United States Patent Application Publication US 2026/0103690 A1 - sequence listing, part 93

SEQ ID NO: 460856 - protein, 398 aa, unidentified
MTESSDYESVQVFIGVDVGKDTHHAVAINRSGKRLFDKALPNDENKLRSLISDLKQHGQILLVVDQPATIGALPVAVARSEGVLVEYLPGLAMRRIADLHAGEAKTDARDAAIIAEAARTLPHALRTLKLADEQIAELSMLCGFDDDLAAQTTQASNRIRGLLTQIHPALERVLGPRLDHPAVLDLLQRYPSPEKLASLGEKKLAAQLCKLAPRLGKRLAADIAQALAEQTVVVPGTNAAAVVLPRLALQLITLRKQRDEVALEVEQRVLAHPLYPVLTSMPGVGVRTAARLLTEVACRAFASAAHLAAYAGLAPVTRRSGSSIRGEHPSRRGNKALKRALFLSAFAALRDPLSRAYYTRKMSQGKRHNQALIALARRRCDVLFAMMRDGTFYTPQAS

SEQ ID NO: 460857 - protein, 360 aa, unidentified
MDKYIGFDIDSKKTIACVVQKGKKEMYSTIGADVKSMRKYLQQQKADGSRAHLTFEISGQAGYIHDSLIDCVDTITVSNPSKMTWIYRTAKKNDRIDSRKQAVLLSIGEIPAVHMPSVEVRQWRNTILHRRNLVNKVTAVKNKIRAVLKSQGFTRAMHRGSLWNRSNRGWLKTLCEAKVSSTGLWCMNLYNSLEQLELLDGQVKRVTMYLDSYLSRQAGGGLLMSIPGVGPRTAEVVLAYTDDVRRFGNSKEYCSYFGLTPRLDESGTRRRLGHISKLGPSVVRWVLCESSWKVVRKSKGLRAFYEQVMSNGQAGRKKIAIVAVCRKLLSIMRAMMLTGEMFNEELVRRECGNERLRKVS

SEQ ID NO: 460858 - protein, 449 aa, unidentified
MIRLWRANTSESKETFNMRKQNHSNKKLEAVTFKTLVVGVDIAKHTQWARFVDCRGIEHNKAIKFENNKNGFNSILARISQICNEEDFNNVIIGMEPTGHYWKAFANFLMKQAGITVVLVNPYHTKKAKELDDNSQTKSDKKDALTIARLVKDGRYFETYLPHNIYAELRGLTATRISINKRKTAVENTITAVMDEYFPEFTTVFKHPFKGKASMHILKICALPRFIIELGTEGVLVEIKKAVKKTVGRKKAQQLVDAAIDSIGVDYGEYAAKFRLQQMMEELELIQKQLDELETEMKNSLEKTGISEYLLSIKGIGVVSLAMLLGETGDPLRFEDARQMSKLAGYNLVEDSSGKNKSGTCISKRGRKNLRCVLYQMALTMVANNEEMKRLYHYLKTREKNPLKKVQALVVISKKILTLVFTLSKKRVYYNPSNVFGTVRESQLKQQAA

SEQ ID NO: 460859 - protein, 356 aa, unidentified
MNKRSKLNFSGQPIYVGLDVHKKSWSVSIFTQHGEYQTFSQVPEAETLSQYLRHHFAGAQYRSVYEAGYCGFWIHDQLKDQGIDNIVVNPADIPTQDKERRRKRDRVDCRKLARGLRGDEIQGIYTPARWKLEDRSLIRTRLSMGRKQARCKNQIKSMLLFYGVAIPERREMGHWSRRFIQWIEGIRMERASGDMALQIHVEELCHMRQIIAKLNRAILALARTEQYRSWVSLLKTIPGISTLTAMILLTELYEITRFPSVDELCSYVGLIPDTRSTGEKEHVGGVTQRHHSQLRWLLIEASWMAVRKDPVMMEAFQEYCKRMRKTKAIIKIARKLLNRIRYVLKNQAEYVTGVIE

SEQ ID NO: 460860 - protein, 371 aa, unidentified
MSTITIGVDLAKSVFSVCEVNSTGHVLGRRDFGRDAFALWLTQVPVGTVVAMEACSGAHHWARRCLEHGLQPRLMAPPFVTPFRKSRMAKNDRNDAEAIATAARQGNMRFVPVKDVDQQARLSWHRVREGYRAESLAIGNRLRGLLAKFGIAVAKSDLALRRTLTELDQHTALPDEFKELIRSLAAHWAQVRTAIDACDARIDVHAREDERCVRLRAIIGIGPITADAMVAALGAAKDFRNGRQLAAWLGLVPTQHSSGGHTRLGTISCRGDAYLRTLLIQGARSSLQRAKAVSLEKSTPEQIWIRQLACRMCFGKVLVAIANKHARQLWAMLAHDDAYDADAWLRHPTGWPRAMVQRLAGKHAITVTVMA

SEQ ID NO: 460861 - protein, 386 aa, unidentified
MIYVGIDISKYKHDCFICNDTGEVIVDHLSFDNSKKGFQQFLDLLKPYDNSNVHIGLESTGHYGLNLKLFLEKNNYSFMEFNPLLVKEFYKSLSLRKTKTDKVDATVIAQKLMSVPYKPNSNLFYHKYSIKSLSRLRENLVRQRSKYKVQLTNILDMIFPEFKPFFGNSFGVTSLYILEKYKTPEKIANMRDFNSLSKVSHGKFTYAKFVKLKDLAKNTIGESNDIFELELSSILNLYKNIDVQIIELDKQISTIIKDLNPPTLSIPGIGVVTCASIISEFGDISKFSNPSKMLSFAGLEPGIIESGTMSSKGKMVKRGSGYLRYSLMNVALTVIRFNHTFYDYYYKKISEGKCHRVALSHVCKKLIRVIYILETKHIQFDPSLLK

SEQ ID NO: 460862 - protein, 340 aa, unidentified
MDTIGLDLHKRESQLCVLTEAGEIVERRIVTSRERFTAVLGSQAPARLLVEASTESEWVARHLESLGHQVIVADPNFAPMYATRRRGVKTDRRDARTLAEACRLGAYRPVHRASAPQRHVRAQLAVRDALIRTRTRYVSVVKALVRRDGLRLPPGNPVHTDAKLAALPLPVPLARELAPLRALFEPLNNEITAADERLAAVAAADPVVERLRTAPGIGPVTAVAFVATLDNVTRFASAHHVAAYLGLTPREYSSGEQQHRGRISKTGNARMRYLLVEAAWRVLRTADPAAAALRVWADGIAQRRGRSVAAVALARRLAGILYAMWRDGKDYCAPPSAAGA

SEQ ID NO: 460863 - protein, 345 aa, unidentified
MNKTKVQQWQTKGKGLSLNEFDHYLALDWSIRVMALGHMRRRSPAPEKFERPAYLKELKQYLATLKGLKVLAIEETTTSQWLYVELIDHVDRIILCDPFHNHLLSQGPKTDKIDAGKLCHLLRAGLLKEVFHSLSGIYELRRLVSAYEDLVKAGVCVLNQKACLAQGHFDSGPHAPFILEHIDKSIELYRNNKKDYERKFEQIAKRNKLVRNLLDVSGIGVIGAVKIVAYVVDAHRFPRASHYLSYCGLIKHEKLSGGRSYGRRKPRFNHTLKAVYKLAAMSIISGNDNPLHQYYDWLLAHGVAEHNARQALARYLARLTYGMLKTGTRYQPYRWRHEADSQQAA

SEQ ID NO: 460864 - protein, 378 aa, unidentified
MDVIYPRCAGLDVHAETIVACALWEEDGHIQKDIQTFSTFSKGLGDLLEWLEEHGVTHVAMESTGVYWKPVFAFLEGYVDLTLANPQRIKNVPGRKTDVSDAEWIAKLLRHGLVEKSFVPPADIRELRDFTRLRKKWVGQLTSEKNRIQKVLESSNVKLGSVLSDLFGVSGKDILARLLEKGYVDKDELDECLRGRLKTKKQAVYDSLLGTLTEHELRLLRLLWKHVEELERLIEEVDQHIDRLLEPYREEVNLLMTMPGVKKQTAAVIIAEMGTDMSVFETPERAASWTGLSPGNHESAGKRKSTRTTKGNPHLRSALCEAAWSAARSKTHPLSRKFWSLAARCGKKKALIAIARRMLVIIFCMISRKEPFRQPQLI

SEQ ID NO: 460865 - protein, 343 aa, unidentified
MKLHVLGIDLGKTVFHLVGLDSTGRVVIRKKCSRTQLLAFTANLQVQLIGMESCSGSHFLGRALRQQGHEVRLMPAQYVKPYVQTNKSDFLDAEAIAEAVQRPRMRFVPIKTEEQLDLQALHRVRERWVMRRTAVVNQIRSLLLERGLTLPKGRGYVDRQLPRILEDGELRLSGCFRVLLAQLKIELEQLTARIEEMDRVIQQTAKENEACQRLTEIPGVGPVTATALIAAVGNGSTFQKGRNLAAWMGIVPGEYSTDGKQKLLGISKRGNKYLRTLFVQGARSVLQQRHKQAPGLSSWLAQLLARAHQNVVIVALANKLVRMAWAVLCKNQRYRAPVLAVTT

SEQ ID NO: 460866 - protein, 372 aa, unidentified
MIAAFKPTERMEVKKKMAVYVGIDVHKKYCQAALMNDHGHLLQELRFDNTSQGASSLVDLAKSVDSHVKAVVEPSANFWIRVYDKLEEEDVEVKLSNPLRTKAIAEARIKTDKIDAKTLAYLLRGDLVAESYVPSRKNRERRALIRHRASLMQMRVEVKNRIHALLDKHELSHEYTDLFGKQGLEWLRSLQLATPDHEILQSSLQVVETLNEQIRSMDIQIAKDATTEDKAKLLMTMPGVDYYAAMVLLSEIGDVKRFSSDEKLVSWVGLAPQVHQSGDSHWTGHISRKGSKRARWILGQCAQSARQHDPRMREFYERIERKHGSSKAIVAVARKMLAIMYVMLIRNEPYRGENRELTKQKHKRLDTLANTT

SEQ ID NO: 460867 - protein, 362 aa, unidentified
MKNLKYSVGIDISMKDFACCLSVINDQQDVKVKASHKFTNNKAGFQSFLDWIKNHCKEPLPVFFVMEATGVYHEQLAWFLHGKDRNVSILLPNKAKKYLQADGNRSKNDKIDARGLAKIGAEKKLELWTPPSKELYTLRDYTRQHQSLNEMRTATANQLHSIEHSQFQNKDIIKQLKSTLKLIEKHLGEMEGIITKVIKSDPVLNQHHKNICEIKGFGTLSFAVVAAETNGFILFDNAASLVKYAGYDVIENESGKHTGKTKISKKGNSRIRRILHMPAFCAVRDDQPQFQKLFERAYDRTRIKMKGYVAVQKKLLVMMYYLWKKNEKYDPKFDHTKKIIAPATPGATLDEHLKDALIEQQN

SEQ ID NO: 460868 - protein, 345 aa, unidentified
MRHYAGLDVSVKETAICIVDEIGAVCREVKVRSHPEDLARVLKDPAWRLERVGLEAGPLSQWLFSGLAAASLPVICIETRHTKAFLKAQPNKSDRIDARGIAQMMRVNLFRPVHVKTLTNQKRRALLTARNLLQEKAIAIENDIRGLLRNFGLKVGMVGVVKFAVRIRELTEDMPDLAEIIEPLLDARDKLRQNFAALHRKLLAIVRDDEVCRRLMTTPGVGPVVALAYTATIDIPARFRNSKAVGAILGLTPVLNESGESRRVGRISACGDGMMRTLLYEAAQVLLTRVAKWSWLKAWAVKVARRRGRQKAVVALARRLAVIMHRMWTDGTPFRWTKESTLVAV

SEQ ID NO: 460869 - protein, 346 aa, unidentified
MLIIGCDFHPSFQLVSIFDNQSGEMKHMRLGHRAEAEAFYRSLPSPARVGVEACGHYPWFERLLAECGHELWLGDASRIRAAEVRKQKTDRRDADHMLTLLLENRFPRIWVPTLEQRDLRQLLVHRHKQVQARTRVKNQLQAIALSHGMQRKGKLWSGAGRTLLEQLPLDRYGAQRRRQLLATLDRFNQEIAELDGQVEEEARRDARAQLLRTHPGVGPVTALAMVLTLGPVERFPGARKLASYLGLIPSEHSTGGRQRLGRISKQGNAFLRFLLVEAAQSAVRGDEELRRYYRRLSMRKHRALAKVAVARKLAIRLYWMLRAKQTYAQLSKARYAGEPESFCGRN

SEQ ID NO: 460870 - protein, 350 aa, unidentified
MDKELYIGVDVSKQTLDLAYYDGESIDWKKAHIKVSNNNAGFKKIGSWVAKVSKGFDIVLFCMEYTGLYTQDFRLWLEEKHYIYRMVEPRKMHRFEPDLDDGLRSLDRIKTDELDSFRIAIYCEQNHRKILRNPSKLPPPVYSKLKRLLAERKQTVKQSVLYKQQLHDICAYDTDLSVERKNGQLKTLNDALKGIDNEIDMYIKEDADISKNFSLLTSIPGIGRVVALETIVLTENFMAIDNPRKYACYIGVAPFKKESGTSVRKGSSVSKKGFKQAKADLSIACLVCMQHIPNIRDYWERKRKEKCSGIVFNAIKFKMILRMFAVIKRGTPYVETDNYRNGKNKQPGVN

SEQ ID NO: 460871 - protein, 389 aa, unidentified
MSQPFDASKSLATLEQDNTVIAVIEMSQSKWLVAAVVPGVKRQPLKKLQADEEALLKLLYRWRTEAGQTGREIKRVVVAYEAGRDGFWLARWLRTRGVEAYVIHPASIAVSREHRRAKTDRLDTELLMRAFLGWLRGEKRHCSMAAVPAAEEEDARRPNRERENLVTERTRIANQMKAILARFGIRNFKPTLRKAAEKLDGLRTAEGTPLLENTRAELSRHLARLRVVREQIRAIEQERLHKLAAAPAEENGPHAMVRLIARVFGVGVETADMLVNEVFARHLRDRKAVARYAGLTGSPDESGKRRRERGLARAGNARVRRGMIQLAWCFIRFQKDSALAKWFDLRTADGRGSTRKTMIVALARKLLIALWRLVTTGEVPEGVILRPAA

SEQ ID NO: 460872 - protein, 318 aa, unidentified
MINELFVGIDVAKAWLDVAWLPGETSQRITYDEAGISGLVERLIPEKPTLVVLEATGGLETLVASRLAAVGLAVAVVNPRQVRDYAKACGRLAKTDRIDALVLAAFARAIRPQARPLKDEETMELGDLLARRRQLIDMRVQEKLRLERASAVQRASLKEHIAWLDERIRDLDTGLTHRLRTSSVWREKDELLAAIPGIGPVTRVTLMALLPELGKLERREIAALAGLAPFNRDSGQHQGERVIWGGRAQVRQALYMAAVSAMRSNPVIKDFYLRLRANGKPAKVALTACMRKLLTICNAMLKHNTPWNPRLLDMKHSC

SEQ ID NO: 460873 - protein, 380 aa, unidentified
MQAPDNCTPIADHNGTIFVAIELSQRNWLVVMRSPERDRISHHKLDGGDFDGLLKLIETARARTARALGSEPAVVSCYEAGYDGFWLHRRLAAAGISNFVFDPASIAVEQRGRRAKTDRIDGEVMLRTLLAHCRGEPRVVRIVRVPSPEQEDARRASRERQRLIQEQTGHINRIKALLRLLGLAAGNPRRRDWPKWLADQRDWKGEPVPPQLMAELKREHARLRLVGEQLEALASAPAAAPAQMVERKELLQRLKALGPVFAATLTDEMFYKNFRNRREVAAYCGLAPTPWRSGRMEREQGISKAGNPRARHKAIELAWLWLRHQPDSALSKWFRQSTNNASGRTRRGAIVALARKLIVALWRYLTTGLVPEGALIKTKV

SEQ ID NO: 460874 - protein, 416 aa, unidentified
MNAAGIDVSSRKSTVAVLRPFGEVVQLPFDVAHNTEGLTSLAEQLKSLDGETRVVMEHTGRYYEPVAKALHEAGLYVSAVNPLLIKEYGANSLRRVKTDKADAVKIARYALDNWTDLRDYTPMDTIRYDLKTLNRQFQLASKQRTACSNNLIALLEQSFPGIRKCFDSPVRSDGTQKWVDFAHTFWHVDCVRKQSFNAFSERYRKWCKRHGYFFKQSNAEEVYALAKNAVVLVPKSEVTKVLVQEAANQLTSISRSMETYRTEMERLASMLPEYPVVMEMYGVGKSFGPQLMAEIGDVRRFERKQALVAFAGIDPMPNQSGDKNVRSNKASKRGSPYLRKTLFNVMGIYLKCAPLDEPVFQFLDRKRSEGKPYYVYMTAASNKFLRRYFAKVRDYLATLENLPPVDMDSTGLQKHN

SEQ ID NO: 460875 - protein, 385 aa, unidentified
MCQFSGSSQAAVDYNSTIIGAVELSEKKWVLAVQLPGVGRHSRHALDACGDGLVSFVERLKAKCAAAGRKIARAILTHEAGRDGFWLARFLARRGIEVRVMQPSSLPVDRRARRAKTDMIDVEMLLRTLMAWLRGEPRVCSMVPIPSEADEEARRAHREREDLTRERRSIVNKIDGILATLGVKGYKALRRDRREQLNCARQPGGEPIPQKARARIERLLDRLDLVLKLIDQVESARDAILRKDAPADEAERMIRSLTTLRSISPDIATLLVREAFVRQFRNRRALAGYVGLGGTPFSSGGSEREQGIGKDGNRRVRAAMVELAWMWLRWQPDSALSVWFRTRVGAMGGRIRKIMIVALARKLLVALWRYVNDGVVPSGAKLKAA

SEQ ID NO: 460876 - protein, 357 aa, unidentified
MRRVIGIDVHRTFGEVVFWENGRLRHAGRIDMTRTALEGFGKTLLASDEVVLEATGNSMAVSRVLAPFVARVIIANPLQVKAIAQAHVKTDKIDAGTLASLQAAGYLPQIWTPDAETERKRRLVARRYQVVRHRTRLKNEVHSILHAHLIPKCPHADLFNARGRAWLAAQRLPDDERAAIDRHVRELDRLAEDLALLDREIARDAIEDSAVNRLMTITGVNLAVAAGIVAAIGDISRFNSPQKLVSYFGLNPRVRQSGLGAAHHGRISKIGRSHARAMLVEAAWAAAKAPGPLHAFFVRIRARRGHQIAAVAVARKLTVLCWHLLTKGEDYLWARPALAGVDQPMPTTSRRCATARC

SEQ ID NO: 460877 - protein, 351 aa, unidentified
MKTQQTAHPKLFIGIDIHKRSWKVHCSTELFCGKSFSMSSDPGQLLNYVTKHFPGHEVSVAYEAGCCGYHAHRCFEGYGWRSLVVNPADIHRKGKEKHTKTDKIDAQLISRELKDGRLESIVVPDIEREELRSLFRRRNDLVKDFRRIKSYIKMQLLYFGIKEAEEFDNDHWSHRYRNWLDDMVFKHPTAKATLESRMRSFRFVDQELRDVSTQLRRYCKVHYKKDYMLLRSIPGIGGIVACGILCELGDLRRFNSVKHLAGYVGLAPGVHQSGNNYKVMGITPRAHRLVRSYFVEASWQAIRADPVMQAYYRKHTGKNVKSIIIKVARKLLSRTLAVIKTEIPYMIGVVE

SEQ ID NO: 460878 - protein, 394 aa, unidentified
MKLIGIDIGKNKHFFCVMDQQTGEIISQPVSFSNDKEGFDFLIQKINSYPKDSVLIGMEDTGHYHFALLKYLLDLQYTVALINPKTTDFNRKMQGGITKNDKLDTINICDVLDTPERKKQYRITKVNSFDLYEQKQLTRHHHNLKEEENVYKNRLQKCIDIVFPEFNKLFNSKYGIVYMNILKMFGSAENIANTDIRTIRKCFEIEGRGNRISLTPERLKECARSSIGISSSAEVIQIKHLTAQIELIEEQLTEIDKKIEEFSIQNNSPILSIPGISHFSGTSILAELGDISNYSKPSQIIKFAGVAPLHYESSQFNAQHTAITKKGSKYLRKTLYQIILPVIRHNPVFNKYYQLKISQGKGHRCAQGHCVRKLLRIIYHLLKTNQQFDPQLLR

SEQ ID NO: 460879 - protein, 338 aa, unidentified
MKTYAGIDLHSSNSFIGVINQNDEKLHSRRHYNNLKEILKVLRKYKKSLQGVVVESTYNWYWLVDGLMEQEYKVHLANPTAIQQYKGLKNRDDKYDAFWLAHLLRLGILPQGYIYPKSLRPVRDLFRRRTLFVKQRTAQTLSLQSMIARNRGIEHSASVIVHLDDESYEEMFDCPNLVSTALHQIGTIRFLEKQIKEIEAEVETVVELDNAYRGLLTIPGIGKILAMTIMLEVGDIRRFEKVGNYSSYCRCVKAQSTSNGKKKSNNNRKNGNRYLSWAYVEAANHNKRSCPLARKFIERKTAEKNYTVAIKALANKLSKASYFIMRDQTIYDPSLLFG

SEQ ID NO: 460880 - protein, 401 aa, unidentified
MQQRLWAGIDAGKTAHHCMVVDADGQRVLSRRIDNDESALLELIRAVTSLAEGGQLTWAIDLNAGGAALLITLLLAHDQELLYIPGRTVHHAAGSYRGDGKTDAKDATIIADQARMRRDLRPLRRGDELAAELRILTSRRSDLSADRTRTINRLRERLGEYFPALERAFDYSNNQAALILLTGYQTPAALRRIGTARLETWLQNRHARKVSSVAASAVAAAHTQYTVVPGEQLAADLVARLTQEVIDLDAALKEIDVMIEDRFRRHRYAEIIVSLPGFGPRLGAEFLAALGGDIALYDSADRLAGVAGLAPVPRDSGRVSGNLHRPRRFNRRLLRASYLAAQLSIRHDPASKHYYDRKRAEGKRHTQAVLALARRRNNVLWAMLRDRTHYRQPTADPATAA

SEQ ID NO: 460881 - protein, 524 aa, unidentified
MAKKAKKIKTNKGIKLEVVNSNAAGIDVSSREMQVCVPEDRDGDNNRCFGTFTEDLHLISDWLQTCGITTVAMESTGVYWVQLYMRLEEDGFDVLLVNAKAIKNIGEKKTDEIDAQWIMLLHSYGLLKASFQPDNQARRIRNLSRHKDKMLKSSSREVLHMQKAMELMNIKLVNVISDILGKSGIAIIEAILGGERDAYQLAALADPRCKASPQTIEKSLVAKWDDDLIFLLEQSYRLYQFYQKQMQECDRKIESIGKEYLSQINSTSSTFEYLPSGKKNRHKNAIAFDVEPYACALWGINLMRVPGISEVTTLKLMGELGYNFTDKFETYKQFCRWCNVSPNNKISGGKILSSKIPKRKDPVGIILRTTANNLRASKCPLGFFFRRIQSRSGHMSAVVATANKLARIIYVMVKEKREFEESYMSFNEEDMLKKRLEATQKALINIHKQLKRWYRWSKLYRRIKGRKRHIVTNTLGCLLLVLVHSAAVQDRNGIKQVLPLDIISISVLSFKKSYFSPKKRRWNT

SEQ ID NO: 460882 - protein, 414 aa, unidentified
MKVVYPICCGVDVHKSFLVGTIISTTDGVQPHYQKKRFSTYNSDLRRFADWLHLNNCLDVCMESTGKYWVPVFNILEERSIRVTIANPKWVKAVKGNKDDTKDSKWIGDLFRLGLVPGSFIPSKKIRILREFTRYRYKLVSMKSSEKNRFQNAFTVCNVALDSVVSDMFGKSATAITDHLISDAPFDPEYCVSLLQRSLKKKADSVLESIEGYLITDEQKLRMRIVRSHIDYITDAIAQVDSAIDTMVEEFENTISLLRTIPGVDRNSAITIISEIGNDMSEFGSSKRLCCWAGLTPGNNESAGKKKSVRITRAGVYLKPALVQVAHAAVKATDNSYYRLKYEHISKRRGKKRAIIAIARMILTAIFQMMTTGEVWNPTDLFKVDMPDSLKERQLSKAVKQATKFLEKQGLTVY

SEQ ID NO: 460883 - protein, 416 aa, unidentified
MFKIIRFNCCGLDVHKTWIFACIGITDVNFRTTYFEARFSSFPKDLRRLSSWLQEHDCSEVCMESSGKYWIPVFNALEATCKVTLAHPKYTKPQKGNKTDRKDARWICDLFMCGMIKPSFIPPPDIRHLRDLIRYRTKLTNMLTSEKNRALNCLTVSSLKLDDVFTDVFGKSARSITEYILAHPGEKFNVAPFVDKHCKTPIDQIQDAVDGAICPEQAVKLRECLNHIDELNAHRDRIEQEILTLVEPYSAHLDLIRTVPGMNKDPMTAILILSEIGSDMSVFPTAKNLVSWAGCCPRNDQSAKHVKSTRISQAGSYLKPRLVQVANALLKSKNHPEIIERYRRIKSHRGHKKAIIAVCKMLLTAIWNILSTGEAYNASGYLIQTPRPTDETKVLTHKQALELLRLRGYVIKEESA

SEQ ID NO: 460884 - protein, 464 aa, unidentified
MTDQKPWRSRKERKEWARRLQSEDPGLEVVHPHAAGIDVGNGAHYVAVRPDRDPEPVRRFECFTADLHRLADWLQQCGVKTVAMQSTGVYWIPLYEILEERGFHVYLVNARHTKNLPGRKSDVQESQWLLKLHTYGLLNNSFQPPSEIRVLRTYWRQRGEHVQGAARCIQRMQKALTQMNVQLANVISDVSGLTGQAIIRAMVAGERDPQKLAELSDPRIHASREEVAKSLEGNWRPELLFVLQQEVAMYDTYQQRIAECDQQLQKHLASFVGTVPPQPTEAEPKRKKSKPAKNAPRFELHSELQRITGVDLTRIDGIDVMVAQTLISEVGLDMNRWKTEAHFSSWLGLCPNNSTSGDKVLGRGTRHVVNRAATALRMAAVTLMRSRTYLGAQYRRLRTKLGAPKAITAMAHRLARLVYRMLKYGQQYVDKGAEYYEHRYRRQQIEFLRKKASKLGFRITLAQA

SEQ ID NO: 460885 - protein, 412 aa, unidentified
MDVIVERCAGLDVHRDSVVATVRVPGKGKSRRRRAQQTRTFGTTIAQLERLGNWLEGFAVTLVGMEATGVYRKPVFFVLERRFECWLLNAQHLHNVPGRKSDVIDSRWLCELLEFGLVRPSFVPPPEIRRLRDLTRLRSTQAEERTRAIQRLEKVLQDAGIKLTSVASGTYSVSARAMLEALLGGVSDPACLAELAKGRLRAKIPQLQEALANRFDIAHHGVLVAGLLAHIDALDQAVAALDARIAAATDAELIERLSTIPGVKRHIAEVLIAECGVDMSVFGSAQRLVSWAAICPGTNQSGHRRRSGKTRRGNPWPRTALTQAARAAARSKNTYLASHYWQIRDRRGEAKAIGATRHDILIAYYHIVHERVPFRELGPDWLARRHSPEHRTRRLVKQLEALGHNVTLEAAA

SEQ ID NO: 460886 - protein, 388 aa, unidentified
MCTDPGPGVREAPDGEFSTTTSGLLALADWLEEHQCQHVAMEATGVYWKPVWHVLEGRFELLLVNPAHARNVPGRKSDVNDAHWLADLLAHGLIRASFVPPQPIQELRDLTRTRKQLVRQIARHTLRIQKTLEDANIKLTGVISTLLGTSGRAILKALIAGETDPERLLEHTTGRLRAPRERLLEGLRGAVTDHHRFMLKLHLRQIDSLDSSIRLLERQMGKLLRPFRQRVEQLATIPGVSDTVAQVLIAEIGLDMTRFPTSGHLVSWAGLCPRMDESAGKRRSNRVRQGAPWLKTTLVMAAWAGVGARGTYVRAQFQRLKTRRGPKKAVVAVAASILTAAYYILRDHVPYKELGADYFDRRDRSSVVRRLSRRIEALGYRVEVHQTA

SEQ ID NO: 460887 - protein, 391 aa, unidentified
MPDVRSSVSAKTTRTWVALDVHKDSLAAGILSAEGGPPEVVQFENSERAVRRFLRRLGDPEALAVCYEAGPCGYDLYRLLTSVGVACDIIAPSLTPVRPGDRVKTDRRDAMKLVRLYRAGELSFVCPPTPVQEGLRDLVRCRDDLRCARTAARQRIGKQLLRYGRIYREGRKTWTKQYGAWLRRQRLDDALAQAALEQMRCHLGALDAQLDAIDAQLDEVAQAEPWRAAVCALTCFRGISTLTALGLLAEVGDFHRFASARELMSFLGLTVSEYSSGQRRTRWSITKTGNRHARRLLVEAAWHYQHPPRLSVRIRAHEGVVAPEMLARAWQAQIRLHHRHRHLTGRGKPATVATIAVARELCGFLWATMTDQPLREDPPEQRRTSKEALVA

SEQ ID NO: 460888 - protein, 351 aa, unidentified
MVIIGVDYHPSDQYIAFVDTETGEGDERRLNHSDGEAEKFYRELAARGASVRVGMETTGYSRWFERLLAELGIELWIGDAAKIKTKRVRKQKTDRNDAQLLLKLLLDNNFPRIWVPSPENRDLRQLLWHRHRLVQMRTRIMNQLQALAMNEGQRRKKKLWSEAGRAQLEKLALAPWASRRRQDLLELRDRMNPRIQELSGAAEQEAKKRPEVLRLMTHPGVGPLTALAFVLIIGTVERFPCGKQIGSYVGRIPCEDSRAGHQRLGHITKQGSSLLRFLLGEAAQAAARCAADWRRRYMHLAMRRQRNIAKVAMARRRGVRLYWMWRKGWEYSDWIKFGSHAGQLGTGHGVQ

SEQ ID NO: 460889 - protein, 342 aa, unidentified
MYYIGLDVHKKTISYCIKDVGGQVQWEGTIPATRTELDSWMKTLPKPWTVAMEASIFTGWVYDHLLPHAAQVKVAHPVMLRAIAAAKKKNDRIDAGKIADCLRCDFLPECHMVSTEIRDRRRTLRYRHLLVRQMVQMKNRVSGLLLETGVSHNKQRLHKVKYFRELLATNKEVDDSIRPLLKLSRESIERLQKTDYALVSSLERDPLLAQRLKNLRTVPGVGPITALTWAVEIGDVSRFQSVKQAISYCGLCGDEKSSADKVLRTPLSKQRNKHIQRVLVEAAKLAPKQSHELALVYEKAKQKGNTNRATIAVARKMVTYLLAVDRGQRSFVPVEDFSTAVA

SEQ ID NO: 460890 - protein, 315 aa, unidentified
MTKPESIKVSVGIDVSKSMLDIAIHETGESWSCSNDASGCAALGPKLRQLKATRIVLEATGGFETLIAASLSVADLPVIVVNPRQVRDFAKATGQLAKTDRIDARVLAHFAAAIEPPLRPGKSDDAQHLEALLARRRQIVEMLVAEKNRLANNRDHAVVKDLKHHIAWLERRLKSSDDELQRVLKTSPAWRERDDLLRSTPGVGPVLSLTLLAQLPELGQLNRREIAKLVGVAPFNWDSGKWRGSRHIWGGRAAVRSPLFMATLCAIRINPTIKCFYQRLIKAGKAPKVAITACMRKLLTILNIMIKTQTSWRTA

SEQ ID NO: 460891 - protein, 414 aa, unidentified
MEDILECCCGLDVHKESIVACVLKGPIEEGTKPKSEIKEFGTQLKDLMALRKWLEEHTCRYVAMESSGIYWQPVYAILETSLSDEMHLLVVNARHMKNVPGKKTDMRDAEWIAILLRAGLLKGSFVPEHDIRDLRQYTRYRKALIRDITSQKNRIEKLLQSSGFRLSSFLSDIFGSSGLAVMQQLVQVGCVSEQSLKICLKGRARLKTAEILSSLNGTLSLPQRQLLKMQLAHLKDLQENLEEVEKEIRTDFSQFEGPIDLLDSIPGIDLTAAYAILAEIGSNMSAFPTAQHICSWAGLAPGNNESAGKKKKQRVTPGNNYLKTILCEVAWVIAAHKNQYLSGWYWRLKQRTDSKRAVVALARKLLVIIYTMLKTNQPFDERKFLERKETTNRKRIGRMVSELARLGYAISAPA

SEQ ID NO: 460892 - protein, 413 aa, unidentified
MLKIIYPICCGIDVHKKFIAACIASTDDKGITTYKLSRFSTFTNGLRKLADWLRSNSCTEVCMESTGKYWIPVFNVLEATCKITLAHPKYVKAIRGKKTDKKDAKWIADLFKHDLVAGSFMPPLLIRQLRDLMRYRLKLTNFKSSEKNRIQNCLTVSNIQLSNVVSDTFGKSSMAIIEHLLENPNDKDFDFLPLLHSSMLDKVDDIRLAIDGIITSDQLQKMNIILQHYDELTKCKLNLESLILSLAGPIAKELKLVSTVPGIKNPFSAIAIISEIGADMSVFPTAKHLCPWAGLTPQNNESAGKKKSVRISRAGVYIKPLLVQCANAIVKSDKHPEIRGRYLSIKKRRGHKRAIIAIARLMLTAIYHILKKNEPYNAELYKKAELIPFTREITIEQAVFIAQRQGYSVIKAG

SEQ ID NO: 460893 - protein, 453 aa, unidentified
MARKRKQGGKASSAIMPVMRPDAAGIDIGATEIFVAVPADRAAENVRSFPTFTQDLYSLADWLHACGIKTVAMESTGVYWIPLFQILEERGFEVCLVNARHVKNVPGRRTDVCDCQWLQFLHSVGLLKASYRPAQEVCAIRSLLRHRESLVQMAATHVNHMQKALDQMNVQLHHVISDIVGQTGLAIVDAILAGQRDPLELAKLRGERIKASEAVIAKSLVGDYRHEHLFTLKQSLAAYRSYQKMIEDCDREIRLQLEDLQPPTTPDAPATRVDNSSKKKQSAEGILRAELQRVWSVDLTKIPGIRTGIAQTLLGEIGPDFTKFQSASAFASWMGLCPDNDISGGKVLFVATRKVKCRAALALRMAAQSLHHSKSALGDFYRRMRAKLGAPKAITAAAHKLARIIFHLISTRQEFDDSKFAADQLRYQKRQEAKLHAKAKSMGYALIPLEVAG

SEQ ID NO: 460894 - protein, 459 aa, unidentified
MGKSSHIQGTKGTKFSQQLRGVNLEQVLIVAIDAAKLHQKALICNYFGDVIERPFFFSVSESGMQQLYQKINLAAKVVQAQRIFLGVEATGHYYEDIVREMAKQGYLVQIFNPYSTFEERSSALNWCKTDDLDLVAIAHAIKSNKATEARLLEGIHRHLLVLTRARRSEIRKRSVLRMEIRTLMDVIWREFQGYADHSQGKARKIKVFSDFWGKASLFFMEHYPHPSMILKLGESGLRELSIRHNLKLRQTAIHKLLYIAEQSLSRNTEELRPELMLLKMKLHDLDAFDAKIDRLDREIEGSLLQTEGRLLLTIAGLGVSTSAELFAEMGDLSHFTHAGQLIKKAGTNPIVKQTGGGKGSYRNISKQGNNHLRYVVFLAGRSLCLHNHDLKPFYERLKSRGKHERAIFIAMGNKLLKIAFAMLRDQVPFTSRNAKYQIATEINKKLKYNCFVPASNQAA

SEQ ID NO: 460895 - protein, 305 aa, unidentified
MKSYLGIDVSKLHLDLSHPAPAKRLANTEKAILPWLKSLPPETILVCEASGGYEALLLSLAHALHRAVIQLNARQVRDFARAKNRLAKTDRIDAGLIADFAQTFQPKALPLPDPLQEQLLALIKHRSHLLTQITQNNNLAQTLSDKHLLRLIAKTVAFLQKQIAQLEALIQTKVAASPGLLAKVNRLQEVQGIGVLTATSLIALMPELGSLSDTQAAALAGVAPFNHDSGQFRGQRHIFGGRSQVRSVLYMAALVASRHNPILRPLYLRFVTRGKPKKLALTALMRKLIVLANHLLKYPQFTLAT

SEQ ID NO: 460896 - protein, 487 aa, unidentified
MHLSSPVRLLGIDLGITSDHTAVVVDDAGSICARRRARPTVASLTALEKAALAAADPATHLVVVVEPTGPAWLPVAVFFGRRGHTVLRVSSAKAADLRRFLARHAKSNGIDAETLARLPLVAPSGLVPVELGSPARASLDRRVRAVARLTADIGRRKTRIRALAQQLIPTIPTALSDDGLNQTDLAVLERYADPRALLAAGPARLTRLIATTSRGQLGQAKTQALRTAAAEAVTLWDGDSAAALDDVAAEIASEVRLVRAAEAERTRHQTARDTAMARIDPAGLAASLPGLGPVGAAQLVATMGRPGRFPHAGAFKAFTGLTPRASETGQTDRKHQPMTKAGPRALRSQLIQSADTARKLDPQLAAVYHAQMTQRGATHRKALCVVAARLAERAWLTLARSEPYVICDLDGRPVTPEQARRLIAEHYTVTAEVRRRRRSTKQAGKAPHMALKAQGKSQHDAGHEATFPTTSLDTPPTLVNTSQATRA

SEQ ID NO: 460897 - protein, 349 aa, unidentified
MKKIIVGIDVSKEKIDASAILVTVNQLGMQKLDYQTFENRPMGFRRMVVWARHLVKGITLDEVMFCCETTGAYDHKLCDYLFARGLDIWRESALQIKKSSGLRKGKDDKTDSLAIAEYAMRHADKAVYYVSQSQDIRELKELLLYRHKLEQEKASTTVRVAGLKATAGKSPSRNFILRDAQKRIKQLEKSIKECEKQILDIYERNEEMKKSYTHITSIKGVSIVNATAMIAYSNNFKNITSSRKLASYYGVAPFREKSGTSVDKKAKVNCYSNSMLRSYLTMAARHTIKANGIYFDYYNRMIAAGKCYGVAINNVKNKLLNLSISLVKNDMDYEACHEYKRLQGKAELA

SEQ ID NO: 460898 - protein, 315 aa, unidentified
MTTETFVGIDVSQDTLDYALRPTGVSGQVSNDEKGIAHLVALLKPLSPTLTVVEASGGLDRPVVAALSAAPIPVAVVNPRRARAFADAIGLLAKTDHVDATGLAELADRLRPEVRPLPDAEAQALAALVTRRQQLVGQHTAEQNRLGTALPAVRESIRQHLAWLEEAIVTLDADIAGRIAGHSQWQETAAIVDSAPGVGSTTASVLVAGLPELGKLDGKQIAALVGVAPVARDSGKKHGLRHIKAGRGHIRAVLYMATLAATRFNPVIKAFYERLLKAGKLKKVALTACMRKLLTILNAMVRHGTMWEAERFTAA

SEQ ID NO: 460899 - protein, 391 aa, unidentified
MSGPQVIDDEEHERVHERVAAIDVAKDSGMVCARLPHPARPGARRSTVWTVKARMGAIRTLGRQLSRDGIEVVTLESTSDYWRIWFFVLEACGLAVQLVNAAQAKSLPGRPKTDRLDAMWLARLTEMGLLRASFVPPKAIRDLRDYTRMRTRLIQERTRCFQRLEKLLESALVKVSSVASKLTTISAQDMVKAMVAGQRDPLVLASLARTSMKAKREELAEALDGMFDDHHGELAGMLLDQIAFLDQRIAALSARAAGLATAMPAAWGVDGDGTTGLEAGAGPDAAALPVVARLTEIPGVSPDLARAIIAEIGLDMSRFPTAAHLVSWAGLCPSARQSGPRTRAGPGRQRRRAHRHLPRRALPPDRPPPRQGQGPGRRRPLHPGHHLAPAV

SEQ ID NO: 460900 - protein, 392 aa, unidentified
MVCVGIDVAKDKHDCFILSLEGEVLADVFTIANNRDGFEMLLRTIRSCTSPTDNIKVGLEATGHYSYNILGFLLENGLHTFLINPLHTNLYRKSLSLRQTKTDRIDARTIASMLMSDVDLKSYTDTAYHNEELKSLTRYRFDKVQERAKLKQSVSRLVSILFPELETLVPSLHLASVYAMLSEFPSAKQIADSHLTHFKAVLSDSSKGHYDREKAIEIREAARRSIGSAMPAKSMELQHTIRLIHELDMEIDEIEIAIMAIIDKMAPPILTIPGMGYRMGAMILAEIGDFSRFDSPDKLLAYAGLSPSTYESGKLKASGTYAHMEKRGSRYLRYALYNATKYVCHWEPTFKAYLAKKRAEGKHYNIAISHAAKKLVRLIFALQTSGKTFRSA

SEQ ID NO: 460901 - protein, 370 aa, unidentified
MLDTTTFVGLDVHARSIKAVSLDVMTGEVRCATFGYDAGAVAEWVRSVDPKARCVYESGVTGFDLQKRLSGLGVDCVVGAVSKMIKPSADRRRKNDRNDAEFLARMLSVGNVVEVWVPDDECEAARDLTRALEDARDDLSRSKQRLSKFLLRHGLVFDERTPTGRRKGNWTRAHWSWIESIRFAEGADNDVLAYYVDAVRRAAEEKARLEGLVEAEARKPRWRKRVDSLRCLKGVDTATAADLVFEAGEFSRFRNARSFAAWVGLTPSEHSSGESDRRGAITKAGNKHLRKALVEAAWHYLTCSGRPKDLARGQAPDRVARRHAAKGVRRLVERREALLARGVHGNKANVATARELACWVWAVGLMAEEA

SEQ ID NO: 460902 - protein, 320 aa, unidentified
MQTRLVINTFIGVDVSKASLVTCVHDSSTHCTLGNERSAIAAWLKSLPAGSAIGVEATSTYHELLADLAHRHGLLVYVLNPKDVRHYAKGVGMRGKTDRVDAALIARYIAHEHAKLHLYRPASPEQRQLQRLLTRRAKLSRARVSVQQSLQGLPGLKVPLRNLLERFDTLIGVIDARIQALVNACPQRQSACQRLRSIKGVGPVVGPALLNTLEHFVFERADSFVAYTGLDPRPDDSGKRTGRRRLSKHGPSELRRLLYNAAMAAVTSSAWKPLYQHYLDKKLSRTEALVIIARKIARTAWSVYTHNTTFDPQRLTSGLT

SEQ ID NO: 460903 - protein, 410 aa, unidentified
MTITGIPLPSIPVAGVDTHTDTHTVAAVAATGQHLATATFPATTSGYAQLALFLHTHGVDTVGVEGTNSYGAGLTRHLVDAGYAVVEVLRPSRAVRRRNGKSDPVDALAAARQVLTGEALSIPKDSTGPVESLRTLYITRKQLVATTVRIMNTIKSLLITAPDDIRARYSSMTNHAMVLALSRCRPQADDHAPAHAVVSSLKILAATYLQVRERCDDLEARISALVSSINPYISNMVGSGPLIAAELIVSIGENPERIPSEAALAQLCGVAPLPASSGRTTRHRLNRGGDRRANSALYRIAVVRMGCDQRTKDYVAKRTAEGLSKKEIIRCLKRAIVREVYRVVCAQSSRPEPRDLRRPDLKQRRQAQHLTQAEVAGRLGCAPARISDIETGKRPLTELAAAYENLLQSA

SEQ ID NO: 460904 - protein, 387 aa, unidentified
METVADRAKPTAIRTDLRAIFVSLELSRSRWLITSLSPGNRDRMSKHSVQAGDIAGMLARFSELRHKTQARTGQSFPIVVIQEAGLDGFWIHRVLRKEEIESHVVDPASIATSRRRRRAKTDRIDGEALIRVLLAFKRGEPRVCMMVRAPTPAEEDRRRLCRERKVLTAERVQHVNRIKGLLFAQGVSEYEPLRRDRRDRLARLVTGDGRLLPNYLKAQIGRELDRLELLLEQIKAVEAERDSLLASTEANKSALPAMLLDLKGIGPEFAAILWSEGLCRHFDNRRQVAAYAGLAPTPWQSGSVDREQGISKAGNPRLRETMIQLAWLWRRHQPRSVLTLWFEERVRHNAGRLKKRTIVALARKLLVALWKYVSAGIVIEGAASKTA

SEQ ID NO: 460905 - protein, 433 aa, unidentified
MLKINYMSTLFIGIDVSSKTNAVYAMDFEENKYISSSFGNNQPGAEELVDMIAECMRKHKNLDTILIVLESTSVYSVHISNFLSTNETLMPYKPYVFCVNPKQTANYRKSYIGMEKTDPTDAYLIADFGRVGRTKKLEPWRGGQFIALKRLTRHRMHLSECISREKTYMVSNLYLKFSELQLLEGDDKPFGNIYGATSSAVLTEFMSPQEIIDTSEEDLLKFLAEKSKNRISDISKTSELLQKAARDSYRLDKCMYEPLNISLASSFNCIHALQKEMKLIEQAIEKCINGMNPNALIILQSIPGIGPVWASGILSEIGDATAFHSSDALAKYAGLYWPKGDSGDFTSEDNKMSKSGNPYLRYYLGEAANSVRKHVPEYAEFYARKYAEVTKHQHKRALALTSRKFVRLVFGLLVKNQLYTGEKLDAEFNNESN

SEQ ID NO: 460906 - protein, 416 aa, unidentified
MPHILFVGIDVSSKNNVVCCLPEGDSAKSLSRFTVSNDEPGVLTLHERIVALMQKHSLTRIRFGLEATGCYSSHLARYLESVLDFAPYEHSVYVFNPSLIKAFKKTHFLDAPKNDRVDAWFIAAKLRSGHLPRAFTWSESLAALQRLTRTRYHVVQTLTRETNFLLTNLFLKFSSYATGSFGKKTSATSLAVMQEFVSVEDIIDMSVDDLLAFVAKCGKNRFDNPQDVAKALQKAARSSYRLPKAMTDAVNLAMASNIRVIRSLQEQAKSLQKAIEEHLTTIPQTLTSVPGIGPIFAAGLISEIGDISRFPNQMALAKYAGLAWTENQSGDFKGVESRLIKSGNRYLKYYFTEAAKSVQVHDTVFAQYYSLKKAEPAKYAEKRALALTARKLVRLVDYLLRTNRLYEPREVTRQEA

SEQ ID NO: 460907 - protein, 462 aa, unidentified
MPAREERETADKSRRQLEGLPVIRASVAGIDLGSEQHWVCAPTRDRSGREVASFGATTAELIRMAEWLQARQVESVAMESTGVYWIAPHEVLEGQGLQVLLVDTRQLAGVPGRDKKSDPTDCEWIQRLHSCGLLRGSFRPEAAICILRTLVRDKANLVAESADWLRRMQKSLDQMNVRLHRAVSDIDGVTGMAILRAIAGGERDARKLAQLRHGRCSKSEQEIADQLSGHWREDHLFSLQQALKMYDAVQERIAAYEQEILRKLGEMEREEQRGQTAPPLNNTNKARAIKNRGQEPRRQALYRMSGVDITQIDALAVETVEVVLSEYGPDLSRFPTEKQFVSHVTLAPHVPKSGGKPVKKKKRNSASTRVAAALRMAALSLRHSQTALGAYYRRIAQRRGGDIAVFASARKLATLIYRLLRWGQPYVDEGEAAYENRYRQHRIGRLAATAKELGYQLTPVPA

SEQ ID NO: 460908 - protein, 355 aa, unidentified
MTALADKVDGVIGVDTHRDTLSAAAVTAVGGLLGQLVVAADAVGYRRLLAFARIHVPGRRCFAIEGAGSYGAGLARMLVDGGEWVVEVDRPTRPARRSGKTDALDAVRAAREVLVQERPAVPRRRGDREALRVLLATRHGALVARTCAINQLKALIVGAPEELRAELRSRSTSGQVAYCAALRDRPARSLEHCMTARALRATAQRTRALATEAAELHDDIGRLVQAVAPWLLELPGLGPISAARVLVSWSHAGRLRSEAAFAALAGVSPIPASSGQVTRHRLNRGGDRRLNRALHTVALVRLRDDPTTRAYAARRRAEGKSPREIRRCVKRAVARHLFKLLCRYDRPEVEIARTC

SEQ ID NO: 460909 - protein, 317 aa, unidentified
MSIAADTGLVVGVDTHLDTHTAALCDARGRALGQLQVPADPGGYAAVLAWARGAAAGSGLRWAVEGTRHYGLGLARYLAGAGEHVEEIDAGKHVGKRRQGKSDAIDAVRAARELLARPHPAKMRADGDREALRLLMCDRDNAVHSCKTARTLLASVIVTAPADLRQRLRHLPRQQRALACAALAVPAGADRQTTVLYQTLARLGQRITALASEAAGLEAQIAAIVEHTTPGLVTAEPGMGALSAAQILLSWSHAGRIRSEAAFAMLSGTAPVPVSSGRTDRHRLNRLGDRQLNRALHVIAVNRMRCHPPTQAYTRRP

SEQ ID NO: 460910 - protein, 339 aa, unidentified
MPLYSGIDLHSNNLMAAIMDEAGKRILKKRLINDPEIILATLAPYRPELVGIVVESTYNWYWLVDALMDHGYQVHLANPSAIQQYSGLKYLDDNHDAFWLADLLRLGTLKEGYIYPKEDRPLRDLLRKRFHLVKLRTSLIISLKNILSRNFGLPMRSSRIKDESIDTFVSGLPAGDHVTLVVRTSKASIDFLTVQIDEVESAVLKQAKNKPFYAKLLDLPGVGKILALTIQLETGPVDRFPKVGNDASYCRKVQSRWFRNEKVKGKGNAKNGNKYLAWTFSEAAAHARCFHPASRTFYNRKLNQGNAAMAHNALAHKLARAAYYIMRDNVAFEEAKMFA

SEQ ID NO: 460911 - protein, 387 aa, unidentified
MIYYIGIDISKYKHDFCIISNTGEVIVENSSFENNKKGFQYFLDQLKSYNKSECQIAFEATGHYSLNLELFLIDQGYSFMKTNPLVIHQFLKARSLRRTKTDKADSLTIANYIMSVPYKPNSNLLYNIYTLKSLCRSREQLIKEKSKFEVLLTNELDKSFPEIKPFFNNIISNTLLYILEKYKNTSHISLMKDYESLRKLSHGKFTYAKFALLKQLAKDSIGHYDDNSDLLISTYVSTINHFNEKIDPIDKQISTIIKELNPKMLSIPGLGEISAATILSEYGDIKNFSSSGKMLAFAGLEPSIIQSGTLENNGKMVKHGSGHLRYSIMNIAMSILRYSPTFYDYYLKKRSEGKCHRVALSHVCKKLIRVIYTLEKNNIDYNPSLLK

SEQ ID NO: 460912 - protein, 466 aa, unidentified
MKLYLGGDVSKGYADWVILSEKKQAILENFQLDDTYAGHCKLYAMLEAYIDKYPGSEIYSAVESTGGYENNWFNTLKSYQKVFNLKVARINPAGVNFNRRAGMKRNVTDAISALSIAEYMINHPENIKYDQDDQWKSLCRHWNFVEMQKNQRVQTINQLETILYSANPTLMRFKKDNFPNWLLELIIRCPTAEKLAKAKPEKLAKIPYLTLGRAKELVAEAKQNIASATDKNAEILVSQISLQIKAFDQNIKSQMRLIEQELTCPEIDILKSFVGINTISAIGLLLEIGVIDRFPTVKGFSCYFGLHPKFKQSGDKVIGIRMSKQGSKNMRKILFNIAKGAITYNPLIKEIYEKKVSHGMSKMAAIGVCMHKILRIVYGMLKNNQAYNPLIDKQNCERSKDKQQEKQQQENANIDKSRRYQEFDVKAPISRKQTKKRKEHDLSQCEITSQSAGSTCSSETKLHKID

SEQ ID NO: 460913 - protein, 364 aa, unidentified
MNDTYYIGLDVHKKSISYCVKTASGEIVQEGRVVARREELRAWAARQARPWRGAMEATLFSAWIYDTLKPYAQQLDMAHPARMKAISAGKKKSDRLDARTIADLLRCNLLPACYVLSPEMRDLRRLLRYRQLVVGESVRMQNKMAGLLMETGTPFVKSKLHGKKYFNQLIQTLEEVPQSVKDLLQMSRGAMEMFESTQKRLVKRLLAEPALAARVERLCTIPGVGPITALTWALEIADPQRFSSIGDAVSYCGLCSAFRSSGEKEQRGPISKQRNAWLQTALIEAAKLAPRWNPQLAAVHQQELTRGHRNRATLEVARKLVAYLMAVDKSGQPFQMRSSPQKLECKSTGKKERKKMPDPALAPA

SEQ ID NO: 460914 - protein, 371 aa, unidentified
MNSMTYVGMDIHQENYTLCCYSFEKDELEYKQTVAPDYKMVLKYLEQVRRRNGEDVEFVCGYEAGCLGYTLYHQLTGHGVKCVILAPTTMGITNNGRIKTDKRDAGNIARCLAFHTYSEVFVPTAEDESVKDFIRMRDDQKKALKVIKQQILAFVLRHGHRFDGGKNYWTGKHLAWLKSLKLGGLLQESLEEYLITYAYLTDKIKRLDDRIEELAAGERYAENVKKLSCLIGVKTHTALATIVEIGDFKRFAEAGKFAAFLGLVPGEDSSGGKHCRGSITKAGNSHVRRLLVESAQSYTKGAVGHKSVDLKRRQSGNAPQIIAYADKANERLRRKFYRMTLKNGTKRNVAATAIARELACFIWGLMTECVA

SEQ ID NO: 460915 - protein, 350 aa, unidentified
MSNHMFAAADVHAATTTFAVLDASGKFVMETVVETKGESLLSVVKSITGAVHLTFEEGTHAAWLYDLLKPHVAELLVCNPRKNRNDSGNKSDRIDARQLARWLRSGDLSSVYHGHDGTKVLKELVRGYENLVSDSVRTKNRLKAVYRSQGESTSGGDVYKLEQREEWLSKIQSSGLRSRAGWLYSQMESLGELRREAEKAVLREAKQHRPCSLLRTVPGIGPIRSATIVAHAATPFRFRTKRQFWSYCGLAVVTRGSSDWVIDGEKLIRKRQPVATRGLNRNYNRRLKDVFKGAVRDAGLFRPHFDSLVASGTRPEMARLTVARKIAATTLAIWKKGEKFIPSKAVIRSE

SEQ ID NO: 460916 - protein, 317 aa, unidentified
MTIQPLIGIDVAKHELVVYRQDLEIQQTLENRPSALKPWLRGLPAQCAIAVEATGTYHVALIELAYQCGHEVFVIDGYQLNHYRQGIGGRAKTDSSDARLLARYLSREREMLRAWAPPPAAYRSLQSLLRRRATLVQARVAIQQSCAELPWLAAHLKRLMAQLTRVDQVIQARLRAIVREAGLRHQVARCQAVEGVGELTATALIMAFLRGDFRHSDAFVAFPGLDVRVRDSGKQRGRRKLTKRGDPEVRRLLHNAAMAASRLPAWKATYQRYRARGLQALQVLVILARKLARIAFSLMKHQTEYTPPSLNRAGGAT

SEQ ID NO: 460917 - protein, 352 aa, unidentified
MMIIGCDFHPRFQQISFLLEETGECGQRRLMHTAEAEQFYRSLHGTRVRIGIEATGSYGWFRRLLDELGHELVVGDATQIRASNPRRQKTDKRDAEHILGLLVADRFPAIWQPPAENEQLRQLLLHRSRLVRLRTRVTNQLDGMAKNEGWVIAGGWSGKRRKAIEALPLPGWYGERRKDLLGLLDRLEERIAPLNKAVGQAAANNAEACLLMTHPGVGPVVSLAYVLTIGNWQRFPRGKQVGSYLGLIPSEDSSSDKRRLGHISKQGNTLLRWLLVEAASTAQRYDPSWHRQYLRLSMNKHHGVAKVAIAHKLAVRLYWMLRSGEDYQHVRERGSHARQSECPVGRSKRPIE

SEQ ID NO: 460918 - protein, 344 aa, unidentified
MTYYAALDVSLRSVAVCIIDDQGNYHFEAKIPSEVESIVECLEAFDGEIELIGFEAGMLTQYLHYGLTGAGYPVMCLEAHHVSDALKAMRNKTDKNDARGIAQLLRTGWYRPVHVKSVGSHQVRAMLSSRRVILKKCLDLENELRGLLRIFGTKLPPHLSHGTFEEVVRERIEADATFKEALLPMLELRGMLYQAYVKLDTQVRRMAREDAVCQRLMTVPGVGPVTALTFKAGVDDPTRFKNSRLVAAHFGLTPKRQQSGETDYDGRISRKGDTDVRCALYIAAHSLITRQKEASSLKAWGVKLMKTKGHRKATVAVARKLAVILHRMWIDGNDFQRHSEKRAA

SEQ ID NO: 460919 - protein, 437 aa, unidentified
MDLSKQQLLAGKYIIGIDPAKDKHQALILNPDGLQLGKSFCFDVSYEGYTNILWKKVTFLFPNCNPENTIFAIETSCNLWTTFAFYLSREGYTVVMVSPLTTHLSRPMAHHDFSRTDPKDALLVASNAQQGNCDLYQEYSTLSNAMHRLGITYDKLRKELAQNRSRLRSAIEQIFPEFLSVLEPDTQTARYLLKRYLFPEDFLSMDIAHEAKAITAISRHQHGMNTLLQLHLAAKHSIGVRKTLEECPAERITVNSWLTLIETLEAQIETIFSAVVSLAQQLPEYDILRSLKGVSHLSSALFLAEVRDIHRFNHYKQIQKNAGFNLRLSQSGRYVGSRHISHLGNKRLQWLLYCMAEETAKWVPEVRIKFLRRQLKFSKYRKNIVASTTPLLKLIMTLVKEQRPYQMRSQTVDQMRALEQQVTQRKEERQKQKKHAA

SEQ ID NO: 460920 - protein, 356 aa, unidentified
MQPQVTKKIDFSGKDLFIGLDVHKKSWSVTIVIDGMEHRTFTQPPDPGVLNNYLQRMFPGGSYHSAYEAGFCGYGIHRKLKSLGINNIVINAADTPTSQKDKLHKRDPTDSRKIARELEKGSLRGINIFDRELEELRSLNRTRFYLMRDLRRSKNRIKSFLMYYGVPIPAEFDNNQWTLKFISWLKQVQMTTAGGQDAFSHLIQSYEHYRQQLLILSRIVRLRISHYDKELFALLKTISGIGPLTSSALITEIGDINRFTHINHLGSYVGLIPRVRESGETTYTGGITFRCNTFLRTLLIESSWQAIRMDPALMQYYHKHVINSKGHKVIIKVARKLLNRIKYVMKNRQPYLTGVA

SEQ ID NO: 460921 - protein, 404 aa, unidentified
MIFVGIDWSERHHDVCVVDPNGVVLAKARVPEGIEGVARLHEMLACHADGPEEAIVGIETDRGLLVHALVAGGYQVFAINPLSVDRYRDRHSTSGAKSDPGDAKVLADLVRTDRRNHRPVAGDSELSASIKLLARTHQSFVWERQRHVNRLRSALREFYPATIEAFGTHLATTDAIAVLSLAPTPELGRRLSRSKIAAALRRGGRQRNVEARAAQIQAALRSEQLRTSPGLERTYGVITSSLVGLIAGLNGQIAGLERDLHGAFERHPDAEIILSQPGLGSTLGARVLGEFGDDRTRYLDARARRNYAGTSPITRASGKARVVLARFARNEWLADACHLWAFAALTKSPGARCYYDSQRARGKTHNQALRAVGNRLVGILHGCLKHGQRYQEDVAWPREDLYAA

SEQ ID NO: 460922 - protein, 488 aa, unidentified
MSDRKTKAPPPRPRPPDDLRRAARRAALDRRPAEDCARIAALPVRHEHAAGIDAGDASPWACVDATPDGSDRVREFPAHTAGLRQLVAWLQFCGVTTAALEATGAYGHVLFLTLLEAGLATIMIPPQFARQIKGRPKTDRRDCQWIQRLHSHGLLPGVSQPDAATQALRGYVRQRANLVRPSGQHIQRMQKALELMNLKLTKVLGDVTGVTGLKVVRAILAGQRDPRQLARLRDRRCGHTAAEMAQALDGRYRPEHLLELRCNLTMWEKYQEVIAVADTAIAAQLRSMRRQAELPPLPPRIRVRGRKAHDPGFDVRTALYYATGVDLTAIEGIDEVHALTLVSELGTDLSKWPTVKQFTSWLGLCPNWKKTGGKVQSSQTRRGKNRAARALRLAAWCLMRSQSYLGAYLRRQRSRLGAPKAITALAHKLARIVYNLLRYGVAYVRQTEAADAEQVRARLEKQLRRRAAELGFTVQPLAAPVPPAVEEQ

SEQ ID NO: 460923 - protein, 338 aa, unidentified
MKTHVGVDLHQRFCYFTAVDASGKLCKQGQVVNEGAALRAWLRQLPCPRQVVVEASGFWPAFARAVAPEQERLVMVHPQRVKAIASAKLKNDRVDSETLAHLSRCDLLPEAWMADEATQQLRLRVRLRITLGRQRARAKNQLQAVLHQEGFKKPVTDVFGKRGRAWLAGLELSASGRLVVDTWLREVDHLDVELAGQTRELERLAKADGRARFLQTVPGIGAYAAMVILAELGDVERFGSKRSLASYAGLTPVVRESAGKRKRGGITHQGSNTLRWMMLQVAQVAARCSPGARSYYAGLRARKPAQVAKIALARKLLTVVWALLHHGECFDEELFARG

SEQ ID NO: 460924 - protein, 375 aa, unidentified
MTKIRFIGLDVHAETIAVAVAEPGGEVRSLGTIPNRIESVRKMIGKLGAVKELRACYEAGPTGYVLYWQLTTLGVECQVVAPTLVPVKAGERVKTDRRDAEKLARCHRAGDLTAVWVPDEAHEALRDLVRAREAGKKDQLRARHRLSKFLLRHGRRQPDGMNAWTKKHLEWIKSHVHFDQPAQEAALQDYFHEVEHAAARIERLEKSLDDAISKAPEQIRGVIEALQALRGVAQLTAATIVSEIGSFSRFEPRKLMGYSGLVASEHSSGAKVKRGSLTKTGNAHLRRVIVEAAWTYQRRPWIGGFLLRRQRDLKLTEEVKEIAWKVQYRLHKRYSKLTASGKNKNQTVAAVGRELLGFIWDIAVRTEYQYQPQAA

SEQ ID NO: 460925 - protein, 330 aa, unidentified
MNYETKFYIGLDVHTKSTQYVVRTWQGDVISEGKCATIYKDVKTSLEPYFHSCIVGMEACTSFYPLREGFMQDNVPVKIANVLRIRQLIVKNDSLDARRLSDMLRLNTFPESFVPSKEIQVLRDLVSVRHSFLEELTATKSRIWAVLTRHGIKIPERSMFSVKGWLHVKAIVESDKCPAELKFLFQHFHNVESSLEQSTKVLIEYAKSNFIKEWEKLHSIDGIAEIISSYIIANVHPISRFANEKKLRRYAGVIPCFQESAGKFHGSMLPKTSSRALLRWALTQAAHGAIRKKGSNLSLYYKSKKKRSKYKAIMAVARSICDLVYMRLKE

SEQ ID NO: 460926 - protein, 435 aa, unidentified
MSSKAYRATRVNEVNWEQIARGKEGLGVTVGIDVGKFDLSVICRWADGRFERPWRVRNPWEIPTLVGVLMQVKADRKLVVALEPSGTYGEALRQALGDNGIDVQRVGTKASHDYAEVFDGVPSQHDGKDAAVVAELAALDKAKPWTYQAADSWEEELAYWVEEMVAQRQMLTPWQGRLEGLLARHWPEASQVLKLSSGTLLRILKRYGTPQALAADACAATQLARWGRSLLSAAKIDKFLAGARSSVGVRAGPWERRQIQEYAERVLAARQQANRAQRRLRQLAEGHPVLEAQGKVVGVPTACVLWTSTGDPRHFDSAGAYRKAMGLNLAERSSGTYQGRLRISKRGSALARQWLYFAVLRLVQRCGVRPWYEAKKARHEGEARRVLVAVMRKLAVALYHVGVRNQEFQPRRLFGRISRRSGRSAQRPGASKQRA

SEQ ID NO: 460927 - protein, 321 aa, unidentified
MERMIGVDVSKDYLDADTLPSTSQRRFTNDPPGIAELVEWARAFRPDRIVFESTGHYQKAAVGALLAASLPAVVVNARQVRDFAKALGILAKTDAIDAAVLARFGQVVSTVVRPLPEPEIQAFQELYDRRGQLVKMLAIEKNHRHAAASAKVIKGIDAHIRYLEKQIKDLEERMDHFVQNCEAFRARDEILQSIPGVGPQVSRTLLAYLPELGQGTRQEISALVGLAPFNDDSGTQSHTRHIRGGRGKVRLGLYQAAVVAIRHCPPLKDFYIRLKARGKATKVGLIAVARKLLVLANALIRRMEPYNPANSVCLQSPLTAT

SEQ ID NO: 460928 - protein, 319 aa, unidentified
MNKSTLFFGIDISKDCFDVYGDSLGHKSYPNTKEGFRSFLRVLDKSSHCVMEATGCYHHKLSMFLYEKGMVLSVVNPVIIKRFIQMKLKRVKTDKSDAFMIYNYACEQVLEPWQPEPSYIVRSKELLSLMQTYSRQSTALKNKLHALEHRGHGKSLLVTSIKRQLRNLKKEGQMLENELEALIKSNEANLFSRLTTIPGIGKKTAVLIMVSTSNFKSFESHRQVSSFLGLAPNERSSGSSIRGRSRISKTGDGLLRNHLFMCSFTACIHNPHCKALFDRIVAKGKSRKLALIAVCNKLIKQAYAIAKSGLPYDPNYARN

SEQ ID NO: 460929 - protein, 456 aa, unidentified
MVAVMIGIDPHKASHTAVAINAAEEPLGQLLVRACDAQADRLLAWAQAWPERAWAVEGAGGVGHLLAQQLLGAGERVLDVPPKLSARVRLLEAGDTNKNDSNDARSVAIAALRSRGVGEVRRDDHAAVLKVWSKRHRDLGRARTQVACRLHAVLCELVPGGVSKAITAGQAAHLLESITPADAVKAARCELAAEFTEDLHRIDAQIRDTRKKLAAVVRAAGTSLTGLFGVGPVIAAAVIGDVRTVSRFPSRDHFAACNGTAPIEVSSGPRKVYRLSRRGNRRLNHAIHMAAVTQIRNPGSEGRAYYDKKLAEGKTPKEALRALKRQVSDAIFACLQADARRAGDPGGQPGNHSASRAAGSHPEHPLFGQATPGPGHHPTTEASTPGRAGRSSIAATSPSAKPQVQVERPQRSEDERPGGAARRRPYSATRKARDHRPSVKVQPPTSRAAKKLDPTS

SEQ ID NO: 460930 - protein, 375 aa, unidentified
MQKKVRFLGLDVHAETIAVAVAEADGEVRSLGVIPNRGESIRKLVKRLGPAEHLRACYEAGPTGYVLYWQLTELGVECVVIAPTLVPVKAGDRVKTDRRDALKLARSHRAGDLTAVWVPDAASEALRDLVRAREAAKQDQLRARHRLSKFLLRTGQRATAGVNAWTELYMAWVRQLRYEQWGQEATRLDYLHEVEHMGARVKRLEEAITEAVKLASPQVQEVVRGLQALRGIAEISAVTIVAELGQIARFETARQLMGYSGVVPRENSSGQRQQRGGITKTGNAHLRRIAIEAAWSYRLKPAVGPGLRKRQKDVPEPIQEIAWKAQLRLHKRYARLAAAGKDQRKIVTAVGRELLGFIWAIGVKVETAARQSIAA

SEQ ID NO: 460931 - protein, 485 aa, unidentified
MKQTKSSPCARAILAHGGQLSRKERRELARQVQSEQVTLQIVHSNAAGIDVGKNTHYVAVPPDRDAESVRYFDSCTDGLQQMVAWLKKCGITSVALQSTGVYWIALYDLLQEADFEVYLVNARYTKSLPGRKSDVQESQWLMKLHTYGLLPNSFRPPQEIRWLRSYWRQRQNHVRSAASCIHRMDKVLTEMNVRLSSAVTDLSGATGLAIIQAIVDGERDPHELAAYRDPRVKATQEEIARQLHGNWQADLLFRLKQELQGYRFYQTLIAECDQELAQLLRAFPDRSAGVALPEETRKNRRKKKRGNSPQFDLRQLLYLMSGVDLARIDGIDVITAMTVVAEAGYDMSPWPTADHFVSWLRLAPDNRISGDKIIGKGRTPTQNRLSQALKMAASSLKASKTYLGAQFRRLRARRGPAIAVKAMAAKLARLVYNMLRHGMEYVDRGTEFYEQQQRERRLHALTKNAAQLGFQLVPTELSLAGTGTI

SEQ ID NO: 460932 - protein, 418 aa, unidentified
MLWTGGEEIVSIIAVINRTMDLPMRKPRPRNRSQRKPNDLSRSLAVLDMDRTLIAVIEMSASTWLVAGIVPGVERQPLKKLEPDEHALLALLQRWRGEAERSGRTITSIAVAYEAGRDGFWLARWLLSQGIEAHVIHASSVAVSREHRRAKTDRLDTQMLKRAFLGWLRGERDHCKMAAIPTLAQEDARRPGRERESLAGEASRIVNRLKSALARLGVRKFNPKLKKASERLNDLRTPEGEPIPPNTLDEMKRDMERRQLICAQIRKIEQERLKHLVQAPDTGPHAMVRLLARVIGVGIETADTLVQEALSRHLRDRRAVARYGGLTGAPDSSGSINREKGLSRSGNARVRRCMIQLAWRFLRFQKDSALAQWFFHRTGNARGMRKTMIVALARKLLIALWRLVHEGVIPEGIVMRPA

SEQ ID NO: 460933 - protein, 354 aa, unidentified
MQSPIIASPKLFIGMDIHKKSWSVHLRTDLFDHKGFTMPPQPQTLVDYVSSHFDGHDVSLTYEAGCCGFSAARHFLSMGWQVKVVNPSDVPRSDKQQYQKNDKLDCRNLCKQLQQDQLHGIYVPTEPEEQLRSLLRQRNQVVKQVRTIKSHIKGLVLFHGIHLPEQFDNPNWSKDFIAWLRDIQWSYTTGAASMQSKLRILELLNKEYLQTSNELRAWCRKHNSKDYYLLKSIPGIGGLVAAAILAEMGDIRRFNNEREFSNCIGLVPAIHQSSETDIKKGITPRCKALLRSYLIESAWVAIRTDPEIQAYYRKHVGKNPKNVIVKVAHKMCRRILSVIKNETPYQISYSRTVK

SEQ ID NO: 460934 - protein, 370 aa, unidentified
MTTTPATVTVIGGVDTHKHTHYAAAIDDQGRLLGHQEFPANDPGYQALLSWLRGHGPIHMIGVESTGSFGATLTRALTAAGEHVVEVNRPNRQARRMDGKSDRLDAEQIARAVLGKVSTAIPKAKSGTIEVIRTLRVTRASAVKARTSTFNTLWGVMIGAPSPLRDELVVLTKRTLVNRCLGLRPETDDLISLAGDPDRMLLAGIKTSLRDLARRWKALDAEIKTLNKQIEGLVRAAAPDLLEMHGVGVEIAGQFLVTAGDNAERIHSEAAFAKLCGVAPQPASSGRTSGRHRLSRGGDRAANSALYIVTIVRMRHHQPTRDYVERRTAEGLSKREIIRCLKRYIAREVYNNLPRPAAVAAAPEVVQHAA

SEQ ID NO: 460935 - protein, 351 aa, unidentified
MGQPEGTGDMQIAVLGIDLGKNSCSVVGLDATGRVVLRRRLHRDGVVKLAAGLPSCMMAMEACCGAHHLGRKLSGQGHQVRLMSPEYVRPYVKAQKNDDRDAEAIAEAATRPTMRFVALKNEDQLDMQSLHRARDRLVGERTALINQMRAILLERGIIVPQGRRKLEVAVETLLAAEQVCLSPRTRLLIEDQRAEWRELDRRIEAFDEEFARQARTDERARLLTTIPGIGPLNATALVAAIGKAETFERGRDLAAWLGLVPRQMTTGGKPKLLGISKRGNVYLRKMLIHGARAALPTLSKGETPLGGWLRGLAARAHRNTVVVALAAKLARIICAVLRSGQGFEMQAATAS

SEQ ID NO: 460936 - protein, 355 aa, unidentified
MSEKLNSKIAVIGIDIGKNSFHIVGQDRRGALVLRQKWSRGQVEARLANLPPCLIGMEACTGAHHLSRKLQALGHDARLMPAKYVRPYCKGDKNDYRDAEAIAEAVQRPTMKFVATKTADQLDLQALHRVRERLVSQRTGIINQIRAFLLEREIAVRQGLRFLRAELPDILAKRTDVLSPRMLRIIEDLSGDWRRLDERIEGLSSEIEALARQDQGCARLMSVPGIGPLISSAIVAAIGTGDPFSKGRDFGAWLGLVPKQMSTGDRTILGSISRRGNRYLRTLFVQAAWVVLVKVGPKQWERYGLKSWIEAAKKRLHHNVLAIALANKLARIAWAVHNGRTFEYVKTNATASRSA

SEQ ID NO: 460937 - protein, 447 aa, unidentified
MSRRQTQQTVTMRCVHANAAGLDLSQTEIWAAVPSDRTPTPIRKFGTFTPDVLALADWLTACHIDTVAMEATGVFWIPVYEVLEAKGFQLFVVNARHIKNVPGRKSDVQDCQWIQYLHSVGLLSRSFRPDAEMATLRAYLRHRAALLDGRAAHIQHMQKALQQMNLQLTQVLSDITGSTGLAIIRAIIAGDRDPQHLAQFRDRRCARDEADIAKALTGNYRPEHVFALKQALALYDDYTGYVQECDAEIEQYITSVVPDTDDLPPLPPSTKRDSNSKNAPSYDARTLLYRLTGVDLVAISGLNEITVQTIVAEVGLDMNRWPTEKHFCSWLGLAPHNDISGGKVLRSRTLRARNAAGQAFRLAAQAVSRSPKSVFAAFFRRVKGRLGTQQAMVATAHKIARTFYHILKNRTEFQDIGAAEYDRQAAERELAHIRQRAKKLGYTLVAN

SEQ ID NO: 460938 - protein, 372 aa, unidentified
MSNVNMYIGLDVHKDSIDISLVEGDRDAKVRFQGTIGGGLADVEKAVRKIRKAHPLSVFHFVYEAGPCGYDIYRHLTRAKHDCMVVAPSMIPKRSGDRIKTDRRDSIMLASLHRAGELTAVHVPREEDEAMRDLVRAREDAVKAERVGKLQLKGFLLRHGVKFAGSGDWKASYMKWLAGVKMPNPAQQIVLQDYINTVTDGTERIRRLTVQIRELLPSWEMGPVVNAFQAMRGVALIVAVTVVAELGDLTRFDNPRQLMSYLGLVPSEHSSGKTRRIGGITKAGNGHARKVLVEAAHTYRFPARTSKILLERQAGLSKEVRDIAWKAQVRLCARYRKMVAKGKKNQIIICSIARELCAFMWAIARELKTVTA

SEQ ID NO: 460939 - protein, 362 aa, unidentified
MECYIGLDVSQRQTAICVVDAKGKIVVEGKALTRPSDIHGWLVAKDVQISSIVRIGIEAGAMSAWLHIELTKLGLPLICLEAFQAHRFLKTYRNKTDKNDARGLAQLVRMGGEFIRPVTVRARSSQEDRTLLTLRQQLVQQRVGLENNITGSLKPFGLLVPRGNVNSITFRERVMAALVKADELGLTLSDGIMPSLDLYEDLCKHLAILTRRVEAVSKDNPVCRRLMTAPGVGPIIALSFVTAVDNPLRFSNDEDIGAYFGLTPKQYQSGETDYQEGISRLGNSMTRVHLVQAATILLSSSRKWSTLRAWGMKVAKRRGFNRARIAVARKLAIVLHRMWINEQDFRWSNKTEGSELASSAAA

SEQ ID NO: 460940 - protein, 351 aa, unidentified
MMLIGVDYHPSFQTIAFLIEETGEYEERELNHSDGQAEKFYRDLKQRGICVRVGMEATGHSRWFERLLAELGFELWIGDPAEIKAKRVKKQKFDREDARLLLRLLRENNFPQIWVPDAENRDLRQLLWHRHRLVQMRTRIMNQLHALAMNEGFCWKKKLFSEKGRAQLEKLALAPWAGRRRQGLLELLDRMNPTIEELTAAVEREARKRPEAMRLMTHPGVGPLTALAYVLIIGTPTRFQRGKQIGTYVGMISCEESSGGKQRLGHISKQGNSLLRFLLVEAAQAAARVNPHWRRRYMHLAMRRHKSIAKVAMGRRLAVRLYWMWRNGCEYSPSLEFGSYAGQLGLGNGVK

SEQ ID NO: 460941 - protein, 377 aa, unidentified
MREKLRFLGLDVHAETIAVAIAEPDGEVRSLGTIANREDSIRKLIRKLGPAENLRACYEAGPTGFVLYWQLSQLGVACAVIAPTLVPKKPGDRVKTDRRDALKLARSHRSGDLTAVWVPDEDSEALRDLVRQREAAKQDQLRARHRLTKFLLRSGQRPPLGLKAWTERWMRWLAQVRYTQPAQEVTRLDCMNEVEHMTARVKRLEEAILEVVKLAPEPMQELIRGLQALRGVAHISAVTIASELGNITSRFESARKLMGYCGVFPSEDSSGKRIRRGGITKCGNAHLRRIVVESAWCYRHLPRVGEKLRKRHQGVPAEITEIAWKAQNRLHKRYMTMMNAGKDQRKVMTAVARELPGFIWAIGIKAEAVASRQQFAA

SEQ ID NO: 460942 - protein, 405 aa, unidentified
MPVHAAPATPSTIVVAVDVGKTTASVSATDTGRHRLFGPVDIAMTRSDLRLLVDRLTQSFPPSPQVKIGIEAAGHYHRPMLDYPGWPAGWEILELNPARVGEQRRIHGRRRIKTDAIDLDAITDLLLTGQGQPVTHPDRVLGELTAWATHRMRRVATRTATKNQLLGQLDRAFPGLTRALPDVLGTRIGRLVAAEFSDPARLATLGSSRLIRFAAHRGLRVQRPLAERLITAAREALPTNDAVIARRILTADLALLTDLDTQITAAEAELAALLPRTPFATLTTTPGWGVVRVANYGAALGDPQRWPGPRQIYRASGLSPMQYESAGHRRDGGISREGSVTLRRALIDLGVGLWQAEPTAKAYAAGLRARGKHGGIIACALAHRANRIAYAMTRDHNDYDTTCWS

SEQ ID NO: 460943 - protein, 357 aa, unidentified
MRFYTKQHQFYCGIDLHARSMSVCIVHQEGDILVHRNMKAAPEPFLTAVAPYRDGLVVAVECIFTWYWLADLCAQEGISFVLGHALYMKAIHGGKAKNDKIDSQKIAALLRGGMLPQAYVYPAKMRATRDLLRRRTHLMRKRAELLAHVQNTNSQYNLPEIGKKLAYKANRTGVAERFDDAAVPKTIEVDLALITYDDELLKDLELYILKTAKHHDAQTLYLLQTIPGIGKILSLVLLYEIHQIDRFPSVQDFASYCRLVKCSKESGGKRLGTSGKKIGNAHLKWAFSEAATLFLRNNPPGQKLLARLEKKHDQGRALSILAHKLGRAVYFMLKRQVAFDLEMFLQTSGSRAGEPGA

SEQ ID NO: 460944 - protein, 352 aa, unidentified
MRTSQKTAGIITTIGIDLGKNTFHLIGFDQRGAIILQQKVSRGQLERRLANIPRCLIGMEACSGSHHIGRQLQAAGHDVHLIPAQYVKPFLKGHKNDYRDAEAIAEAVQRPTMHFVAIKTPEQMDLLALHRVRSRLVSQRTGVINQIRGFLIERGIIVRQGVVPLRKALPEILSSQTGPLSPRMIGVIADLTQDWRRLDERIGGVSAEIEALAEQDDGCQRLMTVPGVGPIISSAVVAAIGNGAGFKQGRDFGAWLGLVPKQESTGDRTILGKISKRGNKYLRTLFVQAAHVVLVRRPSAAMRGLWPWIEQASKRLHRNMLAIALANKLARIAWAVLARGRSYQPRIVADAA

SEQ ID NO: 460945 - protein, 356 aa, unidentified
MQIMGVDLHTRQQRIAMLDTETGELVEKTLQHEGEAVREFYSALTGSVQVGLEASGSMHWFLELLEELGIDYRVGHPSQIRKAETRKQKHDRRDAALLLKLQVEKRFPSIWMPASELRDLRTLLRHRHQWVRIRTRVQNTLQAMALSHGLRRGKTVWSQAGQHGMASLPLHTAYRRSELQHLYDQLQGQIDELDKRVSAQAWQRAGARLLMTHPGVGPVTALASDVFLGDPGRFADGKAVASYVGMIPREYSSGGRQRLGGLSKQGNPLLRFLWCEAALHAVRRDPELQRFYRRKLAPKGLGKARVAAARKLAIRLWILLRDQIDYPEFCRRGQLRQKSGATCAGMPDVGHSPAIL

SEQ ID NO: 460946 - protein, 370 aa, unidentified
MGQASTVFVGMDVHKDSISVAYAEGGSTAPPLFLGPIRTRQCDIDGMVRRFVSKGGRPVFAYEAGPTGYGLYRHLIEKGFDCLVVAPTLIAKRPGDKVKTDRRDAVELARLLRVGDLSCVDVPSVEDEALRDLCRARDAARVTSRDAKLRLKSFLLRLGLSYQGRASWSQAHKRYLARVVCPTPAQQIVFQESIHAIDEQEQRVQRLEQELLDRARSWRLWPVVEALQALRGVQWLVSLTVVAELGDLTRFDNPRQLSAFVGLIPSEHTSGNKRRQGSITKTGNSRARRALVEAAWAYRHPAKVSEHIRKRIENLPPFAQDIGWKAQVRLCKRFRRLRARGKHPNVVTTAIARELLAYMWDIAKQVPLDA

SEQ ID NO: 460947 - protein, 367 aa, unidentified
MSVYVGIDVHRKRSQVAVVDQAGEVQANRNVPNGVETVLKVIGDLPIGTPVAFEAAFGWGWLVELLDDYGFEPHLVHPSRCKAIASARLKNDKVDAHILAQLLRADLLPEAWIAPPAVRQLRARLRHRIQLVRLRTLLRNRIHAVLADHGHDRAEGCWSGPGRDWLAGLDLPAASREVIDDCLAMIDALQAPIDRLDVEVHQHANADPRVKVLTRLPGVGELTALVILAEIGDISRFGSARKLAAWAGLTPTVRGSDLTVRHGHISKQGSTWLRWILCEAAQTAKRSPQFAATYQAISRRRGNKIATTAVARKLLTRAYHLLTDTTADTTADNTCTPSRHRAGPTTGRISTPRASSQNRMSRPSRAR

SEQ ID NO: 460948 - protein, 362 aa, unidentified
MHTITIGVDLAKQVFSLCSVDAVGRVQERRELRRDAFIQWLPSVPAGTTVAMEACSGAHHWARRCQEHGLQPRLMAAQFVAPFRKSRTAKNDRNDAEAIATAARQGNMRFVSIKTVDQQVRLSWHRVREGYKAEALATSNRLRGLLAEFGVTMAQSDGALRRTLADLDALSLPSSLVELVRDVDAHWLQLRERIAQSDRRIQAHAKGDEACTRLRAIIGVGPITADAVVATIGSAQSFANGRQFAAWLGLVPMQHSSGGRSRLGRISCRGDGYLRTLLIQGARSSLQRAKAVAWEKATPEQRWIQDIERRLPFGKVLVAIANKHARQLWAMLARGEQYDADAWLKHPMVQRPASRRAPPATN

SEQ ID NO: 460949 - protein, 369 aa, unidentified
MGKDTTYVALDDSQRRIVAGILRAGEMEPELREIANEPTAIRRLFARLTREGPVSACYEAGVSGYDLYRQLAALGVACQVMAPGLTPQRPSQRIKTDRRDAGKLVRLFRAGELTPIHVPNEADEAVRDLVRCRDDVRRDVMRWRHRLLKLLARHGRVYSAGKHWTQAHWRWIRSQRFEPLPLGRAFEATLVALEQALGRLAELDQELITIAQSAPYREPVGWLRCFRGIDTLSALILVAEIVDFQRFHRPRELMAYLGLVPSEYSSGDTQRRGGLTKAGNTHARRVLIEAAWHYRHRPTLSPALARRSRGEPPEVMTQAWRAQQRLNRRYRHLIGRGKRPPVVVAAVARELVGFLWAALTRPRPAVPAA

SEQ ID NO: 460950 - protein, 307 aa, unidentified
MATSVGIDVSKHTLDWCPGSSGKIQQTKNEPRCIASLVQRVRAVGPERIIVESTGGYERKLVLKLAEANLPVIVVNPRRVRSFGEGMGMLAKTDAIDAKLLALYGEKVQPPIRPILQGRDRLLADLVARRRQLIAAVVSEKNRRETASRPVQRSIAALLRVLEREIKRIDQEIDQIIEADADRSELSELLQTVPGVGPGVTRTLVVDLPELGHLGRREIAALVGIAPFAKDSGQYRGRRSIRGGRASVRTALYLAAMTASRFNPKMREVYQRLRESGKPPKLAFIAVARKLLVALNAIARERRAWQL

SEQ ID NO: 460951 - protein, 316 aa, unidentified
MSTLHVFVGIDVAKAQRDIAVRPPGERWAVGNDAPGIAALVVRLQAVQPTLIVLEATGGSQRAVVAALAAAALPVVVVNPRQVRDFAKATGQLATTDALDARAVAHCAEAVRPTPRPLPDAQTEELRALVARRRQRIAMRTAEYNRLGRASGRLWADIQAHILWLDQRLVALDDDGDTMLHASPVWRERDELYRSVPGIGPVGARTLVLDLPELGTLSRQRIAALGGVAPCNRDRGTLRGRRTIWGGRAAVRATLSMSALVAVRHNPMLQAFYERLCAAGKAKKVALTACMRKLLTILNAMVKHQTPWQSREVSIA

SEQ ID NO: 460952 - protein, 429 aa, unidentified
MEEVDEVELVVQRVAALDLGKATLEACMRVPHPSKPGRRMQEIRGYATTTATLLEMAIWLRQWGIERVAMESTSDYWKGVYYLLEAEGFDCWLVNAREVKNVPGRAKTDRADAVWLAKVAERGMCRPSLVHPPPIRRLRDLTRYRRALVADRSREMQRVEKLLEDAQIKISSVLSDIHGVSGRAMMEALIAGQRDPRSLARLAKGLARKKTDRLEEALRGFFTDHHATILQMMLDNIDRIGAQIAALDARIAEAIGPFSRQGSRLADIPGVNTVAAAELIAEIGVDMTRFPSPAHLVSWAKFCPQIHQSAGKSRSKARGKGNPWLAGTVGRIVFSASHTDTFLGARYRRLARRRGKPKAIVAVGNSVLTVVYHLLSDADLDFCELGPAHYESRINKHRRARDLATQLQALTGQHIVIRDGKAIITDNAA

SEQ ID NO: 460953 - protein, 320 aa, unidentified
MDAVLGIDIAKAKFTVTLRTPDGKQRRKTCPNSPAGFEALAGWLTRQHVTPVHACLEATGTYGEALATWLYDAGHQVSVVNPAVIHAYARVQLARGKTDALDADLIAQFTVTQQPPPWVPPAPEIRALQALVRRLDALYGMHAQETNRLAAGVTVAAVRGSIDAVLANLDEQIAHVKQLIRDHIDRHPGLRQQRTLLTSIPGIGDATAAVLIAELFDKPYASARQAAAFAGLVPRLHESGTLRGRSRLSKIGPGRVRKALYFPAIAALRFNPTIRAVRQRLAAAGKPNMVIIGAAMRKLIHIAYGVLKSGKEYQATCSHP

SEQ ID NO: 460954 - protein, 403 aa, unidentified
MNAVGIDVSKGKSTVVALAPGGKLLARPFDVLHTKSGIKELVSFVRTLDGDTRIVMEHTGRYYEPLLQWLAASDLFVTAVNPKLIKDFGNNTLRKVKTDQADAKKIARYALDNWCDLPQHTGMDTTRAQLKTMNRQFAFCMKQKTACKNNLIALIDQVYPGANTYFESPARADGSQKWVDYVAAFWHVDYVCSMRLSTFTERYRKWCHRHGYNFQSDKPRMLWEKAKDLIAMLPMDKMTKSLVQTAVAQLNVLSKTVETLRTQMIELAEKLPEYQVVIAMNGVGATLASQLIAEIGDITRFPRRGSLTAFAGVDPGAKQSGTMQLRSNKTSKAGSPHLRRALFQIVSGLLMRAPDDPVYNFMAKKRSEGKPYYVYMTAGANKFLRIYYGRVNEYLAGLSKEQE

SEQ ID NO: 460955 - protein, 343 aa, unidentified
MDKNTMIGVDLAKNIFQLHIATMTGNVLSKKKLSRDRFKEFMKSHEPAIVVLEACGSAHYWAETLADMGHDVKLIAPQYVKPFVKRQKNDAADAEAIVVAAQRPEMRFVAAKTKEQRAKGVLFRSRERLVHQRTEQVNALRAVLYEYGYVIPQGIASISRIEDILARPNCDLPDLVCDECRDLLEQISSNTKLINAKTDLIKQLAKQTNMARQLQTIPGVGPMTAMAIDAFAPPMDLFKNGRGLSAWLGLVPRQYSSGGKERLGRVSKAGQADIRRLLIIGAMSRLTWLGRKSIPQGSWLARMLARKPRMVVAIALANKMARMIWAMLTKETDYRDPMISAAA

SEQ ID NO: 460956 - protein, 425 aa, unidentified
MKKRSPYKVAPVKSLDARPLVEDVEDQRVIVGIDVAKEKMVAAVVDEGDAVLKIVGWSHPIETAGFVELVRALAGSAADVAVAMEPSGVYGDALRWQLIEAGFEVHRVSPKKSYDASEIYDGVPSSHDGKSSAIVAWLHGQGKSEPWPVRTERERGLTALLRVLEVHSKQFRQNRNRLEGFVARHWPELTRYLDLDKATLLELLLAYGGPAAVAANLGQARELMLRVGGAALGREKVEAVLESAQHTVGMPQVAEEVAMVQAIAAEARRNQKSERAARGRVEELSAAEGSTKEMQAVVGKTTAAVVVAAAGDPLNYESPQAFQKSLGLNLKERSSGKKVGALRITKRGSGTARMFLYMASLRLIQSDETVRAWYTKKVARDGGSQKIKAVVAVSRKLTLALWHVARGEEFDSSKLFDRRRLGLSS

SEQ ID NO: 460957 - protein, 348 aa, unidentified
MAMTIVEAGRTVIGGVDTHLDVHVAAALDPIGGVLGVESFVASPRGYEAMLEWMGAFGTVSKVGVEGTGAYGAGLGRFLRRSGIQVIEVDRSNRQVRRTQGKSDPADAVEAARAVLSGRATGAPKSRDGNVEAIRALLVAKRSAREGRLRAIHQMRQLSYTAPDELRCRLKGLPIKKFTAEAAAMRPRAGGDPVVYATKVSLTSLGRRVLALEDETAGIDELLDELVTATAPSMLELFGVGIDTAASLLVAAGDNPERLRSEAAWAHLCGVAPIEASSGKVTRHRLDRGGDRHANQALWRIVMTRISSDPRSRAYMERRTKEGRSKREVIRILKRYVAREVFKHLPRG

SEQ ID NO: 460958 - protein, 361 aa, unidentified
MFTERTSVGLDVHARSVVAAAIDGVTGEVFRARLTPGNEEILGWVRALPGPSVVVYEAGPTGFGLSRAFTAAGIRCEIAAPSKIQRPAGDRVKTDARDAMLLARLLRMDEIVAVAVPSVEQEDARDLVRAREDVRGDLMRSRHRVSKLLLRQGIVYYGGHAWTGTHLVWLRAQHFDTPGLALAFDAEHEAVLAAEARRDRLDEAIGAMAADSQFTPVVRRLGCLRGISTLTAFGLAVEIGDWDRLTGASIGAYLGLVPTESSSGASRSQGSITKTGNTHARRLLVEAAWHHHKPYRTPGATMRARWELAPAASRARGHAGNRRLHERWLRFTERKKRPVVANVAIARELAGWCWSLAVMDP

SEQ ID NO: 460959 - protein, 343 aa, unidentified
MQVVTTVGLDIAKAVFQVHGVDAAGQVVIRRQLKRRYVLAFFEKLPACLVGIEACASSHHWSRELKTLGHTVRLMPPAYVKPYVKRQKNDTADAEAICEAVTRANMRFRATKTPVQQSCLTLHRTRHLFIRQQTAVINVIRAHLAEFGIVAPVGRKGIETLLDVVANPTDKRVPVIARACLAALGAQLRRLKEQILEFDRMIMAWHRSNEASKRLDAIPGVGPVLATALVASIADPKAFRSGRNFSAWIGLVPKQHSSGGKDKLGNISKQGDRYLRSLFMAGALAVIRYAKIHGTTHRPWLTALLARRPTKVAAIALANKMARMVWAMMTRGERYKDPIALAA

SEQ ID NO: 460960 - protein, 408 aa, unidentified
MDAIIERCAGLDVHQRTVVACILYGPLDRKPKQLVRTFGTTTRELLSLLDWLTEYEVTHVAMESSGVYWKPVWNILEGDFTLILANAQRIKNVPGRKTDVNDAVWIAQLLRCGLIESSMVPPKDIRRLRDYTRYRRKLLSAATSEKNRIHKVLQDANIKLTTFMSDVFGVSGRALLQALVKGKVLQPHQVQSMVHTHLKKKVPALVEALNGRVDQHHRKMIQYHLNHLDFVEKQIAEIEYEIEQLLIPYREEMGLLNSIPGIDKNAAAAILAETGVDMSKFPTEPRIASWGGVCPGNHESAGKKKSTRTRKSNRTLKAILCQVAHVNARSQNRISAFFHRIRKRRGALKAVVATAHLILRIIYHILKNRIPYHELGPEYDKAQKPSVHHWVQKIKQQGYEVFVTPING

SEQ ID NO: 460961 - protein, 356 aa, unidentified
MNGLKHQEEKRSMDHFAGLDVSVKDTNVCIVDDTGRLVREVKVASEPAALLPVLTNPAYHFKRIGLEAGPLSQWLFSALAEAGLPVICVETRHMRAVLKAQINKTDRNDARGIAQMMRAGLYRPVHVKTLRSQKLRMLLTHRKLLQSKAIAVENDLRATLRNFGLKVGMVGTVKFEARIRELVENLSDLAVLVEPLLVVRRVLHEQIGVLHRRLLAVVRDDEVCRRLMTVPGVGPVVALTYRATVDVPARFKNSKAVGAVFGLTPSRYQSGESDRTGGISRCGDEMMRMMLYEAAQSMLVRSTKWSWLKAWAMKIARHRGIKRAIVALARRLAVIMHRMWVDGTEFRWAREETAAA

SEQ ID NO: 460962 - protein, 416 aa, unidentified
MKIVRPICCGMDVHKNIIVATIGITNKNTRITEYIQETFSTLNPDLLNLKQWLINHKCFDACMESTGKYWIPIFNILEDEINIYLTHPKYVKAIKGKKTDKKDSKWICDLFKHDLIKFSFIPPKEIRALREISRYRYKLVGMRSSERNRYQNCMTVSNIGIGSVFSDPFGKSAQSIMKEVLESDIIEDEKILKCIHGSCKNKDKILDSIKHCNIETDQRFKMNESMIHMEELQLHIDNCEIELMKRAAPMFDQFMHITQLPGISTLSAILIISEIGVDMKQFESDKQLACWAGLAPANNESANKKKSVRISKAGQYLKPLLVQCALGAIKDKEGYFGIKYSRIKKRRGHKKAIIAIARMMLVSIYHMILTGETFNPSDYESFRNPKPPIKQQDLTEESAIEFLKKSGFDVSKLTKP

SEQ ID NO: 460963 - protein, 396 aa, unidentified
MNSGFGVFLGLDVGKGEHHAVGLDRGGKRLHDGPLPNSEPKLRALFDKLAVHGPLLVVVDQPATIGALPVAVARGCGHQVAYLPGLAMRRIADLYPGRAKTDARDAFIIADAARSLPHTLRPVDVGDEALAELDVLIGFDDDLAGEATRIANRIRGLLTGIHPALERAIGPKISHPAVLEILSRCGGPAGIRAAGRRKLTAIAAAHAPRMGDKLVAAILAALGEQTVIVPGTAAADTVLPRLADSLKTVLQQRKTVATQVEGILDAHPLAGVLTSMPGIGVRTAARILLEIGDASGFKSSAHLAAYAGIAPVTRSSGSSIKGEHPARTGNRKLKRAFFLAAFASLHDPTSRAYYQRKREEGKKHNAALICLARRRCDVLFAMLRNKTLYEPRPAAA

SEQ ID NO: 460964 - protein, 333 aa, unidentified
MLPPNCGTATPYILRNTVGLDISKLTFDASAIVGNAEYSAKFDNDSKGLDQFSDRLKSLGCQNLHICMEATGNYYEEVADYFAQYYSVYVVNPLKISKYAESRFKRTKTDKQDAKLIAQYCRSAKESELVKRQKPTDEQYRLSRMTAAYAQIKSECAAMKNRHHAAKDEEAAKAYAEIIKAMNEQLEVLKEKIKEQTEKPNCKEGVKRLETIPAIGRMTAAVLFHHLTSSKFETSNKFAAFAGLSPQQKESGTSVRGKGKLTKFGNRKLRAVLFMPAMVAYRIRAFPDFIKRLEEKKKPKKVIIAALMRKLAVIAYHVHKKGGDYDPSRYKSA

SEQ ID NO: 460965 - protein, 338 aa, unidentified
MNKFSGIDLHSNNSVVVVSDETDQVVYERRHANDLAGILAALEPHRAELAGVVVESTYNWYWLVDGLMEAGYAVHLANTAAIKKYEGLKYSGDEADAAYLAKLLRLGLLPEGYIYPREARGARDLCRKRMQLVQYRTAQILSIENILATQTGARLTSTKIQRLTDEQIAALDFAPDVSLALQANAAVMRALQQQIAVLEERLAERVQLNADFALLKSVPGIGQVLATMIMLETGTVARFARVGNFSSYCRCVQSVRLSNGKKKGEGNAKNGNHYLGWAFVEAAHFALRNCPQAKSFYERKKRQRNAVVATKALAHKLARACYHILREHKPFEVARCFS

SEQ ID NO: 460966 - protein, 387 aa, unidentified
MPQPNDLSRSLVALDQNSTIIVVIEMSQSSWLVGGVLPGIERQPRKKLEPSPERLLALLHRWRDEAVRAGRTITRIAVAFEAGRDGFWLARWLEARGVEVHVIHPSSVAVSREHRRAKTDRLDTELLKRSFLGWLRGERGHCSMARVPTMLEEDAKRPNRERECLVGERTRIVNRMKGTLARLGIRTFKPTLRKAAERLATLHTPEGSPLPPNVSAELQHDMARLSLLISQIKEIENARQERLEQEPETGPHAMVRLLARIVGVGIETADMLVNEVLSRRMRDRKAVARYAGLTGSPDESGTKRREQGLARAGNARVRRGMIQLAWRFLLFQKESALALWYRARTADSRLGTRKTMIVALARKLLIALWRLVTTGETLEGVVLRPAG

SEQ ID NO: 460967 - protein, 345 aa, unidentified
MSMVGGLDIHRKQITFDYLDTVTGEVGRGQITPADRTHLRAWLARFAGRDDVAFAVEGCTGWRYVAEELAAAGVAAHLAEPADTATARGRKRHAKTDKTDSRNLRVLLAEGRLPGCWIPPAHVLEYRALLETYHDLRAERTAWAQRIHAVLFHQGAPGLGDGALRTEQGLAALREASAACLSPAGQLQVATALDMIAALEARLHELRHELLDAARHLTGARVLADRLYGVGPVAALALTCWLGGAGRFSSSRKAVRFAGLDITVWSSDRKGPPGRLSRQGPPVLRWAVYEAGKTHARATAPDHAYYAAVKDRKNGKRAALSEARKILRQACHILTELGDEALAVA

SEQ ID NO: 460968 - protein, 422 aa, unidentified
MLGVGLDWAEDYHDVALGLPGKGVIEQFRIEHGPAGVARLVARCLAVEPDPAEVRVVLETRHGLLVEALVDAGFTVLPVNPDLVARRRGPAKKKDDAEDARICCLLALDQFVELRRLIPHGELGAELRAIARDDDRAARDERRLGNRLRADLLAVFPAAVDIADGDLGSAVFLRLLQRWPSAEELAAAGRDAVEALARANKHGWPDRFAERVITALAVPRLPIRPELGRAKAGSIRLATAQLLLLREQRRAWHRRMGELLLGGPRHGRTNRPKDPPPGNAFPGGEIYLSMPGLGDRLAARVAGEIGEHIEQFTTPNALQCYAGAAPVTRRSGRSEHVVARRLAYNRYLGNAVRQWAFCSLQQSAWARTFYNAKIVAGKRHHTALRALANRWLEILWHCLHRGTLYDEAIHTANRAHTVTQAA

SEQ ID NO: 460969 - protein, 354 aa, unidentified
MTETFKTAVRTIGIDIGKNSFHVVGLDRRGAIVLRQKWSRGQVGSRFANMPPCLVGMEACVGAHYLSRRLKALGHDARLMPAKYVRPYSKGQKNDFRDAEAIAEAVQRPTMRFVATKTIEQLDLQALHRVRERLVSQRTGIINQIRAFLLERGIAVRQGRLSLRAELPRILAAPPDVVSPRMIRTIEDLAGDWRWLDERIEGLSDEIEAIARQDAGCERLMSVPGIGPIVSSATVAAIGAGDAFSKGRDFAAWLGLVPKQISTGDRTILGKISKRGNRYLRVLFVQAAWVVLVKRKSRERLGLDRWLEAAKKRLHRNVLAIALANKLARIAWSVLAHGRTFQVGRIADATAQTA

SEQ ID NO: 460970 - protein, 321 aa, unidentified
MSRVLIGVAVCKDFLDAHARPAGLQQRFANDSAGIAQLVAWVRTLAPERVVFESTGPYRKAAVGALLAAGLPAVVVNARQVRDFAKGTGQLAKTDRIDAGILAHFGAVVATVVRPLPAKEVQEFRDLCDRRGQLVRMLAAEKNHRHAARGGAAPVLKNIDKHIAFLERQIRELEDRMDRLVAGSETFKARDEILQSIVGVGPQVSRTLLVHLPELGQGSRQSIPALVGLAPFADDSGTCSRIRHIRGGRGKVRIALYQAAVAAIRYCPSMKAFYACLKGRGKATKVALIAVARKLLVLANALLRDGRPYQARTNSVCLQNA

SEQ ID NO: 460971 - protein, 399 aa, unidentified
MSKVIMVGCDLHDRSMLLRYAVGTGDPQQLSFENDRPGRDRLLNRLQGLAQKHRAERVVFAYEASGQGYGLSDLLDFAGIECHVLSPTHLPTTPKSAKNKTDAKDAQMILECVRGHVLAGNPLPVVWTPPQRLRDDRELVRARIDAGDEMTRVKLKILSMLKRRGIEKPPWYQSKWTKRWVLWLREAQQEMDPVVAACLGRYVDRYELFHAEQTKLDKAIRDLSQTKRYQAACQEVRKIPGVGLLVAMTFLTEMGDLTRFENRREVAAYLGLCPSSFETGGPGKERKGRITRQGPSRLRKMLCQAAWVSLRCSEEASASYQRIKQGQSKRTKKALVALMRKLGIKMWHRALSCGVSSELWGRGGPHADPQEPRLGLRKGTSSPPSPRHRLSPLAAQGEG

SEQ ID NO: 460972 - protein, 386 aa, unidentified
MPVETDLSRSLTTLEQDSTLIAVIELSQKSWLVAGLVPGLSRQPLKKLDPVPEKVVQVLERWRSEAVKAGRRIDRITVAFEAGRDGLWLARWLRVRGIEAHVIHAASVAVSREHRRAKTDRLDTVLLMRGFLGWLRGEAKHCQMVAVPTLEEEDARRPGRERDSLVRERTRLVNRMKSTLARFGVRGFNPKLRRAAEKLCGLRTPEGVGLPARTLAELGRDMARVALVREQLKEVERQRLQRLAAPQPTPEKTMVLLLAKVIGIGIETADLLVHEVFCRNLRDRRAVARYAGLTGSPDESGSRRREKGLARAGNARVRKAMIQLAWRFTSFQKGSALVQWFEARTLAGKGTRKPMIVAVARKLLIALWRYATTGVVPEGIALRRGA

SEQ ID NO: 460973 - protein, 320 aa, unidentified
MTYIGIDVSKDSFVAAYPAKSGYATKTFKNTSSGVHQFIQSLPAECHCVMEATGNYSMLLLYLLQQANIIVSMENPQKIKHFARAMLSTTKTDDIDAKLIAMYGEKMEPAPYKIPSESIMLLKQKRTVLRQLKKQLTMLLNLQHSLSVLPKQDPTAKVATEKTIKFLRKQISKLEEEITHLSNKEFKRQMDLLTSIKGIGKTLASALIVATGGFAYFSNAKQISRFLGLCPTYQQSGTSVNFKGHINRNGDTYLRSQLYIAAVSSIKFNAACKETFKRLKDKGKSGKVAVIAVANKLIRQAFAVVTNNRPYVDGYVSALP

SEQ ID NO: 460974 - protein, 376 aa, unidentified
MERGSLMLNTTTFVGLDVHARSIKAVALDAMTGEVRSATFGYDAAEVAGWVSSVDPSAKCVYESGVTGFDLQKRLASMGIDCVVGAVSKMIKPPADRKRKNDRNDAEFLARMLSVGNVVEVWVPDDGCEAARDLSRALDDAREDLKRRKQRLSKFLLRHGYVFSETTPTGRRKGNWTAAHWAWIKSISFPEKADDDALAYYVDAVRQAMEDKARLERLVEAEASKPRWKRRVDSVRCLKGIDVTSAADLVFEAGEFSRFKSARSFAAWLGLTPSEHSSGESVRQGGITKAGNKRLRRVLVESAWHYLGCSPHSKDLAKGQVPDPAARRHAAKGVRRLVERRRAMLERGVHKNKANVATARELACWCWAVGCMVENG

SEQ ID NO: 460975 - protein, 426 aa, unidentified
MEVVHECCAGFDVHKKTVMACVRRMLEKGRIERQVREFGTMTADILALGDWLSGLGVTHVAMESTGVFWKPIWNLLEGSFEILLCNAQHIKKVPGRKTDVKDCEWIAQLLQHGLLRASFVPERDQRDLRDLTRNRAQLVQDHTRVVNRVHKTLEDANIKLGSVATDIMGVSGRLMLESMIRGEMDPEKLAELAQRRLRGKIPQLKPALEGRLREHHRFMLEMLLDQLKSLEGLIRRAEVKIEEISCNSKLSVSGEENSKVPFDEAVRLLDTIPGINTVVAQGVVAEIGTEMGRFPTSGHLASWAGMSPGNNESAGKRRSGKTTKGNRWLKTLLVQAAWAAARTKNTYLQAQFRRLVGRRGKKRALVAVGHTILVMAYQMLKNRTSYAELGPDYFDRLDPQRTTRYLVKRLEALGHKVTLEPQQSVA

SEQ ID NO: 460976 - protein, 443 aa, unidentified
MSRKKRTHLRGERGQAFANKIRGIPLEQILCVSLDVHKYFHVVMIHNALGEIVMATFEIGIFQTGFDQLCQAIDEAVAQTDAKVVLVGMEPTGHYFENLARHLTCRPQPVTLINSFAVSRNRDQQMMHREKDDEIDAAAIGDLLRRGEGTPFQPVQGIYLEMQHLSRVRHSKVKMRTALKNQIIGHLDRIFPGLVIKGKVARERYEPLFVTDFWSCQTLQHLVRVCPDPGKLAAMTPQDLRSAFHAQDFAMGLKTAAKIITYAQKVLLPDPQVITIRSELLVHDLALLQEVERHITELEDRLHSLLQQTPYSVWVKVRGLSMTQVANLAAAIGDPNHYTYAAQVFRRSGLVSGRNDSGTRRRKGKGKRVVKTGDVYLRRALMAAIISLIRHQPVLNEYFKELHRTKHAAVARVATARRAMGILWAMQRDQHSRTLVLKRGAEM

SEQ ID NO: 460977 - protein, 363 aa, unidentified
MSSVRFVGLDVHKDTVMVAVAEAGDRPAEVLGKWSSEEGAVLANLKRLGPVSSLRVCYEAGPTGYGLARTLIAAGISCVVVAPGMVPQVTGSKVKTDRRDARKLAHFLRSGDLTTVWIPDPQTEAIRDLVRSRDDARLAKRRVEQQLLKFLLRQGRSFTEGQEHWTKTHWAWVRRQTFEHEAQNRVLADLVTAIEQASERVRRLDVDLAECQEGWALADRVRDLQAFRGIKLLTAVGLAAEIGDFSRFAKASQIMAYVGLVPSENSSGQSRRQGAITKTGNRHVRRLLIEAAWHYFHGPTMAKGDLLRRREGASAEVIAIADRALRRLRSKCHKLQLKQKPSTRIVTALARELIGFVWAAARI

SEQ ID NO: 460978 - protein, 414 aa, unidentified
MDTEPLVFVGVDWASTEHQVCLTRTGDPVQRTFAHDADGIGAMVDWLCAQAGQPSQIAVGIETPHGPVVEALMDRGVAVFAINPKQLDRFRDRFSPAGAKDDRRDALVLASSLRTDRHCFRRVEALDPLVVELREWSRMAAELKDERIRLANRVRQQLWRYYPQALDLADDIGSDWILTLWSKAPTPADARRLTEKQVGRILAAHRIRRITAADALAILQRPALTVAPGTVEAARAHIATTAERLRLVNRQIKDVTHRLDALVEQLAGPEPEQRQAAEQRDAAILRSLPGVGRIVLATLLAEAHQAIQARDYNALRTLTGVAPVTKRSGKSRRVEMRQACSNRLRTAVYHWARVATQHDARSKNRYAALRARGHSHGRALRTVADRLLGIACVMLKKRSSYDPQHEAARAPQTA

SEQ ID NO: 460979 - protein, 349 aa, unidentified
MIRNKPRGATVYGIDLGKNIFHVVGTDSAGNVVQRVKFRRDTLRAFFERAERALVGMEACPGSQWLARKLQAMGHTVRIIPAQFVKPYVKSHKNDTIDAAAIAEAVTRPTMRFVQVKQPEQVDLQSLHRIRDQMVGSRTRLICQMRAFCLEYGVAIRQGAGLFKSDLPRVIADECNDLTPTMRRLLNELFEDLMRLEKRIAEITREIEALAASDEKARRLMTIPGIGPLGATALLAAAGNGQQFKKARDLAAWLGLVPQQYSTGGKPQMFGISKRGNRYLRRLLIHGARSCVMHLDRSRDRLGAWLRQLHSRMHVNKVTVALAAKIARIAWVVLNRPGAIYERRDPALA

SEQ ID NO: 460980 - protein, 344 aa, unidentified
MKIKLTGIDLAKNVFQLCALNQANNVLFNRAVCRAQLRSTIAKLEPTTIAMEACSSAHYWGRAFEAMGHTVSLVPAQHVTPFVRGGKSDARDALAICEAAQRPNIHLVPIKTVEQQDIQLLHRLRQRQVQHSTALANQIRSLGREYGVIFPAGIKPLISHLPEVLEDGSNELSPVARHALADQYQCLLDTRQALGAFLLQIEQLAAQYPAYDDLQILPGIGPMTASAYIAAIGNGRQFKRGRQVGAWLGLAPRQYGTGGELKLGGITKSGDRHLRTLMIHGARAVITRGLKTRPELAQWVQPIIDRQGFNKAVVALANKLARIAWVIVTTGEPFDMKQAFKPAS

SEQ ID NO: 460981 - protein, 414 aa, unidentified
MRVVYQVCCGVDVHKSFLVATVITTVSNSFFPSYKKRRFSTFNKGILEFKAWLLENNCHHVCMESTGKYWVPVYNLLEDVIHVTIANPKWVKAVKGNKDDTKDSKWIGDLFRLGLVPGSFIPPKDIRQLRELTRYKAKLINARTAEKNRFQNALTVCNVALDSVVSDIYGKSATSIINYLIESPDNSIVEEEITSRLLRSLKKKSATVIESIEGYTMTDSQKERMRIIRSHFDSINESISRIDAQIDLLIAPYENYITLLCTIPGVDRNSAIVIISEIGTDMSQFSNTKRLCCWAGLTPGNNESAGKKKSVRISRAGVYLKPALVQVAHAAVKCVDRPYYANKHRSIMKRRGKKRAVIAIARMILTAVYHMMKTGEVWNPSDLSDIDMTPEMAEKRKAKDIRRAVNRYPSADCC

SEQ ID NO: 460982 - protein, 406 aa, unidentified
MFIGWDWATETHDVTVMDHLGARVDRWELAHTEEGITKTLARLARYGAPADLPVAIETTRGLVVDRLLAAGHPVVPVHPNAFHAMRPRWGAAKAKTDAGDSMKLADYLRTNGHFLPRLEPTDQATLDLQALTRQRADHIEAKVAAVNQLAASLDAHWPGGKAVFYELDSDIALAFLERYPTPAAASKLTAGRLQAWCKRHGYSGNKPGSFLIERLRSAPSAASRLSPAAVEQLIRIQVQLVQGTRATLRALDKAITEAVKAHPYAPLFATMPRIGKINLAQIIGELGPILERSQTCEQFIAEAGVVPVTKASGKSRTVAFRYATNRRARLAVTTFADNSRHGSDWAAKIYTDARTRKKRHPHAIRILARAWLRVIWACWRDGACYDPATHQANGKINTSADTPVAA

SEQ ID NO: 460983 - protein, 341 aa, unidentified
MANKLYVGADIAQGKFDAAVWQGATGTALKAFSNDRSGFEQLAARLAAVAPAHDTQIVLVLEPTGGYELAVVAFAYDHGWQVCLPNPKQVRDFAKSNGRRAKTDAQDALLLAQFGAEQQPEPQQELPAPIQELIELLQRREDLQQLKRSESNRLLGLQQRPRPTQAVLESLERTIAALEAQLAAIEQAIAELLTQNPDLKREAKRLRSVPGIGERNVLPILVLFYRWQARTSGRGTPKGLVAFVGLDPQPYESGRSVHKRATISKMGDRSVRRYLYLGALGGVHGQNALRTFYNRLVSRGKAKRLALVAAAHKILIWAWAVFSQGVDFDPSRFPQEAPAAI

SEQ ID NO: 460984 - protein, 281 aa, unidentified
MPRKRILVKSIDTSISYQVIGIDLAKHLVSACLITGAGEIFGIDRLTYDDLLKSAERMSPTLFCMEPCPEVHYLAEKLQGYGHHTKVIDGAAVKEYIKTHFGGQKTDLNDAQAIAFLSLGTNLPEITPKNTSNSVLSSIQAVREQFRKEYIQSFVSLKGICQRWGLPISKGVMNKNKVEELVSESKKIPQEVKDWLLELLQSCRELQKRLNKISKYLKEYADNDEICQKIMSVPGIGPITATRLKATIGDIQRFEKPKSIVAYYGLVPKSKATGHNEKKAA

SEQ ID NO: 460985 - protein, 346 aa, unidentified
METLYCGIDAGSSNCHVAVLDESGKWDMDTDIPTSELHLTAFFESLQKNGERAKIHLEAAELAGWIRRIILERTNIEDVVVSDAKQLSWIGKDPRKNDSVDAFKLAEFLRLGRTHPVYYSDDEKMVTLKKQVKHHDSLSGEQTRIKNKIKASLRTQGIIIKSSSAFSRRRRPKILREVNNSMVRENLEDMYRLLDNIEELSKSSKKRLKSLSEDWPIIEYFMEVPGMGLVLACRFVAYVQTPWRFSTEKKLWSYSKLGLTQRSSDGKPLSSPRLDRNGNGTLKDLSRKVFENAQKRQDNNAFKRAYQRYLKTTYNHEHARLSVQRKILTVLWTMWRKNERYDDRRG

SEQ ID NO: 460986 - protein, 341 aa, unidentified
MDIAVLGIDLGKNSCSVVALDSSGKVTLRRRMLRKTIVALTSKLTPCIIAMEACCGAHHLGRVLSAQGHTVRLMSPEYVRPYVKAQKNDDRDAEAIAEAATRPTMRFVALKSEQQLDMQTLHRARDRAVGERTSLMNQLRAVLLERGVIVPQGRAKLRLRVTELLQQSPEQISSRIRLLIEDMLMRWQALDEWIAGFDGEFAAELKRDEAARRLTSIPGIGALNATALVAAIGDAQTFARGRDLAAWLGLVPRQATTGGKPRLLGITKRGSKYLRKMLIQGARAALPTLSRSNTRLGQWLRGLLARAHSNTVVVALAAKMARTVWALLRYGTTFEPRAIAI

SEQ ID NO: 460987 - protein, 401 aa, unidentified
MGRKEPAVKKIYEKVACGGMDVHYKFSTVTFRDSQGKVVCREVLDHRNWPELVRRFSQWPRGVPIAMEGSFGWGWICDLMMQHGLSPQLANSVKVAGMRKARGDVKTNKKDAELVSLLPLEKGDWWKVWMPPAEVRDRREWTRFRADLVQTQTRTKNRIHAIFHRHGIFHGFSDLFGAAGRRFLDAAVEEGAGLLSGGALWALRGQVRILTQTRNEIAAVLQETHKHLERTPVTHHLRQTIPGLGAVLTHVVVAETGNMARFGYNHRRFASYCLLAPRADDSGEPTEEPAVGRRLGHRGNRVLKWAFIEAARAAVRRGGIWRAMYDRYTQGGTKQRNRGYIKVARALAKLTVREWTKAVGGVEEGPSVPKTAAQRKHRRGRRGQGSTRPGTGTPKRPMAKV

SEQ ID NO: 460988 - protein, 428 aa, unidentified
MTVKDCTSVKEFWQLKKEIRGSKDHLIVGIDVAKDEHKAFFGTAYGKTLLKRLSFKNDIKGFEKLLTRVKEMKVKHSLNELVLGLEPTANYHKPLGDFLIKCGHMVVLVSGVSVKRNRELLDGRWDKHDTKDSANVADLISQGKCLYYEYAPVLFRDLRGLLSLKRRLKKQEHGFRIRIRNSLLAQYFPELDKYYSKWEREILSVVRWCLDPSVIAGLEYDQFVSLVSPGSKTIRQQGRLEWIWKKAVDSIGCDAGEAAEFEAKVMVEELRHIREVIKETDAKIKDLCVRFPEYDYLLTIPGFGPDISSKVLATIGNPFRFNSMSQVLKMAGMDLNASRSGKSSDTAVPVISKKGSAHLRYALYQSAFVASCKNKYFIKYYTNTLIGRERERGIKTKMRVKLAAKMLVIAWTLMKKREPFDAAYLKID

SEQ ID NO: 460989 - protein, 391 aa, unidentified
MPQPNDLSRSLTALDQDSTLIAVVELSQSSWLVGAIIPGVERCPAKKLEASESLLLGLLHRWRDEAAKAGHNIERIAVAFEAGRDGFWLARWLQARGVEAHVIHATSIAVSREHRRAKTDRLDAALLQRAFLGWLRGERGHCTMVAVPSLEEEDAKRPSREREALVSERTRIGNRMRSALARLGIRGFKPGLRKAAERLEQLRTPEGMPLLPNTVAELRRDLIRLRLINDQIAEIEAARVERLRQQPDAARHPMILLLARVVGVGIETADMLVQEVLSRQLRDRRAVARYGGLTGSPEESGARRREKGLARAGNARVRRGMLQFAWRFLMFQKDSALAQWYRARTADARGATRKTMIVALARKLLVALWKLVTTGEVPQGVVLRPAIAAAV

SEQ ID NO: 460990 - protein, 370 aa, unidentified
MKHTRFVGLDVHKDQISVAVAESGRGGALEYLGQITNDPAAISKLCARLARPGVTLSFCYEAGPCGYGLHRQLTSLGHRCEVVAPSLIPTKSGDRVKTDRRDATMLARLHRAGELTPVWVPDEAHEAMRDLIRLRSTVRQIVTRARQHLQGFLLRHGRSQGAARAWSVAYRRWLSTLAFDHPAQQITFQDYVDAVSDAERRLQRVEEQIHALLSEWTLRPVVEALQALRGIALINAVVLVSEVGDFTRFANPRQLMAYFGLVPGERSTGRTIRRGGITKTGNSHARRALVEGAWAYRMKPRVGRHKVDRIEALPKPVREIAWKAQVRLCARYRRLMAGGKTATVVNVAIAREMVGFVWAIACTIQSPKAA

SEQ ID NO: 460991 - protein, 338 aa, unidentified
MTVIGIDTHTASLAACAVDPRGAVLAEMTFPNTRAGHAGLAAWAADLDATARIGIEGSATYGAALARGLEAAGWAVAEVPPHLTRRERIRTRRRGKSDPGDALAIARVALTERELPPVRRADASRELQLLVEAREDLVAEMTRIRNRLHADLLVLLPGRHGALVGPRALARLARQLGRCTGVQAELARDRLRALRHAQLEVERLTARITARVAGHPLLAIPGVGPLTAAKLLGEVGEVRRLRSADAFAALAGVAPIPASSGQVQRMRLNRGGNRQLNRALFTVALVQRRCHPPAQAFVARKRAEGRTQREALRCLKRHLARVVFRALQRGTEFHRAAA

SEQ ID NO: 460992 - protein, 407 aa, unidentified
MTMWYAGIDWADQHHDAVVIDAGGKRVATTRVAHSAEGLGTLVTFLKGIGDVTDHPDHLACILETNRGLLITALLDAGLPVYPVNPKTVDRHRKPAGAKTDAIDAYLLARTGRSDLADLRRLTPDSPLIAELRVLTRDQDTLIQSQTRLVNQLTACLKAYYPVAVDLFGKLQQPTTLAFLQAFPTLEQARAASVEQITAVLKGAGHPTAEVKARQIHARVGQPQLAADPIVTRTKTRLMLTLVGQVRVLLPDIAAYDDEITRLFRLHSDSRAFASLPRAGTRLAPRLLAEWGDDRGRYIDAASVQALAGTSPVPFQSGNFAKAHRRYACNKPLRNALQQFAWQSTQKEVWALTYYQRKRREGKSHAMAVRALANQWVRIMYALWAKHETYDPSTFLAAQQAHAPRAA

SEQ ID NO: 460993 - protein, 341 aa, unidentified
MELFVGLDVSVRTTSVCVMDASGKLIRECKVESEPEAISELLHTIGGPYKRVGLEAGPLSQWLYSGLASSGFPVICVETRHMKAALSAQINKTDRNDARGIAQMMRVGLYKPVHVKTVRSQEIRMLLTARKFVQTKLLDAENNLRGLLRNFGLKVGAVTQVQFERRIVELLEQSPHLRLIIEPLLEVRRVLREQFQHLHKAMGRLAASDETCMLLMTAPGVGPMVALSFRAGVDEPARFGRSRSVPAHFGLTPSRYQSGEIDRDRGISKCGDAGIRWILVEAAGIVMRISKRSSPLKTWGLAVARRRGKEKATVAVARRLAVILHRMWVDNTPYRWEAKAA

SEQ ID NO: 460994 - protein, 353 aa, unidentified
MLIIGCDFHPGFQQVAIFDNQTGEYQERRLGHRAEAEQFYRSLAGQQVRVGMEACGHYPWFERLLAELGYELWLGDAAAIRAAVVRKQKTDRRDAEHLLDLLRHGRFPRIWVPSLEERDVRQLLVHRHKQVQARTRVKNQLQAMALSQGVQKRRKLWTAAGRAELEQLPMLPYAAQRRQQLLQALDGLEAEIEQLNRRVAEEVAQRPAAIRLQTHPGVGPVTALAMVLTLGPAERFASGKQVASYFGLIPSEHSSGGRQQLGHISKQGSSFLRFLLVEAGQTAARQDAELGRFYGRLAVRKHRALAKVAVARKLAVRLYLMLRQDWTYAQLCRAVVQASPSHPVVGRQNRALE

SEQ ID NO: 460995 - protein, 414 aa, unidentified
MFAVGVDVSNGRSTVAVLQTKTSALMKPFEIPHTAEGFASLAGKLAGLDGEVRIVMEHTGRYYESFARAMHSAGFFVSAINPLAIKNYQDGINIRKVKTDKADAMKIARFALDKWEILPQYTPMDTIRYDLKTMHRQFQLSSKTKTALSNNLVALLEQSYPGANRYFDSPARPDGSQKWVDYVDTFWHVDCVARVSQNAFVERYRKWYKRHGYNFSQQTAIDLHTDARQKFALVPKSDTCKLLVREAVSQLNAVSRTVETYRTEMDRLASQLPEYETVMAMTGVGKSMGPQLMAEIGDIRRFPHQKSIVGFAGTDPIKDDSGDKVSDSKPSSKRGSPHLRKTLFVIMSILLQLHPQDDPVYQFLDKKRSEGKPYYVYMTAGMTKFLRIYYGKVRDCLKEQGLWEQTPDAPGMAD

SEQ ID NO: 460996 - protein, 342 aa, unidentified
MYYIGLDVHKKTISYCVKDAAGKIHQEGKIGSTRRELDAWIKTLPQPRMIAMEATIFTGWIYDHLLPHAEKVKVAHPLMLRAIAAAKRKNDKIDASKIADCLRCDFLPECYMTSTEIRDRRRTLRYRGLLVKQMVQMKNRISGLLMETGASFNKQRLHKVGYFTELMAGNEEIDCVRPLLKLSRETINRSQKLDYALVSSLERDPLLAERLKRLRTVPGVGPITALTWVLEIGDVARFQSIKNAISYCGLCGAEKRSADKVVRTPISKQRNKHIQQVLVEAAKLAPRYSHELSLIYEKEKQRGNRNRATLAVARKMVAWMVAVERRKQDFVPAEERGGTVAA

SEQ ID NO: 460997 - protein, 314 aa, unidentified
MEAAVVVGIDVSKRTLEVALSNGGGFSVANDENGISELLARLRQSGAALVVLEASGGYESPAYLALWEAGVPTALINPRDAYHFAQANRQLAKTDQLDARGLCEFGLRMQPEPLPPPEAADEELKALAVRRRQVVKMLAAERTRVQQAPRSVRSSVKRIVRVLERELGAVDHQIEQRLRDNPRLAQRCAQLEQVPGLGPVTCAILVSRLPELGLLGPKQVAALVGVAPYDHQSGEWRGRSSIFGGRAEVRSALYMATLSAIRCNPVLRSFYRRLRSAGKPAKVAIIAAMRKLLVILNAMLKTNSPWRPPCAVVA

SEQ ID NO: 460998 - protein, 394 aa, unidentified
MVQSGRVVIGMDPHKRSVTIEVMAGDETILGGGRFATDPDGFTALREYVRAWPDRVWAIEGCNGIGRHVALRLLADGQDVVDVPPKMSARARVFATGQGRKTDATDAHSIALVGTRMAGLRPVVDDEQLAVLRTLVDRRRALGQEHTRMVAQLHHLLLELVPGGAKKFLSAAQAKEILSKVRPRDAAGKVRRRVAAELVGDLERTYKRKKAADKELTELVRATGTSLLDLTGIGPSGAARLLVEVGDITRFPDRAHFASWTGTAPIDASSGDHVRHRLSRGGNRQINRVLHIMATVQLRSPGIGRDYYDRKKADGKTSMEAMRCLKRRLSDVAYRAMLDDAVAHTTGARTGPGGHRGTSLTSSATGSHPHTGTSDQSLPGPVTHDPRTALPAAS

SEQ ID NO: 460999 - protein, 469 aa, unidentified
MGKGSGVSRSDRRRNARRERLRGLLPRDGAVLGIDLGEGKQALALVDHDVRVLWRRTARVRAHELGGLVDDAVAAAAGAGMAGVTVACEPTGPRWMQVQRLCAERGLALVCVQPLVSHIAREQEDYTPHKRDEPDAVLVARLAAELHCYVPEELDEQWALLRQLGRRREQLVRAATASVLRVRDFLSVAWPSAPEACKGPFESLTWLAAVAAAAGLGPARLAAAGEGEFLALVRDAAAGWGLRRPDRRIARRVLALAGDPGAVAWSRRGLFRRIADELGDLQRARRQLREIEADMTALLAALGLARLGDIPGLTLAGAAVILAEAGDPRRYETSSSLVKHAGLSPADNASGESEGASRISRRGRPSLRLAAWRAAFPMLAHNPVMREKYQAMVAAAEESARAAAGAARPGSAQAAQAARTVRAARAKALAACAASLLRWIYYMTVHGADWDPVAASGGRIAAQEPPQAA

SEQ ID NO: 461000 - protein, 338 aa, unidentified
MNHYAAIDVSLELSSVCIVDATGKVVKEAKVETHPDALVKFFKHLGLPLTLIGFEAGPLSQWLHAGLVSAGFETVLMETRHVKKALSASTVKTDRRDARGMAQLLRMGWFRPVHAKSAGSQEVRALLVARKQLQHKLIDIELSIRGILRGFGLKIGKVTKKDFEKRIRELVAAHVTLGQIAEAMLSARATLLTQFNKLHKVVLDIVRHDEVCRRLMTTPSVGPIVAITYRSALDDPRRITKSKNAGPLFGLTPSRYQSGETDVTGGITRVGDEMVRTALYEAANTLLSPRTRFSALKRWGLEVAKRRGLKRAKVAVARKLAVILHPTFRWTKTEGAQA

SEQ ID NO: 461001 - protein, 420 aa, unidentified
MERIVERPGALDVHKASVTACVRVWEGRKLIEHIAEFQTTVAGLLALGDWLAALGVRQVVMEATGVYWKPVWAVLEDSFDCMLVNARHVKQCPGRKTDVLDAQWLCQLLEAGLLKASFVPPKPIRTLRNLTRYRKTQIQDRQREAARLHKILEDTGIKLGCVATDILGKSGRDMLDALVAGTTDPNVLAELARGQLRKKIPALREALVGRFEDEHALVIGQILAHIDFLEEAIDRLSVDIEERMLPFAAQRDLLMSIPGVKQRVAEVLIAEIGVDMSVFPTPKHLASWAGVCPGNDQSAGKRRSGRTRKGSKWLRGTLTEGALAATKTKDCYYAAQYQRLRGRRGHSKAITAVGHSILTAAWHMLNNGELYRELGGDYFTRQDPDKATKRLVRQLEALGHIVTIQTATSTATAGTREAAA

SEQ ID NO: 461002 - protein, 355 aa, unidentified
MKYYTSTTEFNCGIDLHARQMYVCVMERQGKKLVHTNVKNNDFAFFLKLVQPYRHDLTVCCECMFGWYWLADACQAAGLTFVLAHALYVKAIHGGKNKNDRIDSEKLTHLLRSNLIPPSYVYPAQKRPLRAILRQRIFYVWRRAELLARIHSHQLAHNRVPAKQTRRVRDPWEEQLLAAEDHPLRQLALKNDLAMIRHFDHQIFQLEEELQRQTKQVASREYALLQTVPGIGETLGLTLLYEIGDIERFPTVKDFLSYCRLVKGTVASAGKIKGLRGAKLGNPYLRWTFGEAAVIAKRDHFKIRPLAQQLEARMGGNKFKANTVVAIKLARAVYFMLKNKTVFEPERLVAALARN

SEQ ID NO: 461003 - protein, 459 aa, unidentified
MELLHPRWAGIDISKRDGKVCVRIAGSGRRRAAETVTTWSSMTNQVLALRDHLTRERVTCVVLEAASDYWKPFYYLLEDASFEVMLVNPRHVKNLPGRKDVSDAAWLAQLGAHGLVRASFVPPEPIRHLRDLTRTRSAITRERAREVQRLEKLLEDSGIKLSSVASEIMGVSGRAMLEELIDGQRDPAQLAELAKRRLRSKIPALTEALTGRFSTHHAFLARMHLDLIDKHTEAIEQLTTRIEVVIEPFRWFRELVCTIPGISTGVADVLTAETGADMSRFPTPGHLASWAGTCPGSNESAGRVKSTKTRPANPYLKAALGTAALSVSQSKGTYLAARYRRIASRRAPIKAVVAIEHTMLTTIWHMAATGALYDDPGGDFYPAPRSQDADRKAATKTTTTDDQPARSFTSLLEHLATLTRNHLRVAGHDQSGFDLLAIPTPTGRRAFELLHAPIPLTLK

SEQ ID NO: 461004 - protein, 490 aa, unidentified
MNNSAASHTMNGPLPVPQVPRLSWTSPKRVNRRSPTPAVADAPKAERTPSCEGSCISSPGSRRPEPVRAARTMNTDWTQHNYFAALDWASDHHDVIVLNHHGAVQAEFRFAHTADGWAEFTVKMQPFTGTPITLETSSGPAVDQLLQRGWAIYPVAPTAAARYRERKVPSGTKTDRHDTWALADALRTDGHAWRPLRPQDEATAALRALCRDEIALIEQRTALVNQLQAALREYYPAALAAFDDWTAPHAWALVLQFPTPGQLQGAGKRKWEKYLHTQHLWRPQTAPERLKLFADAQALPASAAVTATKSLLAVSLAKILVTLQAQLNEYRRRITEAFQQHPDHDVFGSLPGAKAVLGPRLLAEIGSVRQEYPDADALMCQAGVSPVSYQSGKVSKCRLRRACNKVLRATIHLWANSSRLTCAWAQAYYQTKRDEGQSHASALRCLGKRWLKILWRLWQNNEAYDEAKYLAQLQRRGSLTWTKLQPTQTL

SEQ ID NO: 461005 - protein, 310 aa, unidentified
MFVGIDVSKDQLELAWRTPSGLKRERLAYQEAELQALVARLQAAQRIVVEATGGYERLLVATLAAAGLPVVVVNPRQVRDFARALGRLAKTDRIDAEVLALFGECIRPPLRSPLEAERAALAELVARRRQLLEMRQAERNRLETAHQAAVRASIAVVLQALEQELARLEQELEAQLRACGVWQEQFRLLCSVPGVGPVTAQVLLAELPELGRIGRRQVVKLVGLAPLNRDSGRWRGRRRIWGGRGSVRAALYMAALVGVRYNRRLRAFYQRLLARGKAKKVALVACMRKLLLWLHAIVKTGRPWQEALAC

SEQ ID NO: 461006 - protein, 365 aa, unidentified
MNTAPLVVGLDVHKKSIAVAVLKGQEGAHMENWTIANEPPEITKLVEGLAAKGSPHFCYEAGPCGYPVHRQITGLGWPCAVIAPGLTPVRPGDRVKTDRRDAEKLARLFRAGELTVIHVPTEAEEAVRDLIRAREDAVIDKLRARHRLMKFLLRQGRVYRETKSWGVAHREWINAQTFDLPASQMTLDTYRQTLTEMESRSGALDQRIETLAMAEPYKTPVSYLRCLKGIDTLSAMTLITEIHDFERFKRPTGFMSFTGLVSSEHSSGNRTFRGSITRVGNAHVRRILVEAAWHYRRPYTMCQALADRRRGCPIEVIHIAHRAEERLRRKFWHLVQRGKPTQTAVVACARELAGFVWAIAQHFPK

SEQ ID NO: 461007 - protein, 323 aa, unidentified
MSVFVGVDVAKKSFDIATPLPNGKTRTKAKLSNDPGGFKQFCDWLERHAEPGAWILMEATGTYHEALAEHCHNQGYRVCILNPAVIAKFADVELRRVKTDKADAKVIAAYGQQKAASLRQWEPEPPAQRRLRALVRRLDDLKEMRQMEQNRLDVAQDAVQQSIQDVIGHITEELEKTRKAIEQTIDDDPDLRKRRDLITSIDGLGDTTATLLLAELGDPLKYQSPSAIVAFSGLNPVVQQSGEFIGQSTISRTGASRLRAGLWMSGTVSIRHNPVVKAMAERLNSRHKAYKQIVCAAMRKLLHLVYGVVKSGIPFDPKIALAG

SEQ ID NO: 461008 - protein, 427 aa, unidentified
MPFAGLDVHKKEIEAVILDERGAVLLRDRFPSRREALQAFARRRLQDCRVALEATTNTWAVVGLLTPLVKEVVVSNPLRTRAIASAKIKTDKVDALVLAQLLRSDYLPRVWTPDEETRCMRQQTSERANLSADRTRLKNRIHAVLHQRLIEAPVKDLFSKAGLSWLRSLCLDAPGQRALERHMRQLAQVETEFQLLDEELAAHAYQHPQIKLLMSLPGVDYPVAESLLAVLGDIARFPHPDKAAAYFGLAPSTHQSGSHCYHGRITKQGSAHGRWMLIQAAQHVARHPGPLGVFFRRLARKKNRNVAVVATARKLVTIAWHMLKDNQPYRYAQPKTVEAKYSRLRVRVTGKKRKTGCKGQKRPASYGSGKRTRAVAALDEIYAVEGLPPLPARFAAGEQAMLERHRVAEHAAYIRQAHRIARKSLTS

SEQ ID NO: 461009 - protein, 389 aa, unidentified
MLFIGIDIASVKHDIAIVSNDGEVLSESFTIDNNIGGFKKLHMEIQSHTESLDVCIGMEETGIYHQNIAKFLFECGYTVFCTNANLTHNFIKSRSLRLTKTDKVDALHISNYVMLNYRNLNPYTPKVYNTNELKSLSRLRFNKLTNLSKSKSELKRLLMVAFPEFVTNFNPLSKWALHLLATYKSVDKISRIHKSTLIDIIKTKSDRDANADLLKSISKNTIGHSNKAIELEIQSCIQDINHFQSQIDDIDFELKDLMQQYKHITSIPGVGIVTGALIIGEIGDVKRFKHKSQLLAYAGCDPTIYQSGNYRSNNARLSKRGSKYLRSALFTSARVACVGNCKDNKFRDKYLLKRAQNKHHYSAVFHAAKNMLHSIHSMLITGEAFDYSK

SEQ ID NO: 461010 - protein, 346 aa, unidentified
MEHFAGLDVSVKETSVCIVDETGKIVREVRVASEPDALLEVLKSHAYRFNRIGLEAGPLSQWLFSALAEVGVPVVCVETRHMRAVLKAQINKTDRNDARGIAQMMRVGLYRPVHVKTLRSQKLRMLLTHRKLLQSKAIAIENDLRGTLRNFGLKVGMVGTVKFEARIGELVENVPDLAALVEPLLVVRRAIREQIAILHRRLLAIVRDDEVCRRLMTIPGVGPVVALTYRSTVDVPARFRNSKAVGAVFGLTPTQYQSGEIDRTGAISRCGDEMMRVMLYEAAHIMLVRSTKWSWLKAWAMQIARRRGMKKAIVALARRLAVIMHRIWVDGTEFRWTREQHAAAGA

SEQ ID NO: 461011 - protein, 446 aa, unidentified
MGQGRRPVSRGVARRNAKLKALRELVGKDRVIVAVDLASQRQAAVVCDHDSVVLARRMFRGSAWCVSEILAWAAVVAAKAGFAGVVLACEPTGHRWKPLVVTARAEKVPVVCVQPLLVRRAREGEDFTPSRPDFGDAVIIARLTAELRCYLPYLPGGPWARLRHLGARREGLVRRAVAAREQLRDLLECAWPAVLQTAADPLESLTWRAALGVSADPEVIAAMSEQQFLAALRDRLAVLGGKKAWRRIALAVRAAAAQPGGIAAERAAILERAGFAYQDWMSALAAQDDAEARMLAVLDELGLTSLVITIPGLSAVGAAVILAQAGDPSRYDSPRAWVKHAGLAPQANECGRYRGKTPHSGRGRPGLRTAAWQAVWGALRCNEVYATRHRMLTTRDANRLTNGQAHTALAAALLRQLHVVITRRVPWQAAIASGTSTPATVVMPAA

SEQ ID NO: 461012 - protein, 357 aa, unidentified
MLKRGLHYVGFDVHKKTIRVCVQNRSGDVVQETTIASCPSELVRWIKEMAPKKWIGGLEATVFSSWVYDTLKPYADDVLMGNPRRLVAISQAKHKSDHLDARTLANLLRSDYFPDCYVLPIEVRRLRNFLRYRNNLMRELVRFKNKTACLLMSAGITYNKRRLHGRRYFHSLVEREDLPPELKELLHLKRLPIDFFRVQARMVLRKLEKHPGLVRRLELLKTIPGIGPITALSWILEVWDPNRFPSVKHAHSYCGLCSGRKESAGKERRTPISKQRNAHLQWVLIEAAKVAKDRSERLHEIYDKVQRKKNHNAATIAVARKLVSYLMAVDKSGKPFAEKKKSPPADIPPNFVKFIER

SEQ ID NO: 461013 - protein, 412 aa, unidentified
MDVAYPRCCGLDIHKKLVVACLLTPGPDGRPHKEVRRFGAMTADLLALADWLGAAHCTPVAMESTGSYWHPIYNVLEEQFTLLLVNAQHIKAVPGRKTDVRDCEWIAELLRHGLLRPSFVPPRPHRELRELTRYRSALVQERSAEINRLQKTLEGANIKLAGVASNVLGKSGRAMLTALLAGIADPAVLAELAKGRLRAKRAELEQALTGRVGAHQGFLIAEQLGHIDELAERIARVSAEISERLRPVEQALERLDTIPGVGRHTAEVLLAELGSDLQAFPSAPQLASWAGMCPGNRESAGKHQSGKTRKGNPYVRAVLVEAAHAAGHTRDNYLSAQYHRLAGRRGTKKAAVAVGHSILVIVYHLLTRGTVYEELGGNYFDERDRQAVQRRLVRRLEELGYQVTLEPTSSVA

SEQ ID NO: 461014 - protein, 340 aa, unidentified
MSEVSIIGVDLAKRVFQVHGALPDGNVAFRKKLSSSQFMKFLAEQPPCLIAMEACATAHYWGREALGSGHEVRLIPPIYVKPFVKRQKNDAADAEAIVEAALRPTMRFVEVKSADQQSLGLLFRTRELLVRQRTQLINALRGHLAEYGIVVAIGARNVKVFQQALLDHGTRLPKTVLSISGVYFEQIAALTEKVTELEIALRRETARDGQATLLQTMPGIGPMSTAAIQAFAPPLENFARGRDFAAWLGLVPRQHSSGGKDRLGRISKIGQRDIRRLLIVGAMSIVNWASRKGSQDSWLMRLLESKPKMVVAVALANKMARRLWAMCVKKEVYEIPVLVA

SEQ ID NO: 461015 - protein, 388 aa, unidentified
MLLDHLADGPATIRTQFGAIFVSLELSRSNWLVTSLSPGTGEKLSKHGLPAGDVAGLLKLFAELKRKAQARTGESYPIVTIQEAGLDGFWLHRVLEQEGIESHVVDPASIATPRRRRRAKTDRLDGETLLRALLAYKRGEPRVCAMVVAPSPEEEDRRRLCRERRTLIDERIVHVNRIKGLLFAQGIAGYAPLRRDRRSQLEALRTGDGRALPSHLKTQISRELDRLELLIEQIKVVEAEQDALLAEASKPAGKAAAADPVTMLLALKGMGPSFAAVLWSEAFYRQFANRRQLAAYAGLAPTPWRSGSIEHEQGVSKAGNPRLRTTMIQLAWLWRRHQGQSALARWFEAHSQRGRKSAIVALARKLLVALWKYVTAGVVIEGAAMKSA

SEQ ID NO: 461016 - protein, 346 aa, unidentified
MDKFDSCGIEVSAQELVVALCRDGRAERLRSFANTAQGHAALCGFLASGPQRVRVALESTGLYGLDLAYALHREARIEVMVANPRAVRHFASALMQRSKNDRLDAVVLREFAARMPFQAWVAPSAHCFALCAVTRRLETLTEQCTAEKNRQHAASLSAAIPSAVRRDLQRSVRSIQRAIVRLTREAQRILEADPLLASSYRLLLTAKGIGPTSALRLLAETALLSEDLDVRQWVAYAGLDPREYQSGSSVHKRVRISKTGNRHLRRALYMPALVAVRHEPHLRAFYQHLLAHGKCKMQALVAAMRKLLHAVYAMLKHRQPYDGAKLYRLVENLPASSSTHCSAEAA

SEQ ID NO: 461017 - protein, 437 aa, unidentified
MRSIGLDIHRDFAEVAIAEGGELRSAGRIEMTPEALELFARSLGRSDQVALEVSGNAWEVARIIRPHVAKLVAVSPADTGIRAARAKTDRLDARALAKLLAAGQLDGVWVPDERTRAMRRRLGRRAQLVRVRTKAKNEIHAALMRRLVPKPKVSDLFGLKGRRWLEAVELPAYERETVDGCLRQLDFCDREIAEIEKVIAKEALASAEVRRLMTIPGMNIITASAFMAAIGEIGRFPDRRKLVGYLGLDPKVRESGTTAASRARISKQGSAAGRYALVEASWSVILAPGPMHAFFERIRARRGHQAAIVAVARKLACLCWCMLTRGEDYAYAQPSLTAKKIRRAEIRAGAPKRKGVKRGTWAANAAIREAERNLALQAEVAYKRTVSDWERTQRKTVSDWERAQSKKAGAGATPGRASGGPSSGQAARQDQAPEPAL

SEQ ID NO: 461018 - protein, 362 aa, unidentified
MNETYYIGFDVHKKSVSYCVKTASGEIIQEGQITARRDVLRIWAGAQPGPWQGAIEATLFSAWIYDTLKPYAQQLHMGHPARMKAISAGKKKSDRLDARTLADLLRCNLFPDCYVLSPEMRDLRRLLRYRHLVVRESVRMQNKMAGLLMETGTPFVKSKLHGKKYFIQLLQTLEEVPESVKDLLKMSRGALEMFEATQKRLVKRLLADPVLQARVERLGTIPAVGPITALTWALEIVDPFRFPSIGDAVSYCGLTGPFRSSADQVQRAPLSKQRNAWLQSTLIEAAKLAPRWNPQLAALHQKELERGHRNRATLQVARKLVAYLLAVDKSGQPFQMRSLPALARVLSTKKEWKAASVALQPV

SEQ ID NO: 461019 - protein, 353 aa, unidentified
MAIVADHYAFVTGVDTHARSHTLAIVDARSGQELGTRTFPSTPSGRGRAARWLQRRCGTSSGVLVAMEGTNSYGATLRELLSDGGYRVIEAPKPVRSLRRSQGKSDQLDAVRAAQAVLSLDVDRLTEVKSDPIAQALRILLTARAGMTRERTASINMLLALLRTIDLGIDARRTLSNQRIRMVAAWRCRAEATPTRIARGEASRLAKRILEIDHHLKDNLIELTLLVQDAAPELLAMPGVGPVSAAVILGSWSQPGRVRSEAALAALAGTCPLPASSGNTTRHRLNRSGDRNLNRAFHTITLVRMSHDERTKAYVQRRTLEGRTKKEIMRSLKRYVTRQVYRTLAARSRVDKL

SEQ ID NO: 461020 - protein, 335 aa, unidentified
MKKYVCFAGIDVSKSKLDVTFLTEPWEKKPQHFVVSNDSKGIQQILLLLKKSSINLKDTLFSFEDTGVYSLPLCFFLSQKQLDYWMIPAIEIKRSKGISRGKTDKSDSKDIAFYSCTHLHKLRPGSIPEKEITQLKLLFTEREKVLKALHLLESTMEASGFIPKEIIDSVKKINAAGIRSLQKMLVQLEEKIREIISSCEPIKQQENLICSIPGVGPQTALYLIIATKSFKAFENSRQLACYAGVAPFEYSSGSSIKGRTKVNHLADKKLKSLLYMCAMNAKKYDKELSKYYERKVEEGKPKMLVLNNISCKLLGRVFAVIKRETPFINIQKFAA

SEQ ID NO: 461021 - protein, 393 aa, unidentified
MSKTIVHHEGAASLKAAGHHSKQITSVIKLGLDIHLARHVVVAQYDHALPKPPRRFAPGEVVPWVESLRKAGHQVYVVYEACGFGFGLQRALEQAGATCYVIAPCKLDERGKGVKTDALDAAALCQRLSRYVGGNTKELAVIRVPSEEEEKLRHVHRQREALVRARTKLQAQGRGLLVNHGQAAPAHWWRGRTWRLLGELFPVWLIARLEVFRPILLALDTQIAALTKELEAAAPPDLPAGLGQLTSVVLQREVCDWSRFKNRRQVSSYTGLCPGEYSSGEKRVPGSVTKHGNPRVRAALVECAWRLVRFQPQYPPVKKRLGLLAKGARATGAARKKAIVAVARNLAVDLWRLSTGRCTAAQLGLHNLGSTTAQPEVKVRGEQTEPAVATTAA

SEQ ID NO: 461022 - protein, 340 aa, unidentified
MSLVLQSLLPYPDSCMGTSPHQQGWDTKMEKLSYGGIDVSKDRLDVVVLPEERFFSVSNDAAGWAELVARIRPLAVSAIGIEPSGGYERGIIRALLAAGLSVRRINPNKLRQFARARGVLAKNDRLDARLIAEYVAIMPTRVVQRDEAVEKLAEVVTMRRQLRDEHVTVENQAAHIEDAMLQRLNKRRLARLEADTRLLDKRLAEMVATNAALAQRYELLTSMPGVGPVLAFTLIALLPELGQMSRKQIAALVGLAPYDFDSGKLRGHRSIYGGRMPVRNVLYMAALSGCRYNPALKAFHKRLAAADKKSKVVIVAVMRKMITTLNAMLRDNVEWQPKSA

SEQ ID NO: 461023 - protein, 339 aa, unidentified
MKFAGCDLHKQTITICVVDQSRRVLERRTVRCGEERTILAFFERLGDFEAVVEATASYEWFVRLIEPVAHRVLLAHPKKLRVIAESTRKSDRLDAQILAEFLALDMIPTSYRATPRQHEHRRLVRQRGGVQRRLTSVKNRLRRILCDYNADRPSLFTVEGLAYLAQVPLSGADRFAVDQMVEELHFGRRQLLAVNARLKEFAEAAPLREQEARTLLRTIPGVGFVTTEVVLAELADIDRFGSQKRVVAYAGLSPGQRESAGKSRELHLEKNGSTLLRSTLVEAAWRLVQHSLRWRRIYERLKLRVRAKKAIVAVARRLLCLMTAILKTGQPYSLSQQPT

SEQ ID NO: 461024 - protein, 401 aa, unidentified
MESPIVSIDVSNGNSHYMCFIKNNKRFGKVKKIDHDIEGFKRLLEDIQKLEAETNEKVCAVFEATGVYTKPLERFLSKNSIKTYIINPLESARKRKEEIHNKKTDKLDPISISKVYYDKEEMMELKKKDETYNWLRKKNRLYEDQLNHLRKYKVIFQNQLSICFPGYLDLFKDGYSDIPMTILKKYPHPDLLKNKKAETVARYLEKNTCHTHKVSLEYALKIIEFAKKTYPGCEKDDVEVEIFKILLDKVIETQRECEKTLNEMITVASTLEEYRYISSIDGIGPNLAARIIAEIGDIEEFKSREALVAYAGLDPHIYQSGDQDGKHLKISKKGNKYLRCLLFLAVGCSIRGAKDNPVNRFYQKKKQQSNPLNSKAAKTACTAKLLKIIYGICKNKTTYER

SEQ ID NO: 461025 - protein, 408 aa, unidentified
MEVLYPRCCGLDVHRRTVVACVRLQEHRRKRTEVRTFGTTTSEILELHRWLAEACCTHVAMESTGVFWQPVFNLLEGSFVVILANAQHIKAVPGRKTDVKDCEWLADLLAHGLIRASFIPPAEVRALRELTRHRKSLIRDRARVINRIHKLLETANIKLGTVVTHLDGVTGRAVLKALAAGETDPGRFAAFARGSLRSKTALLSAALEGRFGVNHRFLLDQLLAQLDSGATLIAQCDARIFELARPLEPHLERLQTIVGIGRRSAEVIVSEIGVDMTRFASAAHLASWARVCPGTHESAGKRRPAAAGFGNQWLRTALVESAWAATRARRTYLSVQYRRISRRRGSKRAALAIAHRLLVIAYHVLRDEVPFANLGADYFDRLNAAKAMRYHLKRLTELGCNVSSVSPA

SEQ ID NO: 461026 - protein, 404 aa, unidentified
MNAVGIDVSKGKSTVAVLRPYGEVVISPFDVAHTGSDLRALADLIKKLPGETKVVMEATGNYFESIARYLHEQNIFVSVVNPVLISNFGGNTLRKPKTDKKDSVKIASYALTYWLDLKEYTPQEDLRKSLKLMNRQYQQSIKLKTMMNNNLISLLDLTFPGINKLFTSPSRESDGHEKWVDFVLEFSHCDMISKLTIKAFAKKYKKWSDKNSYHFTESSCEKIYAFAKDCVSSVSSDKAIVFSVVQAAKMLISATENCHAIQSEMNRVASKLPEYDTVMNMYGVGKAVGPQLMAEIGDPRRFHSRKAITAYFGYDSENNDSGQKTTRSNPMTKKGSGALRRTLFIIMQVLLQTKPQDNPVYDFLIKKKSEGKHYYSYINAAANKFLRICYARVKEVLNVSEQMT

SEQ ID NO: 461027 - protein, 432 aa, unidentified
MNNCLQVGIDFSQKGADFCLLFPDGQALDMHQHFANSQSGYEQARTYLLKALQRHAFDGLNVSGEATSYYWLPFFWQLAHDPQLAGFQPRLSLLNPRWVYWFKRSLSPDDKTDAKDPFYIAERTRTRPPKAAWTPQEDWLPLRFYTRLRFHLVQTLTREKNYALIHLFLQHSAYASQEPFSNWLGVTSRQVLSGELDFTDLAELPLEELADLLDEWSSHTLPNPQENARRLKQVAVESFSLSDPLATPIQRVLDATLQHIASLEMLIQQVEQWISAEVEAQHPEIPNLATVPGLGLTLAASIAAEIGGIERFFTGQKWDKRHKRWSPKNLRDVEDAVAKMAGLWWPRADSGDFQSEDRHLAKTGNRYLRYAIIQAANGMRRHIPAYTQFYTLKYRQATKHKHKRALVLTARKSVGLFVGLLHRNEAFRDKEA

SEQ ID NO: 461028 - protein, 385 aa, unidentified
MGTQTFIPRDYDVFAGLDVDKKSISVTFTDHQGFLKSLNMPYKVEHLVNYVRKHYPAKKVAFAYEAGPTGYGLYDGLEAQAYPCLIASPSMIPKAPGQRVKTNRLDSRGISENLRGGQLKGIHVPTPLYRELRHLTQLRDTLVSEMVRMKQRIKSLLLMEGLEFPPAPAGSQWSFLVKKKLRELPCSTTVRFKLDRLLDSLEFDEMQVLKATREIRRFCQTDLELSQCIEYLKTLPGIGWIVASQLLARVGDWRQIKNIRQLPAFLGLVPTENSTGERTERGSITHTGDGRLRSKLIQASWSAIRQDGELREFFRTVAKKHPRHLGSRVAIVAVAHKLSVRAAVVLMKQRPYEVRQKVQSAPLTQEETVPQGTTRRLAVPGETNS

SEQ ID NO: 461029 - protein, 419 aa, unidentified
MSFKIFKFNCCGLDVHKTWIYACIGITDSNNRTEYKQARFSSFSKGLHQLCVWLAKYNCNDVCMESTGKYWIPVFNILEQHKIRVTLSHPKYTKPMKGNKTDRKDAKWICDLYMCGMVKPSFIPPADIRELRDLVRYRFKLTCMITGEKNRAQNCLTVSNLKLDDVFSDVFGKSSRSITEQILQHPGEKFDVSPFVDSRCKTPIEEIQAAVDGNISKEQDVKLRQCLDHIDELQKHISEVEQEILRLSDKYEAALNLIRTVPGFDKNPMTAIQVLSEIGGDMPVFLTAKHLVSWAGCCPRNDKSDRKIKSTRISCTGSYFKPVLVQIANALIKSKKHFEFTTRYKRIKTRRGHKKAIIARCRMILTAIWHILTDLKPYTSDGFLESRPVKKEKVLTTSQALNLLKQRGYIIKDEPLAVS

SEQ ID NO: 461030 - protein, 386 aa, unidentified
MIEAVIERCAGIDVGKKFLVVCVMSGSLEAEPKTEIRKFGTIVAELEHLRDWLIQEGCSHAVMESTGSYWKPVFNILEDSVEVVLANAYDVQNRRGHKTDPNDSRWLAHLLRHGMIRPSFIPERAIRELRDLTRRRRQLVGERARERNRIQKILEDANVKLGDVLSDVLGLSGRLMIDALLEGRLQVEEIAQLAQRKAKQKIPDLIAALQRNRLTDHHRFLLRHALRHLDFLAEEIEALNIEIRSRLTTEQFRQKHALLQSIPGIQEEASAAILAEVGPNMAQFPSDAHLASWAGLCPGNHESAGVRKTGRTNRGNNWLRSILTQCAWAASNKKNSMLQSFYFRLSSRCGRKRAIVALGHRLLRVIYHVLLRDQPYQESNMRPLSP

SEQ ID NO: 461031 - protein, 400 aa, unidentified
MISVGVDVSKGKSTVCILKPYGEIVCSPFEVQHEEGEMEAFADLLSKLDGEIRVVMEATGIYHLPVLTFLNDKGYFVSVINPFAMKKYAKDNSIRGAKTDKLDSMMIANYGIEKWYKLKKYEGDEETYAELKLLGRRYRHYMELHVKALQELTHILDYVMPGIKKMFNSWNEANGKDKLSDFVEKFWHFDLITSMNLEEFTEEYLSWAKEKKYHRSRSKAEAVYELACNGIPTLSSNTPSTKMLVEEAVSVLRAVDSSLALILARMQALAKSLPEYSTVREMGGVGDVLAPKLIAEIGDVRRLHNAKALIAWAGIDPPPYESGQFVGSKRKITKRGSSTLRKVGYEVMRVLKSHPAPKDDAVYNYILKKESEGKSKKHAKIAGLNKFLRIYYARVIEVYQ

SEQ ID NO: 461032 - protein, 362 aa, unidentified
MEFFSGLDVGMDETAICVVDDKGKVALQTTVVTDPEAIKLALKPYLGRLRRVGHEAGSWSPWLHPELEKLGLPVVCLETQHVRAALKAQRNKTDKTDALGLAHLMRTGWFRQAHIKSEACYRLRLLLTHRRNLKRKFVDLENAIRHSLKAFGMRFKGCGRGGFAQAVREAVAGDPLVTELIEAMLNARAALWKEYLKLHEMVVKFVAGHELCRRLMQIPGVGPVAALSFVTAIDDPSRFKRSRDVAAYFGLTSRRWQSGKSIDVQGRISKAGDPDVRRALYEAASALLTRFKRKDKIKTWGLAIAKRTSHRKATVAVARKLAVVMHAMWVDGTFYCGDPATRAADVSARAAAKDKKLLGAYA

SEQ ID NO: 461033 - protein, 406 aa, unidentified
MELTPIYKRVIGLDVHQAKISACAISEQPDGSVCVVKREFGAYKRDRKALAEWAREFAPEVVVMESTGIYWKSPYAALEQVGIAAWVVNARHVKTVPGRKTDVADAQWLATLARAGLLRASFIPPADIRHLRLIARQRQKLGGMLASEKNRLHKLLADAGVRLNVLVSDIHGQTARAMIKSLIAGRTMSEILSHAGRLKASRAELFEALQPEELSEPHLFVLSEIMAHIEELEARMARFDQALLQGLSAWQPQLILLQTIPGIDLMGAAMLLVEIGTDMQSFGSAERLASWVGICPGNNESAGKRKSGKTRKGNAWVRRLLCEFAQAASRSRCALKEKFAALNIRKGHKKSIVALAHKMLRILFAMLKNNTPYQDRAVDYEALSVQRNAPRWIKMLIKHNLMPASA

SEQ ID NO: 461034 - protein, 346 aa, unidentified
MEQIIRIGMDTSKHIFQLHGVDAAERPVLRKRLGRKQMVEFFAKLPPTVIGIEACGASHHWARVLEQLGHQVKLIAPQLVKPYVTRNKNDGRDADGVCEAMSRPRMRFVPVKTAEQQAALMLSGIREQLIARRTQLSNTIRGYAAEFGITAANGLDKIEPLLAQIAQDESVPALARGLFAMQGRQYAQLQVELKAIEARLRAWHRANADSRRLAQIPGVGPVGATALVMKTPDPRAFPSGRHFAAWLGLTPKDHSTAGKTRLGKITRAGDERLRSVLVAGATAVIQQAKHGRGHPSPWLIALLKRKPPKLAAVALANKIARIAWKLMVTGESYDGVRMLGASAAAA

SEQ ID NO: 461035 - protein, 335 aa, unidentified
MYRVGIDVHDKLSMVHILDEHGKKHKAFTVKGRWPKVVEALKSQPGPMAVCFEASNGYGYLYDSLASVAKQVTVAHPGQLRLIFRSKRKCDRVDAEKLAKLLFLDTLPQVHVPRPFVRNWRRLITFRERLVVGRTQTMNRIRGLLRRLGIEAPKGLWTRAGMAWLAKVELPEEAAVERNLLTLELEQLRLHIKQVESQLNRIAKENGSVGLLMTIPGIGVRTAEAVVAWLDQAVRFKSNKAVGSYFGMVPCEDSSAGTQRLGHITKQGPGLVRRLIVEAAWQARRRSPTVRTYFERMTHGDPKRRKVAIVATGHYLLRCMQAMLRDSQPWREQET

SEQ ID NO: 461036 - protein, 324 aa, unidentified
MTDPALGIDIAKLKFNVCLINPQSKLKHKLFPNTATGFEQLLDWLSRQGVPRVHACMEATGTYGEALSLFLHQAGHTVSVVNPAAIKAFAGSRLSRTKTDRVDAELIARFCQAQAPLSWTPLPPEVRDLQALVRRLESLIEMRVMEENRLSSGVTVEVVRHSVEELLAHLNEQIKRTQKLIREHINSHPGLKRQSELLDSIPGVAETTAALLLAEITDITQYRSARQVAAYAGLVPRERQSGTSVRGRTRLSKIGNARLRRALYFPAITALRCSPFFQAWAKGLQERGKSKMSVICAVMRKLVHLAYGVLKNGKPFDPEWAKSA

SEQ ID NO: 461037 - protein, 420 aa, unidentified
MEMLWTGGEEIVSIIAVINRTMDLPMRKPRPRNRSQRKPNDLSRSLAVLDMDRTLIAVIEMSASTWLVAGIVPGVERQPLKKLEPDEHALLALLQRWRGEAERSGRTITSIAVAYEAGRDGFWLARWLLSQGIEAHVIHASSVAVSREHRRAKTDRLDTQMLKRAFLGWLRGERDHCKMAAIPTLAQEDARRPGRERESLAGEASRIVNRLKSALARLGVRKFNPKLKKASERLNDLRTPEGEPIPPNTLDEMKRDMERRQLICAQIRKIEQERLKHLVQAPDTGPHAMVRLLARVIGVGIETADTLVQEALSRHLRDRRAVARYGGLTGAPDSSGSINREKGLSRSGNARVRRCMIQLAWRFLRFQKDSALAQWFFHRTGNARGMRKTMIVALARKLLIALWRLVHEGVIPEGIVMRPA

SEQ ID NO: 461038 - protein, 369 aa, unidentified
MDVSIEKVINQTPNFMNYKLQTLAGENLFIGIDSHLKSWKISIYSDMLELKTFTQPAVSSKLMDYLHKHYPGANYHCVYEAGFSGFSVHRELTQMGANCIVTHPADVPTSDKERKSKSDKVDSRKLARGLKNGELKAIFIPDKLQEQDRALLRTRDRVIRNRTRVKNRIKSFLMYWGITLPEGFQGKTWSKDFLLWLKKVPLSSSCRSALNTYLAEVNHLSQSLGLLDQDIKLLSNSSRYASKVKLLMGIPSIGLTSAMILLTEIGDINRFKTFNALCCYFGLIPNTKSSGETERTGRMTKRGNRHLKYILIECAWTAMRKDPALLMSFKAAAVKTTPNKAIIKVARKLLNRIRFVLKSEEQYVIGVVQ

SEQ ID NO: 461039 - protein, 343 aa, unidentified
MDHFAGLDVSVKDTSVCIVDDAGRIVREVKVASEPAALLPVLKNAIYHFKRIGLEAGPLSQWLFSALAEADLPVVCVETRHMRAALKAQINKTDRNDARGIAQMMRVSLYRPVHVKTLRSQKLRMLLTHRKLLQSKAIAIENDLRGTLRNFGLKVGMVRAARFEARIKELVEHLPDLVALVEPLLVVRRVLRDQVAVLHRRLLATVRDDEVCRRLMTVPGVGPVVALTYRATVDVPARFRKSKSVGAVFGLTCSRDQSGERDRPGAISRCGDEMMRTMLYEAAQSMLVHSTRWSWLKAWAMQIARRRGMKRAIVALARRLAVIMHRIWIDGTEFKWTREVAAA

SEQ ID NO: 461040 - protein, 371 aa, unidentified
MLNQRKELNFEGQNIYIGIDVHLKSWTVTILTETMPHKTFTQPPQAQILSAYLNEHFPNADYYSAYEAGFCGFSAHYHLQECGINNIVINPSDVPTSQKEKWQKNDPVDSRKIARALRSKELIAIHVPDKKSLSDRSLIRMRSSLVKDMTRFKLRLKSLLYFYGIRFPKEFENSNTHWSKRFIKWLREDIVLDTSARQALDLFIKEVENQRILLLEVNKKIRHLCKTKTYKNNIDLLQSIPGIGITSAIVLMTHIETIDRFKNTDYLASYVGLIPNSHSSGESENKGEMTFRGQNHLKAILVESSWVAVRVDPALSLSYNTYIHRMQPNKAIIRIARKLLNRIYYVLKNQSQTDQMPFHDFQDNVAEELRE

SEQ ID NO: 461041 - protein, 341 aa, unidentified
MDKLDFVGLEVSKQELVVALQREGQRKARKTFANTPPGHQALIHHVSHPGRKVRVCLESTGLYGLDVALALHRAGLEVMVANPRAVRNFAKALMERSKNDQIDAGVLLEFAIRMPFQAWVAPRPAVLQLHALARRLEALTDRQTAEKGRLEAAQATDTLLPALRRDLERSLRSLRRALARLSGEAVKIIDQDPGLKLRFELLISVPGSIAAASAIRILAELAVLSEDLDVRQYVAYAGLDPRECTSGTSVHKPPHISKAGNAHLRRALYMPALVAIRHQPNLRAFYLHLRAQGKPKMVALVAVMRKLLHAIFGMFKHEQAFDGAKVYALPAPEISTKEVAA

SEQ ID NO: 461042 - protein, 359 aa, unidentified
MTSMAPDPRRRRVIIGVDTHKYVHVAVALDIIGGVIDSRSFAADSGGYEQLITWALSLGLKLTFAIEGTGSYGAGLTSAVRRRGVGTVEVMRTDRRDRRLRGKSDTLDAENAARAVLSGNATAIPKTNDGTVEMIRQVKIAKDLAVKARSAAIISLKTIIVTAAPELREQLQGLPRVALIERCAALRPGTLTSVLAATKHTLRATARRWVLLNTEVLAHEKILTELTKQVVPDLVTAHGIGPDTASEMLIVAGDNAARVRSEPAWARLLGVAPVPASSGLTNRHRLNRGGHRQANAALYRAVIVRMQFHEPTKAYVARRTAEGKTKREIIRCLKRLLAREIWTLMKPFREASVTTAMAA

SEQ ID NO: 461043 - protein, 323 aa, unidentified
MNKDIKYFGIDISHLVFDVTDSEGNYYQFKNNGSGFKKFSKLLDLDSHCVMEATGYYHYQLAYYLLESGIKVSVENPLAVKRFIQMKLSKIKTDKSDSRLICEYAQQVELKLWKGNSKDELECLQITRALAIYTKQSTMLKNKLHGEDVLGNPSKAVVRSLKRNLKQLNKEIETLENRLLILVKHTHQDLLTRLQTIPGIGRKTAIMLVVLTGGFERFTSASELCSYAGLTPVIRQSGSSVKGRARISKIGNQKLRNLLFMCSFNACKYNKACRDLYERIVAKGKSKKLALIAVCNKLLKQAFAIAKSGLIYDDTYRSTLVKN

SEQ ID NO: 461044 - protein, 412 aa, unidentified
MDVLYARCAGIDVHKKMVVACLITPDATGTPTKETRTYGTMTADLLEMMDWLVDAGCTHVAMESTGVFWKPLYNLMEGALEILVVNAAHMKNVPGRKTDVKDAEWIADLLRLGLLQASFIPDRPQRELRELTRYRTSLLQERSAEVNRLQKTLEGANIKLSSVATDIMGKSGRDMLAALVAGRTDAAALAQLARGKLREKLPQLEKALRGQFAAHQRFLVAQQLAHIDGLDDIIERVSAEIAERVRPFEREIEQVDTVTGIGRRTAEVLVAEVGTDLTRFRTHRHLASWAGLCPGNNESAGKHKGGKTRKGSPWLRAALIEAAKAAGRSKKTYLGAQYRRIAARRGAKRAAVAVAHSILVIVYHILTRHEPYHDLGVTYFDERDRQAVERRLVRRLQALGYDVSLQPTAPAA

SEQ ID NO: 461045 - protein, 328 aa, unidentified
MCGLDTDGSELANANQANDCQGIAQVAERFGRPVRAAIESCCGPADLAQELVSGAGWSVDRAHPGYVQRRKPNSDKTDGQDARLRADWERVGYRPRLWLAPRSICALRHLLRYRLPLTQQRRAAQLRRRAVLREQRCRAREGLKAWTKAWEPWVRDTAELSEPGRWLAQQHWRELARLATTIRKGEKRLQRLTATDVPVQRWQQQPGIGPVTAWTLRAEIGPLDRFRTGKQRARFGGLNPRHVSSGQRPADAGLIRAANPAWRTVLMEAAHRLVRYDSWWQQFAQRLRAAGQAGSVVAAAVANRWMRRLHQEMNPPGGEWAAAGGPAR

SEQ ID NO: 461046 - protein, 313 aa, unidentified
MTEHTIGIDISKSHLDAFRLEDETAQRFENSPRGFRALIKWLGAAQIARIVFEPTGPYHRAFEQALSGKFPLVKVNPFKARRFAEACGTRAKTDAVDARTLARMGAALEMEPDQPTSSKLLDLKDLQIARIGLIKERTRLRNRGHMQTNPVLKRQIKTRLALAERQITELDAEIAKQIAEDLYTARKSDILCSVPGLAPVSAAMIITFLPEIGTLERKQAGSLAGLAPYNRESGTWKGRAVIGGGRKTLRDALYMPALAAMRFNPDLKEKYAQLRAAGKPPKVAIVAVMRKLLETGNALVKANRLWTPKSPCA

SEQ ID NO: 461047 - protein, 593 aa, unidentified
MSPPVAPALQCIGVGIDTARYWHHATFFLEDLQPARAAFEFPENRAGYDQLRQAFAGLAQRHAGVHFCIRLDAAGQYAVNLEAFLRSLPWPMTLSVGEPKRNQRYREAISPKRKADPVDSACAARFALRERPAATATLPAAMHQLREVASRLAAQIRHSTRLVNQLHNLLARVFPELDMIVAHLPVQWVLELLNRYPTPARLARARLATLQAIPYADPDKVRQLHQAARTSIGTFDGDTAALLVRNLVQQLRAAQAATAELEKRLSADYQALPQPNHLHTIRGFGQATAAVLTAKIASIDRFATPGQLVGYFGVFPEEHASGADKHGQPHPRRQRMSRQGNDLVRKYLWMAAQTALLHNPPVRALYRRLRARGTRGDVALGHCMRKLLHLAFAVWKSGQPFDPNHYPWEPTKPAADTPTNSMPIAADQLPESAANKTAAGHNQGTGPEKQVVTAATSTVNLPAPSVKHSITLAPSSATPRQGLVDFAALRQKVRLAQALEHLGLLRDLKGSGPQRRGRCPVHQGPGTTGRSFSVQLDKNVFHCFHPPCGIKGNVLDLWAAVHRLPLVDAARHLAHTFRLDLDATTLRTEKRNP

SEQ ID NO: 461048 - protein, 362 aa, unidentified
MCKTFVHIFMQYTHHLGIDLHKDFGYWTLLNDDKEVLFKEKVLTKEESVKKAVARLGVLPEEVQCAIEPVSQWGWYSDILVDEGLKVKLVDVTKSKLIAGTKLKNDKVDSRILAELLRSNYLPEAYLAPKETRELRELLRWRIFLTRIRARVKNRITAIIFHHGLICPKSDMFGKSGRKWLEEQILSPFHSEERASLLHTLDALTPEITKASTFIEEKAESDEVTKILMTIPGIGHFTAMVMKAEIGTFERFPSPEKLACFAGLVASSYSSGGKLRFGRITKHGSPHLRWAMIEATNTVRPSWGHLYDFYHRIKEKKGGKVARVALARKMLTVAWILVKKKEPWVAQSFSGSFRQREAVISQ

SEQ ID NO: 461049 - protein, 369 aa, unidentified
MNNSTTVVGLDVHKESVVAAVLLYGHKEVTEKVSIENHPKAIEKLVNRVTRQGPAEFVYEAGPCGYQIQRQIAGLGHHCAVIAPSLTPVRPGDRVKTDKRDAVNLARFYRSGDLTEIHVPTCEEEAARDLPRAREDVLKDRLRARHRLSKFLLRQGRVYRETTTWGTAHRAWLRTQKFDWPTLQQTFEANMRAHDEAEARLETLEQQTQDLAQQPAYRMAVNCLRALKGIDTLGALTLVVEVHDFRRFSRASEFMSFTGLVGSENSSGEKVQRGSITKAGNAHIRRVLVEAAWSQRYPNVMSKQLAERRKDCPEEVIKIAKKAQARLHRKFLRMTSRNKLHQVTVVAVARELAGFVWSIGQHIPAAVTA

SEQ ID NO: 461050 - protein, 386 aa, unidentified
MKKNSIAKLQVSKSQLRRMAAKQRLTVGLDLGDRWSRYCILNEAGEKASEDQLPTTKAGLDSLFAKMAPCRIALEVGTHSPWVSRQLAGMGHEVIVANPRKVRLITQSVKKNDRMDAEQLARLARVDPQLLAPIRHRGAEAQGDLAVIRARAELVDCRTALINTARGLAKPMGERVKSCDADSVKESLADGLNEATQNAIRPLLKSVEEMTQQIGVYDKKIQEIEKRYPETKVLKQVNGVGTLIALTFILTLEDAERFEHSRDVGPYLGLTRKQRDSGDSQPELGISKAGDELMRRLLVQAAHCILRAGAPDSDLKAWGLTKVEAGAKTGSGKKGSKRRKKKAAVAVARKLAVLLHKLWVTGEVYDPQYNRKAVAAAQGKAKGTAA

SEQ ID NO: 461051 - protein, 388 aa, unidentified
MTYYVGVDIAKYTHFASIIDSNGTVIENPFSFANNEIGFKLLLAKLQNYPKSEMVIGYESTAHYHLNLHHFLDDSGYKTALINPILTKRLRSISIRNVKNDKVDSLTIALFLYSNYSKLNLSDNGIQELRVICNQVHELKQTKAKLYIQLTACLDLTFPEIKAAFFKGNLKSNAAHNLLKKYNTAKEISAITPTQLVKIISKNSKRFNKNRVESLVDLAKHSVGINSKSISIKIRQIIEQVELIERQIEDLLDVICNDEIVRDCALLQIPGMGYLQAANILSVIYSIERFDSPEQVLAYAGLDPIIRQSGLFNAKSTRMSKRGNSLLRYTLIWSALNCSKNSKTMSEYYLKKRNEGKSHYNALGHCARKLTNYIFWILTHPNDKFNLD

SEQ ID NO: 461052 - protein, 429 aa, unidentified
MGGCASSASTGIDAEEIEWFGGIDWASQTHQVCLVDAHGECLGERAVAHGGPGIEELCDWLITRTGATPEVIGVAIEMTQGPIVEALLERGFCVYGINPKQLDRFRDRFTVAGAKDDRRDAHVLGDSLRTDRHAFRRLSNDEPVIVKLREWSRMADDLQQERNRLASRMREQLWRYYPQLLELADDLAADWFLDLWSRAPTPAMAVRLRETTIERFVKAHRLRRWQASEVLSILKQKPLSVAPGVVEAASDHIRTLTVRIRLVNQQLKAAHRKLDELCAQLIPSEEDEPGQQCEQRDVVILRSMPGLGRIILAVLLAEVWQPLRRRDYHALRSLSGVAPVTRRSGKTRVVVRRYACNKRLANALYHWARLATQHDALSRRRYAALRRRGHSHGRALRTVADRLLSVACTLLEQQTLFDPTYEVRDAASG

SEQ ID NO: 461053 - protein, 362 aa, unidentified
MAKVRSWVGLDVHARSVLAVTIDGESGELRSRRLSGTTSEVVEFCSSLPGPTRVAYEAGPTGYGLARALEAGSVGCVVAAPGKIERPAADKVKTDQRDAERVLRLLMIDGLHPVRVPSGQEEALRDVVRAREAVRGDLMRARQRLSKLLLRHDVRYEDAASAWTIRHRSWLTALDLGERGAQVTLLEYLGAIDAIVIRRDALEKTIGELIPGSPWAQTVARLRCLRGIDTLSAVGLCAEIGDFERFAKAGQLMSYVGLTPTEDTSGEKRRQGAITKTGSRHARRLLVEAAWHYRRAPAKGQKLRRRQEGQAAHVIEISWQAQRRLHRVWQRLDTQRGKRRTIVAVAVARELAGFCWALANAD

SEQ ID NO: 461054 - protein, 332 aa, unidentified
MYLGIDVHKRYAQVAVMDENGHIVEEVRVENANLDDLAQRYAGAQAALEATSNYYHIHDTLSEHLDVTVAHPKELNQIAHSDKKTDRVDAKELARMVRLNSVPESYVPTDDIREARALVRGRQTLVENRTKYANKVHGLLSDHGITEDVKPLSVEGREFLRELSLPTPWNSLLESYLEVIETLTEEIHNLDETIEERAGSLKETQLLMTIPGVSYYTALTIYAELGEISRFDGDKEVVSYVGLNPVIRESGDSRIEGSISKRGSGRVRWLLVQAAHTAVHTCNDEYLSRFYNRLASRKNSQKAIVATARKILVSIYHMLDRGEVYDPPGVSA

SEQ ID NO: 461055 - protein, 355 aa, unidentified
MSQEKYIGMDVHQATISAAVMDAHGKLLMECLLETKADTIVEFIQGLHGTLSLTFEEGTSAAWLHDLLKPHVSRLVVCDPRKAALLKEGNKSDRIDAQKLAELLRTNQLKPVYHEEHGIRALKELARSYLTITKDVTRVMNRIKALYRSWAIPCSGAGVYAPRHRAEWLAKLAEPGVRVRAEHLYQQLDSLQPLRLQARGALLRESYQHPAVKLLRQIPSIGPIRAALLVALLQTPHRFRTKRQLWAYSGFAVETHDSGEYRCVRGKLQRNRERITVRGLNDNHNQDLKGLFKSAAISASTRPGPLRDFYVARVEKGMRPTMARLTLARKIATITLTMWKKGVGFDPQNLPRQAA

SEQ ID NO: 461056 - protein, 317 aa, unidentified
MAQAALSVGIDVSKCWLDVYRHPDGRRARLSNDAGGWKELLAWLDEAPIVRIGLEASGGYERAVAKQLAAAGYGVCVLDPARVRYYALAFGRLAKNDRIDARTIAEFTAHGERPSKVLDKERERLTELLNLREALSDNRTRLAQVAEHLRDKAFARSAATHLAKLDRDILRIERRVEDAIAASASFTRLSRLLRSAKGVGPVLAATLIARVPELGTLANRQIAALIGVAPFDDDSGPIKGKRHIRGGRARVRRVLYMATMVAATRHNPLLKAYYQRLIAAGKPPKVALVACMRKLLTILNTMVANGQTWRDMTTAAA

SEQ ID NO: 461057 - protein, 354 aa, unidentified
MKRTTKYVGLDVHQATTVSSVRDASGRVIARAVLPTEATALVEYFVGMRGRVHVAFEEGTQAQWLHDLLEPVVERVVVCDRRGEPRAGNKADRVDADRLSRLLLNGSLRAVYHGRTDRTTLRELTRAYRSLVEDATRVMQRLKSLFRARAIRARGRRVYAPQHRAQWLAQLTDRGARFRAEALLTQLDVLRALRPRAKAAMVVEARRDPAWDVLRSVPFLGPVRVALLLATLRTPWRFRAKRNLWGYGGLAVVTESSADHEFVAGRVVRRRRQPLTRGLNRNHNRVVKEVFKGAATAATGRPGALRDFYQARVARGMRPEMARLTLARKLAALTLRLWKTGEPYDPAKLTVQST

SEQ ID NO: 461058 - protein, 321 aa, unidentified
MQVIGNDMAKATFAVALPLSDGKYRTKAKFPNTTKGYTEFLAWRAKHAPDAAVGMEATGIYHEALARALVEAGVVVYVANPARVKAFGQAEGVRTKTDRSDAKLIARFFEAQRPEKLRPYVPPTPSEVKLRALVRRRDDLQEMLQMEQNRLEVADISVQQGINDVIRTLEDQIKQVRKAIQDHIDNDPDLRGRHELLTSIPGVGDTSSAQLLAFLGDLNKYSDVRQVVAHAGLNPAQRQSGNYEGKARISRVGDANFRKKLYMPALTGKTYNPTLKAFAERLSEKGKPFKVIMCALMRKLIHLVWGVLKSGRPFEPEVVLA

SEQ ID NO: 461059 - protein, 408 aa, unidentified
METIHPICCGLDVHQGSVSACLRRLNAQGAVSVEIRDFGTTVRELVALADWLVAEGCPIAAMESTGVYWKPVWNILSPLLDVWVVNAREVKQRRGKKSDRADAKWIAELVAHDLVQPSFVPPPRIGVLRDLVRMRTVLVQTRTQVKNRVLAVLEDTNVKLASVVSDPFGASGRKMMEALVNGERDCKVLSEMAMGVMRRKIPQLEAALQGGFTEHHAFLIRLGLESLDQCNRQIAELDSQIGRLMEPLQEEASRLTSIPGVGENAARVVLSEIGTDMSRFGSAERLASWAGLCPGNHESAGKRHSGKTRKGNRYLRRVMAECAWAASKTNTFLGRTFRRFQIRIGGKKAAVAVGHKILVIIFHLLNEERFYDDGRYDYINQREQIRQRNRALTTLQRLGYQVALTSAS

SEQ ID NO: 461060 - protein, 391 aa, unidentified
MPEDAPRPAQAAIRTDLGAIFVSLELSRRAWLITSLSPGGGEKMSKHLVPAGDVFGLLRRFAELRRKAAARTGRDFPVIVIQEAGLDGFWIHRVLQSEGIESHVVDAASILTSRRRRRAKTDRIDGETLVRTLMAFKRGEPRVCSMARAPTPQEEDRRRVCRERRTLVGERVTHVNRIKGLLFAQGVFGYEPLRKGRRERLEDLRTGDGQPLPMHLKAQIMRELDRLEVLLGQLKTVEAERDALLKPETDKATSPAAMLTRLKGIGPETAAVLWSEGLFRQFDNRRQVAAYAGLAPTPWQSGSIDHEQGVSKAGNPRLRTTMVELAWLWLQNQPTSALSLWFHERVRRLGGRMRKTTIVALARKLLIALWRYTTAGVVIEGAVMKAAPATT

SEQ ID NO: 461061 - protein, 412 aa, unidentified
MRRVIGIDTHRTFGEVVIWEDGRLRHVGRVDMTRTALEGFGKKLLATDEVVIEATGNCMAVSRVLTPFVKRVVIANPLQVKAIAHAHVKTDKVDAGTLASLYAAGYLPEIWTPDAATERRRRLVARRYQVVRHRTRIKNEVHSILYAHLIPRCPHADLFGRLGRTWLTSQPLPDDERAAIERHLRELDRLGDDLRVLDQEIAQSALDDAAIKRLITITGVNLTVAAGLVAAIGDIGRFSSPQKLVSYFGLNPRVRQSGLGAAHHGRISKVGRSHARAMLVEAAWATAKAPGPLHAFFVRIRARRGHQIAAVAVARKLAVLCWHMLTKQTDYHWARPALIANKRRAMELQAGRPQKKGNKRGSTYAYNVKALRDQEMRLAQQAEQSYENLVAHWQPRPAKKQARGRLKPAGLE

SEQ ID NO: 461062 - protein, 370 aa, unidentified
MKKPATLFVGLDDHKDSISVAYVPDDRAAEVNYVGRIGTRPADVDKLVRRLQAKADRLVFAYEAGPCGYGLYRQLTGHGLTCLVVAPSLIPRKPGDRVKTDRRDAVQLARLLRSGDLDSVYVPSIEDEALRDLCRAREAAVVTLKAAKFRLKSFLLRLGLHYTGRADWNDAHLRYLAKVVCPTPAQQIVFQESLRAVDEQVQRLKRLEAELADLVPAWRLAPVVHALQALRGVQDVVATTMVAEIGDLTRFDNPRQLAAFLGLVPSEDSSGDRRRQGPITKAGNGHARRALVEGAWAYQYPAKVSPAIQKRLEGLPKTVQDIAWKAQVRLCKRFRRLVARGKHPNVVVTAIARELAAFMWAIAKEVPITA

SEQ ID NO: 461063 - protein, 349 aa, unidentified
MLADEVDYVVGVDTHRDQHVLAVVVAGTGVVGARRSVRSSARGYAEALRFAQAAADGARVWAVEGVGHYGGGLARHLSGRGETVLEAGRGPRDQRRLQGKDDSLDAVRAARTALASETPALPRTGQQREALRLLLLARRSAVDVRRLALVQLRSVIVTCPDQLREELRGLPAGRLVERCSRLRRSPSRTPDELAATLVLRSLARRIQAATVEAAELEREILAHVRALAPQLLDEPGIGPIVAAQLIVSWSHHGRVRSEAAFARLAGVAPVPASSGQTTRHRLSRGGDRQLNRALHTVILHRRQHDPATKDYIARRVAEGKTRRDAVRLLKRYLARHLYRVLDNQGPLMT

SEQ ID NO: 461064 - protein, 416 aa, unidentified
MKKSTSIKPDTDSVLIGLDWAKDKHDFCLQSPCGQCETGQIEQDYTKLHDWLDYLSGRFEGRRLSICMEAGRDPLLWRLETHENADLFVVNTATAARYRKTFTPSGDKNDQRDAASILDLMQRHPEKVSPHYKADGTTRAMDQLSQARRHAVNRRTGVISSLREVLDLYYPVVGKLFDDLSSPMALNFLLRWPDPLSLGKTRNDTFEKFFHQQHSRSEQLIKKRLDMIAHAHCVTEDPVLLEVAQMRIADHINQIKTLNESIANYEGSIEKLFVDHEKAELFSNLPGAAKALAPRLLAAFCLVDPQDAVQMQTMIGIAPIRVQSGHSKRTFMRRQCPKFLRQSFHEFAGCSIKKSVWAKAFYDHKVKDKGWGTQAAKRALAFKWIRVLVACWKSNTPYNEMQYLAALQNRNSPFAL

SEQ ID NO: 461065 - protein, 372 aa, unidentified
MARYWGIDLHKEYVHACEWDPVNRQRRHFRFPNTRAGWPRFIDQHLGPDCRVAIEVTGNAFEVHDGISSHVEQVLLAHPNELKRLGSRRQTDRVDAERLAKMLALGTLPLVWVPPVVIREMRALLRHREALVIDRVRCINRAKGVLRRHGYPMAKQSDVRRYLAEHDPDLPEGERFILASLLRQLEALEGELRGVDAEIARRAQAVAEVRLLLSLTGMGLVGAATVWAVIGDPARFRSPRRVTRYGGLDPSVYQSGERSSQGHISKNGSPMLRRTLIQVAYQVARRDTGPLGRFFARKQRQLGTKRAAVALARKVLIVAWRMLRTQELYRGVEPARYQRKLKQLARTAATAGGSPSRSLVVAVKAEQAARVA

SEQ ID NO: 461066 - protein, 331 aa, unidentified
MKNKEFIGIDVSKNVLDIFILKLKFHFVVINDPSGFAKLLEICCIKLSCTKDKLFFCSENTGRYSRLLSIFFHESEIMYAMVPALDIKQSKGMTRGKSDKKDAKSIALYARRKKDELVPTKLHSAEVGQLRQLLALRDKLIKHRTAYKNAINDLNDCFYEGETEFIRETQLRLIKQLNIEINNVEQQIEHIIQVLPEWKTNYKLIQTVKGIGPVIAKYFIIYTENFTRFSDPKKFACFAGIDPFEYSSGSSIKGKTKLHPCANKHLKSLLNIAAMGAIQLKGEYKIYYQRRIQDGKNKMSTLNIIRNKLVTRVFAVVKRQTPYVDFSTFAA

SEQ ID NO: 461067 - protein, 359 aa, unidentified
METQSNKIDFSNQNIYVGFDVHLKSWKVTILTEKVAVKTFSHDPNPELLFQYLKRNFPGGIYYSAYEAGFCGYWIHNKLISLGVNNIVVNPADIPTTNKERVQKEDKRDSRKIARSLRNGDLKAIYVPSLKTLEDRGLLRARATMVKDLTRFKNRIKSFLHFHGINFPESFSKPQSHWSKRFIIWLESIELTEESGKITLSSLIHQSKNLRATILDLTKQIQKLSCTKTYQDEVILLRSLPGIGILTAMIILTELETILRFSNLDKLCCYIGLVPSTSSSGEEEKTGDITSRGHSVLRNAIIESSWTAIRHDPVLLKSYLDYCKRMDPNKAIVRIAKKLLSRIKFVLKNKQPYAFSWTN

SEQ ID NO: 461068 - protein, 394 aa, unidentified
MRNWYENVACGGMDVHYRFSDVTWRDGLGHVVRRERLDHRDRSRLRAQVAAWPKTASIVMEASFGWGWLSDEIEAAGLDVHLSNCYKVERMREARGGVKTNRKDADLLSLLPQEATTWWEVWRPPPQVRDRREWMRHRAGLVAAQTTVKNRIHALCHRHGIFYEFSDLFGGEGRRFLAEMGRDGRHAGGTLAAGALETLRGNLRLLMHLRSELATVAWHLRGLLNRDDLVRRLDGIPGFGLILSHTVAAEVGRFERFRNAKALASYACLAPRSDETGEARPGRAPLGRHLGSRGNLTLKWAFIEAAHAAVRHGGKWRAIWDRATKNGKKDRNRGYIKVARALATVVWVIGSHGVRYQERPPGRPGSRKAARRRQEDSRPGTGQPFHPMAQAPRA

SEQ ID NO: 461069 - protein, 329 aa, unidentified
METILHNCCGMDIHKDSVVACIIKSDPSTPAVNVKDEVSKEIKVFGTFPDDLAQLKAWLISEDCRHVAMESTGVYWQPIYEALEDAHGGEMDIKVVNARHMKNVPGKKTDIKDSEWIARLLRAGLLSGSFIPPQDIRELRQLTRYRKNIVQDVNTQKNRIEKTLQQAGFKLSTFLSDIFGVSGRNLIRVLIKQGRIFSSDVENETRRISKEKKAEIKRAINGQLTKKQRDFLQLQIAMLDSLLAHLETIEKSIAVLSEKWGNDIERLRTIPGIATTSATAIIGEIGTDMGKFPTAEHFCSWAGLVPGDNMSAGKKKVQELLLATHILRG

SEQ ID NO: 461070 - protein, 347 aa, unidentified
MLIIGCDFHPGFQQVAIFDNRTGEVEEKRLQHRAEAEQFYRSLAGQEVRVGMEACGHYPWFERLLAEMRFELWLGDAAKVRASVVRKQKTDRRDAEHLMHLLIEERFPRIWVPSLEVRDVRQLLVHRHKQVQARTRTKNQLQAMALSHGVQKQRKLWTQTGRTELEQLSLLPYAAERRKKLLEELDGLETEIRQLDQRVADEAGQRPEAALLMTHPGVGPVTSLAMVLTLGPAERFESAKQVGSYFGLIPSEASSGGKQRLGKISKQGSSFLRFLLVEAGQTAARYDPQLKRFYRRLATRKNRGVAKVAVARKLATRMYLMLREGWTYAQLNQAVMSVSPSHSVAGE

SEQ ID NO: 461071 - protein, 282 aa, unidentified
MTTITTIGLDLAKKVFQVHGVDAEGKVVVARKLRRKDVLAFFARLPSCLVGMEACGSAHYWAREVGKLGHIVKLMPPKYVKAYVKRGKTDAGDAAAICEAVTRPSMSFVPVKGLEQQGLYMLHSARSQLIGQRTQLINAVRGHLSELGIIAARGLLGLAELAAIVRDESDQRLPVTARAALLILVRQIETVSAEIAALDTALRKENKASELGPRLETIPSIGPVIASALRARVTDAALFKNGRQLSAWIGIVPENDSTGGKVRQNGLSKKGDRYLRSLMHEE

SEQ ID NO: 461072 - protein, 394 aa, unidentified
MLRRGLPGLAGQSLEQGGRVVGQHSRAFVGIDTSKLRNAVAVAEEGRGGDVRYLGEIDTAEAATRKLVVKLAAKYRQLTFCYEAGPTGYGLHRLIGKLGHDCIVAAPSLIPKKPGDRVKTNRRDAVGLAKLLRSGELTAVWVPDERHEAMRDLSRAREAARKDLKGKRQQVSSFMLRLGRHYPGKKTWGPAHMKWLMLQKLEHREQRIVLEELLGAVRQESERVERLEQAIRDAVPEWSLAEVVTALQAMRGIDLVAAVTVLAEIGDLSRFQTPRELMAYLGLVPSESSTGDTVNRGGITKAGNGRARRILVEAAWSYRYPPRVSREKQMKVAAAPRAVREIAWKAQMRLCGRFRSLTRKGKRPTVVATAIARELAAFIWAINREVVRSHAMAN

SEQ ID NO: 461073 - protein, 376 aa, unidentified
MLYVGIDVAKNKHDVTALNVQGKTVLKPLTFSNNKAGFELLDLSLRQLNQDCLIALEDTGHYAFNLLNFLHEQGYKVYTYNPLLIKKFAKSLSLRKTKTDKKDAHGIALKLLSDPNREQFQHDNRQVDLKILARHIHRLKKKQSDWKVQYTRCLDIIFPELDKIVGKHSEYTYQLLTRYPNPQKRIEAGFDKLIEIKRLTASKIQDILSVAPRSIGTTSPAREFEIIEIIKHYKRLIDKAETCVNDLMAEFNSVITTVTGIGGRLGAVILAEIRNIHAFDNPAQLQAFAGLDSSIYQSGQIDLAGRMIKRGSPHLRWALIQAAKACARFSPAFKAYLKTKLEQGKHYNVAIIHLAKKLIRTLFYILKKSCHLTNKK

SEQ ID NO: 461074 - protein, 387 aa, unidentified
MYFVGIDISKFKHDCAIVDELGDVITPSWSFQNDCEGFSLLRELLDVLDGEKKIGLEATGHYGQNLKLFLENSGFSFMEFNPLLVNRFVHSKSLRKTKTDSIDALMIAQYLMTVEYKPYPPSFYTLEKLKSLTRFRDSLIRQRSKQLVELTNILDKVFPEFKPFFKGRFSATALYILSHYASPEKISNMNSKSYESLRRLSRGKFSMVDFVELKTLARNTVGSTSDYLLQEMEITIDIYNQLQSKVEEIEQQINDCVLGLDPPMLTIPGIGVSSAAVILSEFGDFSKFKSPSKLLSFAGMEPGYFQSGTSESTGKMVKHGSSHLRYAMMNCAQTVINNEPTFAAYYAKKRAEGKEHRVALTHVAKKLLRVIYTLQTKELSYNPDLVR

SEQ ID NO: 461075 - protein, 347 aa, unidentified
MKHYAGIDVSLNSSSVCVVDESGKIVREVKVASEPVVLIHCIKSLGVSVERIGLEAGPLSQWLYGALRESGLPVELLETRHVKAALSVMPVKTDRNDARGLAQLMRLGWFRPVHCKSMAAQEVRALLTARKLVQSKLYDIEMSLRGILRGFGLKVGPTTSRSFAARINHLAAGHPSLEMVAQALLSTHAAALCAFKDLEKNVRQISRADARVRLLMSTPGVGPLVALTYVSAIDDPKRFTSSKRVGAHFGLTPKKYQSGETDISGRISKIGDSTVRAVLYEAAHIILTRPIHGGALKSWAMRLAKRAGMKKAKVALARKLAVVLHRMWVSASTFDFEKANGCMRAAA

SEQ ID NO: 461076 - protein, 336 aa, unidentified
MNFIGIDVSAENFAASIFSSVNKPIISEEGFDNNPSGFENFLSWLQKHGILPEYSVICMEATGVYGENLSYWLVARGFKTVIEHPLKVKRAFLSKGHKTDKIDSKKIAEYAYRHVDKLKFWTPPEKIVEQIKVLLSTREQFVKQRTANNNALKALKRKKIQTPLANRLYQQTINRLDKQIEQIEKELRNLIDKDSFFKKTVNNLEAIPGVGLLLTANFLVATNGFTTEMATNYKKAAAFLGVCPYQYESGTSKYRNPTSVKYGPSRMRKLLHLASRSNMAHNSSFCLYASIKSSQGKNNRIILNNMCNKLLKIMCAIIRTGNPYVYNHVSKHPKFA

SEQ ID NO: 461077 - protein, 348 aa, unidentified
MLHAGLDLSRRRLDVCLLAEDGERVEVGVALPDAGGLAELVERVRERYGPQPVRAAIESMNGARFVHDRLERLGWEVEVADAVKVKGLAPLACKTDRIDAWVLAELSRRDLVPAIWLPSFEMRQERERARWRLFLVRKRTALKNRVHAQLLAFGHPCPVSDLFGRRGRVLLEQLAFPEPWRANVLAAVAMIEQLDCEVAAIEKELQQFGADHRYVPLLRTVPGIGWVLSYTIASEIGDIGRFSSPTKLTGYTGLCPRVHQSGTTDRRGHLSHAGPRYLRWALVEAAVHACHRDPFRDRYERNKRRLGKQRGAKVAQVDVARRISDAIWHMLTRNEPFAPASAKDTLAA

SEQ ID NO: 461078 - protein, 365 aa, unidentified
MQKISTMRTSGKNIFEGQLTIGVDLGDRSSAYCVLNEAGEIVLEHKLATTPEAMKQVFGSMPRCRIAMETGTHSPWVSRLLTALGHEVIVGHAQKVRLITKSQRKDDRLDARTLARLARIDPELLSPVKHRSAQAQLHLTEIRARAVLVSARTALVNAARGLVKSYGERLRKCGTQQFRRETTSGLSTGLREALEPLLREVESLNERIQEYDRRIEKMAKQTYPETALLKQVKGVGDLIATAYVLTIEDPHRFRKSRDAGCFVGLQPGRRNSGESEPQMRISKEGDEYLRTLLVQGAHYILGPFGEDSDLRRWGQKLAARGGKNAKKRAVVAVARKLAVLLHRLWVNGEVYEPLHNSQREVQAAA

SEQ ID NO: 461079 - protein, 423 aa, unidentified
MRNDDIDVWLGLDVGKQSHHACALDRHGKRIVDKPLGQDEAQIRELLACLGGHGNVLLVVDQPNTIGSLPLAVARDMGVAVGYLPRSAMRKAAQLLPGDAKTDARDAYVVAFTALHMPDTLRDAGSDDETMARLKVLAGFDDDLAFECNRQTDRLRSLPPRIHPAFERALKGDRITRDTTLALLEHYGGPTGMRRSGRTRVGKWIKSAGLRRCDGIIDDLFDAIGQQNVTVAGTQTVEEIVPVPSSHIRQLREQREQLADKIETLLENHPLLTVLTSMPAIAVRTASQILLAISGDITRFNSAAHLAAYAGIAPVTRRSGTSIRGEPRHGEATNASRTPYGTPPSSPRSTIPKATPTTNANATKENATTQPSSASHDDAATSSTACSRTQPSTSPCTSQPEPPAATGRAKHALKTTHNQADTT

SEQ ID NO: 461080 - protein, 315 aa, unidentified
MANLTKSKTVVNVGVDVGKQYLDVCIYEKNLYWREDNTVAGTKRLLKRLSHYHVERLVMEATGRYEFELAQLAYARKLPVCIVKPLLIRRYAGANDQLAKTDKLDAQVIAEFAATLKPKVTPEKSKNLIAIRDLIARRRQLVNLRTQENNRRGIMGKVLAVSCRRIIRHLNAEIERIEKQLARHVSEQAEWTEKQSRLKTVPGVGDTLVYTLLADLPELGELNNREISKLVGVAPINRDSGRMRGKRRIQGGRANIRTVLYMATLSATRCNPVIKAFYRKLVAQGKHKKVALTACMRKFIIILNTMEKNKTEWAF

SEQ ID NO: 461081 - protein, 363 aa, unidentified
MKKLQLVAMGDQEAEAAGKPPAGTAVKIAIDLSRTKWVYAIRWGGQERRRLTTPAQLKHLQALVAQYPNCPVRIAYEACGFGYDIAWWAQEQNLDITVIAPSRMERTPGLQVKTDRLDASKMARKLELGELRSIYIPRRTAHNERQVARSYGQVLKERKRAQTRIRSLMQEHGRLGPPPQAHWKTYNDWLQAQVLDEHLGLCVGAMLAIRSMADIQARALKARMLAIAGSERYARCVEALCTQPGIGPLSAIRFILEIGDVRRFANADSIAHYLGLTPSEYSSGPTVQRGPILKCGPGTLRACMVQCAWVAVRSKGGDPPLREMYERLVERTGKKRAIVAVTRRLVRRCRARWLELEEGAAAA

SEQ ID NO: 461082 - protein, 341 aa, unidentified
MYSIGLDISKATISIHISLNSLDLEIKNTPKAIKSFYSKLKKLYKKELEKVVFVYEPTGSYSALLTKFCANKNIKSFIINPKQSSNFAKALGYRSKSDKIDAKMLSLCLSIAKPSEIRVPVINATAEDIKELMSYYMFTVKQRVAVQNHHEALNVKEGNSYALKELKKRVKDMKQKEDEIIQKIDEVIKEDDKLLNDYENIKTIPGIGTITAIVLLHLFIKYPQANQKQIVSLVGLDPVIKESGTSLNTKPKISKSGSRLYRGVLFMATMVSIKFNEQMRDFYDRLKANGKHSTVAQIAVMRKLVVIAHSLYKNNSKYDAKVYQIACGIQCNKSEIEEVLV

SEQ ID NO: 461083 - protein, 347 aa, unidentified
MKEQNNRSEFTIGLDLGERRHRFCALNGKGEVVEEGTLGNDRVSLGRLSARYRGALAVMEAGAHSPWISRYLERLGWEVIVSNPRKVRAIYQHERKSDRRDALMLARIGRMDRALLYPVRHGSEEAQQDLLRIKLRDSLVRARVALINSVRFSLKSLGYAVSNPSSERFHKVAMETLPEVVREMIAPSVQALAELSGRIAVLEHEISLLARTKYPQTLWLQQVPGVGAITALYFVLKIEDPKRFKHVRDVGAYTGLCPRRDQSGESDPQLRISKRGDAYLRRLLVSAAQYILGPFGPQSALREYGLRLAADGTTRAKKRVVVAVARKLCVLLLSLWKNQTPYQPYPA

SEQ ID NO: 461084 - protein, 346 aa, unidentified
MDHYAGIDVSLECSSVCVVDAKGEIVREAKVASEPEALIAWFHSLGSDLARIGLEAGPLSQWLYAAMKKAGLAVELLETRHVSDAFKAMPVKSDRNDARNIAQLMRLGWFRPVHCKSMSAQETRAILTARKLIQTKLQDIENSVRGILRGFGLKVGKTTKRSFAARINELVAGHPALKTIAAATLAVHTVLLREFNGFEKQVRAMSLLDAKAKLLMSTPAVGPIISLTYASAIDDPARFTSSKRAGPLFGLTPKKYQSGETDYSGRISKNGDASVREALYEAAHIILTKPIKGCAQLKSWAMRIAKRAGMNKAKVALARKLAVIMLRMLKDNVPFNSTAKATAAAV

SEQ ID NO: 461085 - protein, 389 aa, unidentified
MLLDHPFDGPTAIRTHIAAIFISLELSRSNWLVTSLSPGKGERMSRHSVAAGDTAELLALFAELRRKAEVRTGQSYPIVTIQEAGLDGFWLHRVLQQNGIESHVVDPASIATPRRRRRAKTDRLDGETLLRALLAYKRGEPRVCAMVVAPSPEEEDRRRLCRERRTLIEERITHVNRIKGLLFAQGISDYAPLRRDRRARLEALRTGDGRELPSHLKAQLGRALDRIELLVDQIKAVEAGQEALLAAARKPASEEAVPDPVTMLLALKGMGANFAAVLWSEAFYRQFANRRQVAAYAGLAATPWQSGGIRHEQGVSKAGNPRLRTTMIQLAWLWIRHQPQSALTRWFKERSQQGRKRAIVALARKLLVALWKYVTQGVVIEGAVMKPAA

SEQ ID NO: 461086 - protein, 463 aa, unidentified
MKNKKSKGRPTRRSQPLLERVNLNAAGIDCGSAMHYVAVPPDRDPEPVRNFKTFTDDLNRLADWLVACRITSVAMEATGVYWIPIYEILEARGLEVLLVNARHVKNVPGRKSDVTDCEWLRELHSVGLLRGSFRPTAEIAALRSYLRHRETLIQSAATTINRMQKALVQMNLQLHVVISDIAGATGLRILRDIVDGQTDPRHLATHRDARCQASEAEIAAALTGHYRAEHLFVLRQNLELYDALQRQIESCDTQIEAHLKALATSATPPAAPLTASRSRRKARSNEPHFDVRTSLHQLSGVDLSQIDGIGPYSALRLISEIGTDMSRWRTEHHFTSWLTLAPDNKVSGGRLLSSRTRPSANRAAAVLRMAAMSLGRTQTALGAFYRRLAYRVGKAKAITATARKLAILVYRCLKGELVYQDPGAAEYDRKHRANVLRHLRQRAAALGFHLVNGQTGEILEGVS

SEQ ID NO: 461087 - protein, 353 aa, unidentified
MSRILAIDLGKFMSVTCLLDTTTNKTEFWTMSTDRRYLKVVLKRYKPDLVVIESCTIAGWVHDVCTSQGHKLLICNPNQEAWKWKHIKRKTDRDDALKIAKLAALDQLIPVYMPSERQREYRRLVKYRTVVRARGVRIKNNIRAIFQRRGLAIVAGRNAWALRRLDQIEQHRKPLCECGKDELWRGEVDLELNELMRLRRQHDEVEKKLRELSTEDKRVQLLETIPGVGRRTAEVVVACLDDPRRFTNARQVSSYAGLVPRRYQSGLMDRQGRIHKRGPRLLRTALVEAAWIMQRYNPWAKAVYQRICANQKNRKKKAIVAVARKLLVRCWAMLLHETPWNGAAPMVSEAASA

SEQ ID NO: 461088 - protein, 319 aa, unidentified
MNPEEPSFVGVDVAKEWLDVAVWPSGERWRVAYDERELEALVTRLQELPAALVVLEASGGLELRLLSVLGAAPLPVARVNPRQVRDFARATGQLAKTDRLDAEVLARFAAQVRPAVRALPSPEVEALRALVTRRRQLVGMLTAEQQRLARAEATPASVRSQLEIHIGWLREQLRGLDDELRSVLHASAGWRARDDRLRSVPGVGPVVSATLLAELPELGTLGRKQIAALVGVAPFNRDSGRLRGRRTTWGGRASVRSALYLATLVATRCNPVIRAQYERLVAAGKLKKVALVACMRKLLVILNAIVRHQSTWSPELAPA

SEQ ID NO: 461089 - protein, 408 aa, unidentified
MINDAINTSRVIGFDAHPDSFTAAILSGPTPAAAVVEKMFNKVPMNRLLQWAKKNTLDSDIIVLEASGNSFHIARSLRSAGREASVLESRHIGKLKEAHANNDKISAIRIGKAYLAGTAKIVWIPDETTQERRDTFHTYSKAVKRSTQVTNRIKSYLSDHGVRLKSKTHILNQKESIMQACQWSPRERLIIEGMLMDLQNAQSQRAHWNHFMAQEVLHDPLLLSLTRLTGVREIVAYSIGAIIGDINRFASPKKLVAYIGLNPAFDKSGEGEWNGGIKGHGRRDLRSHLIEAAQSILQSNHDLGRWGKKLMARKGSRNLAVAAVARKLAVAIWYLMKGLWSTVEEVEAGMKLKIGKMIGKMGKEGLSLIGKTRKEFKEEIEQNLKKGREYILDRARSSPLKSSLKEAS

SEQ ID NO: 461090 - protein, 340 aa, unidentified
MNEITTIGIDLAKNVFQVHGVDARGAVVVRRQLRRRAVLRYFETLPACLIGMEACATAHYWGRELRAMGHEVRLIPPAYVKPYVKRNKNDAADAEAICEAVTRPSMRFVGIKTVEKQSILSVHRARDLLVRQRTMLINSLRGLMAEFGVAEAQGRRGATRLIKIVGDETDERVPALARRVLGSLVAQLHGTACQVRILDREIAAWHRQSDVSRRLATIPGIGPVTATAIAASVPDPSVFTSARQFSAWLGLVPRQYSTGGKLRLGGISKRGDGYLRRLLMTGATAALQHSKTVKTQPWVLGLLQRRPRKLVAVALANKMARIAWAVMSQRTRYRPMPAAS

SEQ ID NO: 461091 - protein, 407 aa, unidentified
MDVIHQRCAGLDVHKDEVVACARVVSGRKILRTSARFPTTTRGLGTLADWLGTHECEIVALEATGVYWKPVWHILEAQFTLVLANPGHVRAIPGRKSDMNDAAWLADLVAHGLIRGSFVPPAPIQELRDLTRTRKQLGRQIAQHSLRLQKTLEDANLKIASFVSDLLGVSGRAILRGLIEGDTSPERLLARTTGLLRAEPAQLQAALEGHVREHHRFLLRLHLTQIEAIEDGVRTLDARLETLLRPFQTVIARLSTIPGVGALVAHTVIAEIGADVQRFATAGHLRSWVGLCPRLDESAGKRRSTRLRHGAPWLKTVLIQAAWAAVRRRDAYPHAQFQRLKAKRGPKKAIVAVAASLLTAVYFILRDEVPYRDLGVHYFDRHDAARAAARLTKRLEALGFKVALSAA

SEQ ID NO: 461092 - protein, 479 aa, unidentified
MEEAVVKSKQRTKATREQRYRERNPRWTPLLERIQPDAAGIDCGAEHHYVAVPPDRDERPVRAFRTFTADLNQLADWLIQCRTRTVAMESTGVYWIPLFEILEARGLEVVLVNARHLRNVRGRKSDVTDCEWLRELHSVGLLNPSFRPAAEIVVLRSYLRQRANLVEEATSHIQGMQKSLTQMNLILHVVLSDITGTTGLKIIQSILNGERDPATLATHRDDRCKASAQEMIAALTGNYRAEHLFTLKQNFDAYQFDCRQIAECDSAIQQLMVTLAAHRPSPTTELPSARRPTKPKRHDPAFDIRTPLHRLAGGADLSQIDGIGPHAALQLVAEIGTDMSRWPSAAHFTSWLSLAPNNKISGGRLLSSRTQPSANRAAAVLRRCAMSLMRTSTALGAFYRRLAARTGKPTAITATARKLAILIYRVLRGDISYSDPGAETYAQLHRSRLLKSLCKRAHQLGHALVDLSTGEILPPHEVS

SEQ ID NO: 461093 - protein, 312 aa, unidentified
MDAIVVGIDVSKDRLDVVIRPTGESFVFKRTAAGIEDLVARLKAQSPALVAIEATGGFEAVVAAGLAGAGLPVVVVNPAQVRAFARALGKRAKTDPIDAVVIAHFAEATKPQLRQIPDEMTRLLAELVARRRQIVDMIAAEGQRAGRMSDHRLTRSIGRLRKALEKELDELDRLIDDHMRGSAVWVETEKLLVSVPGVGKTIARTLIADLPELGSLDRRQIAALVGLAPWTRQSGQWRGKSFIGGGRKSVRSSLFVGAMVAARYNPQLKRFRDRLVAAGKPKLLALVAVARKLITILNAILRDRRPWQPLAA

SEQ ID NO: 461094 - protein, 428 aa, unidentified
MKYNTQNAKIKSITEKTLIVGIDVGSETHFARAFDWRNYEYSKKPLEFSNTEAGFMTLKAWMADFAEKYGKNVVIPGMEPTGHYWFNLGAYLQDNGMKPVHVNPHHVKKSKELDDNNPNKNDRKDPKTIAALVNEGRFSYPYIPTGIYAEIRSLSNLRLQTQEEITRIKNRIARWFSIYFPEIKDVYRNPDSVSGLMILKEAPLPQDIIKLGVYGIDKIWRDAKVRAAGLKRAKTLLTAAEHSIGSQEAPDSARIELKNLLNDYEIYKNREEDLMSLTEEKLSEIPHIDKLLEIKGVGLKTVSGFVAEVGDITRFDNPKQLQKLAGYAIVECSSGKHKGESHISYRGRKRLRYVLYEAAISLIARNEEFKEVHRYYRTRKENPLKKMQSVIAVACKVLRIFYTILTKGVTYDGAKMMQDIKRPQMLAA

SEQ ID NO: 461095 - protein, 429 aa, unidentified
MNYTQNEKIEQVTDSTIVVGVDIGSQIHYARAFDNRGRELTKRVFSFHNDLEGFNSFNLWAETLKSENKKTAVLIGCETTGHYWFAFAKYVKDHQKRLVMVNPFSVKKIKELDDNSPKKTDSKDPKTIAKLVVDGRYSIPYVPEGIYAEIRDLVYSRDRIMKQHNISANRIQRWLAIHFPEYLGLYTRFDAASGLAVLGKAPTPKDVIALGVNGIRKIWHDKKMRGRGVTEDRAKTLVEAAHNSVGLDGGIGTKSELYMLLEEHRLWTSQLEAVNKVLEEMILKVPHVEKLLAIKGVGSITIAGFIAEVGGIRRFDSPKQIQKYAGLELVENSSGKHKGRTRISKRGRRKLRKILYQVMVPLLARNREFREIYDYYVTRVKNPLKRRQAMVAVSCKLIRVFYAVLTKGMEYDRFKMMSDIHRKSDIIAA

SEQ ID NO: 461096 - protein, 373 aa, unidentified
MRKVIMIGCDLHDKTMLLKIAEGRKEPETRSVKNTAAGRKAMIHDLKKRAVAASGARIVFAYEASGQGFGLYDELTDAGIECHVLAPTKIARSQRQASQKTDEKDAQQLLELLRAHLLAGNELPIVWIPDATTRDDREVVRTRLDVAEKITRVKSQIQSLLKRNHVRRDPASGKGWTRRFRSWLKQTLCESETGPLGPRSRATLLSLFRQLDFLEEEEKRLDVEVNALAGEDRYAAAFEEMTTLCGVGLLTAMVFLTELGDLSRFANRRQLAAYLGLVPRSFESGNANDRKGHITHQGSSRVRKILCQATWSRVRWDPQEKEAYDRIVARNPKKKKIAVVASIRRLSVRMWHRGRKFQGKPSRHMLLASRTAA

SEQ ID NO: 461097 - protein, 316 aa, unidentified
MTHPYISTIGIDVSKKHLDLYHSLLKITKRYDNNSQSLAKLIKYIVSNPVDCILFEPSGGYERKLLRSLVEKQLPFVMIHALHVRKFAEAKGQWAKTDAIDAALLAEYGLKMQPELTSKISSLNYQVLRTWSRRRTQVTNLIRLEKQYLEQQDNQQIIDLIQKNISTLKDQIKLIDQKIQQVIEQDSSLCKKAALLNREKGIGQVCTTLFLCELPELGQVNHKEIAALVGVAPYNRESGSWKGYQQTTRGRKVVRCALYMAIISAIRYNPKIKSFYDRLIAKGKRKKVALTACMRKLLIVLNATLKQRFYHTEVHT

SEQ ID NO: 461098 - protein, 403 aa, unidentified
MNMNAVGIDVSKGKSMVAILRPYGEIVSSPFEIKHTSGNIRSFIERIKSIEGESRIVMEHTGRYYEPLARELSLAGLFVTAVNPKLIKDFGDNSLRKVKSDKADAVKIARYTLDSWTELKQYSLMDEIRNQLKTMNRQFGFYMKHKTAMKNNLIGILDQTYPGVNTYFDSPAREDGSQKWVDFATTYWHVDCVRKMSLNAFVDHYQKWCKRRKYNFSQDKAGEIYGAAKELVSVLPKDDLTKLIVKQAIEQLNTASKTVEELRTLMNETAAKLPEYPVVMGMKGVGPSLGPQLMAEIGDVTRFTHKGAITAFAGVDPGVNESGTYEQKSVPTSKRGSSFLRKTLFQVMDCLIKTKPQDDPVYAFIDKKRAQGKPYYVYMTAGANKFLRIYYGRVKEYLTSLPE

SEQ ID NO: 461099 - protein, 310 aa, unidentified
MDAIIIGIDVSKDKLDVHVLPAAQAFAVARNGAGIEELAARLAALAPAVVAIEATGGFETIVAAGLAGAGLPLVVVNPAQIRAYAKAIKQRAKTDPIDAAVIAKFARATRPEVRPLPDEATRQLADLVARRRQIVEMMAAEGQRGRRVDHKRVARSIARVRKTLEAELAEVDQEIGDQVRGSPLWREKEDLLVSVPGVGPVVARTLLAELPELGRLERREIAALAGLAPFTRQSGRWRGRSFIGGGRATVRTVLFLAAMTAARHNPTLKAFRDRLVAAGKPKMVALIATARKLLTILNAIIRDNRPWQNA

SEQ ID NO: 461100 - protein, 413 aa, unidentified
MEGLQPLYRHVAGIDIHRMVHVVTTLIEQADGTIQQETRQFGGFKRDCRALAAWLVEQDIELVVMESTGIYWKSVYSHLERAGICAWVVNAHFVKHVPGRKTDVTDSQWLAVLARFGLVRGSFIPPQDLRELRLVSRYRRKLRFMCGTETNRLHKILDDAGIKLGGVVSDLNGVSARRMITGLISGVSIDTMLSMAHGALKCTREDLRESLDGELTGRHLVVLKHIQHHIDMLEHELAEMDAYLLAAMQPYQWAHQLLQTIPGIDQIAAAMILIEIGDDMTRFGGADRLAAWAALCPGNNESAGKRKSGRTRKGNAIIRYILCECANAAAKTKSSLASKYKNLMVRKSHKKCIVALAHKMIKLIYLLLTRMQTYFDPQIDYQAISAKKNVPRWIKQLKLLGKWPDKVQPTANT

SEQ ID NO: 461101 - protein, 345 aa, unidentified
MQVTTIGLDIAKRVFQAHGVDETGKAVLRRKLQRPEVLAFFKGLSPCLVGIEACGTAHHWAREIQALGHEVRLMPASYVKPYVKRGKTDAADAEAICEAVTRPTMRFVPVKTPEQQAVLMLHRTRDLMVRQRTMLVNALRGHMAELGMVAPQGISRVADLVAVLLGEDETTMPKLARQALRGLAAELESLGERIEAIEAAILTWHRGNEASRRLASIPGVGPITASAIVASITDPTLFRSGRHLAAWIGLVPKQNSSGGKERQGGISKQGDRTLRRLLVLGATAVIRHTRTKAASEASWLKGLLERRPAKLAAVAQANKTARIVWALLVRGGAYRAPATAQAATA

SEQ ID NO: 461102 - protein, 387 aa, unidentified
MAQVNDLSRSLTAFDAISTLVVVVEISKASWLVSGAVPGVERQPLKKLEPDATALLRLIERWRNEAVRAGRPISRIAMAYEAGRDGFWLARWLIARGIEAYVIHSASVAVSRERKRAKTDRLDAAMLMRVFLGWLRGERGHCGMVAIPTMEEEDARRPSRERESLVNDRSRITNRMKSALARLGVRGFKPHLRKAPERLAALRTAEGTGLPANIIEELRRDMARLALVREQISSIEKTRAERLERTPDTGPHAMVRLLARVIGIGIETADMLVREILSRRLRDRRAVARYAGLTGSPDESGLKRREKGLAKAGNARVRRGLIQLAWRFLVFQKDSALTRWYRTRTEGPSGARKTTMIVALARKLLIALWRLVTTGEVPDGVELRPAA

SEQ ID NO: 461103 - protein, 413 aa, unidentified
MYIVGIDIAKKSHQAAIMKPDGTLVGRSFRFTNTKQGFEFLMDKLSAVDSSLENFEFGMEATGHYWLNLYTWLADKHAIVHVINPLQSDALRNLYIRKTKTDSVDAKIIAQVIRIGQYSETKLADDRMLMMRDLCRQRFFLVDMVANLKRKIIVMMDRIFPEYQGFFSDTFGKSSTAILKHCTTPEEITLFGEDNLAQLLQVASNGKFGLKKAQELISLARNSFAARLSSKTLSLLVKQMMEQMELLENQIEILEKHISSHFKSFGTKITQIPGIGPVLGASILSEIGDISRFANPKKLCAYAGIDPSVKQSGQFLGNENHMSKRGSGYLRRCLWMASFVSVNHCREITIVYKSQVSKGKTHFQSMGFVCHKLLNIIYTVLKNDIDYSPMLCINPAITARTSRRIARAALKAR

SEQ ID NO: 461104 - protein, 411 aa, unidentified
MQVVYERCCGIDVHKRQVVVCVLLTAPDGRVQRHIQTFSTMTADLLALDDWLRELGIEQIALESTGVYWRPVFNLLEEGRTIVLVNAQHMHTVPGRKTDVKDSEWIADLLRHGLLAPSFIPPKPIRELRELTRYRKTLVAERADLVNRVQKVLETANVKLAAVATDVLGKSGRAMLEAIVAGEADAATLAELARGRLRAKLPALRQALEGRVEAHHRFLLARLLEHIDFLEAALQTVQEEIDRRLAPYTEAVERLQTIPGVGPQAAATIVAEIGLDMSRFPSAKHLTSWAGLCPGNKESGGKRLSGKTRKGDVWLRAVLLEVAWAIAHTKDNYLAALFRRLAQRRGLKRAALAIAHSVLGIIYYMLRDGTAYQDLGVAYFQQLDKVKIERHHVRRLEQLGYTVTLSPAQAA

SEQ ID NO: 461105 - protein, 417 aa, unidentified
MNAHWNEQPYFAALDWASDHHDVIVLDRQGAVQLEFRFPHTAEGWADFSAKMRPFAGAPITLETSSGPAVDQLLQRGWAIYPVAPAAAARYRERKVPSGTKTDRHDTWAIGDALRTDGHAWRILRPQDEATATLRVLCRDEIALIEQRTALVNQLQAALREYYPVALQAFEDWCAPYTWAFIVEFSTPAQLRAAGRRRWEKFLHAHRLWRPDTAPRRLELFASDALQASPSVTVAKALLALSLARVLITLQNQLDQYRQQIGEAFGRHPDHDLFGSLPGAKAFLAPRLMAELGSVREDYPDADALMCLSGVSPVGYQSGQVEKCRLRRACNKVLRATVHLWVNASRWRCRWADAYYHHKRSEGHSHASALRCLGKRWIKILWRMWQTGQCYDESRYLAQLKRRNAITWQALSALPTE

SEQ ID NO: 461106 - protein, 343 aa, unidentified
MQTITTIGLDIAKSVFQVHGVDVGGQVIVRRKLKRRYVLTFFQKLSPCLVGIEACASSHHWSRELQALGHTVRLIPPAYVKPYVKRQKNDAADAEAICEAVTRANMRFVETKTPEQQGGLVLHRARHLFIRQQTAVINAFRAHLAEFGIVAPVGRHGVEELLNVVADPNDKRVPEMARACLLAFGAQLRRIKEQILEFDRMISAWHRSNEMSMRLDEAPGVGPVLATALVAAVADPKSFRSGRNFSAWIGIVPKQHSSGGKNRLGTISKQGDRYLRGLFVAGALSVIRYAKIHGTKHRPWLTALLARRPTKVAAIALANKIARMVWAMMARGERYKEPVALAR

SEQ ID NO: 461107 - protein, 407 aa, unidentified
MGITCGIDWSESRHDVALIDEHGTVVARTRIDTGATGFHILLALIAEHGGSVDDTPIALETDKNLLVVALAKAGFTVYPINPRAVARYRERYGQAGGKSDPGDAAVLAHILRTDRHLHRPLPAVSEEGRAVKALARQHQEAIWALHQTVSRLRSVLLEFYPQALQAFPNLKHKAALTVLADAPTPAAGQRLTRGRVVALLRRSGRGNHPALVEQILTDLHTPALGQPPRVEEAYGHTVRGLVAIVIAMGQAVDDLDTELAREFDQHPQAAILRSVPGLGPVLAARVLGEIGDDPARFDNPQGLRAYAGTAPVTIASGRLRYVKARKVRNKRFGDACHWWAYTMLTKSAGARAHYDRRRAAGDHHNAALRNLANKLLGRLWWCLVNNQPWDEHGAWPDHGHTENPTAA

SEQ ID NO: 461108 - protein, 364 aa, unidentified
MTTEQKRRTLFVGVDVHKDTHTAVGVSPFGEKLFELTVGNYKEDFRSLAEAVESVSAKEMLSPYFGLEDCSGFGERLSGFLLESGYIVVHVPPILVDERRKNETHPEKSDSLDALGVAKVMLQRSDKLLLYTLTPESLKAKQIKEISIDREFLVSERTRLKNQLHTLLHRLWNTEYRTKFKDPFSLKALRYWLSRTPKGADVFLVRMMKRKARRLLDLHEEITELEVELETLLKESGHTIQTANGCGVTIAAMIVGEIGDINRFHSPAALAKYAGCAPREYSSGKTKRFRKSRSGNRRLNCAFHRMALSQISRMGNPAAQKYFKRKVSEGKSKQQALVCLRRHMVNIVWMTMKHKTEYRYPQEI

SEQ ID NO: 461109 - protein, 388 aa, unidentified
MTQAPVSHSVPVAPDYDRTLVLAIELSNKSWVLAAQVPGLPRVKAKRTVEPMAEALLTAIQGYRDRAHAAGRQVERVIATYEAGWSGFWLAGWLATHGIETHVVQPSSVPVDRRARRAKSDGIDAELLLRTLLAWLGGEPRVCSMVPIPAEADEDARRCIRERAELVAERVALVNRIGAVLATLGVGDYNPLLRNRRERLEGLRTAQGTPLPPHAHAKISRMLDRLDLVRTQITTLEQERDAVLEDEVPDRAGAMIQQLATLRGIGVQSATVLVREAFVREFANGKALGSYAGLAATPYSSGGTEREQGISKAGNRRLRTVMVELAWLWQRYQPGSAEVSWFRERVSGTGARMRKVMVVALARKLLIALWRFATQGVVPGGAVIKPAP

SEQ ID NO: 461110 - protein, 313 aa, unidentified
MSQPVVHVGLDIAKAHLDVCALDQPHPVSRRFANRPLAHAALVSWLQQWPARHVVCEATGGYERRVVAALQQAQIPVSVVNPRHARDFARAQGRLAKTDRLDAYMLAQFGQRLQPPPTPPRSAVQQQLAELVARRTQLRGLHRAEHNRLEHLQHPAVRRQLRAHLRSLERQIAQVDQWLDELTHTTSELHEKVQCLRAVRGVGPITAITLLATVPELGTLNRRQVAALVGVAPLNRDSGLRRGHRLIAGGRAAARAALYMAALVAAFANPQFKVFYQRLIAAGKAPKVALVAVMRKLIILLNQLLKNPQFQPT

SEQ ID NO: 461111 - protein, 347 aa, unidentified
MELHAIGIDLGKTLFHLVGVDAGGNVVVRKRCSRTQLLRYTANLQVERIGMEACSGSHFLGRALREQGHDARLMPAQYVKPYVKTNKSDFIDAEAVAEAVQRPTMRFVPIKTEEQLDLQAVHRVRERWVMRRTAVINQLRGLLLERGVTLSKGRSHLEQALPQILEDANLQLSDSFRVLLAQLKLELEQLTARIDQMDSVIRHTVKENEACQRLTTIPGVGPVTATALVAAIGNGSGFRRGRDLAAWVGMVPREYSTGGKQKLLGISKRGNNYLRRLFVQGARTVMQHRAKQSPGLGSWLAQLLAPTHQNVAIVALANKLVRMAWAVLRKNQAYRSPVLATSSLGQA

SEQ ID NO: 461112 - protein, 335 aa, unidentified
MHEYIGIDVSKSSLQCYFSEQDEELSLENSPNGLRLLGRRCKAYRKRGIEPIIIFEPTGSYSHALRRYCAKEKIACFIVNPRQSANFLKALGERNKSDRVDAKMLSKMHVLAKEGEIAVPVIHESYEKFKEYMSYYKLVQKERVRLNNHLEAARAKGSDRFLIRRLRNRVEALKKEEKLVLEKMLQLIYRDETLHRKFTAITSLKGIGPVAGVFLLHLFLSYPDSNRKQITALCGLDVVTAQSGTSVRKKGRISKKGSRFYRGALFMAVLVAIRHNPQIESFYKRLKERGKHTTVAQIAVMRKMVLITHALYKNETLYDPQRYHPIRAKEEKEAA

SEQ ID NO: 461113 - protein, 393 aa, unidentified
MRLAIGIDIGKDAHWVTALTEQGDVVLDGRVANTPPELTALGAELAALGGERTVGIDVIGGIASLATALLLAAGERVVHVPGLAVNRARQGTTGGETKSDPRDARVIAEQVRTRRDLRPVAPEDATTLELRLLVGRRRDLVVEQTRRLGRLHDLLGTIHPGLERRLDLTTKGALYLLTRYVTPAELRRAGRARLERFLRTCPHLPHVDRLAALALEAAHEQPLALPGEAVAAALCRELAAEALHTRARLDVLDQQLAEALARHPDGTLILSLPGMGVTLACEFLVEAGSLARFASPDALAAAAGLAPVLRQSGKVRFLRRPLGGNKVLKRVFYQSAFCSLHHPASRAFYERKRHEGKRHHQALIALARRRVNVLWAMLRDRAPYQLRAARPAA

SEQ ID NO: 461114 - protein, 366 aa, unidentified
MALELSNKKWKLAFSNRQRIRQVTLAAAGSQALREALALAKQRLGLPSDAPVRSCYEAGRDGFWVHRLLQSLGVDNVVVDPASIEVPRRARRAKTDRLDAEKLVRMLMRYAGGESTLWRVVRVPTAQQEDQRRPHRELDRLTGERTAHRARVRSLLALHGVAVAWKPQGKLAVESLRDWEGQPLPEQLRAELERELARLELLQQQMAVLEKQQQQRLREPQTAAERQAAALVKLRAIGPVSGRLLSEEFFGWRQFKNRREVGSLSGLTGTPYASGEMAREQGISKAGNKRVRWLMIELAWSWLFYQSQSELSRWYRRRFGTGNARQRRIGIVALARKLLVALWKYLERGELPAGAQLKKGAVLAAA

SEQ ID NO: 461115 - protein, 463 aa, unidentified
MPHAPRPSSRRRLNDLPKEFRHVNLHAAGIDIGARQHFVAVPEGRDPDGHDVREFGTCTVDLHAVADWLAACDIDTVALESTGVYWIPLFELLAERGFDVKLVDPRQLKHAPGRKTDVLDCQWLQQLHTFGLLTAAFRPDDAICVLRGYLRQRAMLVTYAAQHIQHMQKALEQMNVKLPEVVTDITGVTGMGIMRAIVGGERDPQALAALRDCRCHHDAATIARALQGSWREEHLFALRQALELFDVYQGKLADCDRTIEACLTAFDDQSGGTPLPPAPRTSKRPRNAPAFDARSQLYRLTGVDLTRIDGIDAHTALKIVAEIGLDMTRWPTEKHFASWLSLSPGSKISGGKVLSSRTKHSANRVAAALRISASALHHSRSALGAFFRRLKTHLGAPKAITATAHKLARLIYNMLKHGTEYVDQGQQYYEQRYQQRVLSNLSRRAQELGYRLLKDPEASAAPA

SEQ ID NO: 461116 - protein, 326 aa, unidentified
MTLSHLTDNTFVGIDVGGAGLDVAWHRGDSAHYANRPDAIATLVERLRTGPEVTRIVLEPTGGYEKPLVKALRQAQLPVEVIHTTRFNAYRALVGVKAKSDTSDARLLASYAAAPDEVRGRKAGYVELPEDAIREALSELASRRDQLKHMIHAETCRLGTVRLAELRQAITAHLEALRAEDKQVHRMMLELVRQRIDLRRDQRLLKTIKGIGVKSALGLLASVPELGRIDNKAAAALIGVAPFVRKSGTMSAPARIHGGRAAVRSILYMAAVTASRHNPVLRPFYQRLIAKGKPPKLALIAVLRRLVVFANAVLKSGQAWRGAIAA

SEQ ID NO: 461117 - protein, 338 aa, unidentified
MFYGAIDLHSNNSTIGIINDRGERVYRRIMPNDLAGIKKLFDPFRVELKGIVVESTYNWYWLVDGLQEAGYRVHLANTTSSQQYSGLKHTDDDSDAWWLADLLRLGLLKEGHIYPVQQRAVRDLLRKRGRLVEQRTRNIISIENLTSRNWGVRLKGDQVKELTVAEVEQSYGDENLALAVTSTLRIIEALDAQIKLIEKRVKQQIKLSEPYQLLKTVSGIGEILSMTIMLEAGEMSRFPTVGDFSSYCRCVDSLRLSNGKKKGSGNTKNGNRYLSWAFIEAANFAIRFNPIIRRFYQRKSARSKVVVARKAVAHKLARACFYVLRDQAPFEVERCFGH

SEQ ID NO: 461118 - protein, 400 aa, unidentified
MLSIGIDVSKGKSTVCGMKPGGEIVYAPFEVQHTREGMSELVSLLRSSGEEVRAVLESTDSYHCPVVAALLENGIFVSVINSLRMKRFCSQSIRKVKTDRIDAMQIALYGLAYWQELQPARLPEDTYRELQLLARQYYQMTSMLIKAKVDFNAICDQVLPGMQELMNDHAGRHKLSDFVLRYHHTTHILEMGETRFRKDYCKWAEKKGYRNCERMAALIFATAQNGIPVLPNAPSTQIVITEAIRVLHTVEASRDAILTQMQALAKTLPEYSLVREMPCIGDTLAPRLIAEIGDVRRFHSKRALIAYAGIDAPPYQSGKFCANNRHISKRGNRYLRKTGYEVMQSYVMHKPANDPIFTFIEKKRNEGKSGKLAMVAGLNKFLRVYYGKVTELYRSLPAIE

SEQ ID NO: 461119 - protein, 421 aa, unidentified
MKVHRNCCGLDVHKETIAACLIREDAGGNTRKEKRLFGTMTQHLRELAQWLREAEVTAVAMEATGVYWVPVWNVLEREGLELVLINPEHYRAVRGKKTDLKDGERIAELLQDGRLEGSYVPRTELRVLRDLTRYRVKLVEHQGSVACRIQKLLEQCNIKLASVATNVLGVSGMAMLHALAQGETNPERLADMAKMQLRKKLAALQLALDGHLLPHHRFLLSEMLEELSHVQSSIARLEAEIELQMKPFQKVLQAWMSMPGIKHRVAWTLVAEIGPDLEAFPSPDDLASWVGVCPGNNESAGKRKSGKTRKGNRWARRALCEAAWVAAKAKNSYLSAQFRRLAAARGTKRAVVAVAHTILIIGYHLLQRGTTYQDLGSNYFDQRHTLRTTKRLVKRLEALGHRVILESPLSAALNQALHGTS

SEQ ID NO: 461120 - protein, 388 aa, unidentified
MDRVIIGMDPHKRSVTIEVMAGDETVLGGRRFGTDADGFKALLRYAKQWPQRTWAIEGCQGIGRHVANRLLADGEQVVDVPPKLSARARVFATGQGRKTDATDAHSVALVGTRMAGLRPVVDDEQLAVLRLLVDRRRALGEDHSRMVSQLHALLLELIPGGAKKNLSAAQAKALLAKVRPRDVAGKTRRRLAAELIADLERIYKRRKAADKELKELVAATGTSLMDLHGLGPSGAAQLLVDVGDITRFATRAHFASWNGTAPIDASSGDQVRHRLSRAGNRQINRVLHIMATVQLRNPTEGRAYYDRKVAHGKGNMEAMRCLKRRLSDIVYRHMVDDAIAQTVTDPGGHRGTTTDSSVTGSHPIAGSSDKPLPGPATRQPRTPATAAH

SEQ ID NO: 461121 - protein, 416 aa, unidentified
MKIVRPICCGMDVHKNIIVATIGITNKKTRITEYIQETFSTLNPDLLNLKQWLINHKCFDACMESTGKYWIPIFNILEDEINIYLTHPKYVKAIKGKKTDKKDSKWICDLFKHDLIKFSFIPPKEIRALREISRYRYKLVGMRSSERNRYQNCMTVSNIGIGSVFSDPFGKSAQAIMKEVLESDIIEDEKILKCIHGSCKNKDKILDSIKHCNIETDQRFKMNESMTHMEELQVHINNCEIEMMKRAAPMFDRFMHITQLPGISTLSAILIISEIGVDMKQFESDKQLTCWAGLAPANNESANKKKSVRISKAGQYLKPLLVQCALGAIKDKEGYFGIKYSRIKKRRGHKKAIIAIARMMLVSIYHMILTGETFNPSDYESFRNPKPPIKQQVLTEESAIEFLKKSGFDVSKLTKP

SEQ ID NO: 461122 - protein, 426 aa, unidentified
MRVMYERVAGIDVHKDMIKVGIRAPGHRAWTRASEVLEYRTFYGVLLTMAADLRKRGVTHVVMEASGVYTEPVYYALAGQGFEQVVVINPAHAKALKGHKTDAKDALRLAELFECGLLRGSYIPAQGLKDLRDLTRYRTKTVQARTSEIQRLAKALESAGIKLDSVVSDLTGKSATLMIEALIDGERRGQVLADLAIGRMRTAGKLADLSQALAGRFTDHHAMLCRLHLDRIALFNAAVSGLEQRIAVKVTPYQRELDLLKSIHGFGDAVAQAWLAEIGPAPHEYFASYEKLASWVTLCPGNHMSAGKRSHGRTGNAGTYIKPMLVQAAWSAVRTEGRLRARYHKLVRRFGGPKNPAAVKKAILAIARTLLKIAYQVLSSGKPYQDLGADYYARRESPDQRRAYLLRQLEKLSPGCAITITPAEAA

SEQ ID NO: 461123 - protein, 339 aa, unidentified
MNVLPVGVDMSKATFQAAIWRSSAGQILGEYGNRRPDFETFATRGHQIQQEEGYETVHLVVEPTGGYEQGLVAFAYDQGWRISLPNPRHVREWAKASGRRAKTDAQDTLLLAHFAAERQQPAQQPLPCEVRELDSLLKRRDALEAMPRQERNRHEAYQHHPHAHPGLAGSFERLITTLEEELRTVQDEIERHVQRHSPIAAHVGRLTQIPGIGPRTVPPLPVLLFRWHALTGGRRSAKRFIALTGLDPQPFQSGASVHKRTTISRLGDRAMRRRLSMAALGGLHGTNPFRDFYDRLVGRGKPKKVALIAAARKLATWAWAVFASETDFDPARVAPAVSS

SEQ ID NO: 461124 - protein, 325 aa, unidentified
MSITIGIDVSKLKFDVCILKSDGMKSHATFENEKSGFIKLYNRLKNESDKHFALEATGIYGENLCQYLSMKKQSVFLLNPVQTSYYAKCMMKRTKTDKCDALTIAQFLNHHKDELIPWKPRSKTFNIIKNLHHCLQDLNSDRNRVFGRIEACANTDQDGRAEALKHYKKQKKFYDAQKEAVLKQLRLLVNNDSEIKTQYNLLISIPGVGEITAFGLIANLPDLTRFKCAKQLAAFAGLNPGVRESGSSVKSRGSISKTGSKNLRNVLFMPALVSKKCCKPMFKFADRLIEKGKTPKVAVVAVMHKMIRIIFAVLTKGKVFDEDML

SEQ ID NO: 461125 - protein, 316 aa, unidentified
MKGKSEQPMFVGIDVSKATLDVALRPEEETWSVSNDTKGIAKLVKTLGKRQPALIVVEATGGYEMSAVVALVEAGLAVAVVNPRQTRDFAKAIGRLAKTDRVDAKMLAHFAEAVQPEPRTLPDEETRALQALVIRRRQLLEMQVSERNRLHQAHQSQKASLESHIEWLEQELNQINEQIRAILQNNAVWREKDDLLRSVPGVGPVLSCTLLAELPELGVLNRKQIAALVGVAPFNNDSGKKKGTRSVWGGRASVRCALYMGALSASQHNPIISAFYQRLIQAGKPSKVALTACMRKLLTILNSMASHGTHWQPNLA

SEQ ID NO: 461126 - protein, 342 aa, unidentified
MLYVGIDVAKNKHDVTALNVPGKTVLKPLTFSNNKAGFELLDLSLRQLNQDCLIALENTGHYAFNLLNFLHEQGYKVYTYTPLLIKEFAKSLSLRKTKTDKKDAHGIALKLLSDPNREQFQHDNRQVELKILARHIHRLKKKQSDWKVQYTRCLDIIFPELDKIVGKHSEYTYQLLTCYPNPQKRLEAGFDKLIEIKRLTASKIQDILSVAPRSIGTTSPAREFEIIENIKHYKRLIDKAETCVNDLMAEFNSVITTVTGIGNRLGAVILAEIRNIHAFDNPAQLQAFAGLDSSIYQSGQIDLAGRMVKRGSPHLRWALIQAAKACARFSPAFKAYLKTKLE

SEQ ID NO: 461127 - protein, 341 aa, unidentified
MQKNSYFIGLDIACDDFVASVYESPGKPVITKEAIENNPDGFSALVLWLKEQGINSSNAVICMEATGVYSEACAHYLSVNGFRVSVEPPLKVKRAFDPVGHKTDAVDSRQIAEYAYRYSDELRFWQPKQEIVEKIKQLLTAREQFTKQSTAIQNSIKAYEKHIIKVPLIINAHQETLKELKKHIKAIDKELDRLIHQNPTISQITGQLKSIPGVGLLLASDLIAITGAFNDISSHKTLAAFLGICPYQHQSGKSVYRQPHMRNFGPNYARKLLMLAARSCATHNIEFRKYYMRKLAEGKAKQLVLNNISNKIIKIACALIKNNAQYNETYRSVNPLCFNLA

SEQ ID NO: 461128 - protein, 402 aa, unidentified
MNAVGVDVSKEKSTVAIYQPGDQVILKPRDFRHTQSDISSLIGIIKGLDGETKVCMEHTGRYYEPVATWLSDAGIFVSAVNPILIKNFGDDSLRTPKTDKADAKKIARYTLDRWTNLKQYCHMDETRNQLKTMNRQFGFYMDQKTAMKNNLIALLDQTYPGANTFFDSPARSDGSQKWVDFVYTYWHVDCIRGKSLEAFTEHYKNWCKRKGYNFSAAKAEKVYRDSADLIAVFPKDANIRMLIHQAVDMLNLASKTVESLRTEMDQTAATLPEYPVVMAMNGVGPTLGPQLIAEIGDVTRFVKRGSLTAFAGVDPGKNDSGKYSQKSVPTSKKGSPHLRKTLFQIMDGLIKRSPIDDPVYAFMDKKRAQGKPYYVYMTAGANKFLRIYYGRVNEYMSTHSDV

SEQ ID NO: 461129 - protein, 366 aa, unidentified
MRKHHHFGTFDAVRRGHPLHHYAGIDVSLELSSVCIVDAKGKIVREAKVASDPDALVAFFKQLGFRVVRIGLEAGPLSQWLYAGLAQAGFEAVLLETRHVKAALSAMTVKTDRKDARGIAQLIRMGWFRPVHCKSLGSQEVRALLVARKQLLGKLLDVELSIRGILRGFGLKMGVVTRKTFEARARELSSGQTMLETVVGAMLTARAALQSEYAKLHKTMLVIVRDDKICRRLMTAPGVGPVVAITFKTAVDDPTRILKSKAVGPLFGLTPKKYQSGETDVTGGITCVGDTMVRTALYEAANILLSRVTRFSALKRWAVEVAKRRGLKRAKVALARKIGVILHRMWVDGTDFRWTKAELGSGVAAH

SEQ ID NO: 461130 - protein, 350 aa, unidentified
MAEYIAFDSHKRYTWVDREDHSGEKSRGHRLEHAPGAVRNYLSGCEPGTTVAVEATGNWYWIIDEIEQAGLQPRLVHPRKAKLMMGLTNKTDQLDAHGLNRLQRNGTLPTVWIPPGPLRDLRELTRTRLVLVAQRTRLKNRLSATLAKWGRPASECSDPYGQRGRAELDNHLQSLPEQTRWVSRQLLLQLDFVGAQVKELEQRLSGLVKMTPEMQWLLTMPGVGVILAATIALEIGEIERFPSAMHLASYSGTTPRVHASGGKVRYGPLRNDVNRYLKWAFAEAANSVAVHHRRCPERHVSQLYRRLLRKGHPKAIGAVARHLAEAAFHVLRGKQIYRDPKLDRGCTNPG

SEQ ID NO: 461131 - protein, 369 aa, unidentified
MQEIDAFVGLDVHKATIAVALAEPARGGEVRRLGEIANEPEAVARLVRRLRKRHGRPEIVYEAGPCGYGLYRQINDLGVSCRIVAPSLIPRAAGDRIKNDTRDAEKLARLLRAGELTFVWVPDPVHEAMRDLVRARHTAARDVRQARSHVQMFLLRQGARYEAKSWTMRHRVWLSDRRFDHPGQQIAFQSFLNRLEQAEARKTELEAQIGELCEAWSLGPVVRAIQALKGVGPVIAATLVAEVGDFSRLESPRKLMAYLGLVPGEHSSGRTVRPRGITKTGNSAARALLFEAAWSYRTTPKVGQWQQAHRPVVDQAFKDIAWKAQLRLYGRDRRLTARGKRNPVAITAVARELVGFIWDIARRASPQVV

SEQ ID NO: 461132 - protein, 403 aa, unidentified
MGCFAGIDWGSMKHAACVVDDTGKVLASFEVAHDANGVAELLRRLCKFGPSSELRVGIERPSGVIVDTLLDAGFRVVAIHPNVLKACRPRYRAAGGKHDLGDAYIVADVVRTDGHRFRDLQPLGDEIRALRALVRTRDDLVHARVAHANQLRALLESFWPGAAQIFADVDSPIALAFLAKYPGPASAARLGEKRLASFLGQHKYPGRRSAAELLQRLRAAPDGKAGELEADARSEAVLALACILRHLVAQLRLLTSRIEHDVAALPDGRIVMSFPRAGRINAAKILSELGDDRGRFVSAEHLAAEAGVVPVTYASGKHCGVVFRWACNHNLRVAICTFADNSRHASPWAASFYQAACARGCDHPHAIRILARAWIHVLWRAWTDRKHYDPAQHGAAARMAATA

SEQ ID NO: 461133 - protein, 338 aa, unidentified
MKFKRIAIDTSKHVFTIHGVDEHERPVLRRELKREQFEAFFRKLPGTEVVLEACGGSHHWARVLQGMGHKARLIAPQYVKPFLKRSKNDDKDAEAINEAAARPSMRSVAVKTVDQQAKGIIVKHREMLVGQHTQAINALRGHATEFGIVAAKGTAKVAPLLAVLASDKAIPAAARTMFAQMGAHIAALESRIAGLDAELLAMHKAHPVSRLLAEIPGVGPMIASTMALTVEPQNFASGRHFAAWLGLTPREHSTGGKQRLGKISKAGNERLRTLLVVGAMSVIRFAKPGSKSASPWLLQLLERKPRKLAAVALANKMARIIWAMMARGEAYRRQPVTA

SEQ ID NO: 461134 - protein, 366 aa, unidentified
MLIIGCDYHPSVQQIAWADTETGECGEKRLMHSDGEAERFYRELKQRGVQVRVGMEATGHARWFERLLAELGFELWVGDPAEIRVTRVRKKKNDREDARLMRKLLLENRFPRIWVPSPENRDVRQLLLHRHRLVGMRTRVMNQLQAIAMNEGLRRKSGLWSKKGRARLESLSLAPWASRRRQELLDLLDRLSPMIDELSKAIEQEAERRPEVQLLMTHPGVGPITALAFVLIIGTPERFHCGRQIASYLGVIPCEDSSADHWRLGHISKQGNALMRFLLVEAAQTVARCESEWRQHYFHLLLRRGRAIAKVALARKLAVRLFWMWRKGQDYQQVKKFGSDAGQLETPNGVKSITVKLMERPAPSMA

SEQ ID NO: 461135 - protein, 466 aa, unidentified
MDTFYMGIDASKGYADFMIIAADKIPLIKSFQLDDTFDGHQALYTILSQFLAERPDSELLAGIESTGGYENNWYKCLSDFQGSLNVKIARLNPSGVMHSSKAAFKKNTTDQISAQNIAEFLIAHPDKIIFQQIDPFASLRKQWGFVDMLTKQKTQLLNQLNNLIYSANPEILQYCQNKMPDWVLKLLIQYPSAQKLKKARFRTVAKIPFITEKRASKLIQDAKVSVASATDTTTNQLIVATAKQILHLSKSIAKQTKLMIDECTGPEINLLKSFPGISDSSAIGLLIEIQTIKRFPSVKQLASFFGVHPVYKISGDGATGFKMSKMGRKEPRRILFMVALAATRCNPLIKDLFAYYQKQGKHKMVALGICMHKILRIIYGMLKHNKPFDAQIDIANRIRSSQKKNAKAVNNSGRRFQCYDSNAPITRRQKKERLERGMSHDAIGTKSGINTLVPLADIIPQIVEQL

SEQ ID NO: 461136 - protein, 520 aa, unidentified
MPKRQFNHDSIMAKPVQSKSVSTGQIKPAKQMPTVHPHAAGIDLGNAAHYVCVPADSVPAGQNPVRQFGVFNPQLDEMVEWLKQCQVQTVAMESTGVMWIPVFQKLEAAGLEVLLVNTKGLKHVPGRKSDVLDCQWIQQLHSYGMLNGSFRPADIICRLRTLVRQRGSLIASASSETQHMQKAMQEMGVHLHVVLSDVTGDTGLRIIDAILEGERDPKELVKLRDWRVHKSTVAEMEAALQGDWRQELLFVLRQSRQAYKFFQEQMQALDKEIIALLEQIPPGPTPPAGGTQAPSAPSSESPDKPAGDSKGCTAAAGSDCAGQSSGPVKAQSKGAKKVQRKRSTGGNALPKDIRPQLDHIFGIDLTRVPGLNIVGVLIILSEIGTDLKGRWRSGDVFAAWLGLCPGSKISGGKVLSSRTPHVDNRVAWLLRMAALVIGRTDTCLGVFFRRIKARHGPSKAMTATARKLAVLIYHLLTTGEEYQEPDPEQYDKRLRTNKIIRLKRQARQLGFELVPLEEAA

SEQ ID NO: 461137 - protein, 411 aa, unidentified
MDTLFVRCAGIDVHQANVVVCVRRADRPGPAVEEVRTFPTMTRDLLALSDWLAEHGVTHVAMESTGVYWKPVFNLLEGRFQVLLVNAAHIKQVPGRKTDVKDCQGIAQLLQHGLLKASFVPPAPIRALRDLTRQRTQLVGEKASAANRIQKVLEDANIKLAGVATDVLGTSGRAMLEALIAGVTDPEQLADLARMRLRAKIPALQLALAGRVTDHHRFLLRLHLDHVSHLEGLIGRLGAQIEGVMAPFAEAAARLATIPGISQRVAETVVAEIGTDMGQFPTAGHLASWAGMSPGNDESAGKRRSGHTTYGNRWLRRMLVQAAWAASRTKGTYLAAQYRRLAKRRGRKRALVAVGHTLLGMVYQILKHGTTYAELGADFLDRQEPERLTRQLVKRLESLGHKVTLEPRPAA

SEQ ID NO: 461138 - protein, 381 aa, unidentified
MIENAIWVGMDVHKKSISVAIVATGEDAVERLTVPNNASSVHRLVKRLKAYQKPLKSCYEAGPCGFVLQRKLRQADIKCAVIAPTLIPVQKGNRVKTDKRDALKLAKLLRAGLLTEVHVPTEAEESVRDLYRCREDAKEDQTRARHRLLKFMLRRGVVYSAGKRCWTGCHYQWLRQLRFDDRNAQRVFDDYMAVLEQQDARLTALDDELEKVASSQPYQEPAGWLRCFRGIDTTSAIGLLSELGDIARFGSARGLMGYVGQVPSENSSGEKIHRGGITKTGNRRLRRLLIESSQHCRLRPAVKGEVLKRRRGQPPWAIAIADRAMRRLHQRYWHLVMKGKPHNVAITAVSREFVGFIWEVLVEGRQRAALRDGQPPTETFC

SEQ ID NO: 461139 - protein, 415 aa, unidentified
MKFEKDTNGIKRYVAFDIHKEYALVGGQSAEQEWVMQPRRIGMEKLREWAKANLRAGDAVVIETTTNVWDVYDIVEPLVSYVVVAHAGGVRQIAEARVKTDKKDIERLIRLLIADIVPEVWVPPVEVRELRGMISYRNRLVKTSTMMRNRLQSLIHRHNLLLPKGMLRDPGWWEAQQVSPMEKIQIRQELAMLDEMEKHKGEVDAELGRQSLGEVWGQQAMRLLQLSGFGVIVTMTVLSAIGDVMRFESAKKLVGYSGLGAGVHDSGKEHIEKRITKSGRKELRWALVEAAWRAIRISPYWKEQYEKYLRRMRKPNQAIVVIARKLLVVVWHVLTKEETDEHVNEEDLAYKMLVLAWDLNENVRMGLTYKQFAKYALMKLGVETDITRFVRRNVPRRLAPREEVLARMTELGLTA

SEQ ID NO: 461140 - protein, 361 aa, unidentified
MPGTMTYVGFDVHARSAYAAAIDVISGELTRVRFGAGIETPVDWLRTLDGPVRACYEAGPTGYGFYRAAVAAGIGMEVVAPGKTPRGRGDRVKTDLKDAELLARCLIAGSLTAVAVPCPEVESARELTRAHDACRRDLMNARHRVSKMLLRHGRVYPKPSTWTQAHRRWLAAQQFEQPISELTWADLIACVDGLTARKKVMAERIGELATDPAWWPTVARLRAFRGVDTLTALAIHLELGADWQRFEKATRVGSWLGLTPSRQQSGETDRQGQITKTGSMLARRLLVESAWHAAREPRIGATLANRQEGQPDHILQISNRCQQRLHHLYTTMRARGKPHNVTIVAIARELSCFLWAAATAP

SEQ ID NO: 461141 - protein, 426 aa, unidentified
MNCTQNQKINQVTEHTLVVGIDIAKRTHYACFVDDRGRVLRKSFPIFQSKEGFRQLNEAIQEGMQAFGKSQVIVAVEPTGHYWLNLAYFLEENGIPLVMVNPAHVCRSKELDDNLPTKHDAKDALVIARLAKDGRFLVPRLLHEIEADLRVGSTLKEKLRKEQTAVKNAIVRWTDRYFPEFWTVFRDLGKTALSVLEWTPLPADMAGRTVEELLEVYRQSEGMKCPQKAKIQALINTAKDSIGVTEGTAMARFEIAALVRRYRQLEAEIAALDAELKALVQTTMEYQWLKTVDGLGDATIIDLLAEIGSFAHYRDPRQLVKLAGLTLKENSSGQRKGQKHISKRGRKRLRSVLFRAMIPLIRHNEAFRELHEYYTTRSVNPLTGKQSIVALCRKLLNVLFAICTKKQAFDAERMKQDVLSQVQRAA

SEQ ID NO: 461142 - protein, 405 aa, unidentified
MFVGIDWASTEHAVCVLDQAGKTVRAFRIPHSAAGFDDLVARLRRLGAPARLPVAIERPDGRLVDRLLEAGHPVVPVRSNAIKAWREGEVVSGAKSDTGDAKVIAEYLRLRHHQLRTLTPFSDATRALRAVVRARGELVRQRVAAINQLTATLDAFWPGAKAVFPDVEREIALAFLERYPTPESAAGLGEQRMAAFLTRHRYCGRTPAAELLARLRAAPAGVAGGAEATARRDAVLAFVGVLRALNQAIRDLDRSVIARLGEHPDSKVFASLPRSGQVNAAQMLACWGDCRDAYDGPEAIAALAGIVPVTRQSGKHAAVSFRWACNKRFRNAMTTFAHNSRLASPWAAKLYADAIARGHDHPHATRILARAWVRVIWRCWIDQVPYDPVKHRAAQRLAEEAAAAA

SEQ ID NO: 461143 - protein, 347 aa, unidentified
MDTIGVDLHKRETQLCIGQVDGTITEQRIVTSRERFTAVLGHRPPARILVEASTESEWVACHLESLGHEVIVADPNYAPMYATRSRRVKTDKRDARTLMEACRAGTYRPAHRLSAARRHVRAELAVRDAVVRTRTRYVALAKALVRRDGLRVPSSAAERVGAHLEGLAVSPALAAELAPLLTLLPPLNASIAAADQRLAELEHTDPSVALLMTAPGIGAVTASALVATIDDVQRFASAHQFEAYLGLVPGERSSGELRRIGPITKAGNRRARWLLVEAAWRILRSKDAAGAPLRGWARPIVARRGSRIAVVAVARRLAGILYAMWRDGAPYDAGKIRRPRARQSPAA

SEQ ID NO: 461144 - protein, 346 aa, unidentified
MASMARAALEVTVGVDTHRDTHVAAAVDSTGRALGTIEVSTDRNGYRRLELFAGSFGDIVAFGVEGTGAYGAGLARFLAERGHTVIEVDRPDRKARRHQGKSDPVDALAAALAVVSGRATTTPKSRDGAVEALRALSVVRRSATHSRTQATNQLRCLVTTAPDRLRERLRDLTLKELVATCAAFRIAGTETTADATRFALRALARRITSLTEEIAELEEHVASHVRTAAPDLLELKGVGTQVAASLLAAVGDNPDRLKTEASFAHLCGVAPIPASSGQRTRHRLNRGGDRQANNALWRIVMVRLSCDERTQAYMEKRTAEGHTKREIIRCLKRYVAREVYHCIVPN

SEQ ID NO: 461145 - protein, 398 aa, unidentified
MIYVGVDIGKDRHAAAAVNEAGESAVPPFYFTQDAGGFAALFGALEKLGGPGAVAVGMEATGHYWKVLRHALAKRGYRADVINPLITSRDASADVRGRKSDKLDAIAIANVMRKGGYSPAPAAGAADALKTLARYRRALVARRSDAKNRLAAALDVAFPEAAKTLGGLSGAAAMAAVRAFPSARLAAKADIRTVTSVFKKASGGRLGREDAKKFREAARHSLSLGMDTGGEEFVIPQTVDEIRALDSQIDRVERRMQEEPRPELAARLMSIKGACRIQPLAIAAEIGDPARFAGAGMAGKVLAYAGCDPRVRESGKWKGRTKMSKRGSPTLRNALYLMATTVRLHTPYFNEIYKKHADKGKHHNVALSHVIRKIVDVMCGMYKTNTDFVPPKTKVKPC

SEQ ID NO: 461146 - protein, 339 aa, unidentified
MELKRVGLDLAKNVFQVHGVDGQEVVRCRRQLRRSELLKFFADRPPCLIGMEACAGAHYWARELTKLGHTVKLMAPQLVKPYIKSQKNDANDAEGICEAVGRPNMRFVPVKTVAQQEVQSAHRIRSELIRQRTAKANQIRGLLAEFGVVVERRIEVLRRALPKLLEEEAGNALSEPTRRLLEGLRGDLVQLDERVGALDSEIKRVAKEDAACVRLQTIPGIGPLTASALVSAVGNGRQFKNGRQLAAWVGLVPKQDSSGGKTRLLGISKHGDTYLRTLLIHGARAVQRTCATKTDARSHWLRELGTRRHRNIAAVALANRNARIAWVLLTRDEVYEAPA

SEQ ID NO: 461147 - protein, 390 aa, unidentified
MKIFVGIDIAKLNPFAAAISSDGEILIEPFKFTNDADGFQLLVSKLESFDKNSIIIGLESTAHYGDNLVRYLVAEFYQVCVLNPIKTCQMRKNNVRKTKTDKVDTFVIAKTLMMQDDLRFITFFDLDMMDLKALGRFRQKTIKQRTRLKIQLTTYVDQVFPEIQYFFKSGLHQNAVYALLKEAPSPKEIASIHMTHLANLLKVNSHGHFTKELAKELRVLAQKSVGANDSAISIQITQTIQQIELLDSQLEKIEVEMTDIMKFNDSVIMTIPGIGYINGGMILGEIGDIHRFSNQTNKLLAFAGLDPSVYQSGNFQAKTTRMSKRGSRVLRYALVNAAWNVVRNNATFKAYYDAKRAEGRSHYNALGHCAGKLVRVIWKMLTDEVEFNLE

SEQ ID NO: 461148 - protein, 412 aa, unidentified
MDVIHERCAGIDISKVDVKVCIRVPSSGKRRRSEVRTFSAVTSGLLAMRDWLLAEGITVVGMEATGVYWKPVFYLLEHDIECWLLNARHMKSVPGRKTDVKDSEWIAKLVEHGLVRPSFVPPEPIRQLRDVTRYRTEIVRERTRETQRLEKLLEDTGIKLSATVSNILGVSGRAMLEALIAGERDPHVLADLAKGSMRRKTDALVEALTGNFTAHHAFLARAMLDRIDACTATETRLSEHIEVMLQPFRRRIELLVTIPGVDTRAAQVILAEIGDDIARFPSAADLASWAGVCPGNHQSGGRTGSGKTRHGDPWLKAALGQAAVSAARTKDTYLAARYRRIVARRGKKRALVALEHSILIAVWHMFTHDTEYADLGGQYFLERTGRARQTRRLVSQLNQLGYQVTLQAEGAA

SEQ ID NO: 461149 - protein, 323 aa, unidentified
MERPPVFAGVDVSKARLDIAVTGSDETWSVSNTSEGIAQFVQRLGEIGPELVVMEATGGFEVPAAAALAAAEIQVVIANPRQVRDFARATGQLAKTDEIDAQVLALFAERVRPQVRPLPDEDARVLDAILGRRRQIIDMITAENNRLGFALPAVKKNIEKNIRWLERQLSDVDSDLDTRIRKSPVWQAKNNLLRDVPGVGPNLARTLIAELPELGRLSHKQIAALVGVAPLARDSGLFRGKRMIWGGRASVRSALYMSVLSATKWNPVIRVFYQRLRAQGKPPKVALVACMRKLLTILNAMVRDGQEWDPSIPIDQLRIQHSC

SEQ ID NO: 461150 - protein, 340 aa, unidentified
MTIRTIGLDLAKSVFQAHGVDERGAATLTKRLHRKQMLPFFSKLPPCLIGMEACGTAHYWARTLAAMGHEVRLIPPSYVKAYVKRGKSDALDAEAICEAVQRPTMRFVPVKTVEQQSILMAHRARSLLVRQRTMLANALRAHLAELGLVTNPGIANLAKLAQQALSDKDALPSYARTTLEILVRQIMTLSEEITTLDRKLLAWHAESEASQRLTAIPGLGIVTATAMAATVTDPEQFRSGRQFAAWLGLTPQQHSTGGKTQLGGISKQGDRYLRRLLVVGATAVIRHIKDKPTPMAAWIRKLMEKKPFRLVSVALANKLARIAWVVLTRKEAYRPYELAA

SEQ ID NO: 461151 - protein, 310 aa, unidentified
MTVVTVGIDLAKNVFAVHGVNAAGKAVLVKPLVRRDKLLELIATLPTCLIGIEACTGAHYWAREFQKMGHTVRIMAPQLVSPYRMGGRHGKNAAADAAAICEAVTRPNMRFVPIKSVEQQGQLFVHRAHQGYVSERTALINRIRGLLSELGIVLPQAFKAFLSGVAQVLEDLPGYCNQVIGDLLNELYHIEEKIKNSEKLIQQLARDNSAAQLLMPFRGIGPMTATAIVASIGNGHDFKNGRQFSAWLGLTPRQQSSGGKARLGRITKAGDSYLRTLLVLGAGSVLLGAAKNARMCWAMLHLRDEFRFSA

SEQ ID NO: 461152 - protein, 411 aa, unidentified
MNAGVITVVGIDVSKYKSTVAARRPGGEVALLPFDISHDVTGIKNLIEKLHSLDDESGEIRVVMEHTGMYWRPVALALQQAGFFVSVVNAILIHNFSDNSLRKVKTDKADALKIANYGLTFWMDLREYSSEDETRQMLKIQNRLYERTTTTGTMLRNGLISLLDQTFPGANKLFLNEGRNSKGHVKWVDFVIRFWHKECVAALSLHTFADTFQKWCKRTGYRFSTSDAERIHTAARNAVATLPKNDSTKLLITQAAISLNTVYDSLHALRVEMNRLASLLPEYELVMAMEGVGKITGPQLMAEVGDVRRFSHKGALVAYAGVDAPPYQSGTFDAKNRHVSKRGSPHLRKVLFEIASMILVHGNPDNSVFCFMDKKRAEGKHFYVYTVAGAAKFLRIYYARVKEYLNTQEIA

SEQ ID NO: 461153 - protein, 339 aa, unidentified
MDKMEVCVEACGIEVSAAELVVAWGGEKKEVRVQGFANTAAGHKELLRALTRGGKRVRAVMEATGLYGLDVALMLSAQAGVELMVANPRAVRHFAQAMMQRSKNDRLDAAVLREFAARMPFQRWERPPANTLVLWAIARRLEALTRQRTAEKNRQHAAQVSQAAPAIVRKEIARSLRELERAILRLRREALRCVAAEAQLQQRYELLCSIPGVGSVSAIQVLAELAMLSEDRDVRQWVAFAGLDPREYSSGTSVRKHTRISKVGNRHLRHALYMPALVASRHEPHLRGFYERLLARGKKKRQALVAVARKLLHAIYGMFRSGQRYDGSRVFVLPTAKIA

SEQ ID NO: 461154 - protein, 338 aa, unidentified
MYYTGIDLHKFSSYLTTVDSSGAIVKQENLKNVAHNFIQYFSSIPGEHQTTVESTMTWYWLNDLLSSIKIPLVLAHAKYVKAIAYAKVKTDKVDSHTLAQLLRMNFIPVAYKISNDNRTLRDALRARLKIVQRHTSVTNSMHLLLAKYNYDSPTQLTGIPEFQYEQLSEVEALLNEQILDLEKQLYPFLIPNDDIQRLLWIPGIGKMNAFTILLEVDDINRFPDIKNFFSYCRLVPSARNSGGKSKQRSSKDGNKYLKVAFSDAAVHAVQYYPVIRKYNSSLARKKNKQIAKTIIAKEIASIVYYVLKCRTNYNNIFKGKELEHTKSLQWPRITSPYA

SEQ ID NO: 461155 - protein, 380 aa, unidentified
MKIVGCDFHPAWQQVAWVDMESGEIEERKLVNGDGEAEEFYRQLESPALIGIEACGNSQWFIDLVERLGHQVWIGDAAQIRASYVRRQKTDRRDAGHILRLLIEGRFPRLWVPSAEQRDLRQLLIHRHKLVEIRTRVKNGLQHLALNRGLQKKGSLWSAKGRACFEKLPLQGWTARRREDLLKLLAELDRHLDELDAAVSGAAEEDPQARLLMTQPGVGPITALAFVLTIGDVSRFRHSKQVSSYLGLIPQEHSSGGKQRLGSISKQGNGFMRMLLVEAAQSVNRLDEGFRKQYAARCHHKAKGVAKVAAARKLAVRLYWMLRTKVGYPEIAHIESSPRVPLVGPGGALGSPFTGLAGRRKPDRWIDWALSHPAIGRMSG

SEQ ID NO: 461156 - protein, 438 aa, unidentified
MSNKVIFNLDELFISVGIDVGADFSWMSIALPNQQFVGKPYKILHNSIDSLTTAVSKIKEAEELYSLESRIFLESTGIYHYPLFCYLRDKGFNCSVINPIITKNSTNINIRKVHNDRFDSKKAALVGLKPDLKVSLMPSDLALNCRNLCREYYDLMDNRSAYVNKLQGELRMAFPQYLGIFSKVTINTSLTLLETYTSPSAFLKADKQEIIDIIKSTARFGLTYAQNKYNAIIQAATDANQFGYIIDSNIKRIRLYISFIRKYDEEINNILESLHELVDANEDADFVKQIHLIETFKGAGFLSAVSIMGEIGDFSAFSKPKQLFAHFGLYPSVKQSGKFEGTKVQISKRGSAIARRVIHTLTLQSISISRNGEAKNPVLREYYLKKCDSKPKLVAMGAVSHKVCNMIFAILRDNKPFKIIAPQEHIKQYNSAKCDIAA

SEQ ID NO: 461157 - protein, 338 aa, unidentified
MFVIGIDPHKGSHSAAVLDEDEELVGELRVRAGRGQREELVAFAARFQPRCWAIEGATGTGALLAQQLVAVGETVLDVPPTLSARARLLDAGRIDKTDAYDARAAAAVALRHSKLRTVVREDHSAVLRLLAKRHHDLVAHRTRAVCRLHSVLCHLIAGGLPKRLSAVRAATELRRIRPVDQVGVERRRLASELLIEVLAADRDLVALKARITSAIGASSTTVTDVIGVGPVMAAYLIGYSGDVRRFPTAGHYARYNGTAPIEASSGPRVRHRLNPRGNRQLNHALHIAAVTQVAHDTPGRAYYLRKQGEGKTKKEALRALKRRISDAVYRQLIADITR

SEQ ID NO: 461158 - protein, 399 aa, unidentified
MECPYDIYCGLDVGKFSHYAVAIGVDGEKLADGEFPQDEVKLSELFNRLTDQGRVLVVVDQPNTIGALPVAVAQNLGVDVAYLPGLAMRRAADLYPGNAKTDARDAFIIANTARSMPHTLRAIDKESEVLAALKVLAGFDEDLTHECTRTINRLRSLLLGVSPALERVFSGTRLTQPLVLELFIKYHGPIGLREAGKAKVMRFARSKSSRDPSRLIDEIFEALSQQSVSVSGTGAVELVIPMLALNIKTLKAQRVEVAQQVEKLLANYPLLEVLMSIPGVGIKTAATILLCVGDGSSFPTAAHLASYAGIAPVTRRSGSSIRGESPSRGGNKQLKNALFRSAWVASTCDPESKAYYAQKRAQGKKHNAAIICLARRRCDMIYAMLKNETFYRPKVALSA

SEQ ID NO: 461159 - protein, 348 aa, unidentified
MRFYTKQHRFYCGIDLHARSMYLCVLDQEGKTVLHRNFKASPEAFLRAIKPFRDDLVVAVECMFVWYWLADLCAQEDIPFVLGHALYMKAIHGGKTKNDKIDSKKIAILLRGGTLPIAYVYPRTMRSTRDLLRRRNHLMRKRSELLAHIQNTNSQYNLPEFGKKLAYKANRDGVPEHFPDPCVQKSVGVDLQLLDFYDRLLTDLELYIVKKAKGHNIRSFYLLRSIPGVGKILSLVLLYEIHDINRFPRVQDFASYCRLVKCPRESGGKKSGSKNSKIGNAHLKWAFSEAACLFLRGNEQAQLYHDRLVSKHRKGKALSILAHKLGRAVYFMLKRKEPFNMEVFFARA

SEQ ID NO: 461160 - protein, 359 aa, unidentified
MTSIALGRDDIIIGVDTHKDQHVAVAIDGLGGRVGELAVPAKPGGYAQLVAWSATLGSVARFGVEGTGSYGSGLARFLRRHGHKVIEVSRPPRKGERRRAGKSDTIDAEHAAREVLAGKASATPKLANGIVEAIRLVKIARDTAVKAHTSAMIALKATLVTASDDLRADLEPLTDFKLVTACAALAGADDLADPGHAMHHVLGALARRWLQLHDEIKIHSDHLKRITKTAAPELVAAFGIGPDIAAEMLITAGDNNDRIRSDAALAKLCGACPIPASSGKTNGRHRLNRGGNRQANAALHRTVVVRMRWHPPTIAYVERRTGEGLTKKDIIRCLKRFLVREIFHLLPAPSTTIELASAA

SEQ ID NO: 461161 - protein, 339 aa, unidentified
MQVSTIGVDLAKNVFQVHGVDSAGKVVISRQLRRKQVIDFLSKIPPCLVGMEACGTAHHWAREVSKLGHTVRLMPPSYVKGYVKRSKNDAADAAAICEAVTCPSMRFVPIKSADQQALLMLHRTRDLLIRQRTQLINALRAHLAEFGLVAKTGREGLAQLAEIVTNESNREALPSAMKQALQAIVDQLAALELQIGVLDRAIHAHHRANDMSCRIETVPGIGVIAATAIASTVTDPSNFKSGRDFAAWIGLVPRQHSTGGKERLGGISKQGDRYLRRLLVIGATSVVRHPQKHPWIMRLLAKKPAKLVAVAVANKMARIAWAIMAKGGHYRTPELAAAA

SEQ ID NO: 461162 - protein, 368 aa, unidentified
MDAGSIHVVPGAALRGRPRELEEVPMSIVGGLDIHRKQITFDYVDTETGEARRGQVCPADREHLAKWLARFTGQDAHFAMEGCTGWRYVAGEIIAAGLTPHLADPAETAHLRGPKRRAKTDRADARHQRMLLEQGRLPECWIPPPHVLECRALLETYLDLREQRTGWVQRIHATLFHHGAPHIARQRLGTAEGAAALQAAAARCSPAGQLQLAIAVQMLAVYDERLHQVRRQLLDQARHLRGAAELTARLYGVGPITGLAITCWLGGAGRFSSARKAVRFAGLDITVYSSDGKRAPGRLSRQGPPVLRWCLYEAGKTHARKDAPDHAYYAQVKERIDGKRAAISEARKIIRQAARILTGLGDDALAAC

SEQ ID NO: 461163 - protein, 447 aa, unidentified
MKRKQEPKSSMSVVYPDAAGIDVGSREHFVCVPADRDDEPIRSFAAFTEDLVGLGEWLKRCRIRHVAMEATGVYWIPLFEVLDRMGFEVILVNGRQTKRPAARKSDVLDCQWIQQMMMFGLLSGSFRPADALCAVRAVTRLRARLIRDGQRSVQRMDKALVQMNVQLGRLLSDLSGKSGMAIIRSIVAGERDGVKLAALCDRRVRTSADVIAKSLVGNWRDEHLLALKQAVATYDLIQSHVAECDEKIAQAIAALQRLPDPPPEPRIKPRTNKRHTALEQHKMRTALFQAMGVDLTAIPTIDIDTATVILSEVGPDLSRFPTSEQFCAWLNLAPGTRISGGKRLGRAPMPATNLAGEALKRAAFNARNSKTFIGAAHRARMARMPKACATKATAHQLARLIYAMVKNGQPYVEHGIERYEAEHRDKQIRRLRQKATSLGLTLVEKAA

SEQ ID NO: 461164 - protein, 350 aa, unidentified
MNENQDVIKQVVGIDIGKDLFYACHKVLNSKHQTIIKGTKSFSNDLLGMQEFYIWCEKRSRESIKNVVFVMEATGVYYENLAYFLYEYDCLVSVQLAQKIKYYAKSCNLKTKTDKVDSKMIAEFGIEKNLSGTELWTPPGKSFKMIRDLSREHTSLKEACSAARSQLHALKQAHNVYPRVIELKQQQIEFYQQQEEAVKQELLLLVKEDESLYTRVENIVSVKGLGFITVIKILAETNGFLLFRNIRQLVSYAGLDVIEKESGSFKGKTKISKKGNARIRSALYMPAMTAAVYNSELKTFYNRVNEGRNIKRQGLIAVMRKLLILVYTLWRKNEAYIENYPEMNLIAIKG

SEQ ID NO: 461165 - protein, 397 aa, unidentified
MAKYINHQSLDVNTEYSVIGLDLAKHDLSLAAISTDGEVFIVDQMMYADFLELAHGLSPTLFSMEPCCGFSYLSAELQSLGHEVRVISGQAVSNWVKTYRSGQKTDANDAYALARLAENPDITSIRSKTLNEKRIMTIQGVRRQLVGQRTKTIASFKGLIQEWGIQVKVGRRNLNQMQQFVDERAEVFTEPVVKALTHMIEQIRSLDARIKELDSDLESMVMSDHQGRQLKQVLGIGTQIAARFISVVGDISNFKNARSLVAYLGCIPRNRVTGHRNKPKIKNGLAPDMSSKGQGKISRHGDKYLRSLLIQGAAAIYMQYSKGALADCSLRRWLEKQIEVRKPYGKIMVSLAAKLIRIMWAVLTHGEKFDISKVSVSRSVFAAAGDQKAELETAAVT

SEQ ID NO: 461166 - protein, 347 aa, unidentified
MRFYTQQHPFYCGIDLHARTMYLCILDQAGETLLHRNMPATPEALLKAITPYRDQIVLAAECMFTWYWLADLCADHGIPFVLGHALYMKAIHGGKAKNDKIDAHKIAVLLRGGMLPQAYVYPAEMRATRDLLRRRMHLARKRGELLAHVHNTNSQYNLPTIGKKIAYKANRDGVAERFADPAVQKSIEVDLALITYYDELLRDVELTIVKTAKHHDAQTLYLLQTVPGIGKILSLVLLYEIHDIARFPRVQDFASYCRLVKCAKESAGKRSGTSGSKIGNAHLKWAFSEAAVLFLRDNPAAQKFLARLEHKHSKGKALTILAHKLARAVYYMLTRQTAFDLDTFLRR

SEQ ID NO: 461167 - protein, 313 aa, unidentified
MIITPRCVGIDVSKHHLDIFDEGIGVSERVANTPHAITELVARWRCDALVVFEATGVYDLELRAALRAADIRFARINPARARDFARASGQLAKTDPIDARMLAAFARAMRPATEQVSTPARNALARLAKRRDQLVLMRAQEKNRRSEAGDRAMVERICRLIEVLDHEIAEIEADISALITAEPEIADDAQLMRSLPGVGPVACMQLIAQMPELGHVGPKQAAALAGLAPFNVDSGAYRGKRKIGGGRKRVRNALYMAALNAVRRADRFKAFYAKLRQAGKPAKLALIAVARKLLTILNAIMRDRKAYIPAQQS

SEQ ID NO: 461168 - protein, 344 aa, unidentified
MKYYAGLDVSLQETAICVVDEDGIIVIEGKATSEPDDLVRWLAATGLTIARVGLEAGPLSPWLHAGMREAGLPAICIETRRMKGATAAMAVKTDRNDARAIAHAMRVGWFTAVHVKTVESQELRLLLNNRRTLLEKRVAIDNESRGTLKAFGLKLGAVTVAAFEARVLELLAKRSRLLAMVRPMLTARAALRQQGEVLHRMVLKAVRASTVCRRLLSVPGVGPIVALTYATGVDDPSRFIHSRDLGPHFGLTPRKYASGEIDRSGSITKAGDGAVREVLVQAALTLLTRVHRWSALKAWGVAVAKRRGLRRAIIAVARKLAIIMHRMWADTTTFNWTRETVTLA

SEQ ID NO: 461169 - protein, 438 aa, unidentified
MSNKVIFNLDELFISVGIDVGADFSWMSIALPNQQFVGKPYKILHNSIDSLTTAVSKIKEAEELYSLESRIFLESTGIYHYPLFCYLRDKGFNCSVINPIITKNSTNINIRKVHNDRFDSKKAALVGLKPDLKVSLMPSDLALNCRNLCREYYDLMDNRSAYVNKLQGELRMAFPQYLGIFSKVTINTSLTLLETYTSPSAFLEADKQEIIDIIKSTARFGLTYAQNKYNAIIQAATDANQFGYIIDSNIKRIRLYISFIRKYDEEINSILESLHELVDANEDADFVKQIHLIETFKGAGFLSAVSIMGEIGDFSAFSKPKQLFAYFGLDPAVKQSGKFEGTKVQMSKRGSAIARRVIHTLTLQSISISRNGEAKNPVLREYYLKKCDSKPKLVAMGAVSHKVCNMIFAILRDNKSFEIITPQEHIKQYNASKCDMAA

SEQ ID NO: 461170 - protein, 333 aa, unidentified
MKDLSTKQHFVGCDVSKGTLDFALYERGKDYRTFAHIQVSNSLEGFQAMRKWLRGLKVKLTDAVIAMEHTGSYSVALAEWCFKKGYAFVFLHPLDVKNACGRGRNKTDRVDSQFIADYVYTMREKLEPSTPESPLIKSLRQLRNERRLAVNARTAFIVQSKALNDKAASSRMSRMIAELDRQVKAIEQQMISVVSSDESLKKDYELLLSIKGIGMVNAITTIVATGNFTRFQTARQYAKFCCVAPLASQSGTSVRMGNHVSKAGHNEIKATLTVAARSAIIHNRQLKAYYDRKRAEGKCHGCVMNAVKFKIICLMFAVIKRQTPYVNTEKFRA

SEQ ID NO: 461171 - protein, 385 aa, unidentified
MQVIYERCAAVDVGKDVIAIAVRKPGDGPGGRVTVRRTYKTFYGVLREAARWLMSEGVTHVAMEATGIYSMPVYHALLEHGGFEKVLVCNAGHVKNVPGRKTDMADAEWLAQLLECGLLAGSFIPPAEVKAARDVIRYRAKIAQQRVSEISRLGNVLQDAGIKLDSVAWSVSTKSGRLMIEALIDGERRGAVLADLAIGRMRSKIADLSMALEGRFGDHHAMLCRLHLDHLDHLDGMLAKLDAQIEAMMQPFRSARDLLITIPGIGRLSAAAIISEIGTAVAGYFPDAAHLASWAGLCPGNHESAGKHRPGKRRKGNQHLQPVLVECAWAAVRHEGYLKSLYHRHVMKWGGYRSSIAKNKAIIVVAHAILVIIWHVLATGKPYDD

SEQ ID NO: 461172 - protein, 338 aa, unidentified
MRKFIGIDLHSNNSVVVITDEEDRVVCQKRLPNQLEAIEAALAPHREETVGVVIESTYNWYWLVDGLMDVGYRVHLANPAAIKKYEGLKYSGDFADAAYLAHLLRLGLLPEGYIYPREQRAARDLARKRMQLVRQCTAQVLAIEGILMRQSGARQSSNAIKRFTVEQVEALPFAPDVVLALQANRAVSEVLQQQIAALEQRLQERVRLRPEYRLLRTVPGIGEVLATVIMLEAGPVSRFAQVGNFSSYCRCVDSLRESNGRKKGEGNGRNGNKYLAWAFVEAANFALRYCPQAKSFYERKKRRTHGVVAIKALAHKLARACYHILREQKPFEVKRCFA

SEQ ID NO: 461173 - protein, 327 aa, unidentified
MQPITWIGIDIAKQDFVAAQRSQTDFETQCFPMTEEGFEAFQQWLPKTSGLGIVFEATGPYWLPVARWLDGLEPSIPYACINPRRLRDFAKASPERSKTDAIDAALLVHFAETFPPALEPPKSRRAQTLRALWRHHLELQGLLDRARDRQEKALADPQLPTQLATRLQSLLDALKLELDQVEREAHDLVQHDPQTRQSYRLLLSIPGIGPKTALTLLAEYGPQLLQANPKQLTRYAGLEPILFESGSSVRKRPRISKQGNWRLRRALYMAALVGVRWNPILKTFYERKLQQGLAKKSALVAAMRKLLHLVYGVLLHQQPFNPHYEET

SEQ ID NO: 461174 - protein, 350 aa, unidentified
MEKVSVIGIDLAKNVFVLCAQTASGEIAWRKRLKRRAFKQFMAATAPRCLVAFEACGGAHYWGRFLTALGFEVKMMAPRAVKAYRQGPHKNDWRDAEAAAEAGSRRPVRAVRVKSEAAQAVQVLVRLRALQIRQLVQTGNHLRGILNEFGIVLPKGHKRLREAIARLRQEDPASAALPASVRRTADRLCLQLAEQARRVTEATSELEAAIKDEEDCRQLRTVPGIGPINAAALSVALEAPQAFPTARAFAASLRLVPRQHQSADKQIMLGIGPLSANETRRHLVLAGQSLITMVRRFKQPPADKFLLWVYRLDRRKHRNVAAVAVAAKLARIAWALMAKDQIYQPRLATA

SEQ ID NO: 461175 - protein, 418 aa, unidentified
MNIPSQSPYRATVGLDWADQKHDVFVRFADGDSYRRKIDSRPEAIQEWLLELRSTCGEGKIAIALEQRRGALFYHLCTHLSWIDLYPINPLSLASFRKTFFSSRAKDDPVDSQLLEELLRTHPERLRSYQPEPTAERKLDQYCRRRRSLQDLATKTELKLISTLKQYFPLAVNLFADIGLKSEIALNFLSRWPTLDELHRAKAQTVRSFFYAHNSRSQSLIEKRLQLIAQAHPVTDDLALIEPLVLTSKCLVTQLRQFNQAINQFDQKIRELFKSHPDHFLFESLPGAGEQLAPRLFVVFGSDRSRWADATDIQKYSGIAPVVERSGKSLWVHRRLARPIFVCQTFHEFAQQSTHRCSWADQFYRRQRQRGKSHHSAIRALAFKWIGIIYACWKANKPYEESFYVQALEKRNSSVSSN

SEQ ID NO: 461176 - protein, 421 aa, unidentified
MSKADTRKVKFVKDGTLIVAVDIGMEMNRGYCTTTDGRDIKPFKFDNTRKGMDKLWGMITASKNRFQCTEIIVGYESTGPYGEPMIHYLMKKPVKLVQVNPMHTKRVKEINDNSPLKTDDKDPRVIADIIRWGHALSIVIPEGDAAYLRRLNNSRERHVRERTALLNQLQQLVFVLFPEFKQVMKNIKCQTPLYILNKYLTPEAISILDKDVLGEEMRKQSMGKFRENHADMLINLAKNTIGIKEGIAGLSLDIRHILVQLEMLNVLVTEIESEMETALNRIPYSSKLLSLKGLGVVSVAGIIGEIGDFTKFRTQSEIMKLAGLDLYEISSGKWKGQRKISKRGRSLLRKILYYAAMQTIRKNGILHDYYTRLTEGGMKSMKALVAASRKLLRIIFAIVRDDSKYLINFESIKRQVIKKAA

SEQ ID NO: 461177 - protein, 341 aa, unidentified
MKLIRVGVDLAKNVFQLHGVDRSEKMVWRRKLVRAEWIKVLLDRIEPGCEIGMEACSGAHHWARLLQAKGFTVKLIAPQFIKPYVKSNKNDANDAEAICEAMSRPSMRFVAIKTVEQQDIQAVHRVRSGLMDQRKGKSNQLRGLASEYELVAPKELLHLRSAIPRWLEDQENGLSERFPRLLRGLWRDLQTLDERIEELDREIEQIARQDPMAMRLQKVRGIGPLTATALLATVGDASQFSNGRDMAASFGLTPKQNSSGGKERLLGISKRGDAYLRSLLVHGARAVIRTAQPKTDRLSTWVMRIATTRHPNVAAVALANKTARIVWAMLTKGTDYRPQTV

SEQ ID NO: 461178 - protein, 457 aa, unidentified
MTASKKRSRTIEGDRLPVVHRHAAGIDVGATFHVVAVAAERDAKPVRTFRSFTGDLHRLADWLTQTGITTVAMESTGVYWIPVFEVLEARGFEVLLVNARDVKNVPGRKTDVNDAQWIQRLHQHGLLRGSFRPRQGIVALRAYLRHRERMVEYAASHVQHMQKALMQMNVQLHHVVSDITGVTGMRIIGAILSGERDPEVLAGLRDVRCKESRDTIAKALAGNYRPEHLFVLQQALELYEVYQERIRSCDRKIEGTLRVLNEHQDAPPESLADRRSKRQKNEPGFDIQPALHVLLGVDPTQIHGIGPYLALRLVGECGDDMSRWPTAKHFTSWLTLAPGNKISGGRVLSSKTRRSANRAAALLRMAAISVGKTNTALGAFYRRLGARVGKAKAVTATARKLAVLFYNTLRYGSAYADPGAAYYEERYKERVRKNLQRRAAALGLQLVEAVPSGMGVS

SEQ ID NO: 461179 - protein, 349 aa, unidentified
MSQNLKTAVAVIGIDIGKNTFHVIGLDGRGAIVLRQKWSRGQVEVRLANMPPCLIGMEACVGAHHLSRKLQALGHDARLMPAKYVRPYSKGQKNDFRDAEAIAEAVQRPTMKFVATKSADQLDLQALHRVRERLVSQRTGIINQIRAFLLERGVAVRQGLRFLRAELPRILATPPDVLSARMVQVISDLAEDWRRLDERIDRLSREITVLAQQDAGCERLMSVPGIGPIISSAMVAAIGTGDAFSKGRDFAAWMGLVPKQISTGDRTILGKISKRGNRYLRVLFVQAAWVVLIKPRSWERHGLKHWIEAARKRLHRNVLAIALANKLARIAWGVLAGSRTFEASKLQVA

SEQ ID NO: 461180 - protein, 355 aa, unidentified
MDHYAGLDISLEETSVCIVNADGKVVREAKVVTDPDALAKELADQQLDFKRVGLEASSLGCWLHSELTARGFPAIVVEARHMRSSLNAQRNKTDRNDARGIAQMMRMGWFRAVHVKSPEAQRLRLLIANRRLLKRKLVDIENHVRGALRAFGLRVGVVARGGYEARVLELIADADNALKTFTLTMLEVRRAIMGGYNALHKSLISIVAADPLCRRFMTVPGVGPIAALSFRAGVDDPLRFTSSRVVGAHFGLTPRRWQSGTIDIDGHITKQGDGDVRTALCEAAASLLLRVKRWSALRAWGIRIAKRTSMMNAIVAVARKLAVILHRMWIDGSEFRHVAGAAITEKLELPPPMTV

SEQ ID NO: 461181 - protein, 416 aa, unidentified
MNNESPVVAGMDVHKKMLAVVVAKVDGNRIEYLSERFGTTRQDLDQLAHWLHQQQVTEVAMESTAQYWMPVWLALEEQFTLYLAQPRSTAAPKGRKSDWADAQRIVRRLLAQDLTLSYVPGREQREWRTMTRTRVEMSAQQVRLRNQMEGLLEQAQIKLSSVLSDLLGVSGRRILREMVKGETNPACLASLADKAVKASEKTLQEALGGKLTATHRLLLKMYLEQWDLLASQIDQLNTRMAQALSQHQAAVHRLVEIPGVSLTAAQQIIAEVGPEARAFAAPQKLASWVGVCPGQHQSAGTEYSHRSPKGNRMMRRVLVQCAWASVKVKGSIFHQKFRVLVPRLGPRQAIWAIAHRLLRIIWKLLHDQVNYVERGLDTNPAAVQLRIKRHLKELQRLGYAVNLSALAAIRPQEASV

SEQ ID NO: 461182 - protein, 414 aa, unidentified
MAEEETISWFAGVDWGSERHQVCLLDARGGTVGEREFPHSGEGLAELGDWLLSMASAAGTVAVAIEVPHGPVVDVLIDRGFVVYAINPKQLDRLRDRFSVAGAKDDRRDAYVQADSLRTDRRLFRRLQVADPRLIELRAWSRLAEELGVERVRLSNRVRHQLWRYYPQMQKLTNDLAAPWFLELWAIASTPAKAARLRKSTVERLLKQHRIRRTDAETVLGILREPAIKVAEGVAEAASIHMRSLVARLRIVNRELREAERKLDELCTTIGEIEQTSGEGLQRRDVAILRSMPGIGRINLGTLLSEASGPLSRRDYEGLRTLSGAAPVTKRSGKSLIVVRRYAAHVRLRDTVYHWARVATQRDPKCRARYTALRKRGHSHGRALRGVADRLLALACVLLQRQTLFDPYFGRPTA

SEQ ID NO: 461183 - protein, 343 aa, unidentified
MEHSAGLDVSVKETNVCIVDDAGKIVREVKVASEPEALLAVQTNPAYRFKRIGLEAGPLSQWLFSALAEAGLPAICVETRHMRAALKAQINKTDRNDARGIAQMMRAGLYRPVHVKTLRSQKLRMLLTHRKLLQSKAIAIENDLRATLRNFGLKVGVVGTIKFEARIKELVEGLPDLIVLVEPMLVVRRTLREQIGVLHRRLLTVVRDDEVCRRLMTVPGVGPVVALTYRATVDVPARFRNSKAVGAVFGLTPSKHQSGEVDRSGAISRCGDDMMRTMLYEAAHIMLVRSTKWSWLKAWAMQIARRRGLKKAVVALARRLAVIMHRIWVDGTEFQWTRKAAAA

SEQ ID NO: 461184 - protein, 321 aa, unidentified
MAYFRDVVGIDVSKENLDLYVLSAQQRRTVPNTAAGYRDLVSWLKSLGVRMAVMEASGGYERDVAKALRQAGFDVRIVDPKRVRHFAKAAGRLAKNDRIDAEMIAEFGAVFAAAQRCEIPLDAKREHLAGLVATRQALMDHQTSLQNQISACPKGPARQALAAALKPIPASIKQLDRLIAEAIAAHPQFAALAARLDTVPGVGPVTIAALIAWLPELGRLDRRALAALVGVAPFDDDSGKRTGQRYIKGGRGKLRNIVYMAVMGAATKHNPVLKAYYDSLLNRGKLKKVALIACLRKLLTILNTMVAKQQDWNPASMAIAA

SEQ ID NO: 461185 - protein, 369 aa, unidentified
MNNGSTVIGLDVHKETVVAAVLPPDAERARETVTIENHPKAVERLVTRLAARGPVAFVYEAGPCGYEVQRQLTGLGQPCAVVAPALTPVRPGDRVKTDRRDAEKLARLYRAGELTPIRIPTRAEEAARDVVRVREDVLADRLRARHRLGKFLLRQGRVYRETKAWGVAHRAWLRSQRFEWPALQQTFAAYLRALEEVEAHLAVLDQQVVDLAQQAPYRLLVQALRCLKGIDTLSAVTLAVEAQEFRRFPRARAFMSYTGAVSMERSSGGTVRRGSITKAGNAHLRRILVEAAWSARHGTGVSPALTARRKGCPAEVVRIAKKAQARLHRTFWRLTSRTKPAQVAVVAVARELAGFVWAIAHQVPEGGSA

SEQ ID NO: 461186 - protein, 400 aa, unidentified
MRAVFGIDVSKTSSEVAILVNGEKVHGYTILNDAIGFNRLLGDLKTVHNPEIIFEATGVYSRRLQAFLEEYSYAYTRLNPLEAKKQLDSLRVRKTDKIDAEKLAKSQLVHNRKPTYVQEEVYQHLRDLSRFYQNMTEDLVRTKNRLHKVLQVTFPELENLLSTPTGEQYWNLVMAFPCKEDVLSLSQSNLCEIIRQSTSKRISEKRIAYLTDKLIKLAKQSFCAVKKTSPMLEEVRYYAQELLRLSERRQVVLNDMVALAQPLPEYDILRSIPGIAETTATSLIGELGDIRRFHSANQINAFIGIDLRHYESGNFLAKEHITKRGNPYARKILFKCIHNIASASHTNPCHIADFYEKRKRQSTIASTKPHTIASIHRLIRTMYYLITHNKLYDYSLTQNR

SEQ ID NO: 461187 - protein, 421 aa, unidentified
MQRVEDSEEIIERVAAIDIGKAEVVVCIRIPDPARPGRRQQEIVHSSTLTPRLLVLADRLTELGVTRVVMEATSDYWKPVFYLLESRGLDPWLVNARDVKHLPGRPKTDRLDAVWLAKVAERQMLRPSFVPPGPIRLLRDLTRYRAGLVKVRTAEKNRVEKLLEDAQIKLTSVVSDIFGVSGRDMLAALLAGERRPAVLAQLARTRMRPKIPLLEEAFAGQFTEHHAFLLRLMLARIDETGADIAAVETRIQQLVAPFATVVARLDEIPGVGAAAAWTVLAEIGLDMSRFPTAAHLCSWARFAPGVNQSAGKNKGRGATGHGNPYLGQALGEAAVATARTHTFLGDRYRRLARRRGGPRATVAVGRSILVIIWHLLSQPETRYHDLGPDYTRRRADPNRATRKHVQQLEALGYTVALTPVA

SEQ ID NO: 461188 - protein, 429 aa, unidentified
MEEDDDLEVIVEYAAGLDVHKDTVAACVRVPGPDGGVVKYQAEFATFTEELLALRDWLVSHAVARVGMEATGVYWKPVFYVLEDAMECQLLNARHLHNVPGRKTDVADADWICKMVRFGLVRPSFVPPPPIRELRNLTRYRRTRMEERTRESQRLDKVLQDAGIKLSSVASDILGVSGRAMLNALVDGTRDPELLAESARGRLRSKIPTLQLALTGRFGTTHAVVIAEILAHLDYIDESLQRLQDAIDQVIVPFADARDRLMTIPGVDKIGAEAIIGEIGVDMTRFPTAAHLASWAGVSPGQHESAGKQRHGTARPGNTWLQRALTVAAMGGARTHGSYLCAQYQRLAPRRGTRRARKAVAHSILVGAWHILNDADTTWHDHGVDYYQRRHDPTRTGHRKIADLRSLGWTVTTNPDHSITVAPPPATAA

SEQ ID NO: 461189 - protein, 344 aa, unidentified
MGEVSTIGLDIAKSVFQVHGVDVAGAVVIRKRVSRARVLEYFSDLPPCLVGIEACPSAHHWGRELQALGHTVRLIPPSYVKAYLKRSKNDANDAAAICEAVTRPSMRFVPIKTKEQQTALMLHRTRQLLVRQRTMLSNALRGHLAELGIVSAKGRNGTADLLSIIKDGSDSRLSPAVRGILDVLARQYGAIGVEIASIDRSIMALHRGCEASRRLAEIPGVGPIGATALVAEIGDWKTFSSGRSLAAWIGLVPKQHSTGGKDRLGSITKQGNRYLRWLLVVGAMAVIRYARKHSTEKRPWLGRLMERRPTKVAAVALANKIARMAWAIMVRGERYKEPKLLLAT

SEQ ID NO: 461190 - protein, 349 aa, unidentified
MLHVGLDLSRKRVDVCLISSGGELLGQFPAPADRDGLHGLARRVAAYGEPVRGVVESMNGARFVHDELVTHGWEVLIADAQRVKGLAPLACKTDKIDSRVLATLSFYDLVPAIWLPTPQLRRERERSRWRLHLVKHRSTLKNRVHSTLIAFGYQRSMSDLFGLGGREFLRGLEIPEPWRGHVDASLELIDELELRIAAIEHQLKRSGADHRYVPIMMTAPGFGWITSFTVACELGDIGRFSTPTKFVGYTGLCPRVSQSGDVNLRGPLSKRGPRYLRWGLMEAAVHACSHPLYKERYQRLRRRHGRQRGPKVAQIDLSRQLATAIWYMLTRNQPFKPFAPAGATFRLAA

SEQ ID NO: 461191 - protein, 402 aa, unidentified
MKEIPPPKQPANATPALGATGRAVGLDIHPDTFAAAILSGRDPLSARVAQSVTRQPLEALCAWATRHTRSEDLLILEASANSFAIAERLQGIGRQVYILESHRAGQIGKSYLANDKVDAAKIARIYLSGLAIKVWQPDAETRQRRELLSTYQRCVKDSTRAQQHLRSYLNEHALRLPKGFRLCRPEAISRLLMLKDWSARQKLLLQEMHGGLIAARERRTRLRRMMALEIEEQPDFLRLYKLAGLNLVTTYALVAIIGDITRFATSKKLVSYLGLNPSVVESGQFDGGGALHGHGRGSLRALLIQASKRLLSTANPLQKWGLSVALRRGVNKAAVAVARKLTVAVWHVLQGHWNQALEETTTLLTKLTKLATELGIATLHELGYASKVAFQEEKLQVLRTHP

SEQ ID NO: 461192 - protein, 351 aa, unidentified
MMIIGVDYHPSFQTIAFLMEETGECGEQELNHSEGQAEKFYRDLQQRGIRVRVGLEATGYSRWFERLLAELGIEIWIGDPAEIKTKRVKKQKTDREDARLLLKLLLENRFPQIWVPDPENRDLRQLLWHRHRLVQMRTRIMNQLQALAMNEGYRWKKKLFSEQGRAQLEKLALAPWASRRRQELLELLDRMNPTIEELTAAVEREARKRPEVLRLMTHPGVGPLTALAYVLIIGTPTRFQRGKQIGTYVGMIPCEESSARKQRLGHISKQGNSLLRFLLVEAAQAAARIHPDWRRRYMHLAMRRHKSIAKVAMGRRLAVRLYWMWRNGCAYSPSLEFGSYAGQLGTGHGVK

SEQ ID NO: 461193 - protein, 343 aa, unidentified
MKLHVLGIDLGKTVFHSVGLDVTGKVVIRKKCSRRQLLAFTANLEVQLIGMESCSGSHFLGRALREQGHEVRLMPAQYVKPYVQTNKSDFLDAEAIAEAVQRPRMRFVPIKSEEQLDLQALHRVRERWVMRRTAVVNQIRSLLLERGLTLPKGRSYLDRQLPGILEDGELRLSGSFRVLLAQLKLELEQLTARVEEMDRVIQKTAKENEDCQRLTEIPGVGPVTATALIAAVGNASAFQKGRNLAAWMGIVPGEYSTGGKQRLLGIRKRGNKYLRTLFVQGARSVVQQRNKQSPGLSKWLAELLARAHQNVVIVALANKLVRMAWAVLCKNERYRAPVLATTH

SEQ ID NO: 461194 - protein, 320 aa, unidentified
MDAVLGIDIAKAKFDVALLTPDGKTRQKSCANTPAGFADLTRWLARHGVTAVHAALEATGTYGDAVALYLHDAGHVVSVLNPAIIHAFAASQLARAKTDAVDAALIARYTATQHPPAWTPAPREIRELQALVRRLEALHGMRIQETNRLEAGPLVAAVRASIETVIATLTAQIAAVQQQIRDHLDQHPTLRAQRDLLTSIPGIGAATAAVLIAELFDKSYGSARQAAAFAGVVPRVFKSGTLQRPGRMVKIGPGRLRKALYFPALTALRWNPTVRDLRARLRATGKANMVIVGAAMRKLIHLAFGVLKSGRAYDPRYARS

SEQ ID NO: 461195 - protein, 448 aa, unidentified
MKRKQIPKPQEIPDAEHELIIERVCAIDVAKASGKVCVRTPRERRRVSKIWDVEATTGAVSELVAQLDELGIEKVTIESTSDYWRIWYYLCQAAGLDVQLVNACEVKNVPGRPKTDKLDAVWLAKLTEKGLLRPSFVPPAPIRVLRDYTRLRVDLTRERTRYWQRLEKLLEDALIKVSSVASRLDTLSARDMIEALIAGERDPRRLADLARGRMTAKRLALIKALDGRFDDHHGELARMLLDQIDTLNAQIATLTSRIDELLVAAEPGHDDDLGTPTDDPGAADGRLSAVERLTEIPGIGPTGAQIILAEIGLDMAQFPTAAHLVSWAKLCPRTIQSGPLTRGGKTGKGNPYLKGALGEAAATAAKTDTFLGERYRRIVKRRGKLKALVAVARSILVIVWQLLSDPTARFRDLGSDYHTRRINIERRMRNHIAQLSAMGFRVTVEPAA

SEQ ID NO: 461196 - protein, 376 aa, unidentified
MQKPSTIDIDPVIYLAIELSASTWLVVSKIPTSEKTGLHRMEAGDSQALLALIADLRKKVAAKLGVEASVMSCFEAGRDGFWLHRLLSEHGVINHVVEPTSILVNRRARRAKTDRLDAQGLLRILAAHAKGDHDVCSVVRVPTIEEEDAKRQREREHLVQERVRIENRIAALLTTQGIRKRPSLRSWEKDMEEMRTGDGHPIPSLLRAEVNRLRRRLVMTLEMIRELEAEREQALQTQDDMASRMIRALCRIRGIGDNFAAVLTREVFYRPFQNRRQIASYLGLTPTPFQSGGMDRDRRISRAGNARARKTLIQLAWLWLRYQPDSSLACWFRERVGNLQGRTRRIAIVAMARKLLIAIWRYATDGIVPEGAQISI

SEQ ID NO: 461197 - protein, 419 aa, unidentified
MIEAVLERCAGIDVGKKYVVCCLSLGAANSTATEETRQYDTTVAELEKMRDWLLENQCSHVAMESTGPYWKPVFNLLEDHFTVILANAQQVKSLPGKKTDRKDGRRLAHFLRHNLIEGSFIPPVAIRQLRDLTRRRRKLLGAGGSERNRVQKVLEDANVKLGNVLSDVFGASGQAMLEALLSNQGTPQQLAEFARGRLRRKMPEIVTAVEEHRMREHHRFLIRQSLRHMAFLEEQVAALDEEILRQMKPFEKEFESLQTIPGIKATAAASILAEVGVDMKQFPTAHHLASWAGICPGNNESAGKHKGTQTRKGDPWLRGTLTESAWAASRKKGSSFAARFRRLAPHRGQKRALVALGHNLLIVVYQVLSTGQPYQELGSTYHEERTKEARVRHHLRCLRALGALAPGADLTEVPHAPTV

SEQ ID NO: 461198 - protein, 426 aa, unidentified
MKVMHDRVAAIDVHKDMVKVAVRVPGERRGTRKTDVLEFRTFYGVLEEMGRELRRHGVTHVVMEASGVCTEPVYYALAGLDFTEVMVINPAHARALKGRKTDARDAIRLLDLYECGLLSGSYIPAPDLKEVRDLARYRMKTVQARASEIQRLQKTLETAGIKLSSVVSDVTGVSATALIEALIDGERRGAVLADLAQGRLRTAGKMAGLSMALAGRFTDHHALMCRLHLDRMQALGEAVAGLDAKIAPLAARHAREAGLLKSLPGFGDVVVAGWLGEIGPAPHQHFATAQRLASWATVCPGNCMSAKKSKGGRTGDGGNYIKPLLVQAAWAAVRVPGRLQARFRRLVRRFGGARNKGAIKRAIMAIARTLLKIAYQVLKTGTPCTDLGAGFYASRETTQARQDYLIRQLQKLNPGCVITVTPAEAA

SEQ ID NO: 461199 - protein, 392 aa, unidentified
MIFVGIDVSKDKHDCFIVNSDGEILFDTFTILNNMDGFDDLFEKINSCSKDFSKIKVGLEATGHYSYNLLGYLLNKGLPTFVINPLHTNLFRKSLSLRQTKTDKIDSHTIATMLMSNVNLKSYSIALYHNEELKSLSRYRFDKVKERAKLKVSVSRLVTILFPELEKIVSTIHLSSIYELLYQFPGAIQVANANLTKLSNLLANSSHGRLDKSKAIEIKQLAKNSIGSNMPAKSLELKHTIKLIRELDSEISEIEVEIEKIMDKIDSPILSIPGIGMSMAAMIISEIGSFDNFDSPDKILAFAGLAPTTYQSGKLESSHSKMEKRGSRYLRYALFNATKFVCNWDPTFTIYLSKKRAEGKHYNVAISHATKKLVRVMFALEKNKTVYDKAVA

SEQ ID NO: 461200 - protein, 349 aa, unidentified
MRYFAGLDVSLKETAICVVDENGGIVKEGRATSEPEALIAALQKVGLPLERVGLEACSLTAWLHTGLRQAGLPAICIETRQANAAMKTMPNKTDRNDARALAQIMRTGWYREVHVKSRECRAWRSLLVARRTVLNEMRSIENVVRAILREAGIRLGTPSRTTFADRVREYAGGDASVMPLLEPLLAILATMLREFARLTKQVLDIVRPEPVCRRLMSVPGVGPITALAFRATIDRPERFRRSRNVGAHLGLTPGRYQSGETDIQGKVSRCGDELARTALYEAAHTLLVRSRKWSSLRAWGMQIAKRRGMARARVAVARKLAVILHRMWRDQTEFRFGKEPIATVSRAAA

SEQ ID NO: 461201 - protein, 326 aa, unidentified
MEHELHYIGIDTAKEKLDVDVLRPDGRHRTKKFANTTKGHDELVSWLKGHKIDHAHICIEATGTYMEPVAECLYDAGYIVSVINPALGKAFAQSEGLRNKTDTVDARMLAEFCRQKRPAAWEAPHPLERALRALVVRHQALTDMHTQELNRTETAREVQRPSIDAHLLWLEAELKRLEKQIKDLTDDDPDMKHRRKLLESIPGIGEKTSAVLLAYISLKDRFAHARQFAAFAGLTPRRYESGSSVRGASRMSKAGHVSLRRALYMPAMVATSKTEWGRAFRDRLAANGKKGKVILGAMMRKLAQVAYGVLKSGVPFDASRHNPVAA

SEQ ID NO: 461202 - protein, 402 aa, unidentified
MYYIGIDIAKFKHYASIIDQTGKTLTKPISFQNHTEGGNKLLDWIHQYVDTPTDVLIGMEATGHYWLALYSFLLEKGFSVIVLNPLQTNAWRKGTEIRKRKTDSIDATLIADVIRFGRFTETPLANETMLALKQLSRFRSSLVHSVSDLKRKAIVVLDQTFPEYHTVFSDIFGKTSAEVLMEYTTPSDFEHVSVDQLTEMMEKASRKKIGENKAKHLLQIASQSFGVTFCKDAFSFQLKMLLEQIKFIEEQIKHCEQQMGEYLVELNTPITTIPGIGSILGATILSEIGDIHRFDKPAKLVAYAGIDASISQSGQYEASKSSMSKRGSSHLRRALFQAAISGYRSDPVLKAFYEKKRAQGKHYYVCIGAVARKLCYIIYAVLKNNNLTRFLIIHPKDNLFIF

SEQ ID NO: 461203 - protein, 353 aa, unidentified
MDRITRVGVDLAKNVMQVHAVDSAERVVVRKAISRERFVSWFANLEPCLIAMEACSAAHYWARKLHALGHEVRLIPPQFVAPYRKGGALVKNDALDAEAICEAASRPHMRFVPVKSPAQQSVLVLHRMRTGFVEERTALANRLRGLLAEFGVFLPQGTRQLHQHFIDRVEDGSNELTGPARQALMRGWAQWQALDEEIAWFDRQIAEHANRDPQAQRCMDVCGVGRLTASAAVVTVVDARQFKNGRQMAAWLGIVPKQKSSGGKQRLGSITRQGNDYLRTLLFLGARSAIRTAHRRDDRLSRWIVQLQARVGYYKTLVAVANKHARILWAVLAKGERFDRSYAPARTGGAAGA

SEQ ID NO: 461204 - protein, 343 aa, unidentified
MDHFAGLDVSVRETSVCIVDDTGRIVREVKVPSEPVALLAVLTNPAYRFKRIGLEAGPLSQWLFSALAEAGLPVICVETRHMRAVLQAQINKTDRNDARGIAQMMRVGLYRPVHVKTLRSQKLRMLLTHRKLLQSKAIAIDNDLRATLRNFGLKVGVVGRMKFEARIKELVENLPDFAVLVEPLLIVRKALREQIGILHRRLLAVVRDDDVCRRLMTVACVGPVVALTYRATVDVPARFRNSKAVGAVFGLTPSKYQSGESDRTGRISRCGDEMVRMMLYEAAQIMLVRSAKWSWLKAWAMKIARHRGMKKAIVALARRLAVIMHRIWVDGTEFRWTREVLAA

SEQ ID NO: 461205 - protein, 409 aa, unidentified
MMKQNIIFGIDVSSKSSTVCVVIDRIKQGETFKITNDSFGYQDLLDRLNQYLITPLVVFEATGVYSLSLQAFLEDYHIKYLKLNPLKAKKLMDNNLRHNKTDKVDAYRLALIQFNAPQKLRAPQPKEYHELQNASRYYEELAQALIINKNQLHRNLQSAFPQIESILSTSSGRVYWTIVSLFPHAQYVLNHNENQVFQSLLAISGIGKQRAHYLTTRLYALARQAYPYDNESSITIRAIQRNIANLLSLSAERDNVINYMEKLAMQANARSLNIYESIPGIAKTTAVRLVAELGDLRRFDTSAQIDAFVGIDPGRYQSGEKDSHLEITKHGNHLARKILYRTITQMETVKATQPCHITDYYDKKKRSSNSRGYKKIAIASVHKLIRTMFALIKHDQLYDYNVATHNQRL

SEQ ID NO: 461206 - protein, 372 aa, unidentified
MNYNTVYVGMDVHKESFSLCAYTIETEKASHYQKTEADCKNVLKYLEFLRTIYGDDANFICGYEAGCLGYTLYHQLTANNVKCIILAPTTMLEQRSKKRIKTDKRDAEIIAKCLAQHNYSPVHIPTAKDEETKEFLRMRDDHKLALKKVKQQILAFCLRHNYRYDGNSHWTAAHLKWLKALTPEALYKEILDEYLLTYQTLSDKLERLDKRIGELATQDEYKEAVKKLCCFIGVKTHTALSVLVEVGDFKRFASAQHFASYLGLVPGEDSSGDNQNRLGITKAGNRHVRLLLTEASQCYARGQVGFKSKELKASQSGNTPAVIAYADKANERLRRRYYKMVLNKCKKHNVAKTAIARELACFMWGMMTDNIV

SEQ ID NO: 461207 - protein, 415 aa, unidentified
MDVSSTSKFAAFVGIDWGDRKHDVCLQACGSSARESGVLPHRPEAIDQWAQALHQRFSGRAIAVCLEISKGPLVYVLQRYAFFVLFPVNPTTLAKYREAFHVSGAKDDPSDAQLALDVLLTHPERLAQLHPQSAAMRTLQQLVEQRRALVQDVGRLTNRITATLKHYFPQVLEWFKDKDTLVFCDFLSRWPTLKQAQRARKTRLTAFFHEHNVRYPRIIEQRIQDILAATALTCDTAVIEPNRLLVEVLVQQLRALLQAVQRFDHEIDALAPRLSDYTLFSSFPGAGAVFAPRLLAAFGEQRERYASAAEIQMYSGIAPVTERSGNKCWVHWRFKCPKFLRQTFVEFAALSIPHCYWAKAFYDQQRDRGASRQAALRALAFKWIRIIYRCWQNRTPYDEASYLNALKRHGSPLMN

SEQ ID NO: 461208 - protein, 477 aa, unidentified
MNGTGRKAKKQANINNSVNALSQEELGRRIAAVEAGLKSSTWKDLETGGKFDKNAKLTFISDDMLILGCDIGSETHYVRAIDTRGRELSKDAFPFTNNAEGFQRAKAWAVQIAAEHSKKQIVLGLEPTGHYWFCLAAWMITNGISVVQVNPYAVKQTKELEDNSQLKDDRKDPKLIANLVKDGNYGMPYLPEDVYADLRRLSMLREQLTEDRVRNVNRLHREMKICFPEYMDAFGKLDGPFTLIALKKAPFPEDILSLGADGLREVWREAKLKGRGYSRAEQIVMLAAESVGLRSGTAGSKEAVRCFVEQILYLTAKLEEIEDALHQKCREIPCAGNVLEMEGIGETILSGILAEMGNISRFDDVKEIQKLSGLGLVACSSGKHKGETKISHRGRKRLRFWLFQAARSAVSHAEEFKTMHAYYTTRADNPLKKMQSLIVIACKILRVIFMILRTGRKYDPEKMLKDIRHPVPAEQAA

SEQ ID NO: 461209 - protein, 364 aa, unidentified
MTTSMPQPPHAGQQVNDEREVVIGVDTHKDVHVAVLLNRRTGALLGSKTFRTNPDGYHQLLSWAREFGAVPTAGIEGTGSWGAALARFLRSQGVAVIEVNRPDRSDRRRRGKTDTVDAEAAARAVISGRASVIPKSGDGAVETMRLYKLAKDSAVKSRTQAVNQLKGVIVNGDPTLRERLTGLTTHAQVQLCAELDPSDVDGVADAASRRTLRLLAQRIQYLTREIKELEKLLTTAVEQTAPAMLDLFGVGHDSAAILLVAAGDNPDRITSEASFAALCGVSPVEHSSGKIKRRRLNRGGDRQANAALFRIALTRLRADVRTRDYVQRRTSEGRTKREIIRCIKRYIAREIFKIIQLTFAPATT

SEQ ID NO: 461210 - protein, 349 aa, unidentified
MTLFVGLDVSVRETAVCIVDDAGKVVREQKVPTEPDDIVRLLASIGEDYGRVGIEAGPLSQWLVNGLTAAGLPVVCVETRHMMALLKAQQINKSDRNDARGIAQMMRVGLFKPVHVKTQMAQEQRMLLTSRKLLQRKLLDVESDLRGTLRNFGLKVGVVSAGKFEARIRELVAGYPRLALVVEPILAVRRVMRQQFAVLHKMLLDTVRHDPVCLRLMTAPGVGVVVALTYRATVDQPQRFIHSRAVGAHVGLTPRRHQSGEIDYDGGVSKSGDTMLRTMLYEAAQSLLTQSGKWSWLKAWGMRVAQRRGMQRAIVAVARRLAVVLHRMWVDGTEFRWSNSTTAVPSQAA

SEQ ID NO: 461211 - protein, 345 aa, unidentified
MRSMYYIGLDVHKKTISYCVKDGSGQIHSQGAIPATRLDLDRWMKTLPQPWTAAMEATIFTAWIYDHLLPHAAALKVAHPLMLRAIAAAKKKNDRIDAHKIADCLRCDFLPECYMASTEIRERRRTLRYRNLLVRQAVQMKNKIAVLLMEAGVSYNKQKLHKVGYFRELLATNKDIDDGLRPLLRLCRETLVRLGKTESALVRSLGRDPLLVERVERLMTIPAVGPITALTWVLEVGDVRRFSSIKKAISYCGLCGAEKSSAEAIKRTPLSKQRNKHLQSVLIEAAKLAPRRSPDLALVYDQEKQKGNANRATLAVARKLVAYLVALDRRQKEFLPVERENRTAA

SEQ ID NO: 461212 - protein, 318 aa, unidentified
MSDSVFVGIDVSSQTLEIASSAAAKTWQAANDTAGIQQLVVQLTGMKPALVVLEATGGYEFEAACAIQAAGLPVAVVNPRTARDFARAMGALAKTDTLDARMLATFARVLHQHPERERFIKPLADAQLQRLQALVLRRRQIVQMLTAERQRMRISHAAARPSIERVIEFLKAELGDSDAEVADHVQRHHAELAAALSSVPGIGAASVAVLLAQLPELGKLDRRRVAALVGVAPLNRDSGQMRGQRSIWGGRADVRRTLYMATLTAVRHNPVLAAHYEHLLAAGKRKKVALVACMRKLLTILNAIAKHGSTWNPSLHHA

SEQ ID NO: 461213 - protein, 436 aa, unidentified
MGQVIIGVDPHKLSATIEVVDQDEKLLGAGRFSTDRAGCAAMRTYTRSWPERLWAVEGANGAGRPLAQRLLEAGEHVVDVPAKLAARVRLFDTGHNRKTDALDAHSIAIVAVRTQGLRVLKVDGELEALRMLADRREALTRRRVAVVNRLQALLAELLPGQAKKDITTGQAKQLLASVRPRDVAGRTRRRIAAEELAELVVVDAKIRKATAELKTLVLARDSHLMELRGVGPVVAARILADVGDIARFADRNRFASWTGTAPLDASSGQQDRHRLSRAGNRRMNHMIHIAAVTQLRLDTDGRAYYRRKRSEGKKPMEALRCLKRRISDAIYRQLVTDAQRVLDEHLEAGPGGHCGASLLSSATGSHPHTGTSDQPLPGPAPTTLPLTRLTEKPHPGPAPQHPRRRAGTVKVQRPTGRTTLTATSVDADSREPIPTP

SEQ ID NO: 461214 - protein, 412 aa, unidentified
MKDLLEISCGLDVHKEKIVACILTGPLGKPTRSEIREFSTLIPDMIALRNWIVSKNCHHVAMESTGIYWMPIYEILEDAFSGDITLLVVNARHMKNVPGKKTDMRDSEWISTLLRAGLLNGSFIPEKRIREFRDLNRYRKSVIRDITSQKNRIEKFLQSSGFRLSSFISDIFGASGRNIILHLIEHGQIDKTALDSCLKTKTRNRIDEILMSVNGTLSEHQKAFLRILMTHYDSLKKHLAEIETSLEEDMAPFALQVEQLNSIYGISTTASYAIIAEIGIDMKPFKTAEHICSWAGLCPGNNESAGKRKSTSVTKGNPYIKSMLCEIAWVIAGKRNTYLSAWYWRIKQKKGAKKAIVALARKLLVIIYTMLKQGTLFDESCFETRRKHCEQKQLSRYIRELEKHGYHVEAQS

SEQ ID NO: 461215 - protein, 443 aa, unidentified
MSKKHSSHLRGERGQAFAELIRGVPAEQILCVSIDISKYFHVAMIHNGLGEIVMRPFEVDIYQSGFDQLCQAMDQAQAQTQAQVVLVGMEPTSHYFENLARHLTAHSQPVKLINSFSVKQNREQQLMRREKSDEIDVAAIGDLLRRGEGTPYQPVSGIYLRLQQFDRARLSKLKIDTMLKNQIIGHLDRIFPGLLLLDETARKRYTTLFRTDFWQCQTLQDLIRVCPNPNDLVQMEPTELVHAFHAQGRRLGPAMAAKIIARAHATLLPDPVLAGIRCELLKHDLTLLENTQAYLVQLEGCLVELVAQTPYQIWTKLKGLSAIQVASLAAAIGDPTHYTTAAQVFRRSGLVSGRNDSGKHQRKGKGNHILKTGDVYLRRALMNAVATLFLHQPSLMRFNKHLQITKHPGVARVATARKVIGILWAVLRDQSSHTLIPCKGAEM

SEQ ID NO: 461216 - protein, 424 aa, unidentified
MEIVKGILEEEEVYYERCAGIDVHKKLLVVALRIGRKVEVREFGTLTHEIRSIAAWLKENGCQMAAMESTGSFWKPIYNIFEQEGLPIMVCNAYHIKNVPGRKTDVNDARWIAHCLSHGLLDPSFVPDRDQRELRDMTRFRKSQIEERSRNINRLQKFLEGANIKIGSWLSNVEGKSATELLELVIGKPDFTVDDVAKKMHKNLKSTAEEIFLSLESSITPTQREFFKHVMNVIREQTVQIELTDAMIQRMLNDNYKAAVEALDVIPGIGRVSAEQILAEVGTDMSRFNGPDKLCKWAGVCPGNNESAGKRKSGKTPPGNKTLKSTLAQSAKSARKKKDSFFFAQYARLVSHRGKNKATMAVAHSMLIAIYFVLSGYDFKDLGADYYNQFNREKKINSHIKQLSKLGVVIPDDILKNAMLQEPA

SEQ ID NO: 461217 - protein, 358 aa, unidentified
MQQRKKINFEGQNIYIGIDVHLKNWSVTTITQSGYKKTHSQNSSARELFEHLRKHYPGGKYQAVYESGFTGFSTYYALKEYDIDSMVIHAADVPTTQYESVMKSDSVDSDKLAKALKTGTLKGIYVHRRENLDARGVVRLRKTLQTQLGGYKSRVKHLLHNNGVVFPEYFTKNTTHWSKRFMRWLREDVILLSPTRTSLDLLLDQVELFRKNLLNATRQIRALSRSEHYARTYENLASIPGIGMLTGMSLLTEIDDVERFHNEKQFASYLGLVPTSYSSGEKIVNGEKTFRGNKLLGPMIVESAWIMIRYDSVMAAAYGEYCKRMKSQEAVIRIARKLANRILKILRSGQKYEYDRCH

SEQ ID NO: 461218 - protein, 390 aa, unidentified
MILVGIDVAKDKHDCCIINSDGNFPEEVFSILNNREGYETLYKRICSLAVDFTKVKVGLESTGHYSSNLLAFLLDKHLTAYVINPLRVNLFHKGQSLRRTKTDKIDSRNIAHLLMTDSSLKPYSLSSYHMEELKSLTRYRAFIVRERTKLKTSIARLVTILFPELEQLVSSIHIHSIYAMLEKFPGSAYIAATHLTRLTALLLKASRGRFGRETAIRIRDTARQSIGAVSPAKSMELQYTIAHLRVYDQEIGEIESEIEKIMDDVNSPITSVPGIGMQMGAVILAEIGSFRRFDSPDKILAYAGMSPSMYQSGKLTGSYSRMEKRGSRYLRYALFNVTRYVCHYDPGFTAYLSKKRKEGKHYYVAISHAVKRLVRVLYAMEISGNRYKTA

SEQ ID NO: 461219 - protein, 321 aa, unidentified
MTSQNEAVCFGIDISKHWLDIAEYPSAQVTRIDNTAAAIRGWLRTLPRGAQRIACESTGSYHCTLVELLIKAGHQVFLIDGFKLSRYRDTVGQRAKTDRHDARLIARYLAHEGTDLRPFSMPAPAVTELRSLLRRRATVVRSLGRIRQSMEDLPGFGHEVRVALARLTALIKRFEQRIASLINESGWTEPYRRILKIEGVGALTAAGLCAAFHRAPFSGADAFIAFLGMDVSVRDSGKKTGRRALSKKGDSEMRRLLYNAAMAASRSTTWQPFYQRMLQRGFSRTQALVALARKLARIAFSLMKNTADYVPKQHENACVGT

SEQ ID NO: 461220 - protein, 426 aa, unidentified
MNRSVVVRHSFNPFMVLDVGVDVSMDELHFDAVIGNEAIQKEIANRTEQITVMLRWLSNKAKHSGFNNLRIVVEPTGNYHELLFRIATGMGLETTYVRGEAVKKMNKILHNDNGKTDKRDPVAIRELADRNIVFKHRRLPEIYQMMRRFNLMYANEEKSMIEAKCRIHRCLTAVFPDLSFKSEFVYSPSGRAIMQCYSYDPHAIVRAGLKRVTKRLKALVPRIRKLTIQRLMKYAYDSVQSTPPGRINDLKIFELRYAWDDMESAEKRRAEIGKKLENLYDEAREADNNLPKAIKGVVTKLALARLAGELGPLSDFKSCQQIFKFSGLNLRERESGKFKGEIKISKAGRFMVRSIVNQMVLPLVKRTRLFGAYYHFKTGVEKMKGTKAMTAVARKLLKMLWGLYKSGAEFSPERVFACESTFAEAA

SEQ ID NO: 461221 - protein, 394 aa, unidentified
MKLVGIDVGKNSHHFCVMDKETGEFNVTPTSFSNNKEGFDFLINSLKPYSKKSILIGMEDTGHYHVALLKFLLSNGYTVALINPKTTDLARKMEGGITKNDKLDTITICDVLDTPERKKQYRITKVDRFDLYEQRQLTRHHHNLKEELNVYCNRLQKSIDLVFPEFNTLFSSKYSIVYMNLLKTFGSAEAIASTDIRTIRKCFEIKGKGGRISLTPEKLKECAKNSIGISSEVETIQIKHLVSQIMLIKEQIAEIDKKIEEFSIKNNSPILSIPGISHFSGTSILSELGDIGNYSKPSQIIKFAGVAPYHYESSQYNAKHTAITKKGSKYLRKTLYQIILPVINNNPVFKKYYLLKISQGKGHRCAQGHCIRKLLRIIYHLLETGQSFDPALLR

SEQ ID NO: 461222 - protein, 320 aa, unidentified
MVKMKQYTPRYAGIDVSKAHLDVYLHPEGSHRRFNNHKTGWRALRLWLADAHLDGVVYEATGRYHKGIERYLGGHGFPIARLDARRARRFAEALGINAKTDPVDARMLAQFGAFLRPPVITLPEPALEQLKELVAARRGLVAQGTRIANKRKTVVSRLLKRQLRQSAEQVGRQIARIDAECHEQARADPALAQRLAILMSITAIGKVTAMTLLADMPELGTLNDKQAASLMGVAPVARDSGTFQGKRHIRGGRAQVRQAVYMAALVTTRFNADMKRKYQTLIENGKPPKLALTVVMRKLIILANALIRDNRKWQEIRPCS

SEQ ID NO: 461223 - protein, 403 aa, unidentified
MYAVGIDVSKGRSTVAVLEPLGKTVAKPFEVRHTKSGMNDLVNYLNTLDGECRIVLEHTGRYYEPMVRWLSGAGLFVSAVNPKLIKDFDNNSLRRVKTDKADAKKISRFALDKWYMLRQYTAMDNIRTQLKTMNRQMSFYQKQQTAYKNNLIALMDETYPGANKFFTSPKRPDGSEKWVDFIEKFWHVDCVCNISLKSFTEKYQKWCKKHGYIFQPDKPAEIYNASKELIPILAKDDMTKMFVQQAVTQLNAISKAVEELRQQMDSLASQLPEYPVVMSMFGVGTTLGPQLIAEIGDVHKFTKRSQVTAFAGVDPGVNESGDYVQKSVHTTKHGSPYLRRTLFLIMDVLIKLQPEDDPVYRFMAKKRDEGKPYYVYMTAGANKFLRIYFGKVKEYLSNLHLEE

SEQ ID NO: 461224 - protein, 350 aa, unidentified
MIIIGCDYHPGFQQIAFVDTETGECGERRLAHREEAETFYRDLHKKGGRVRVGMEASGHARWFERLLTELQFELWIGDAAEIRTKRVRKQKTDRQDAQLILKLMLEDRFPRIWVPSWENRDLRQLLWHRHRMVQARTRIMNQLQAVALNEGLRYKKRLWREAGREQLELLRLAPWASRRRHDLLELLDRLNPTIAQLTTAVEEEVEKCPEAQRLMTHPGVGRLTALAFVLIIGRTDRFQGGKQVASYLGLVPEEESSGDRRRLGHISKQGNSLLRFLLVEAAQVTVRSDSEWRGKFFHLAMRRGRKIAKVAMARRLALRLYWMWRRRWNYEQLTKFGSHAGQPGHPHGVQ

SEQ ID NO: 461225 - protein, 346 aa, unidentified
MTIVGCDFHPSWQQVAVLDVETGEINEHKLVNGKGEAERFYRALPVPSLVGIEACGNSQWLIELLQQIGHEIWIGDAAQIRASYVRKQKTDRRDAAHILKLLVENRFPRLWTPSAEQRDLRQLLVHRHKLVSIRTRVKGGLQHLALNCGLQKKSKLWTAAGQKTLRELPLDTWAACRREDLLGLLTNLNQLIDKLDVAVEGAAAEHPQARLLMTQPGVGPITSLAFVLTLGDVSRFKRGKQVASYLGLIPREHSSGGKQRLGAINKQGNSFMRTLLVESAQTVTRLDKGFRKQYLHRCHRMPKGVAKVAAARKLAVRLFWMLRTNTRYPEVVRIESSPALAVVGES

SEQ ID NO: 461226 - protein, 357 aa, unidentified
MVNGIIHLNEERGSDMNISKKVDRMGMDLGKNTFHVFGVDESGSAAVKKKLRRKQVLEYFANLPPCLVGMEACGGSHHWARELIKLGHDVKLISPQFVKPYVKGNKNDYNDAEGICEAVGRPTMRFVTVKAIEQQDIQGLHRIRQSVVKQRTALANQIRGLLGEYGIVVAQGISRVRSRIPEILEDGENGLTDRFRGWLAELLEAFRALDERIQQYDQEIAREHAANAACQRLSAIPGVGPKSATAIVASYGDGKQFSDGRQFAASIGLVPRQHTTGDKPRLLGISKRGDKYIRTLLIHGARSVIYRIEGKTDSLSRWLQSLVARRGKNKASVALANKNARIIWALLSRGECYEAGE

SEQ ID NO: 461227 - protein, 319 aa, unidentified
MTTSSIVVGVDVAKDRLDVAVRPTGETWSTANDEAGITALVARLRPLGPGLVVCEATGGFERAAIAALAGAGLPVVVANPRQVRDFARATGQLAKTDQLDAGILALFAERVRPTPRPLADAAAQLLDAVLTRRRQLLEMLVAEKNRLGFAPKPLHRGIQAHIRWLERQLDDVTKELAGLIEASPVWRAKDDLLQSVPGVGPIVSSTLLGELPELGTLSHKQIAALVGVAPLARDSGTLRGKRLVWGGRASVRTALFMAALCGRRWNPQLKVFYERLKAAGKPTKVALIACARKLLTILNAMVRDHKRWAMPAPSVQYSC

SEQ ID NO: 461228 - protein, 391 aa, unidentified
MSMYFIGIDISKYKHDCCIISAANQKVVSKVIIKNNKAGFNELLTIIHSLANPADIRIGFESTAHYALNLELFLENSLLTFMEVNPVLISEYKKSKTLRRTKTDSVDCESIARWLMTVEYKPHSKGFYHAYSLKSLTRLRDKLIRQRSFYLVKITNVLDHTFPEFKPFFNERLSKTALYLLENYGSAEKMARMNSASYEKLRSVSRGKFSPQQFLRLKELAVNPVGVNNSIFDVELNSLLSLYKSLVKEIDTIEKEINKLIEEVHPHYMSVPGIGPLSAAVIYSEYGDISNFTNPGQMLAFAGIEPGINESGTESHGGKMVKRGSSQLRYTLINCCLPLIRFDMTFATYYAKKRGEGKPHRVAITHVAKKLIRVIYALESQDIDFNAQELR

SEQ ID NO: 461229 - protein, 424 aa, unidentified
MKRTQNEKILQIKFETLVVGIDIGKDTHYARAFDCRGIELSKLLRFSNTNQGYKALEDWMQEIMKEKGKTEAIVGFEPTGHYWFTLGDHLQRKGHRLAIVNPFHVKCTRELDDNSQTKNDKKDPKTIAMLVKDGRFRDVYIPEDVYQELREAVSERERLVEQMISLSNQVIRWLDIRFPEFNQVFKNWRGEAAWLTLRHFPTPAKVAATGASSIVSTWRKKMKKPSLKKAEKLVNLAIRSIGRTAGNEAAEAALQNLLTQYEMVMRQKQDIEQLMQELLIKVPSASKLVDIKGMGMVAAAVIVSEIGDISRFNDPRQIQKMAGLSLRENSSGKHKGKTRISKRGRRCLREGLFRAMITMLATNSEFRQLHQRNLSREQNPLNKMESIVALCGKLIRVIFAILTKGNDYDADRMLNDMKRSMKAA

SEQ ID NO: 461230 - protein, 413 aa, unidentified
MEILHPRCAGLDLSKRDAKVCLRVVLAGKARATQEITTWSSMTGDILALRDYLIEAAVTCVAMEATGDYWKPFYYVLEDGPFEVMLVNARDAKNLPGRKTDVSDAAWLAQLAAHGLVRASFVPPEPIRHLRDLTRTRTAITRERTREAQRLEKVLEDAGIKLSIVATDITGTSGRAILGAMVAGERDPGVLADLSVRQLRVKIPALIQALAGRFSDHHAFLVDLHLQLIDQHTAAIDTLTQRIEEGMSPFLAARELITTVPGIGIPTADVIIAEIGADMTRFPSAGNQASWAGVCPGHHESAGRTTSSKTRPGNRWLKGALGAAALSIARHPGTFLHVKYQRLARARGRSRAVVAIEHTLLATVWTMLTNGTLYDEPGPDYYARRNPERTKHHAIRQLEALGYHVTVEPAGAA

SEQ ID NO: 461231 - protein, 370 aa, unidentified
MKEYSEAFVAFDTAKKKHAVSIADVGREGEIRYLGEIDSSPLTIERMIRKLAGRYEKLHFCYEAGPTGYGLYRQVRGLGHDCSVVAPSLIPKKSGERVKTNRRDAVSLARLFRAGELTSVWVPDTVHEAVRDLVRAREAASQDLRRKRQQLLSFVLRHGRIFSGRQHWSRAHLRWLAQQKFDHSAQQIVFQDAVDAIDDAATRLRRLDEQVVAIVPSWSMAPVVAAYQAVRGVSFVVAVTFVAEIGDLRRFDSPRQLMAFLGLVPSERSTGERVRRAGLTLAGNKRARRVLIEGAWSYRYPTRVSQTLQARLEGLPKAVRAIAWKAQIRLCARYRRLNAAGKKLPVVIAAIAREMAAFLWAIARHVAPAA

SEQ ID NO: 461232 - protein, 341 aa, unidentified
MHPIYYIGLDIHKRTIAYCVKRTDGVLIQQGTVAAKRKALLDWVSKLPGSWTGAMEATMFTGWVYDFLKPHAFELKVAHPEMLKAITAAKKKNDRADAEKIADLLRVDLLPECYMAPEELRELRRILRYRNMVVRTATSMKNKISGLLMEVGATYDKRRLHGKEYFNCLLERVEDVPESVKNLLKLSRSSLDMFTAVQKKLIKVLKEDDLIGQRVKRLMSIQGVGEVLALTWVLEIGEVSRFSSSRQAISYCGLCSAQHESAGRERRGPISKKRNKHLQTMLIEAAKLAPRWNDELALLHEKELVRGNCNQATLAVARKLVKYLLAVDRRENDFETLQQAV

SEQ ID NO: 461233 - protein, 423 aa, unidentified
MKPLATGGFTAYVGIDWADTKHDVCLQVPGNESREFDCIAHRVVAIDQWAQSLRQRFGSPIAVALELAKGPIVYALQKYEFLVLFPINPSTLAKYREAFKPSRAKDDPTDAELALDLLMRHPERFAPLQAQSEGMRALLSLTEQRRELVADKTRFTNRLTNTLKQYYPQALDWFDQRDTVLFCDFLARWPTLTQVKRARPSALKAFFYAHNGRRAHLISARLNAIKAAIPLTQDLGVITPCRLQVLVLVEQLRTTLQAIERFDREIAELAPRLPDYCLFRDLPGAAPHLAPRLLAAFGEDRRRFQHADELQKYAGIAPVTERSGKKSWVHWRWQCPTFVRQTFVEWAGQTINKSFWAGAYYRQQRDKGSSYQAAVRSLAFKWIRILYRCWQTNTPYNESRYLSALRKRRSPLLNNLDLDTQNA

SEQ ID NO: 461234 - protein, 363 aa, unidentified
MHLQCPVRQLGNINWRMVMNINDPRNQLILGVDTHLDLHVAVLVSMIGQVVSTEVFETNKKGYNRLFKWCNSFGQLLKAGIEGTGTYGAGLSRFLVSNNISVYEVNRPNRARRRLRGKSDLTDAENAARAVLADEAKAVPKTQNGSVEAMRFLLIARRSAIKSRTQAINQIRAILVTAPDEVRKQYLIASTSACIEACKNIAKLGDSTLFDMLAISLKLLAKRWLVLTEELKILDRNLKRLTLTTTPLLTQELGIGPYVAATLLVTAGDNPERLKKESSFAALCGVSPVEASSGKVVRHRLNRSGSRVANNAIWTITLIRMCSDPRTQQYVDRHTKEGRSNKEIQRCLKRYIARELYQKNSMI

SEQ ID NO: 461235 - protein, 356 aa, unidentified
MTSSSKYIGMDVHKESISIAVRNAAGKIVMESVIETKANMILEFVDGLRGDVHVTFEEGTWSAWLYDLLKPRVTKLVVCDPRRNALLQEGNQNDRVDARKLAELLQNNQLRSVYHGDHGLRTPKELVRSYLTITKDLTRVMTRVKAIYRSWAIPCSGKQVYSSRHRAEWLGKIGEPGVRRRAEFYYQQLDALRSLRQEVRKDLLAESKKHKIWKRLSEIPSLGPIRAAVLLGILQTAHRFRTKRQLWTYSGLGIEVHSSADHHVVKGQLERKKKHIEIRGLNKNYNHDLKNLFKSAAVVASTKPGPFEEFYAALVAKGMRPEMARLTLARKIATIVLIVWKRGVCFDANHLKPQTA

SEQ ID NO: 461236 - protein, 456 aa, unidentified
MTPRKTKNLRMPAQRAEALRVVHPDAAAIDVHSEVHWVCVPADRDPQPVQTFGAFTVDLEAIADFLTRCRVTTVVMESTGVYWIPLYELLERRGFQVLLIDPRKARRLEGRPKSDRLDCQWLQRLHAYGLLAGAFRPPDQIVELRSYIRQRQMLLSYASMHIQHMQKALEQMNLKLTEVVSDITGATGQRIIRAILDGVRDPVVLAKLRDCRCKNDEATIAKALQGNWRDDHLFTVQQAVELYDFYHRQIGACEEKIEAFLGTFADRSGGKPMPKKVSRCRTANAPGFDVRTLLYRLSGVDLTVIEGIEGTTALIILSEIGYDLSRFPSVKHFTSWLGLCPNRKVSAGKVKSSRVRPGGNRVNQALRLAARSLHSSKSALGAFLRRLKARMGKAQAITATAHKLARLVYAVLTNGTEYVRQGLEDYEAKYRERLIRNVERKARELGFGLVPATTQA

SEQ ID NO: 461237 - protein, 321 aa, unidentified
MNKSKQICGVDISKNVFDVADSQGNHSQFKNDGKGFNSFLKTLSSESLVVMEATGYYHYRLAQFLYEQGIQVSVVNPLSVKRFIQMKLAKIKTDKSDAKAICEYATINEVPLYTAKDKNQAECLQLMRLIDIYLKQSTALKNKLHGEKTLGKPSKTVYHSLNRSLKAVQKEIQILEDRLMEIVKEEQQKQLTLLKTIPGFGSKTAIMLIVLTDGFSNFENARQLCSYSGITPTLRESGTSVRGRSRISKIGNTKLRNLLFMCSFSACKHNKACREIYERIIAKGKSKKLALIAVCNKLLKQAFAIAKSGLPYQENFVSKLA

SEQ ID NO: 461238 - protein, 444 aa, unidentified
MRITRRAEKINLNHVVDVSVDVHKETLCFFFEIGGHEYSDECQNRTSVIEKRLQRYHAIALEHNKKSLRIVCEPTGQYQNKLFRTARRLGFLTCYVNAESVAKFRLIETNDMNKTDTKDPRIISSLGKLNKTLRFRLLGEEYLMLRKLHKLYDETDVSLTSLRCRISKLLLELFCDYSFKKDFLYSRSGLSLIEHYGCNPNRIVADGFPLFCRTMKKSVPRIRQKTLERLWEDACNSVLNELPAGYVSILESRLHEYLEDYHREQERKSEITRQMVELLKSLREKDPNIPPPTPHVISEKNPARLLAETGPLHDFSHWRKLLRYAGLNICFSHWRKLLRYAGLNICMRQSGTYKGKNKISKKGRPLLRKVLQQIVLPLVRKRYLFGEVYHRKKEEEKRPGTMAMAIVARQFLRKVHGWYRSGKVFDEHRFFTCKSRYIELAKAA

SEQ ID NO: 461239 - protein, 339 aa, unidentified
MNCVGIDVSKGKSMIAVMRPFGEVVVSPFEVRHTANELSELAGLLKSLDGETRVVMESTGNYHAPVAWLLHDAGLYVSVVNAMLVHDYGNNSLRRAKTDKKDAVKLANYGLDHWLTLPRYIPEEDTRLMLKICYRQYQQYSKVQTMLKNNLISLLDTAFPDANRLFTSPPRADGSEKWVDFVATFWHCECVCGRSEKAFTTQYQKWCRKHGYNFSEDKALDIYASACRHFGVIPKTDTAKLLVEQAISQLQTTSSALAALKQEMQSLAASLPEYPVVMGMFGVGPTLGPQLIAEIGDVRRFHSKKALVAFAGIDAPPYQSGQIDVRSRSISYQSPYPYG

SEQ ID NO: 461240 - protein, 375 aa, unidentified
MSDHSEAFVGLDTSKLRNAVAIAEGVRGGEVRFLGEFENSAAATAKLVKKLAAKYRRLTFCYEAGPTGYGLYRQIKSLGHECVVVAPSLIPKKPGDRVKTNRRDALSLAKLLRADELTAVWVPDRGHEAMRDLTRARETAMMDLRSKRQQTSAFLLRQGLHYSERKKTWTKTHMNWLASQKLEHAEQRLVFEEMMLAMRQAQERLERLEQAIRVAVPDWSLAEVVTALMAMRGIDLISAATFLAEIGDLSRFQHPSELMGYLGLVPSEDSTGDRIKRGPITKAGNRRARRMLVECAWSYQHPPRVGQEKQEKVAAAPRAVREIAWKAQCRLHGRYRALVRRGKLKTVAITAVARELAGFIWAVSRAITTARVVAK

SEQ ID NO: 461241 - protein, 465 aa, unidentified
MQNSNQRKSRPGSPRPIEGLPIVRHKVAGIDLGSERHWVCAPMIEGSGREVADFGATTPELIRMAQWLKARKVESVAMESTGVYWIAPHEVLEAEGLEVLLVDTRQLARVPGRNKKSDPLDCEWIQRLHSCGLLMGSFRPKEAVCMLRTLVRDKGNLVAEACDWLRRMQKSLDQMNVRVHRAVSDIDGATGMAILRAIVAGERDARKLAKLRDRRCHKSEEEIAEQLSGHWREDHLFSLRQGLKMYDGIQERITDYEKEILRKLGEMEREEYRKQAVPPLNNPQKAKLIRKRGEEPMRQALYRMSGVDLTGIDAIGVETVQLVLSEYGPDLSRFATEKQFVSHVTLAPHKPTSGGKPVKKQKKRGGASSRVAAGLRMAALSLRHSETALGAYYRHIARRKAGDVAVFATARKLATLIYRLLRWGQPYVDEGAAAYEKRHQQARIKSLTAAAKDLGYQLTPTPNLL

SEQ ID NO: 461242 - protein, 355 aa, unidentified
MTSIIYVGMDVHTTNYTLCCYSMEDDRFFAEVQVEPDAKNILKYLARIEKQQSRDCRIVCGYEAGCLGYSLYHQLHAHGIDCVILAPTTMMTKPGKRIKTDRRDARLISKCLAFHTYSPVYIPTEVDDAVKEYIRMRDDANSALARVKQQIIAFCIRHGKIHDGKSYWTNKHLEWLSSLDLGNKILSEVLQEYLIRYYQLREQVDMYEKLGCFRGIAAHTALSFCVEVGDFRRFATAQQFASYLGLVPGECSSGDKQQYTGITKAGNSHLRKILVETAQVFGRSATKSGKSVALKERQAKCDSLTVAYADKANARLKKKYFKIAMRSKVNIAKTAVAREMACFIWGMMTDNISCA

SEQ ID NO: 461243 - protein, 351 aa, unidentified
MEKTRKKHLYVGIDVHKRQWSVSIFTSVIHHKTFSQAPRPEVLKVYLDKYFNDYQVICAYEACKFGFWIHRRFSAMGYQCLVVNPADIPTTNKESSEKTDPIDSRKIAKALQAGLLRAIHVPSEATIGERQLFRYRKKLWSDLVRVKNRIKDKLLFNGIDIPSEYDNPYWSKGFLSWLKSVEFPSSKTRLTLDFLLEQYEFIYRHFLKVSIEVRKLHKLPKYKADASRLRQIPGIGPLTSVQLLIEIEDINRFKNFNHFNGYIGLKPMVHSSGERDTKGYMTYRSHHALRSSLVECAWTAVQRDPVMLQTYEELVKKHTKKRAIVKIARKLASRVYRVLKQKEDYEIGVVK

SEQ ID NO: 461244 - protein, 344 aa, unidentified
MEYYVGLDVSLRSCALCIVDNKGKVHLERELPCEVEDIADCLAAFEHPIERVGFEAGAMSQHLFFGLQSAGFDVVCMEARQVSAALSAMRNKTDKTDAKGIAQILRTGWFSPVHMKSREAHGLRALLSTRKALLKKTMDLANEVRGLLKIFGVRLPRTVKHGSFDGLVRPIIEMDDVLAHAVIPLLNARAVLFQHYLELDRRVKRAASQDEVCMRMMTVPGVGPIAALTFKAAVDDPNRFRRSRTVAAHFGLTPRRFQSGEHDNPGRISKAGDRDVRATLYAAANALLMRTMAGSQIKSWGMRLMRTKGRRRAVVAVARKLAVLLHRMWIDGSEFRQEQVGGTA

SEQ ID NO: 461245 - protein, 346 aa, unidentified
MEHYVGLDVSLKLTAICIVDRTGKIQREGVVHSDPEAIAAFIKSNAPHVARIGLETGATSTWLWTELNRLGLPVICIDARHAKAALKMQINKSDRNDAIGIARIMQCGWYKEVRVKDLDSHAVKALLVSRALLVKIKRDLENQVRGLLKNLGLVIGPAKMNVFALRAAELTEDRPELTVAVTPLLSARMAIAQQIADLDRKVMKLARNNAQVQQFMTAPGIGPVTALCFLATIDDPRRFRRSRSVGAYVGLTTRRYASGEIDWTGRISKCGDKMLRSYLYEAANVLLTRVAKWSALKAWGIRLAKRSGLRKAKVAVARKLAVILHRMWIDGTDFKWSSKETAKQAA

SEQ ID NO: 461246 - protein, 367 aa, unidentified
MIYVGIDVAKDKHDCFITNSDGEVLFKAFTITNNLDGFNDLYQKIETVMKDITKVKVGLEATGHYSYNLLGYLIDKGLPTYVINPLHTNLYRKSLSLRQTKTDKVDARTIASILMSDVNLKSYSDISYHNEELKSLTRYRFDKVKERAKLKSSVSRLICILFPELEKLVPTLHMASVYALLSEFPGAKQVANAHLTRLTNLLSEASKGRYSKDTAITFRDAARTSIGSNMPAKSLELKHTIKLIKELDSEIDEIENEIKIIMDEINSPILSIPGINYRMGAMIIAEIGDFSRFDSPDKILAYAGFSPSTYQSGHLYGAYAHMEKRGSRYLRYALYNAAKYVCHWDPTFTAYLAKKRAEGKHYNVANI

SEQ ID NO: 461247 - protein, 319 aa, unidentified
MDGDGEKLDCVRIANDPMTLLEVVGKAGADAEVVIEATYGWYWAVDLLQDAGFRVHLAHPSGNDWGNRRVKNDERDARDLADLLRLGRLAEAWIAPPAVREARELVRYRAKLVQLRSGLKAQVHAVMGKEGVLPTLTDMFCQAGQRELDRMEFGDVYVTRIESLRDLIALYDREVAMLEAKIHQLLRHDHGYQTIQALNGVGRTIAAIFVAEIGDVHRFHSAEALCSWAGLAPRHRESDTKVVRGGITKMGSRLVRWAALEAIARYHGGTWLQRDFDRIAARRGKNKARVAVARKLLTLVYYGLRDGEIRCLRADREAA

SEQ ID NO: 461248 - protein, 339 aa, unidentified
MNITTIGIDLAKTSFSLVGSDKHGKIVLRKTLSRNKLLPFIAQCPPCLIGLEACSGAHYWAREFELLGHRVRIIAVKFIEPYRKGGKNDNNDAEAICEATTRPNIWSVPVKSADQQAALCVHRVRQGVVRERTAWINRLRGLLSEFGIVIPKGRYAVQAAIPRILTDEDNGLPDLARQMIHDLWLCIQHSNEQILSYDRALARQAREDETAKRLLTIPGVGEQIATGIVASVPDPRLFKNSRQFAAWLGLVPRQYTTGGKIRLGRITKHGDKYLRMCLVHGARAVVASLGDKQDHVSCWVRDLIERRGYLRAVVALAARNARLIWTLMMKREDYRAIQN

SEQ ID NO: 461249 - protein, 307 aa, unidentified
MEKFAGIDVAKDTLEVFITPGTRKSFLNEDEGRKELGRFLADVRPGLVVLEATGGYQIPVVETLALRNLPVVVVNPRQIRDFAKATGRLAKTDTIDAEMIARFAEAIKPEVRPLKDSDANRLQSFVARRRQLVEMLTMERNRLGTAPDWARADMEDHIEWLTDRIKKADKDISSFIRKTPLWREKENLLRSVKGIGPVNASILLARLAELGKLNRKKICALVGLAPFNRDSGRFKGRRSIFGGRAEVRAVLYMAALSAIRYNPVIKAFYGRLVHSGKLPKVALVACMRKLLVILNAIIRTNTPWCAQ

SEQ ID NO: 461250 - protein, 404 aa, unidentified
MRFIGLDIHRDFCEIAISKGSKARSVGRVNSTPEALTVLGNSLAPQDKVILESTGNALEIARILEPFVCDVVIANPMQVRAISHAKVKNDQFDARSLAELLAADLVPRVWIGDEQTRVLRRLTSRRSQLVRARTRPKNEITAVLVRNLKGRPPMTDLFGRQGRRWLAGLQFPADEHDTVQACLRQIDFLTTEIAHVDRQLAEKALTSPEIKRLMTIPGVGITTAATLIAAIGDVQRFPTAKRLVGYLGLDPRVRQSGQTPCPTRPNLQTRLLRLPARARRSRLVSDQNTRTAARVLPAHPHPPRSPDRDRRDRPQTRLALLATAHHQPGLRLQTPDDVDRKLRALELRAGAPVRPRTQRQPGTPTAKQRAQLERQLTEQAELAYQRLIQDWQATRNNTAPNATP

SEQ ID NO: 461251 - protein, 343 aa, unidentified
MMNETMIGVDLAKAVFQVHGASMTGEPRFRKKLSRQSFSEFMAKQPPALVVMEACGSAHHWAREMTRLGHEVKLIAPRYVKPFVKRQKNDAADAEAIVIAARQPEMRFVEPKGAEQQSRAILFRARERLVHQRTELINALRAALYEYGHVVPQGIRQIGRIEEILEAPRSDLPDLMRDECRDLLEQIAEQTVRINARTEKIKALAAEADTARRLQTIPGVGPMTALAVEAFAPSMDSFNCGRAFAAWLGLVPRQFSSGGKERLGRTSKAGQADIRRLLIIGAMSRLNWMGRKSVPEDSWLARITSRKPQMLVAIALANKMARTMWAMLTKNEDYRVPAQAGAA

SEQ ID NO: 461252 - protein, 314 aa, unidentified
MDIDVSKAILDIAASSAIEQFSVGNDSDGFDAIIAELRMYAIALVLMKATGGLETAIVCALQAEGFELAVVNPRQARDFARAMGYLAKTDSIDARVLSQMAEVLNRHPERERFIRALPDTECQVLTAMVVRRRQLITMLVAERNRLHPAHPLNRKSINIIIKALEDELARLDADMNSHIHSHFKELAKRLSSIKGVGTMTAAALLAEVPEQGNLSRREISVLVGMVPVNRDSGTMRGRRTIFGGRAGVRTALYMAALVATRFNPVIKVFYMRLLAAGKPKKVALVTCIRKLLTILNAMLRKNEEWNESYHHVAP

SEQ ID NO: 461253 - protein, 350 aa, unidentified
MLIIGCDYHPSFQQIAFVDTESGELGERRLAHREEAERFYRELKEKNLSARVGMEASGHSRWFERLLCDLQFELWIGDAAEIRTKRVRKQKTDRQDAQLLLRLMVEERFPRIWVPDAENRDLRQLLWHRHRLVQTRTRVMNQLHVVALNEGLRRKKALWRPAGRQELESITLAPWASRRRQDLLDLLDQLTPKIQQLTRALEEEVEKRPVARCLATHPGVGPLTALAFELVIGTPERFHCGKQIASYVGLVPTEESSGDRRRLGHISKQGNVLLRFLLVEAAQVTVRSQQEWRSKFFHLAMRRGRKIAKVAMARKLAVHLYWMWRQGRDYGQFGKLGSHAGEPGHRDGVQ

SEQ ID NO: 461254 - protein, 347 aa, unidentified
MLIIGCDFHPGFQQVAIFDNTSGEIQERRLGHRAEAEQFYRGLAGQPVCVGMEACGHYPWFERLLAELGFELWLGDAGRIRAQEVRQQKTDRRDAAHLLQLLLEHRFPRIWVPSLEERDVRQLLVHRHKQVQTRTQVKNQLHALALSQGVQRKRKLWTQAGRAELEQLEWLPYAAERRKQLLRSLDRLEQEIAELNQRVEAEVAQRPAAGKLQTHPGVGPVTALALVLTLGPAERFASGKPVGRYFGLIPSEHSSGGRQKLGRISKQGSSFLRFLLVEAGQSAVRQDAELGRFYRRLAARKHRALAKVAVARKLATRLYLMLREDWTYVQLCRAMVSASPSHSVVER

SEQ ID NO: 461255 - protein, 423 aa, unidentified
MDILYERVAGLDVHKDTVVACVRIVAEGKTARECRTFSSTTEQLIELRAWLEECRCTHVAMEATGVYWMPVFKILGEGPFELIVANAAHIKNVPGRKTDVNDATWIGDLLACGLIKASFVPGEDIQELRSLTRTRKQLVREQTRHVQRIEKTLAEANIKLNSVISDIMGASGRRMIEAMIEGVRQPRQLAELAGKQIKATPKELYDALHGRLTDHHRFLLDLHLKQWDGLDGTIRKIDREIDQRIGRLHTKGANGEVPFRTLIELLSTVPGISTLSASAIVSEIGCDMNRFPTAGHLVSWSGLCPGKNESAGKRKPSRLRKGAPWLKTMLVQCAWAAKRKKDSYYRAQFFRLQSKRGPQKAICAVAASILTAVYHILKNGTEHHDLGASYFDRRPLELKAGRLVARLKKLGFNVQLQPAAEAA

SEQ ID NO: 461256 - protein, 391 aa, unidentified
MTFFVGIDVAKFKHDCFIADDNGRVIKDSFSFKNDKAGFNVLLLALDELKPKEQIKIGFESTGHYHFNLKLFLEENNFTYMEFSPLLVHKFIATVSLRRTKTDKKDASMIARYLMTVDYKPYPNKFYHINNLKSLCRFKESLIVERTKYLNKLTVILDLIFPEFKPFFENKFNKTAFYLLSKYKSPKRIANLSINAYHEMRSKLKHTISYQKFSALKDLASDSIGKTDDVLNFELESLLDLHFSLNVRIEAMEKKIIVIYQSLAYKVHSIRGVGLGSAAIIASEIGNFSRFASAHQLLAFAGLDPSQSQSGISESSGKMVKHGSSYLRAAIMRVAETFYVFNPQISDFYWKKRKEGKAHNVALSHVARKLVNTIFALEKSPDKVFNSALLK

SEQ ID NO: 461257 - protein, 340 aa, unidentified
MQSTTIAVDLAKSVFQIAVSRRPGKVAESHRLSRSQFRRFFAERQPALVVMEACGTAHFWARELQALGHQVRLLPPHEVRSYVHRNKTDRADAEGLLEAHRNERIREVPVKSVSQQAIAALHRLRSAWMKDRNARINLVRGIARELGFSIPVGARHVVVGVRALLREDQLPELLRPVLEQACQEIGDLERRIVEVEQQLSAVAKQMPVVKRLQSIPGVGLLTSTALVAFVGEIQRFASGRHFASYLGLTPREHSSGLRRRLGSINKAGDGYLRTLLICGARAVLNAAQRGKLKQPDRLRRWALQVQGLRGHNRAAVALANKLARIVWAVWNNDSRFESRA

SEQ ID NO: 461258 - protein, 386 aa, unidentified
MHHATTLPVPEETCIRGDCATLFVSLELSRSTWVATALAPGSRKMSKHTLVGGDGRKLLDLLARLKTRAEQRIAAPVKVVTIHEVGLDGFWIHRLLKANGVESHVVDPASIAVPRRHRRAKTDAIDGETLLRTLMAWQRGEPRVCSMTVPPSPSEEDRRRISRERATLLRERIQHTNRIRGLLFGQGVTNYNPLHKNRRVCLEELRTGDGRSMPAHLKSEILREIDRLELVLRQISKVEAERDEMLQPAEASSPAALLMRLKGIGAEFATVLYLEGLFRHFENRRQLAAYAGLAPSPWKSGSIDQEQGISKAGNPRLRTTMVELAWMWVRYQPASALSCWFRQRVGSERGRTRRISIVALARKLLIALSRYINHGEIPTGAVMKPV

SEQ ID NO: 461259 - protein, 412 aa, unidentified
MNQDKLYVGIDVSSKNNVCYLMYSDGSKHSSFSVPNNRNGAKIIVDRVTSVLLLQDIPQVVIGMEATSVYGDNLMRFLRESGSLGRFERSLHMLNPKQVKKFRDAYSDLPKNDHVDSYIIADHLRFGRINKEVYMDDYKYQALKMYTRARHQLVQELTREKQRFLNTVFISFSGLTQEKIFSNKFGATSMALIEEFSSLDELAYMSTDELVDYIRKKGKNHFENPEEIAEAVQRVAKNSYRPPQVIADAAKQMLAISMNTIRLLQKQIKEYDKAIEKMLEAFPQTLTSVKGIGNIYAAGIIAEIGDINRFPSQASLAKYAGLVWTQHQSSDFEAEDKRMIQGGNHHLKYYLCEAANALRRCDPEFKRFYALKYKEANKHNHKRALALTARKLVRLVYTLLKTNHLYIPPEEY

SEQ ID NO: 461260 - protein, 387 aa, unidentified
MPQPNDLSKSLAALDQDSTLIAVIEMSQSTWLVAGIVPGINRQPLKKLAADEAALLQLLDRWRDEATKAGRTIDRIVVAYEAGRDGFWLARWLRGRGIEAHVIHPTSVAVSREHRRAKTDRLDTELLKRAFLGWLRGEPRHCSMAKIPTPEEEDAKRPNRERENLVSERTRIVNRMKSTLARLGLRGFKPTLRKAAERLDRLRTAEGVPLPPNTLAELRRDMARLRFVMDQIREIEAARLTRLEQHPELASHAMVRLLARVIGVGIETADMLVHEILSRNLRDRKAVARYAGLTGSPDESGARRREKGLARAGNARVRRGMIQLAWRFLMFQKNSALAQWYRMQTADSRGTTRKTMIVALARKLLVALWQLVTTGEVPAGVVLRAAA

SEQ ID NO: 461261 - protein, 432 aa, unidentified
MAAVMIGVDPHKASHTAVVISAAEEVLGELRVHACVAQAERLLAWATAWPQRTWAVEGAGGLGHLLAQQLVAAGERVLDVPPKLGARVRLLAAGDMNKNDPNDARSVAVAALRSADVREVRADDHAAVLKIWSKRYRDLSRTRTQVICRLHAVLCDLVPGGVPKVITAARAARILRALRGGSDAVAAARRELAAAYLDDLRRIDAQQRETRKKLAVAVAATGTSLTGLFGVGPVIAAAVIGDVRDVSRFGIRDHFAAYSGTAPVEVSSGPRKIYRLSRRGNRRLNHAIHMAAITQIHHRHSQGRAYHDKKRAEGKTGKEALRSLKRQMWFLAGVVAVSCMLAVVLGAYGVLAQTSTTATPGRSCTVVQQVSVGLDLNLPVGTSVARASCDLTKDPASTTGAWLTALGWILRVLAWVFAALFIAGFTSAVRKT

SEQ ID NO: 461262 - protein, 310 aa, unidentified
MEQSFVGIDVAKDRLDVHVRPSGDTFALARDGEGVAALVERLRAAIPQLLVLEATGGFEQVVAAQLAAARLPLVVVNPRQIRDFARATGRLAKTDRIDAAVIAHFAEAVRPPVRPLPDKKAHVLDEIVTRRRQVIEMMTAEGNRARQIDNKRLKKRIERLRSILQTELTAIDADLDEIIRGTPIWRESEELLKSVPGVGNVVARTLIAELPELGTLDRRKIAALVGVAPFSRDSGTMHGRRTVCGGRAPVRTALYMAALVASRRNPVIAAFYQRLVAAGKCKKLALTACMRKLLVILNAILREHAPWQAA

SEQ ID NO: 461263 - protein, 420 aa, unidentified
MIYIGIDWGDQKHHVFITNDSGAALANFAITHCVEGFATLENRVKGLSPEPKHCLFALEIASGLLIGYLLEKGYTVYPINPKAVDRYRDRYRVSGAKSDPHDAMLLAHILRTDRQHHQSLMPSSELARELLLLTRDHQNLVQQRTRLLNQLTACLKEYYPAALRFFSSLDQPLALAFLSHFPTPDDAQSLSLKNLEDFCFQHHYRDQKGIKKLYDKLHSPMLQAHPLVVRAKSKYLLSLVSQLIPLQQSIKEYEGEIKRLFKQHPDSGLFLSLPGAGKTLAPQMLAEIGDCRENFPRPEFLQGEAGTAPVTKRSGGRIMVIFRRSCRKRLRNALQQFALESLRFCSWAREYYQAQKGQGKSTSQAVRALANRWLAIIWAMWQRRLPYDDGYHQANRARRHCQVVHDPALLRFLAPSLIVK

SEQ ID NO: 461264 - protein, 409 aa, unidentified
MGLYCGIDWATDHHDIAVVDDNGRVVARGRVGNDATGFAQLLSLLATAGDTAKCPIPVGIETDRGLWVAALRVTGRVIYPINPLAASRYRARYALSGAKSDATDAVLLANIVRTDPGAHRPLPADTELAQVIRVLARAQQDAVWARQQIGNQIRDLLKDFYPAAIVAFTDLDGGLARPDARAILAAAPTPAQAVKLTPARLRRLLIKAGRKRYLDRDIERLREVFTATYLHQPPVVENAMGIQLSALLGQFDAACAAADALAEAATAHFEQHPDAEIITSFPGLGMLAGARVLAEIGDDRSRFADARGLKAFAGSAPITRASGKKTVVLHRHIKNRRLAAVGPIWALGSLRASPGARRHYDARRAAGDWNHQAQRHLFNKFLGQLHHCLHTGQGYDEHRAFPPPLSLAA

SEQ ID NO: 461265 - protein, 345 aa, unidentified
MYYIGIDVSTKESALCILDAKGKIVRETRLPTDPEIIARFIAATGLAIERVGLESGCTAAWLFAELQRYGWPVICIDARHAAAALQAGFRNKNDRNDARGIADLMRVNKYRPVWVKSPEAQRQGRLLTARATLQSQLVALENTIRGLLRQEGIGLTDRRTAFEAAVREAIGDDRLLEAAVHPLLETRNAVLQNRATLDRQILHIVRADPVCRLLMTAPGVGALVSLAFKVAVDDPRRFSRSRDVGAHFGLTPREYSSGEVSYHGRISKMGDREVRRLLYVAASRMLRRDAALWCPLKVWAVRLAQRVGIRRARVALARKLAVVLHAMWSDGQVFQWRRAEASASA

SEQ ID NO: 461266 - protein, 335 aa, unidentified
MELTNQSVGIDVSKDSLEVKFKEKSTKGIKIKGSSKFDNTSNGFISLLEWCNKREKAENVVYVLEATGVYHEEVLYFLYGQGKKVSVELPQRIKYFAKSKGVKTKNDVIDSGVIADYGLERELKVWQPPGKDFKTLRDLSREHNTLTNSKSEAKNRLHAAKHSHDKNARVIERLQSTIKFYTNQLEEIEKDIKTTVNADKELSGKIKKVATIKGVGIMTVVKIIAETGGFYLFQNINQLISYAGLDVVENQSGNHNGKTWISKKGNADLRTALYMPAMSAIRFNEKMKSFNERIMKTHSYKKQGIVAVMRKLLILIYTLWKKNEEFSFDYKWGQA

SEQ ID NO: 461267 - protein, 392 aa, unidentified
MAGRVASRREQNAPEQRTESSSGARQTDQTEVSKTVGQRGSPGSLPLRARTVAGAKSPHHARQGRRGAVHSSERRAQMSGEVFVGIDVAKENVEVAVRPSGERWAERNDGMGWRNLVRRLRELSPRLVVMEATGGYEAEVALHLTEASIPVRILNPRQVRDFAKGKGLLAKTDGLDAAVLAEYAETYRPEPRALPGEEAREMAALLSRRRQLVEMRVAEKNRLEQARGEVRKRILAHIAWLESEIERTGSDLDRRIRKSPLFLDKHERLTSVPGVGNQTALSLILNLPELGMLDRKEIAALVGVAPFNRDSGKYRGKRIVWGGRAQVRAVLYMAAVVAARHNEVIRSFYEKLVAAGKPKKLALMACMRKLLTILNAIARDRAVWTPALAISR

SEQ ID NO: 461268 - protein, 317 aa, unidentified
MSPKIYLGIDVAKNSFQVASNPAQVQGSYPNTRPGYQDLLRTLHPLEIALIVLEATGGYEKALAAELVQAGYNVVVAHPRQVRDFARGMGRLAKTDPIDADTLAQFGEKVQPTPKTPPNAQTEALAELVTRRRQLIDLHTQETNRAGMIHHVKVRKSIRKMIKTLEFQIRELDELIEEHIQADADFQHKDQILRSTGGVGPQTSAMLLSRLPELGRLNRHQVAALVGLAPYDRKSGKQDRGAHIAGGRADIRSLLYMAALSAQRFNPAIKTFAQRLQDQGKPFKVVITACMRKLLIILNALLRDQIPWTPKKLLLKA

SEQ ID NO: 461269 - protein, 304 aa, unidentified
MNGIGIDVSKRQLDVGTTDGETLQVCNNRSGFSELDVWLKKRPVSQIVLEATGGYERPLLDFLHAVGHPVVRANALRARRLAQGMGQMAKTDRLDAYALAQMAALVKLPAYQPLEPWQQKMREFVRARRQAMHALTIARQQLEMVGDRELRRLLQANITRLQTLVERLGKQIAEQVTQQPQLAVLKSMKGVGPGLQAVLASYLPELGKISGKAIASLVGVAPMSHDSGTMRGKRSIHGGRAEIRQVLYMASMSAMRHEPQLRDFYQSLRARGKEGKVAIVAVMRKMLVILNARVRDAENGLVPA

SEQ ID NO: 461270 - protein, 348 aa, unidentified
MTLTIVDGARPVTGGVDTHADAHVAAALDGIGGLLGVSEFPATPAGYARLLGWLGGFGAVGLVGIEGTGSYGAGLARHIAAAGIGVVEVDRSDRQDRRRKGKSDPLDAVSAARAALSGRASGAPRGRDGQVEAIRALMVAKRTARAQRTQAINQARALIITGPDGIRTRFTGQTPAGLIAELAALRPRPGTMVRYHTLLALRELGRRAQFLDGQLGRLDELIVPLVTARAPGLLSLYGVGPDTAAMLLIAAGDNPGRLRSEAAWAHLCAAAPIPASSGKTQNRHRLNRGGDRQANHALWRIVITRMGSHPPTRAYVARRAKEGLSKPEIIRCLKRYAARETYRYLRPR

SEQ ID NO: 461271 - protein, 350 aa, unidentified
MSNPNLTIGLDLGDRKSVACAIDAAGREVQRVTIATTRAGLRAYLGDRPRCRVVVEAGTHSPWVSREVEGFGHEVVVANPSLVYGGRRRKKRNDHSDAEFWARQGRSDVKLLHPIQHRGVQAQEQLAVIRARDQLVRARTKLINHVRGSVKSLGGRIQRCSAEAFPRRAASEIPGELRAAVEPLLSVVSDLSKRIHEMDGEIEAMAESYPEAVRLQQPKGVGALTALAYVLLVEDAERFTRSRDVGAYFGLVPRLDDSSDSSPQLRITKAGDELGRQLLVNAAHYILGPFGPDCDLRRHGERIAARGGKNARKRAAVAVARKLAVLLHHLWRSGATYDPDWLKHRAASER

SEQ ID NO: 461272 - protein, 310 aa, unidentified
MTSPLVYLGLDVAKATLAGHLAGERFSLSNQPAGHAALCRRITAFDQPVQVICEATGGYEQPVVAALRCAGLTVSVLHPTRARHLACGLGYLAKNDPLDAEVLAKIGSLLAPAPTPAPAEGVSELAALVGRRDQLAELIRREKQHRETTSGKQLLRDILQSLTALQKRLAKCESLIAHHLQTHPALAQKAQRLQEAPGVGFVGAVTLLAELPELGTGSQARMTSLAGLAPRDHDSGVYRGPRRVYGGRPKVRRILYLCALSAIRHHPSLKTFYTRLRQAGKAPKLALIAAARKLLTYLHSALKNPQFKLA

SEQ ID NO: 461273 - protein, 356 aa, unidentified
MSNYITIGMDLGNRKHTVCAVGAAGELLWRREVANTPEALKPFFEENAGATVAMETGLCCRWISALAKSCGCDVLVGNARKLAAIWQSKQKNDGNDALLIAKLARADRELFHPVELRDDERHEMVQIIELREVVVAQRTQAVNSVRGLCKARGVFIPKCDASCFHRVAGEAIPTDIGWKFRPMLRHLKEVAAAIKRYDAILEKYAREHFREEVEILQTVPGVGTITSCAFVAHVADPGRFGKARDAGAYFGLTPAQDQSGDRDAPRRITKAGSTLVRRLLVTAANYIMRDSSADTALKRHGERICARGGKVSRRKAKTAVARKLAVLMVAMLKSGRSYDDGLAAGRNTTGKDNAAA

SEQ ID NO: 461274 - protein, 375 aa, unidentified
MAWAPDRNHGGADMAQVRSWAGLDVHAANVLAATMDARSGELAVRRLPGATREIVEFCAALPGPVRVAYEAGPTGFGLARALEAAGVGCVVAAPGKIERPASDRVKTDRRDAERLLRLLMIGGLHAVRVPSTGEEALRDLVRAREDVRGDLMRARHRLSKLLLRHDVRFDGTGGAWTQRHRQWLAAVDLGERGAQVTLLDYRGAIDALIVRRDALEVTIGELVPGSPWADTVARLRCLRGIDTLSAVGLCAEVGDFARFARAGHVMSFLGLVPSEHSSGQTRRQGQITKSGSGHGRRLLVEAAWHYRRPPRKSDALRRRQAGQPPHVLAISWQAQQRLHRTWQRLDGERGKRRTIVAVAVARELAGFCWAVANAD

SEQ ID NO: 461275 - protein, 343 aa, unidentified
MDHFAGLDVSIKETSVCIVDDTGRIVREVKVASEPEALLQELAKSAYRFRRIGLEAGPLSQWLFSGLVEAGLPVICVETRHMRAALKAQINKTDRNDARGMAQMMRAGLYRPVHVKTLRSQKLRMLLTHRKLLQSKAIAIENDLRGTLRNFGLKVGVAGAVKFEARIKELVENLPDLAVLVEPLLIVRRVLREQLGILHRRLLAIVRDDEVCRRLMTVPGVGPVVALTYRATVDVPARFRTSKAVGAVFGLTPSQHQSGESERTGAISRCGDEMMRVMLYEAAHIMLVRSAKWSWLKAWAMKIARHRGMKKAIVALARRLAVIMHRIWVDGTEFRWTREVAVA

SEQ ID NO: 461276 - protein, 351 aa, unidentified
MMIIGVDYHPSFQAIAFLMEETGECGEQELKHSDGQAEKFYRDLKQRGISVRVGMEATGYSRWFERLLAELGFELWIGDPAEIKAKRVKKQKTDRKDAQLLLRLMLENNFPQIWVPSPENRDLRQLLWHRHRLVQMRTRIMNQLHALAMNEGYRWKKKLFSEQGRAQLEKLALAPWASRRRQELLELLDRMNPTIEELTTAVEREARKRPEVQRLMTHPGVGPLTALAFVLIIGTWERFSRGKQIGTYVGMIPSEDSSAHKQRLGHISKQGNSLLRFLLVEAAQAAARCNPEWRRRYMHLAMRRHRSIAKVAMGRRLGVRLYWMWRNGCEYSPKLEFGSYAGQLVTGHGVK

SEQ ID NO: 461277 - protein, 324 aa, unidentified
MSTVVGIDIAKHTFDIATLQANGKYRTKAKLANDPKGFEVLLQWLSKHAEAQAWIVMEATGIYHEALAEWLYERGYQVCVLNPAQIAFYARSQLQRVKTDKVDAKLIADYGRRHQQELRAWKPEQPSLKRLKALTHRLKDLQELEQMEHYRLDVTSDAKVAASIQSVLEHIRQQIADTLEVIKQHFDDNDDLRGQRDLLKSIDGIADRTAALLLAELGDIRRFDDSRAVTAFAGLNPRLQESGKHKGHVRISRMGSALLRGGLYLPAVTSLTYNSAIRAMAERLRAKGKAGKQIVCAAMRKLLCIAYGVLKSGQPFNPQLAIAR

SEQ ID NO: 461278 - protein, 337 aa, unidentified
MKYSAIDLHSNNSVVVVTDEADRVLARARLRNDLGLIVRWLAPHREELAGVVVESTYNWYWLVDGLREAGFEVKLAQPAAVKQYEGLKHSGDESDARFLAHLLRLGILPTGTIREPEERAVRDLARKRMQLVRGRTLQVLAVENLVARHLGRGISGNEVKRLTEEAVDRMGLRAEVALAMKTNVAVLNALQEQIDRLERELAQRVKPMPQYGLLTSVPGIGQTLATVILLETGPIERFAEVGNYASYARCVDSARISNERHKGRGNAKNGNKYLAWAFVEAAIFAIRHCAQAKRFYERKKSRTHRVVAIKALAHKLARACYHMLREGRPFDVNRCFA

SEQ ID NO: 461279 - protein, 410 aa, unidentified
METIVKRAAALDVHKARLTACVRLPGRGRKRRQELAEFETTVRGLLRLRDWLQGHAVTEVAMEATGVYWKPACAILEDEFDCLLVNARHVKQVPGRKTDVSDAAWLCQLLEAGLLRRSFVPPKPIRALRNLTRYRKAQIGERQREANRLHKILEDSGIKLDCVASDILGVSGRAMLDALVQGTTDPAVLSELARGKLRKKIPALKEALVGRFDGQHALIVSAILAHLDFLDGQIELLSAEIEAQLTPLHAAVELLSTIPGVKQRTAEVIIAEIGVDMSRFPSERHLASWAGQCPGNDQSAGKRRSGKTRHGSKWLDSALTEAANAAVRSNNAYLAAQYQRLRPRRGHGRAIGAVKHSILTSCWHMLQTGELYRDPGGDYFSRRDPERATRRLIAQLERLGHTVTLEAATA

SEQ ID NO: 461280 - protein, 418 aa, unidentified
MKFIKAQKIKTINEKTLVVALDIGKKVHYGYFRTPKNQDIKPFPFYNTGQSFNKFWEKLCRFKEKHMLDEVVIGFESTGPYAEPIANYLRKKPVKLVQVNPMHTKRIKELTGNSPNKTDKKDPRVIADVILLGHSLTTVIPEGAAAQLRRLTHARERAIERRTAMNNQLQDLVFVIFPELTDIIKPSTKTGMYLIKNYPDPESIVSIGIGTLCSIVRKISRGKFGIDRVEKLYNAAKESVGITEGKEGILFETSHLVSNIEAENRYIESLEEQMVMYLDQIPHSRSILSIKGVGNITTAGLIGEIGDFRKFKTISEVMKLAGLDLFEVSSGKHKGRHHISKRGRALMRKLLFFAAINTVKSNGIMYARYQKMLKNGTPKIKALIAVSRKLLRIIFALARDNTQYDENYNRNHELKLAA

SEQ ID NO: 461281 - protein, 321 aa, unidentified
MEEIKFKQIVKVGCGIDVHQHLITASIRKGNNDDDVETREFTAYTSSLTSLRDWCKDAGVTHIAMESTGIYWKPVFNVLEEDFEILLVNARHVKNVPGHKTDPKDSRWLSKLLLSGLLKGSFIPPRDIRELRDLVRYRKKVIAQKAADKNRIIKTLEDGNIKLSSVLTNVDGSTGTKIVDKMIEGVTNIDELMKFYHGKIKVDKSEFRLALEGHLTAHHRLMLQILKDSISDKERQIKRLDAEIEKASKAYKVEIGLLQSIPGVGKDSAITIISETGVDMDKFPNEHHLSSWSGMSPGNNESGGKKKRQEQFMVTRTFRAH

SEQ ID NO: 461282 - protein, 316 aa, unidentified
MNTPKNPSDPPAAVYIGIDVAKATLALAHPGLKPEYPNTLKGHAAIIKALPPNAHVVMESTGGYQRAFVRSLHTHEVTLSVVNARQVRDFAKSMGQLAKSDNIDAAIITLFAQSKKPRADKKPSPNQFALEEIMTRRGQLVTLHNIESNRLEHYFEARIAKDARKMLASIKTQIKKLDAMAAELIAADETLQYKANRLTQVEGIGPVTSASLLAFMPELGNLKRNQAAALLGLAPFVCDSGTERGRRHVWGGRSHVRAALYMSALHAMIRNPVLRKFYERLKAAGKSSKVAITAVMRKLIILLNHLLAKPDFLLAS

SEQ ID NO: 461283 - protein, 453 aa, unidentified
MSKMQSGTKPTGLPIINPFAAGIDIGSRFHVVAVSPNLCKEPVQTFQAFTSDLQRMADWLIAMGTKTVVMESTGVYWVAAFEVLESRGLDVILANAREARAVPGRKSDVNDAQWLQRLHACGLLRASFRPGRDIAELRTYLRARERHTDYAAAHIQHMQKALTFMNIQLQHVISNITGVTGMRIIRAIVTGERDPDKLAALRDVRCRESIATVRNALVGNYQPEHIFTLKQALALYDFYQQKIDECDAEIERTVARLNLDRPIPEAPLPKAKHRTKQVSDPNFDVRTAMYQLAGIDLTQIHGIGPFLALRLVAECGTDLSRWRTAKHFTSWLTLSPGCKISGGKVLSAHTRKTSSRLTVALRLAAVTVGRSNTALGAFYRRLAGRIGNAKAVTATARKIAVLFYNAMRYGQDYRDPGADLYEQQYRDRVIKQLHRRAAQFGLILQPQNSLLPM

SEQ ID NO: 461284 - protein, 436 aa, unidentified
MRGCRCSMIMGFTKPIEHFNLQRKKVITMNTLYVGIDVSSKSNVVYLMLPNGDKHSNFSVANSHEGSTLLVKKIYSALTSHSLDTVLIGLEATSVYGDNLVYFLREDATLAPFNRKIHVLNPKQVKKFHDTYNDLPKNDYVDSFVIADCLRFGRINKEVYMGDYRYKALQNLTRARFFAVQNLVKEKQRFMNVLFKKYSTMTQEKVFSDAFSTTALAVYDEFESAEALANMDLHELTDFIIEKGKNRFPDPDAVAKAIQKAARSSYRLPKTVNDSVNQVLSISITSMKALESQIKEFDKAIIALMELLPNVLISIPGIGPVYSAGIMAEIGDINRFDNQASLAKYAGLAWKQHQSGGFEAEVTRLIPSGNRFLKYYLCEAAFSLVRCDKEYSDFYHLKYKEVNRCQHKRALALTARKFVRLVFRLLKDNRLYCPAK

SEQ ID NO: 461285 - protein, 348 aa, unidentified
MKILAIDLGKFNCVSCLLDTENNGTEFDTFKTYRREFKEILRRTQPHLVVVETCSITGWVHDLCVAEDYRVLVADPSQEAWRWKNVKRKTDKDDALKLAKLAALEQINPVYVPSPETRQYRHLVKYRKVLVWRINRVQNAIRALFDQQGVKMPSGHRALTIQGIDELSQHRRVLAECDETNLWRGELDLELTMLDQLWELLATIERKLDLLAKQEERIQLLQTIPGVGRKTAEVIVTCLDDPKRFKNSRQVSAYAGLIPQQHQSGQTNRLGKITKRGPRLLRTALVEVSWLMLRHNEWAAATYARISGGQKTRKKTAIVAVSRKLLVRCWAMLLHNQPWNPELAQTTT

SEQ ID NO: 461286 - protein, 342 aa, unidentified
MQQSIYVGLDLGSSRCHQTVINADGSLRMSRSIPTSEQHLRTAFSALGDNVRVHLESGELADWVHSVIKPMVAEVVVSHSRTLAWIGKDSQKDDAVDARKLAELLRLNRTHPVYCETADDRRLFKQLVTHHEDLSREQARLKSKIKARLRTLGIIRFDARLFSKSGNALLLDELEEPSIRQMLAQSFAVLNQLLDAETQAKQAMTAASKQFPEVSLLQSAPGVGIITACRFVAYIQTPHRFSNKRKLWRFCRLGITRRESNGKRLAHPRLDSAGVGSLKDVSRKVFEAARRTKKDNSFKRAFECALLNTKNAVHARLSTQRKILSTLRAMWLSMQPYQDIGR

SEQ ID NO: 461287 - protein, 332 aa, unidentified
MYLGIDVHKRYAQVAVMDEAGKIVEEVRVENENLDDLAQRYAGAQAALEATSNYYHIHDTLSEHLDVAVAHPQELTQIADTDKKTDRVDAKELARMVRLNAVPESYVPTDEIREARALVRGRQTLVEDRSKYANKIHGLLSDQGITEEVKPLNVKGREFLQELSLPMPWDTLLKSYLDVIERLTEEIQELDETIEERAGSLKETQLLMTIPGVSYYTALTIYAELGEIDRFDGHKEVVSYVGLNPVIRESGDSRIEGNISKRGSSRVRWLLVQAANTAVHTCNDKYLSRFYDRLASRKNSQKAIVATARKMLVSIYHMLDRGEVYDPPGVSS

SEQ ID NO: 461288 - protein, 342 aa, unidentified
MYYIGLDVHKKTISYCIKDVGGQVQREGTIPATRTELDSWMKTLPKPWTVAMEASIFTGWVYDHLLPQAAQVKVAHPVMLRAIAAAKKKNDRIDAGKIADCLRCDFLPECHMVSTEIRDRRRTLRYRHLLVRQMVQMKNRVSGLLLETGVSHNKQRLHKVKYFRELLATNKEVDDSIRPLLKLSRESIERLQKTDYALVSSLERDPLLAQRLKNLRTVPGVGPITALTWAVEIGDVSRFQSVKQAISYCGLCGDEKSSADKVLRTPLSKQRNKHIQRVLVEAAKLAPKQSHELALVYEKAKQKGNTNRATIAVARKMVTYLLAVDRGQRSFVPVEDFSPAVA

SEQ ID NO: 461289 - protein, 407 aa, unidentified
MELVALYKRVIGLDIHQAQITACALIEETDGSTRIEQRQFGGFKRDRRELAEWVASLHPDEVVMESTGIYWKSPYAGLESVGIRAKVVNARHVKNVPGRKTDVGDAHWLATLARAGLLRGSFVPPAKFRELRLIARQRQKLVGQLASEKNRLHKVLTDSGVRLGVVVSDLHGQSARAMVKAIIAGHSPNEVLKLASSRLKASREEIFDALQGELTASHRFVLDELMRHVEEIETRIVRFDARLLSELESERNTLALLQTIPGVDLIGAAMLLVEIGTDMNAFGNPDRLASWVGICPGNNESAGKRKSGHLRKGNLYVRRLLCEFAHAASRTTSVFKSKFQALLIRRGYKRAIIAIGHKILRTIYFMLKQREHYRDCATDYEALSVQRNAPRWIKALIKFGFITPANA

SEQ ID NO: 461290 - protein, 356 aa, unidentified
MSIVGGLDIHRKQLTFDWVDEQNDKWERGRIAPADREHLADWLTRFDQATVPVAFAMEGCTGWRYIAEEMAKVGVDAHLAEPADTSALRGPKRRAKTDKADAKLLRELLAAGRLPECYIPPAQVLEWRALLELYQDLRSQHTGWAQRIQAVCFHQGTTAPGQAGIVRGDRARLKAIVDEQLSISGRLQVNTALAIMDVLAEHLDRLRRRLLSTARGVNGARALMHDIYGVGPMTSLALCAWLGGADRFSSSRKAVRFVGLDITVHSSDGKRSHGRLSRQGPEVLRWLLFEAAKTSARPCAPGYDYYTQVKDRYDANRACLSQARRIVRHATHILTGLGDEAFTVVAQPAAPTTIAR

SEQ ID NO: 461291 - protein, 419 aa, unidentified
MNLFVGLDVSSEKLDTCFLTDDDDLSILLEKTFPNDLNGATAIKDQIIKFTESMIFQKIVIGMESTSLYSFHPATFFQTDKELNQYELVVTVENPFKIKQFSRIFDEDKTDRIDAFRIADYLRLQRYSSSPLKEEKYMALQRLTRTRYQMVCQLTEAKQHFLENLTYKCNTLSRELKNGDSPTSVFGAAMIALMTEDYSLDDFSTMSLDALAELLQHYGKGRFKSPEKIAEAIKKAVRDSYRLGKLAQESIDIILACLVKSIQAFQKQIKILDQAIEDLVVILPEYQCLRSIPGIGPVYAAGLLAEIGQIERFEDQAKLAKYAGLTWKVSQSGNFQSERTPLTKTGNRYFRYYLIEATNSVRRHLPEFKAYYQKKYKEVPKQQHKRALVLTARKFVRLVDILLRNHQLYTPPRSVIEHE

SEQ ID NO: 461292 - protein, 415 aa, unidentified
MEVMHAVCCGIDVHKDVLVVCLRCVVDGAAQKTTRQYGTTLPELRKLAEWLVEQRCPIVGMESTGVYWKPVYHVLSQVAEVLVGNPRDMHRRPGKKTDRIDADWISELLAHDLIRPSFVPSPEQRALRDLTRTRVTLVQSRTQAKNRVHKLLEDTNIKLGSVVTDLFGKSGRAMLNALVAGERNPQKLAQLALGTLRKKVPQLELALEGMFTEHHAALIKMGLAEVDLLDQHIAELEKRIGELSGKMGPKIDICDSVPGVDRTAAVAVLAETGEDMSRYGSAKRLGSWSGVCPGNNESAGKRYSGRTRRGNKWLRRVLVQCAWAARKTDTAIGRRFRTLQVRIGGKKAALATAHQILTTVYHLLVKGVRYDDEKCGRPKPEREVRQRLNAIRQLAQLGYSVTLQPIATAPAPTPA

SEQ ID NO: 461293 - protein, 354 aa, unidentified
MHIHTIGVDLGKTVFHLVGLSLRGEVVVHRKFSRTQLLQFTANVQVDLIGMEACAGAHFLGRALREQGNEVRIIPAQYVKPYVKTNKSDFIDAEAIAEAVGRPTMRFVPIKTDEQLDMQSLHRVRERWVIRRTAVVNQIRGLLLERGITLRQGRRHLEAALPAILEDATARLSGALRMLIAQLKHELEELANFIGEADGTMERTSRENESYRRLLGVPGIGPVTATALIAAIGNGAAFRKGREFSAWVGMVPRESSTGGKQKLLGISKRGNPYLRKLFIQGARAVMLRGTKQSIGLRTWIENIALRKHPNVAAVALANKMARIAWVVLARGEAYRPSLLTKSEPNLHSLQMKPA

SEQ ID NO: 461294 - protein, 440 aa, unidentified
MIKETTQINSSTPPEPPAPIVCWVGLDWADKKHCLVVRAAAGATAQTHLVEHQPQVLDEWFLQLRKDHPQGRIAVAIEQSRGPVLYALMRYDFLALYPINPRCLADYRRAFKVSGAKDDPLDAALLCELVYLHADRLRALAVEEPATRQLRLLVEARRTFVDDRTLFSNRLGSTLKCYYPLALEWVGQDLTTPMALDLLGRWPNLAKLKAARPATLRAFFYAHNSRSEDRIAARLQALAQAAPLTEDPALIGPLQLQMEQLVRQLRALHKSLEEYDRQIKTVFGQHREAWLFAPLPGCGPVLAPRLAAAFGTIRANFESSDDLLCFSGVAPVKKESGGQKLVQFRYAWPIFYHQSIVEFAKCSIGQCEWARLLYEKQRRKGKSNWAAIRMVAFKWLRILWRCWQERQPYQETTYLRSLQRDGVQLYQSLYEGLPPLKTSV

SEQ ID NO: 461295 - protein, 382 aa, unidentified
MNYNQNDKIAQITSQTLIIGVDIAKHKHVARAQDFRGLEFGKAFYFENTNSDFNHFLNWIQQLMNQQGMEKVVVGMEPTGHYWLNLAHFLIEQRINFVVVNPMHVKKSKELDDNSPTKNDVKDARVIAQLVKDGRYAVPNIPQGVYAELRVARKIRDLLSVDLQAVQGQIHNWLDRFFPEFLTVFKDWEGKSALQLLKLNLLPHELSKLTDQEILIHLRKAVTRAVGLSKITKLKEAASHSIGIREGSAMAKLELRTLINKYELINEQFEELESNIDDLLKQIPGVEQMLAITGIGKDTVAGFFSEVGDLSNYSHPRQIIKLAGLSLRENTSGKHKGQTKITKRGRKTLRALLFRVAMPLVAKNSAFKALHQYFTKWPNNPL

SEQ ID NO: 461296 - protein, 388 aa, unidentified
MLEASDHPTTPFAIRVDLGAIFVSLELGKSSWLVTSLSPGSEKMSRHSVQGGDIAGLFGCFTSLRDKARAREGRLFPLVVIQEAGLDGFWIDRALKQEDWIESHVVDAASIAVPRKHRRAKTDRIDGEMLVRTLLAFKRGEARVCSMVRPPSREEEDRRRLSRERKVLVGERTRHINRVQGLLLSQGIRGYRPLRRDRRACLDELRTGDGHPLPKHLKAQIGRELDRIELLMEQIKMVESERDELAKVNDNNQCSPVVLLQGLRGIGAEFATVLTQEGLFRHFDNRRQVAAYAGLAPSPWKSGSIDREQGVSKSGNPRLRTAMIQLAWLWLRYQPDTALAQWFHEHVGARSNRSRKTAIVALARKLLVALWKYVTSGVVIDGAHPASR

SEQ ID NO: 461297 - protein, 366 aa, unidentified
MKKTSTVRVNGNMIFKRHKLTIGLDLGDRWSFYCVLDEAGEVLLEQKVPTTPEAMKQTFSRISQSRIALETGTHSPWVSRLLTELGHEVIVAHAQKVQLITKSNRKDDRHDARTLARLARIDPELLGPVRHRSVQAQIHLTVIRARAELVSARTALVNAARGLVKSYGQRLPKCGTQQVSRELAAELSTELREVLEPLLQEVESLNERIKEYDERMEKIAKEVYPEVSLLKQVKGVGTQIALTYVLTIEDPHRFRKSREVGCFLGLRPGRRNSGESEPEKRISKEGDRYLRTMMVQGAHYILGPFGQDSDLRRWGLKLAERGGKNAKKRAVVAVARKLAVLLHRLWVSGEVYEPLRNSHKAMRAVA

SEQ ID NO: 461298 - protein, 428 aa, unidentified
MDEVETIRLEHFRQLKKEIRGSERHLIVGIDVAKDKHHAFFGTATGKTLLKRLVFENTLEGFEKLLLHVEAVKGKHALEKEVFGFEPTANYHKPLGEFLIKASHMVVLVSGVAVKRNRELLDGRWDKHDTKDSSNVADLISQGKFMYYDYPVVPLRDLRNLLSLKRRWKRQEHGLRVRLRNHLVAQYFPELDRYYRQWGSEGLALARWCLSPSVISGMDYEQFTRLVAPGTRRIAQRERLKAVWQRAARSIGCEVGEALAFEAKMMVEALAQVRESIDAIDGKIRDICVRFPEYHYLLTIPGFGPDVSSKVLAAIGNPFRFGNHREVLKMAGYDLSANRSGKNADGITPVISKKGKAELRYALYQAAHIAATGNQYFVMYFTNKLRGRERERGIKTKMKVKLAAKLLIVAWTLMKREEPFNPEYLNIE

SEQ ID NO: 461299 - protein, 324 aa, unidentified
MIDAILGIDVSKNTLDVSISRCTKVRTKSFANSSDGWHHLLDWLTTRKIQRVHACLESTGRYSLGIACALYEAGHVVSIINPAQIRDFVRTKLGRNKTDGIDASHIREYCELFKPSPWAPPSEAHRRLGELQAIRAGIIAGLTEWKNRKNSGIVDAGAQALADATISHFTSQLGAVDKAIALTIDNDSDLRSKCDLLLSISGVGDTLAGVVLAELPGPDVLRSSGEVIAYAGLNPRQHQSGTSVDRATRISKIGNAVLRAALYMPALSAMRYNPAIVALVTRLKSRGRLKPKQIVVAAMRKLLVLCFGVLKTGKPFDPAIAMGC

SEQ ID NO: 461300 - protein, 430 aa, unidentified
MEASIMPPGAVTAYIGIDWADQKHAIALRSAAEPNKIEHQLIDQKPEALMEWIGQLEQRFGAQGKILVCLEQSRGALIFHLMGYEFFELYPVNPLQLARYRETFSPGGAKDDRPDAELLNELLYCHRDRLRALKPDSELGRKLSFFNQGRREAVDQRTRLSHAIKSQLKVYFPLALELLDQDTSTALAADLLLRWPTLAAIQKQNTSTLRKFFYGHNCRGEQRMLQRLERIQKAMALTKDSALIEPAALKVQMLARQLKHLLPDIARYDNKIAELFAAHPDRFLFENLPGAGEALAPRLASAFGSDPERWQLALEIATLSGIAPVRRASGMKSGKKGDRKASVHFRQACAKFLRQSFHEFAGCSIRYCSWAKAHYDHQRARGNGHHAAVRSVAFKWIRILFACWKKRIPYDPKLYLKALQERGSPLADAC

SEQ ID NO: 461301 - protein, 461 aa, unidentified
MPDGGGENSSPRRTKQIEGLPVIRRNVAGIDLGSERHWVCAPVAGSISREVADFGATTPELIRMTKWLQACGVESVAMESTGVYWIAPHEVLEAGGLEVLLVDTRQLARVPGRDKKTDPSDCEWIQRLHSCGLLRGSFRPREEVCMLRTLVRDKANLVAECGDWLRRMQKSLDQMNVRVHRAVSHMDGITGMAILRAIAEGERDARKLAKLRDTRCHKSEEEIAEQLSGHWREDHLFSLRQSLKMYDAIQQRLADYDREILQRLAAMQREEFRQQPPPPVKNPHKAKNMKKRGEEPMREALFRMSGVDLTGIDAIGVETVQVVLSEYGPDLSRFPTEKQFVSHVTLIPHKPMSGGKPVRKKRRSSASTRVAAALRMAALSLRNSATALGAYYRKIARRLNGDVAVFATARKLATLIYRLLRWGQPYVDEGAEAFERRYQETRLKTLKAKAKDLGYQLVASN

SEQ ID NO: 461302 - protein, 416 aa, unidentified
MNIKKTKKVTKINPKTLIGTVDIGKNVQYGYFRAPNGNDTATFRFFNTRKGFTMFWEKLCRFKKQQGLEDVVVGFESTGSYAEPFANFLRKKPVELVQVNPVHTKKIKELTGNSPNKTDKKDPRVITDVICLGHALTMVVPQGPAAELRRLTQARERSMKNRTAAKNQLQDLVYIIFPELLSAMKPSTKTGAYILKNYPCPEDIIFLGQKSLAEIVRRISRGKFTAQKALTLFEAAQTSVGVKEGRTSIVLEIKYLIDMIEHHNQFIDSLEKQMCTYLKQIPYSQNILSIKGIGDVTTAGLIGEVGDFKAFSTIPEIMKLAGLDLYEVSSGGHKGQRRISKRGRPLIRKLLFFVAINVVRSGGIMHHKYHQMLDRGMIKIKALVAISRKILGFIFAIVRENTLYIENYKYNYKLAA

SEQ ID NO: 461303 - protein, 338 aa, unidentified
MEITITWRFIVGIDISKKWLDCFLLDRQTGNGYDSQVSNTYEGFEQLAGWLADHGADPSQTKLISEHTGRYGEHLLRWTTTNEWAHAVVKTTALKKVGNEHHRKTDAVDAEYLADYGVRFSDQLSLTTAPQPAIGQIRRLQAERRAMVDRRAALKSKLTEADIHDADMERLKNMWSRQVALLTEHITEIEARIQELLDEDTNLKNRYHMMRTAPGIGKVLGPLWMSLFAGRQTLDARKVSSRFGFAPHPHSSGSSVKRIEQSSGFGNSEVRRVMHQAALSVRTYYPHYKEYYEKKRDEGKEHLLVINNIINKLIRLYCAMWNNRVEYDPNYIQKNKHK

SEQ ID NO: 461304 - protein, 375 aa, unidentified
MSTNLRNVGLDVHAETIAVAVAEPGGEVRPLGIIPNRPEAVAKLVRKLGPREHLRVCYEAGPCGYVLYRQLTRLGVHCDVVAPTLVPTKPGDRVKTDRRDAAKLARCSRAGDLTPVWVPDAAHEALRDLVRAREVAKHDQLRARHRLTKLLLRQGIRPPEGVKPWTQRYRRWLDAVPFDQPARRATFGDYLHEVDHAAARLERLEQALAEAVQAAPAALRGVIAALQTLRGIRLVTAATIVCEVGPLSRFTHPRQLMGYSGTVPSEHSSGATIHRGGITKTGNAHLRRVLLEAAWAYRFPPKCAKGLRQRQRGQPEAITDMAWKAQQRLCGRYRRLLARGKPTPQVITAVARELLGFIWAIGVAAERAGTAAAAA

SEQ ID NO: 461305 - protein, 411 aa, unidentified
MDIVYPRCCGLDIHKKSVVACVIVSGMNEPARRTVRTFGTMTADLLALSDWLAAEGVTHVAMESTGPYWKPVWNVLEGSLTLVLANAHHIKAVPGRKTDVKDAEWIAELLRHGLIQGSFVPDRDGRELRELTRYRTSLVQERTAVVNRLQKTLEGANIKLASVVSDVLGKSGRQMLDALVAGETDAAALAQLAQGRLRQKCQALEQALTGRMAAHQRFLVAQQLAHIDFLDEAIARVSTEIEERLRPAERAAVERLDTIPGVGRLTAEVLIAEIGADVTRFPTARHLASWAGMCPGNRESAGKRLSGKTRKGSKWLRTALVEAAHAVGRSKTTYLGAQYRRLLPRRGKKKAAVAVGHSILVIAYHMLTRQTSYTDLGPQYFDERDRTAVEKRLVRRLEALGNKVTVEPIPA

SEQ ID NO: 461306 - protein, 454 aa, unidentified
MVNAHAGGIDVGSTEHYVCVPEDAVSQGESNVRSFGGFTGELDKLVEWLQVCNVETVAMESTGVFWIPLAQKLEAAGIEVVLVNARHLRHVPGRKTDVKDCQWLQQLHSYGLLNGSFRPGSDICALRSLMRHRENLNHGCGQQVQYMQQALGQMNVHLHHVVSDLNGETGLRILDAILGGERDPKKLVELRDSQCSRSTPQEMEAALHGDWRPEQLFVLRQALQTYRHLLEQLRICDEEIEQTLAKVLIPEPTPMEQEKPKNPPAAAKPRKKKIFKLRKAGTGIKKDLTAELTRICGVDLTQIIGLNVLGVLIILSEIGLDMSRWRNEKAFCSWLGLCPGNKISGGKVLNSRSPHVVNRVAILLRTVAPAVGRSETWLGVFHRRMRARLGPAGANTATAHKLAALVYHLLKYKEEFIDVDRLVYESKLYRIRLSKLRKHAQELGMEVVEKKEAA

SEQ ID NO: 461307 - protein, 340 aa, unidentified
MTDINLVSIDLAKTVFQVCQLAEGNKVQSNKKISRKKLSQVLAQLSPTTVAMEACYTAHYWGRVCEQYGHTVKLVPAQHVKPFVRGNKNDANDAVAIAEASLRPNMKFVRVKTVEQQDIQSLHKIRERHNKQHTRINNQTRGLLSEYGLIAGLGFKALKSLIHEALESKALTELFKEEIASIYEELLDLEERLKRVNIKLKGIAEQSPLCRLLMTIPGIGVINATAIYAAIGDGKQFETARDFAVWMGLTPRQYASGTKSYTGRITKRGNSYLRKQLVHGARAIMHRSQGKEDVLNVWINDIKARRGQQKACVALAHKLARICWAVLSKGEEFQARMVAA

SEQ ID NO: 461308 - protein, 318 aa, unidentified
MGSHELVIAQGLSQASSKFIKLPVQTIDNTIEAINQWIETLGENVHIIFEQTGTYNLPLSYALTLHEITFSVITPSQSKGFVKSMKVTHQHDGVDAALLSLYGANYQPAPTSIEDEHLHHLRQKRKHLSTLMTQKQAYENQLHALSFDPRADKLVIESLELLQMTLQIQITKFKEELFTLDDDQHKHLFGLIKSVVGIGDASANALIIASDGFKNFSNVKQVLKFLGIVPIEKHSSKSVHKNYGLAKTGLGYVRAILYMAARSAKKYNLACVAVYQRQRALGKAHKVAMIAVMNKLIRQVFGVVKNQTLFVNDFEFAK

SEQ ID NO: 461309 - protein, 370 aa, unidentified
MKEYSEAFVGFDTAKDKHAVAIADAGRDGEVRYFGEIDSAPHAIAQFVKKLASRYGRLHFCYEAGPTGYGLYRQITELGQDCVVIAPSLIPRKPGAQIKTNRRDAVALARLLRAGELTPVWVPDADHEAVRDLVRAREAASQDLRHKRQQLLSFLLRHGRLFSGHRHWGAAHTRWLTAQKFDHPAQQIVFHDGVDAVGDAASRLERLDGQLAEIVPKWSMAPLVEAYQAMRGVSFVVAVTFAAEIGDLSRFDTPRQLMAFLGLVPSERSTGETVRRAGLTLAGNRHARRVLVEGAWSYRHPARVTETLRIRLEGLPKAVRDIAWKAQLRLCGRYRRLSAAGKKSPVVIAAIAREMAAFLWAIARYVAPAG

SEQ ID NO: 461310 - protein, 340 aa, unidentified
MKSVGIDLHKKTITLCVLDHEGASVTTRTFACTAPEKITAFFKALGPFQAVIEATASYQWLWELLEPLAQRLVLAHPGKLRIIAQSTRKSDKFDARVLAEFLCLDMIPEAYRPTPRQRAHRALVRQRQFLMKQRTQLRNKVRRLLSDYNADRRDLFAPRGLESLASIPLNPTDRLIVNQLLDQLQFLEGQRQALQQQLRVFAQGGSPREAQDRRLLRSLPGVGEVTCEVVLAELGDVQRFRSAKQVVAYAGLAPGRRESAGKTRDLGITKAGSGLLRWVLVEASWQAVRRSRHWSGIYERLKRRRGTRRAIVAVARRLLEVMMALLRSGRPYREGFGAAA

SEQ ID NO: 461311 - protein, 335 aa, unidentified
MKHDMHVLGIDIAKRVFHAVGMDDRGNIVYRKRLSRHDLIPYIAQLPPVRIGIEACGGAHYWARRFRAHGHEVKLMAPQFVKPYVKSNKNDSRDAEAIAEAVTRPTMRFVPIKDVDQQDLQALHRVRERLMGARTALVNEVHGLLHEYGIIISKGVAKFRQAVVGKLESEKDKLTSLSREMFWKLVDEFALLEKQLAYDQEKRDTVATTHPECQRLMTIPGIGPFTATALVAAISDASAFKNGRQCAACLGLVPRQHTTGGKERLLGISKRGDTSLRKLLGHGARTTLRWVGRKTDRRSQWMRQLLERRGKNRTAVAVANKNARMVWALLTSHQD

SEQ ID NO: 461312 - protein, 403 aa, unidentified
MNSVGIDISKGRSTIAVMRPFGEVVISPFEVRHTDSELSELARQLKSLDGETRVVMEATGNYHTPVAKLLHDAGLYVSVVNAKLVHGYGNNDLRRVKTDRKDAVKLANYGLDRWLTLPRYVPEEDTRLLLKNCYRQYRQYSKVQTVLKNNLISLLDTVFPNVNRLFSSPIRGDGSEKWVDFVAEFWHCRCVSEKSERAFTSKYLRWCRKHGYNFREAKAHTIYAEASGHIGVMPKSETTKLLVEQAVAQLRATSTALAALKHEMQTLASQLPEYPAVMDLFGVGPTLGPQLIAEIGDVRRFYSKKALVAYAGLDAPPNDSGDVTGRHKSMSKIGASSLRRTLFLVMSVYLQTAPLDEPVYQFMDKKRAEGKPYRVYMMASANKFLRIYYATVKAYLESLEHTA

SEQ ID NO: 461313 - protein, 448 aa, unidentified
MKTLPIINPNAAAIDVGSEQLHVSIAGDEPVVFGTFTKEVYRLRDYFKAQGVTTVAMEATGVYWLYAYTVLEAAGLELVVVNGRHVRNLPGRKTDMADCQWLATLHAHGLLRGGFVPPAAIRRLQDYQRLRADHIVGAASQVQKMQQAMERMNIKFHDVISDLVSVSGLKIIRAILAGQRDPEALLGLCDAQIQKKKRDRVVESLQGTWAAEHLFGLGQALAAWEFYQKLLAECDQQIEAVLIKLAGPPPPQDPIRAAAGGGKKLGKNTPQIDQLHQLLVRLCGGRDVTAIAGIGDNLLLQLLAETGPDLKAWRTEKHFTAWLGLAPASRQSGKRKGSVKRQRNRAGRMFCAGARSLVQSVDKALGGFYRRLAARKGGLVALKATARKLAELYYRVLVYGLDYAEQGLRVYQEKYAQSQQRLLAKLAEKQGFRLVSVHLDALQPKINT

SEQ ID NO: 461314 - protein, 336 aa, unidentified
MRYIGVDLHKTNFVVCFLSEDHQVQTQTFILDAQGLSRFKRRLRSDDQLAVEASANTFYFYRQIKDRLAKIVVVDTYRFAVIARSKSKTDKKDALMLARFLKLGWLPEVPVPTEQIEQLRHLFQARESLVRMLLQLKNMAHASLVRSGYAMKRSAFASARTRVRMAKLESLTAVDRQIIEMTLRQMSEVEQEVSKLEVSKLEAEIIERGKGLRGLERLLQIHGLNLIAAIGLLAEIGDIEKFETSKQMAAYAGLATSVRQSNETTRRGKITKQGRKRLRTIVIRAVLSMVNRTKTPLMEFYQQKKREKGAGKAIVATARKLLVIVYVMLKKELDYW

SEQ ID NO: 461315 - protein, 338 aa, unidentified
MLYVGVDLHKQSISLCVVELADRARKIVERRRFCCDQEEQMAEYFASLGEYQLVVEATASYEWFVQLVEPTADRVVLAHPAHLRVIAQSKRKTDKLDAQTLAEFLALDQIPEAWRPTPRVRQHRTLVRHRNYVVRRRTSVKNKLRRVLSHYNADLKHLFTEAGRRYLATIDLSEADRFVTNQLCEEFDQHSARLKAVDKQLKAFAKAASVAEQEARAVLESMPCVGPVTVDVVLAEAGDVRRFGSQRKATAYAGLAPGIRESAGKAKQLGITKEGSRLLRAILVETAWRLVNRTRRWARVYEKLKARCGAKKAIVAVARRVWCVMVSILHSGQKYQLT

SEQ ID NO: 461316 - protein, 401 aa, unidentified
MLIGWDWASQSHDITVLGDQGEVVERFAVNHDEAGVERALARMRRHGEPRNLPIAIERPNGVVVERLLAAGHPVVPIHPNAFNAARSRWGAARAKSDPGDSYRLADYLRTDGHRLRRLQPLDQQTRQLQGLVRMRDDHVEARVAAVNQLHALLDTSWPGAVTIFASLDSDIALNFLDRYSTPDSAQHLGEARLAAFLKRNSYCGRRPASELLRRLRGAPIACNLLEPEVLTDLVRNQVRVVRTLRETIAEMDHAIAAALLEHPKAKLLSALPRIGDCVNLAQLISELGPILDGSLDVDHAAAQCGASPVTKSSGLNHGVHFRWAANNHARKALGIFADNSRHSSRWAACLYARHAALQKRHPHVIRILMRAWLRVIWACWHTNTAYSPKLHGAESHFAPAS

SEQ ID NO: 461317 - protein, 387 aa, unidentified
MTKNKGRVVGLDVHPDSFAGAVVEGSDPAQARVLSSSTRVELEQLEQWTLRHTSTEDRLLLEASGNVFAVAARLRTIGRKVEILDSHRAGKVGKVYCANDRVDAVKIARIYLSALSPIVWQPDAKTLERREIFSAYQAVVKESTRAKQQLRSMLNEHCVRLEKGFRLCHPNAIRRLVALREWTPARTMLLQQLHGTLVAARACRTLLRRHMAQEIVAEEALLRLTRLCGINLVTLYGVVAAVGDVRRFSHSKKLVAYFGLNPTVSQSGNFQGSGALKRHGRGALRALLIQSGKKLLEVNNPLQKWGLAVAARRGRNKAAVAVARKLCVALWHVLMGHTIGALERLDTLETKLSKFATELGPVALAAFGYNNKAEFVEKKLYVLRSYP

SEQ ID NO: 461318 - protein, 416 aa, unidentified
MPNPLFIGIDVSSKDNAVCCLTNDDDKRSLARFSVLNNRPGILELRDRVTQLVQKHDFDSLLFGLEHTGCYSSHAAMYLQQHLDFNCSDVKVYKFNPSIINQFKKAHFLDAPKNDRVDAWYIAARLKSGHLPHPFIWSEPLMALQKLTRARYHLMQDLVREGNFLMTNLYLKCSDYTLAFNNKMSATSLAVMEEFDSVEDLAEIPLDELINFLVTHGKNRFDDPEAVAKELKKAARSSYRLPKAMADSVNLAMASSIRVIRTVQEQIKSLKKAIEDHLDTIPQTLDSAPGIGPIFASGILAEIGDINQFKSHKQLAKFAGLAWTENQSGNFVAKQTRLIRSGNRFLRYHLIEAANSVKVHDPVFAEYYAQKSAEPKQFAHKRALALTARKLVRLVYSLLKTNQLYQPMGGNRQKND

SEQ ID NO: 461319 - protein, 344 aa, unidentified
MEHFAGIDVSLKDSSICVVDAAGRIVREAKVASEPEALVAWFRGLGFAVTRIGLEAGPLSQWLHAGLSGAGFEAVLLETRHVKAALSAMVVKTDRKDARGIAQLLRMGWFRPVHRKSADAQEVRALLVGRKLLQSKLRDVELSIRGILRGFGLKVGEISKGRFAARIRELVAGHEMLETVIGAMLAAREALLTEFMRLHRRMLVTVRADAVCRRLMTVPGVGALVAVTFKTAVDDPGRFSSSKAVGAHFGLTPKKYQSGETDVTGGVSKVGDAMVRTALYEAANVLLSRTTRFCALKVWALAVARRRGAKRAKVALARKLTTVLHRMWVEGSTFRWSKEAPAAA

SEQ ID NO: 461320 - protein, 338 aa, unidentified
MTIETLGIDIAKNVFQLHGVNRNGRVVLMRRVMRDQLLAVLAQIGPCTVVIEACTGAFYWARKFEAVGHQVKIISPQYVKPFVRRQKNDGNDAEAICIAARQPHIPFVPKKTVAQQDIQALHRARQRMVNHRTAVVSQIRGLLLDRGFAIAKSITRARRAIPEIISDLKNELTAMAREALSELYDLFRDLDRRIASFDKKIERIFRESEPCQRIAKIKGVGPKTATAVVAAIGDGSEFKNGRHFAAWAGLVPRQHSSGDRKVLMGISKRGNQHLRSLLVHGARAVVRTAPSKTDPNNEWVNQLRERRGFNRATVAIANKNARIIWAVLRTGEAYRAAH

SEQ ID NO: 461321 - protein, 404 aa, unidentified
MYNAVGIDVSKGKSTIAVLQPGGTVIRKPFDVSHTSQNLNELADYLSSLDGTTKIVMECTGRYHEPMVKALSEAGLFVSIVNPHLIKNFGNNSLRKVKSDPADARKIARYTLDNWTELRQYSGMDNTRTQLKTLNSQFSFFMKQKVAAKANLIALLDNTYPGVNKLFDSPTREDGSEKWVDYAYSFWHADCVRKIGLKAFTERYKSFCKKHHYIFQQDKPEKLFNASKELVAVFPKEKTYKLLIQQSIQQLNLASEHVERLRREMNELASTLPEYSIVMGIYGVGKTYGPQLIAEIGDVSRFTHREALTAFAGVDPGVDESGQHKSKSNRASKVGSARLRKTLFQIMTTLLQNAPEADPVYRFLDKKRSQGKPYYVYMTAGANKFLRIYYGKVKECLRNLEQTE

SEQ ID NO: 461322 - protein, 409 aa, unidentified
MKFFVGVDVSSKDLKVCIMDCDGNSLKRFTVQNNPTGASFLRDQVISLADKHSCQEIHIGMESTSVYSFHPAMFLNEDEALHRYQTKVYLINAKLINKFKEAYPYLDKTDDIDAWVIADRLRFGRLPYTAVMQEQLLALQRLTRMRYRLVNNMIREKQYFLQNLFLKCNAFKSEVESSAFGNAMMELFLEQYSLDEISSMDVSVLADFLREKGKNRFPDPEGVAKCIQKAARSSYRLSKCVEDSVDVLLATSIECIRTLSAQIKQLDKAIERLLDGIPNTLQTIPGIGPVFCSGILAEIGDINRFKGEASIAKYAGLTWSKYQSGKFEAEETRMIRSCNHYLRYYLVEAANSVKKVEPEFRDYYQKKYREVSKHQHKRALVLTARKLVRLIYALLRNDQIYTPRRKVYS

SEQ ID NO: 461323 - protein, 466 aa, unidentified
MENNYILYVGMDASKGKADAAILKVSDRRSVKPKFLRKKLSFKFVKSEVTSFLETVRSYSDDNCTSICFALEVTGIYSTNVYNFIKDNLNDNESIKFLNTDFVNQWRNAHNIAKSDPLDAQTISTIIGTDSDVQYVNDNVFENKNGYQDLKALVHRHYQIKKIYSQEINRLIAQCDCLFPELQYVFEPKSAAFIAVLSSYPTTHDIINASRVEVFDVVYEATKHRCSMDKVDKLFELCQDTLVPDDISSYGKSIILDLVENIKNIKGQLKSIERYIKDIASLNPAYKLLLTITGCGPITAATVIAETGNIRRFKNADCFVSYSGTSPRNKRSGTSVETMGKISKKGSRYLRHAIYMIAEFARRHNPVLKHQFERIKNGNKKRHKLANIAIANKIARYIYSIMKNKSSFVILHDHIMRLPEETRDTFFNSISLDFPKNTRKQIYQYSDINGELHRFVYIKTDEMIPA

SEQ ID NO: 461324 - protein, 257 aa, unidentified
MKLQKSNYVRYIGVDVSKASLEIDDSAGLAPASVGNQLETITKSLVPFVDTPDETLVICEATGGYERKLVTAMHAAGIPVMVANPRQVRDFANGHGILEKNDTIDAVVIRHFGQDARNLTLAVPKSDDQEKHGALARRRKQLLDMINQEKNRLQQTADPDVASLIQNHLESLEKQRKHIDEQLKKMVAKEAKTNPTVRVLQSTPGVGAVTVSTLLCDLPELGKLSRGQVAKLVGVAPMVNQSGTKDGRRWILADEVM

SEQ ID NO: 461325 - protein, 328 aa, unidentified
MCTLGIDVSKNKIDLCLLTAGPGGKKKHKVLTNEPAVARKVVDWLNAQKCVPESVTVVLEATGIYHENLAYGLHEAGVSVCMANPCRVREFAHGMDILNKNDAVDAFVLACYGELKSPVVWVPPSPEVRKLRALLRQRDALREDVQRTVNRLEKANSTSTPQEVIRSLERTKSWLNEELARIEKLITDHTDNDPGLKADLDLLKSIKGVKDQVGREMLALLKDRTFKSASQVAAYLGLTPVEKTSGSSVRGRPHMSKTGPSGVRAKLYVAALTASRWNKQAKAIYERLVAKGKAKKAALGAVMRKLVHLCFGVLKTRLPWDENYVATA

SEQ ID NO: 461326 - protein, 450 aa, unidentified
MARRQKSTQNLPVIEPNAAGADVGATQIFVAVPADRDPKPVRCFDTFTTDLEALADWLDACGIRTVVMESTGVYWIPLFQILEKRGIEARLVNARHVKNVPGRKSDVADCQWLQYLHAVGLLRGSFRPDQEICALRSLWRHRDSLIQMASVHLQHMQKALDQMNLQIHHVISDIAGTTGLAIIDAILAGERDPQRLADLRDWRIRATEETIMKSLVGDYRGEHLFTLRQSLVAYRHYQQLIGEVDEKVKQLLSELPAQVDPAEDPIPKARNPRKTPWRNEPIGLREDLYRAFGVDLTQVPGIDSLTAQSLLTEIGPDLSAFPNVAAFASWLRLCPDKRVSGGKVLSSRTGPTKNRAALALRMAAQSLNRSQTFLGEYFRRMRARLGAPKAITAAAHKLARIIYHLLTSRQPYDESIFIVQEIRFRKRKEARLRAQAHELGFQLVPVQAVP

SEQ ID NO: 461327 - protein, 343 aa, unidentified
MQEITTIGLDIAKSVFQVHGIDASGAVIVRRQLRRSQVLPFFRKLPGCVIGIEACATAHHWARELEKVGHEVRLMPPRYVKPYVKRNKNDAADAEAICEAVQRPTMRFVPIKSPEQQSVLMLHRTRQLFIRQRTALINAIRAHLAEFGIVAGIGRNGVEKLLDLITRGEDERIPPAAHACLMALAAQLAMVKRQILEADRRLLAWHRTSKTSKRLEAIPGVGPLIATALVASIPDPNVFRSGRDLSAWIGLVPKQSSTGGKERLGSISKAGNRYLRSLLVVGALSVIRRAKQLGYTRHPWLVRLMERRSVKIAAIALANKIARIAWAMMARNESYRTSLPASA

SEQ ID NO: 461328 - protein, 483 aa, unidentified
MKPKQVESNKKASCRATPNHWQRMNHKQRREMLRKIQSADLSLEVVHPDAAGIDIGNESHYVAVPSARDRQPVRRFGCTTAEVKAMADWLKQCKIQTIAMQSTGVYWVSVYDILEEAGFEVYLVNANETRNLPGRKSDVQESQWLMKLHTYGLLRNSFRPSREIRTMRTYWRQRNDLVRAAGRHIQRMQKALTQMNIQLANVLSDVSGMTGQAIVKAILAGERDPYQLAALRNWRGKASQEEIARSLEGNWQEEHLFVLQQEQDGYQFCLKQMAECDQRLQQYLQLQEDRSHGASLPEEKRKERLRKKKKGNTPQFDLRTELFRMTGTDLTQIDGIDVTTTMTILSEAGWDMSKWKTEHHFVSWLRLCPDNRISEGKIIGKGRLPTNNRVTNALRMAASTLRLSSTYLGAQFRRLRTKLGAPVAIKAMAAKLARLVYRMLRYGMVFIDRGAEFYESQHRKLQINYLKRKAANLGFQIIEAPAA

SEQ ID NO: 461329 - protein, 361 aa, unidentified
MEEIIDRNNALYVGIDVHRYEHTAVCADRFEEEKGSLSFANTPIGIQQFINWLSAIGEPNLTKIIGVEGSNGNGRFLTESLSQDYSQIYEINPIRTKQRRNFGTRGDKSDAVDARLIIEVLTRKLDELPRITIQDRSKTMTTLEQLVIFHEDLIFQITRLKNQLHLLFHEIEPEYQSHRGSSFSVRILDVWLKKCGKKVILSDPKHIKYFMILEKIRQLRRLKRTSKRVDGEMKLLINQIKPNLLTFPGVGIVTAGKIITAVKGIDRFRLDTFIKYAGIAPVEKQSGRNKKHKQNKCGNRQLNNAIYTVALTQLRGHSKAKAYFQKKIAEGKTKKHAIRCLMKRVACIIYGLLRSRENYRG

SEQ ID NO: 461330 - protein, 423 aa, unidentified
MPITYCGGVGVAKRKKSLRKKEMKLPKHLEHINRYAAGINIGSRSHFVAVPEGTDEQPVREFSTFTADLERLAEWLIACGVTTVAMESTGVYWIPVFEVLENHGLEVKLVNARHVKNVPGRKSDVLDCQWLQQLHTYGLLHGAFRPADQVCTLRAYVKQRSTLVSGSASYIQRMQKALTQMNIQLHNVVTDSTGSTGMRIIKAILNGERNPDTLAAMRDPRCKNSSATIARSLKGNYRPEHLFVLRQAVELYEIYRTKIADCDRQILEQLKGFDNSPNDVPPATVEDALVRMSGVDVTNIDGIDTTTALKILSEIGTDMRRWKSSKHFASWLGLSPGTKVSGGKVLGSATKPSTNKASAALRMAAFTLLNSKSALGAYLRRQRTRLGTPTNKAKIINRFIDSKSVNKRFRLSFCPPSIRCIIL

SEQ ID NO: 461331 - protein, 338 aa, unidentified
MGHPRYVVGIDIAAETFTATVLSPPDQIILVSELVSNGPEGYQRFLSELKQHHVGRKSSVIVMEATGVYGEQLCYFLHAKGYQMAVEPPNAVKKAFRFKQKNDTVDSRQIAEYGYRFFDTLRYWKPRTEILEQIQTLLTTREQLVKQRTASQNALQMLRRKVVQTPLAMTTYEENVQRLGEQIKRIDQAIKELIDQDPTLRQKGNLADKVPGVGLLLVANLMVITDGFCHHVDPKSLAAYLGICPYEHTSGTSVRRKDRSDRRGTGRIRKLLYLASLSVKEHNRPFKAYFYRKVAEGKSQRLVLNNIANRLLKVICATVKSEIPYHENYRSIHPALVK

SEQ ID NO: 461332 - protein, 338 aa, unidentified
MTVVFLGIDLAKNVFALHGVDAAGKPCLVRPQVRRDQLAELVARLPPCTIGMEACSGAHHWARQFAGFGHAVRLMAPKFVAPYRMSGRRGKNDAADAAAICEAVQRPSMRFVPIKSELSQCRLAIHTVRQGWVKARTATINRLRGLMSEFGIVLPLKAQTVRRLAAEQAETLPHWARTACMDLLDELRRLDERVAAYDEHIQVMACADDRSRRLMQMPGIGATTASALLASIGHGHDFANGRQLAAWLGLVPGQYSSGGKQRLGRITKAGDSYLRTLLILGARATLAAAARKKDRLSRWAVALSERRGYWKAVVAVAAKNARMAWAMLAKGEEFKPVT

SEQ ID NO: 461333 - protein, 338 aa, unidentified
MNIVFLGIDLAKNVFQLCGLNQAGKPVYTKRTGRKELLQTLANIPACLIGIEASTGAFYWQREFEKLGHKVKVISPQYVKPFVRGQKNDGNDAQAIAVALMQPTMQFVPPKSPEQQDIQALHRARQRIVNHRTATVCQIRGLLLDRGIPIGSAVSRARRAIPLILEDAENGLSSRMRRTIAELYDLFNDLGRRIHFFDKEIETVFRQSEACQRIAKVKGIGPKTATAVVAAIGKGTEFKNGRHFAAWLGLVPRQHSSGDRQVLMNMTKKGDKHLRTLFIHGARAAVRVATNNNDGHMNQWVNQLKERRGFNKTTVAVANKNARIIWSMLRNDTGYQVV

SEQ ID NO: 461334 - protein, 348 aa, unidentified
MKAFCGIDWANDHHDVALVDGDGALLARARIVDDARGLRQLLDLPAAHGDSEDIPVPVAIETSRGLLVAYRRATGRPVYAINPMAATRYRDRHAVARKKSDHLDAMALANVLRTDAAAHRMLPRDSELAQATPILARAQQDAVWDRTQAGNKLRSHLHEYVPAALEAFSSREGLRAATALVILAAAPTPAQAAKLTRSQLQALLKRAGRKRGIEEEAERLRDVFRLPHMRQLPLVDQAMGRQTVTLVAKLSVACTSADDLAQAAVESFEKHPNAEIITSFPGLGSLTGARVLAEIGDDRSRFADAKGLKAFAGAVPVTRVSDKSVAVMARRVKNQRLAAVGTSGHSPH

SEQ ID NO: 461335 - protein, 335 aa, unidentified
MEYCGIDLANKTSAICVMTDDRRIVYEVDCPTDDDGVGQALKAYSGLRCVIEASPLSEYVAEILELRGHEVVVIDPRKAKGVITTKKKTDKLDARNLARMAQTGWYTEVHRKSADARLLRSHLMARKGLVDTLGAQQCRIRGLLRAHGIVLGHVSAGRFEARVLERVASRCPALLPAIRPLLDSWVLLRRSIAELTKQLKEMARQDPVCGLLMTVPGVGPLVSSAFVATIDDPGRFSRSDQVAAYVGLVPSVSQSGETERRGRISKEGDHLMRWLLVEAAHILLSHYRGDNALKAWGKRIEQRKGPAKAKVAVARKLAMILHRMWLTNTPFQAQP

SEQ ID NO: 461336 - protein, 309 aa, unidentified
MKEELVYLGVDIAKAYLDAAIGNEKSRFSNDALGHRQLINWIKQMPASVQVICEPSGGYERAFVRALVGAQLKISLVPANRVRQFARAKGILAKTDRIDAKLLCAFGEAMQPGTISASQLEQQHLRELESQRRHLTHLLVMEQNRAARMSDLCVCKMNRCLITQIKKQIEQLDLLIQGQIKASPELSTKAEKLTAISGVGARTAALLLAQLPELGELNRREIAALVGVAPFNRDSGRMRGKRAIYGGRKPVRHGLYMAALVAAHHNPILRNFYLRLRAAGKPAKLALTATMRKLLIVLNSALKPDLSYA

SEQ ID NO: 461337 - protein, 340 aa, unidentified
MDHIAIDLGGRKSQICVRSGDGAVIEERRVPTAELSLYLAKRGPAPRRVILETCAESFAVADAAKQLGCEVRVVPATLARALGVGARRTKTDERDARCLSEASCRMDLPSVHIPSLVSRQRKTQCGMRDALVASRTQLINTVRGWMRGQGIRVRSGATETLPARVRHAVPTPPSYVERQLKMIDELTSSIREADKELEREARADLATRRLMTVPGVGPVTAIRFVSAIDQVERFADVHSLQSYLGLTPGEHSSGERRHRTGINKAGCTQTRRVLVQAAWVHKTRRPNEPASIWATKVEKRRGKLIAIVALARKLAGILYALWRDGTTYNPARGALPAMPA

SEQ ID NO: 461338 - protein, 400 aa, unidentified
MSGLKGSFDCFVGIDVSKDKFDACGITGEEAKLFQISAGMDRKGFEKLKGHLASVSVSSVLIGMESTASYHVNLFSYLVSEGYKVILINPLLISNYVKMQLRKTKTDKKDAVVIAQFLLANGDTLIQRITPSLISDLRDLSRQRESLVDEMTSLKIEIKQLLNITFPELEHMVGIFTKSILNLLQQYPSAFVLRDADLDQLSQMLIADSYGHKREAFAAALIKAAHSSIGINSTAKEMILKQKIALLLHLEDALQEITGMLIEMARKLMEEDINIMTSIKGIGDKTATNFLVEMGGDINQFERSGKIIAMAGLDPAVYQSGKHEGKGRITKRGNRHLRRIIWLMTTKVIQYTDIFNAYYQKRRKEGLPYKMAVLATAHKLIRVIYAMLTQRTTFCPQMNS

SEQ ID NO: 461339 - protein, 474 aa, unidentified
MPVCFTYHLIMVSMMKNKEESQQRKNKRISKHLEQVNLFAAGIDIGFHSHYVSVPEELATESVREFPCFTGDLNRMADWLVEIGIQTVAMESTGIYWIPAYEILEERGLIVLLVNARHIKNVPGRKTDVLDCQWIQQLHTYGLLEGAFRPEEETVALRTYMRQRETLTQQASDQIRRMQKALRQMNLLLDNVVSDIDGVTGMKIIRAILEGERESTVLAKLRDGRCKKDEKTIAASLEGHYREEHLFSLKQSVELYDTYQTKIIDCDQAIQSQLDKMDSKGDKKDLPPSKKVKSKNTPKFDVRGELYQMTGVDLTCIDGLNESSVLKILSETGSDISAWPTEKHFSSWLGLSPGNKVTGGKSLSGKTKPSANRAAAAFRLAAFGLLNSQSALGAYCRRQRTRLGAPKAITATAHKLARTFYSMLKNGTEYVDKGQDYYEKQYHDRIINNLKKRADNMGFELIAKDISMLEMSKT

SEQ ID NO: 461340 - protein, 350 aa, unidentified
MDKISASRGTRVVAAGIDMAKSTFSVCGLDAAHGVALERTMNRAKLIELFATMPPCTIRLEACSGAHQLARELAAFGHTVRMIAAKFVAPHRTSGKNDRNDARAIVDALIHPRTRFVAVKSEEQQALLSLQRARSGFVEERTALVNRMRGLLAEFGVTLPVRIEKVRHGAVRAAQRLPTLARQVIEQLHAHLLILDERIGQYDRQLRELARHSEPASRLTQVLGIGPITAITTVATIGDGRAFKNGRQFSAWMGAVPRQYSTGGKTRLGSITRHGDVCLRSLFVQCAKALLAVAPRRNDRLSRWALAVRARRGFGKAVVALAAKLARIAWAILAKGERFHVQPFAPAVSC

SEQ ID NO: 461341 - protein, 339 aa, unidentified
MDKSDFAGIEVSKDELLVALRRDEQTLPLKTFPNTGEGHRTLARYLARKGRRVRVCLESTGVYGLDLALLLHKRPGVEVMVANPRAVRHFAQALMQRSKTDPLDARMLLEFAARMPFQPFQPPSATALHLRALARRIEAVTDLCAAERNRLHAASAAEALPAAVRQDIQRSIAFQERALVRLARQARQLIARDPLWQERFEQLDSIPGIAPTSAIAILAELALLSPDREVRQWVAAAGLDPREHSSGTSVHKKTCISKAGNRHLRRALYRPALVAVQHDPHLRAFYPHLLDNGKEKLQALVAVMRKLLHAIFGMWKHQQAYDGSKIYQLAPEVCTTEVA

SEQ ID NO: 461342 - protein, 395 aa, unidentified
MQTVADRPEAPNAIRNDLGAIFISLELSRSTWLITSLSPDGGEKMSKHSVPAGDIYALLARFSEFKQKAFARTGKSFPIIVIQEAGLDGFWIHRVLQNEGIESHVVDPASIATSRRRRRAKTDRIDGEALLRTLLAYKRGEPRVCAMVKAPTPEEEDRRRLCRERKILIAERVKHVNRIKGLLFCQGVSGYKPLRRDRRQRLDELRTGDGGLLPKHLKAQIGRELARLEQLLEQIKAVEAERDALLAAQRVTARAPPAMLLNIKGIGPEFAAVLWSEGLFRHFDNRRQVASYAGLAPTPWQSGSVDREQGVSKAGNPRLRTTLIQLAWLWLRNQPQSALALWFKDRVSRNGGRLKKTTIVALARKLLVALWKYVTAGVVIEGAIVKSAWKAIGRD

SEQ ID NO: 461343 - protein, 467 aa, unidentified
MDDKAKERRKVDQLSAMNPNAAGIDIGAQSHFVAVPPDRDERAVREFGAFTSDLYKLADWLTSWGVETVAMESTGVYWIPLFGVLEERGFEVLLVDPRRLKNVPGRKTDVVDSQWLQQLHTYGLLGGAFRPDEDIRQLRSYLRHRSMLVDYASHHIQHMHKALTQMNIKLQHVVSDITGKTGMDIIQAIIAGERNPEELSKLRDYRVKASETTIAKALHGHWRDEHLFELTQAAELYTTYQDKIAACDRRILALLNTFDDRSQGPPPPKTGKKSRRSQHNAPSFDARSHLYRMTGVDLTGIDGIEAHTALKLIGEIGLDMTRWPTVKHFTSWLGLCPGNKITAGKVISSRTKPSANRAAAALRLAANSLHRSDSALGAFFRRMKARMGAPAAITATAHKLARLVYSMLKHGTQYVDAGQDYYERQYQHRVMKNLTQRAKQLGYKLVELQPDSPSEPPNPTVTIQAVT

SEQ ID NO: 461344 - protein, 354 aa, unidentified
MGIKYIGMDVHQATIVIAVLNETGKCVMETIIETKTSTIVDFISGLRGMLYVTLEEGTYAAWLHDVLSPRVEKVVVCDPRKNKLLPSGHKSDKVDARKLAEWLRTGQLSPVYQGRQSLRTLKELARSYRGLVEDSTRVMNRLKALFRGRGIACSGPAVYQARQREQWLQQLTQPGARRRADWLYQQLDQLQPLRKAAHQALLVESRRQAGQSILCQIPGLGPTRAALIQAIVETPHRFRSKRQFWTYVGLAVVTHSSAEYRMVEGQVRRSNKLVATRGLNRNHNRVLKEVFKSATTGAIQRDPVFKLLYFRLTEGGVAPEMARLTLTRKLAALTLALWKKGAHYDPEQLKAQAA

SEQ ID NO: 461345 - protein, 340 aa, unidentified
MIKVIGLDIAKNVFQVHGIDEAGRPVLRRKLRRADVLRLFSHLEPALVGIEACHTAHYWAREITALGHEVRLMPPQFVKPYVKSQKNDAADAEAICEAVQRPTMRFVPVKSVDQQAVLLLHRTRDLLIRQRSSLISAIRAHFAEFGVIVGQRMRNIDRLLGLLADGGTTLPELARRMLAVLANQLRDVAAQVMAVEAELVAWHRANDVSRRLATIPGVGPITASAIVATVGDAAQFKSGRQFAAWLGLVPQQRSSGGKERLGRISKRGDGYIRRLMIHGARAVVGWRKRRPLSRDPWLGGLLARRPMNVATVAYANKSARVAWALMVRGRIYDTALARAA

SEQ ID NO: 461346 - protein, 340 aa, unidentified
MSIITVGIDLAKNVFAVHGVDDNGKAVLVKPKVARDKLLELVAGLPPCLIGMEACSGAHHWARQFRAYGHTVKLMAPKFVVPYRLSGKRGKTDAADAAAICEAVTRPHMRFVPVKEEHQQIILCLHRTRNGFVEERTAVYNRLRGLISEFGIVLPQKVVNLRRQIGEHLEDLPGYANRCVGDLLAHADVLDARIAEYDRAIAQAARDDARSKRLMQLPGIGPITASALLASLGGGHDFANGRQVAAWIGLTPGQYSSGGVARLGRITKAGDRYLRSLLVMGARAILSGLGDKQDRFSRWARSLVERRGYWRAVVALAAKNARLAWAVLKYGEDFRLHAGT

SEQ ID NO: 461347 - protein, 344 aa, unidentified
MITIGIDPHKSSLTAVAVEPSGQTHPPIRLVVDKHTLAALLTWAAQWPDRQWAVEGATGLGRGIAQQLVTVGEVVLDVPAKLAARARLLGSSSARKTDVADAISVAAVALHNRRLNRVQLEDHTTIMRLLTERRDDLVAEHTRWINRLHVLLRDLHPGGAEVRLDSTEASALLAKIRPVTAADRQRKQIARDVVRDLKRHEASIKELEKQLRAAVTTSGTALTQIQGIGFLTAAKILALTGDIRRFPNQEHYASYAGTAPIDVSSGEQETHRLSRRGNRQLNAAIHVAAVTQARDPGPGRDHYRRKLTEHKTPKEARRSLKRRISNAIYRRILADHQRAQLAAA

SEQ ID NO: 461348 - protein, 344 aa, unidentified
MSKHTVRSGDVAGLRTRFSQLKDKVQVRMGQIVPIIVIQEAGLDGFWIHRLLQDEGVESHVVDPASIATSRRRRRAKSDKIDGEALVRALLAYKRGEPRVCAMVRAPTPHEEDRRRICRERKILTAERVEHVNRIKGLLFAQGVSDYEPLLRKRRARLEELRTGDGRPLPEHLKAQIGRELDRLELTLQQIKSVETERDAMLSSPDEGTPAPGAMLKSLKGIGPEFAGVLWSEGLFRSFSNRRQVASYAGLAPTPWRSGSVAHEQGVSKAGNPRLRTTMIQLAWLWVRHQPRSILTLWFHQRVQLNGGRVRKVLIVALARKLLIAFWKYVTAGVVLEGAETMAA

SEQ ID NO: 461349 - protein, 407 aa, unidentified
MEVLYPRCSGLDVHKDIVVACVRCVTAPKAHEVRTFGTTTSELLALSDWLASFGCTHVAMEATGVYWKPIWHVLEAHFTLILANAQHIRNVPGRKTDVNDATWIADLLAHGLIRSSFVPPTQIQEIRDLTRTRKQLVREISQHSLRIQKVLESANIKLASVLSDVLTQSGREMLEAIIAGEEDPERLADLAKGTARKKRPALIEALRGYVTDHHRTMLKLHLDLIDALQEALCKIDETVGEALEPIQGAVEILKTIPGISDTAAQVIIAEIGIDMSRFPTAGHLISWAGLCPRNDESAGKRRSTRVRKSGTWLKTTLVTAAWAASRKKDSYLRSQFLRLKSRRGPKKAILAVAASMLTAAYHMLQDGTAYQDLGHDYFDRLDKTKAINRLLRRLDQLGCKVEVKHAA

SEQ ID NO: 461350 - protein, 388 aa, unidentified
MDCLLPVPACAPMNEKVVPVVEAVLPSHIVGVDVGKTEIEWAIGPRELPRNDRGSANVQPTVSVKNRERNLKSFLKGLPTGSTLIVESTGRYHRLVCDLAVAQGLTVFVVDPFRVNAYRKHDNQRAKTDACDARLLVRFGRDKYQELRPYWPLSDETSTLMTLVRLRSGYVTHRAAIRQATQEMIPQEQGKRQQGKKEPEPTPVGRNVNHFLAAVRTKADELDAAYTVAIEACEEQILAVIKSAPALQDAYDRISAVPGLGLVATSSLMCALMRGEFRTVEAFIAYIGLDPVAKDSGQSHGKRRLSKKGDPQLRKSVYMGANSLVRNELWKDWIAKQKAKGLTHTAVICILARRLATIAWCLFKRGAVFDPKRVFAAPKQLAVLKPCI

SEQ ID NO: 461351 - protein, 344 aa, unidentified
MTRYIGVDLHTNSFTACILQDGEKEVMQTLPLQEGGLERFAARLRANDEVAVEATGNSAWFCKIVSPRVKRVVVIAPWQFEVIRRSVKKTDRHDARAIAFFLSKDMLPEARQRSEEHTQLSSLIAIRDQLVGLRTSLLGKVHGLFVRHGLKVKREALTSQAGFNRHIKSREWSALEKVELEVIAGQIGAIGDSVKRLDKEIAASAKTLPGYTNLISIKGIGPLSAAIMLLHIGDIRDFKNTGKLAAYFGIVPRVSQSNATATYGHITKRGSTLARKALVQCALIAKRYSSYFHSFYEKVKARRGIGKAIIAVARKLLNTVFHTIKNNWVFQDFPNFKLLPCNPS

SEQ ID NO: 461352 - protein, 338 aa, unidentified
MGTKSFLPASPISNAMETVVANLGIDVAKKKFDVALLKNEKYKSKSFDNKASGFIALLAWMKQREPGEIHVCLEATGGYGDQLAKFLFENGYTVSVVNPSRVKAFGEAELLRNKNDKIDAKLLARFCNKMKPAAWQPDPPEIEHLRMLGRRRDVLIAMRTQETNRLGNPDKSVNESIEKVIAFLNQEIEQITQSIKDHINSNDDLKKKRDLLDSIKGVGDVVIEAILSETNGFARFDRIEQVVAYMGLSPKEKTSGSSVKGKSLLCKIGSARLRKVLYMPALSATRSNPFVRDLYLRLTAKSKNGMVVACACMKKLVHIMFGVLKSGKPFDPAYGKTS

SEQ ID NO: 461353 - protein, 356 aa, unidentified
MSETVSTEIIVGVDTHKDVHVAVAISGLGARLGTKTIPVGAKGYRDLAAWALSFGAVRAFGIEGTGSYGAGLSRFLCEQGHAVLEVNRPNRQLRRQRGKSDPLDAEAAARAVLAGQADTLPKSGTGTVEMIRHLKTARDTAVKGRTQAMLTLKSLIVGVPAILREQLERVGGKMKLLRHLAALRPGPITSTTASAKASLRAIARRWLALDGEIKEHDVHLKALTTSRAPELIKAHGMAAGTAAEMLLLVGDNPERIRSEAAFAKLCGACPIPASSGKVTRHRLNRGGNRQANAALYRVVIVRMRGHQPTLDYVRRRTAQGKSRSDIIRCLKRYVAREIFGYLCSTSKPATTPLGSS

SEQ ID NO: 461354 - protein, 373 aa, unidentified
MPRYSTAFGMDVHLRSTTVCALDAETGEAVTRRFRGNPWGEVAEWMSGFPGPSLAAYESGYLGFAPQRELSGLGVDCVVAAVSKVPRSAADLSSKNDRNDAARMAKAILSHDITPVWVPSPEIEGLRDLAGAHDAATARLAAAKQRLLAFLARRGYAYGGTTPAGNPRRYWTYDFLRWLDKVRPADDGGIRALAALRNEVEAAAETRDDLLAEYRAAVAAGPLSAEVEALQSIKGCGFALAAAFASEVGDFSRFRSGRQVTSYFGLAPKQRSSADSVRLGGISGAGDALVRRLAVEGSWSYVQASHQPKLMPKGSGVPLEVRMHGRKGSERLLRRREEMLARGMPQAKANAATAAELVRWLWALGAMCREATE

SEQ ID NO: 461355 - protein, 409 aa, unidentified
MRVIGLDVHRSFAVAMFLDSEGLHNAGRVELTQDAVIAFGRRLRSDDEVVIEATVNTAGIVRILQPFVHRVVIANPLQVRAIAHAKIKTDKIDAAVLAKLHASGFLPEVWMPDEATETLRRLVAQRTQIVQQMTRIKNRLHSVLHANLIPPFEGELFSLTGRAWLETLPLAGDERIAVRRYLADLDQRAADLEALDQALAERALRDDRARRLMTVGGVHVTVAMGLLAAIGDITRFASPEKLVSYLGLNPSVRQSGNRAAQHGRITKRGRSHARGMLVETAWAAARAPGPLRAFFLRIQSKRGKQVAAVATARKLAVLFWHLLTKQEDYAWARPALLQAKLRKTELAAGKPAAKGRRKGRAHAYNSKEVRDRERAWLEQAENAYARFVANWQPKPPPGRTGAANGTRTS

SEQ ID NO: 461356 - protein, 318 aa, unidentified
MFIGIDVAKDTLVVAARPTGTLETVANSAAGLQPLLSAWREHPPTLIVVEATGGYEVLAVLTLSLAGLPVSVVNPRQVRDFAKGTGQLAKTDAIDAHVLAHFGELMQPPVRPLADAETRALEALVARREQLRLMLEAERQRLTQPAAHAPAVRTSLEHTIAFLQQQLAHTDDEIGTAVAAHPVWAARSTLLQSVPGVGPMIAQALLGWLPELGQLTRQQIGKLVGVAPFNRDSGRYRGTRRIAGGRAAVRAKLYMGALVAVRYNARIKAFYLRLLANGKPKKVALVACMHKLLTILNQIVRTAMPWDASHHMAAPQLA

SEQ ID NO: 461357 - protein, 425 aa, unidentified
MNKKRTKKQEAGPLWVGVDWGDSEHAVSVVDEERTLLMQFRSGTRLGDLRELARVLHGLGTVAGIAVEATRNPVVQFLFEAGFTLYPVNPKLSKNWREGNSVAGVKSDVRDGLVLALELARRHESLRAFEASQAAAAELAGLCERRHMLVDDRTRLVQRLKALLKQYHPGILEFFADWTSPAAWRFLRRFPRPDVLARARKDTLIRFLRANRIGLRPVWLERIERRDQAAQWPRPADSLSLEMAALATVAQLLALESYIVQVERLIKECSAKMPQASLVRSLPGAGDRLAPALLAMMAELEQEVDRHAALRCLSGVAPVENQTGKRRHAQMRRRCNKHWRDVLHLFAQCSTRSSRWAKAYYELRSAAGDNYATALRKLADKWLDILDSMLTHNEHYDEDRHIQALRKKGSPVYAKLCADSCGQSP

SEQ ID NO: 461358 - protein, 426 aa, unidentified
MNNTDISRIEQFRQFKNQIKRSKKYLIVGIDIAKSKHHASVVSSKNKKLLRGLIVENNASGFEHLLSMVQFYMSRDGFDDVVFGLEPTGVYQKPLAQFLIRQGYLVVYVTNEAIKKNRWLLDGRWNKTDKKDSANVADLICQGKCQYYDLPDMNLRDLRSLLSLRGRFKKQLHSCQVRIRNNLVAQYFPELDKYWNQSKTENLAIVRWCLSPHRISQLSFEKFFQMVTPANKGQRQYQRLEKIWEIAPYSIGCQPGVSMEIEAKILVETIESIQRQIDKINEVIEDICVSFVEYSYLISIPGFGPYISAVVLAAIGNADRFENSRQLLRLAGFDLSCNQSGNKSTVPVISKKGNAQLRYALYQAALIASSLNAQFRRYYVNLLQGREREKGIRTKMRVKLAVKLLVIAWTLMKKKQSFDPSYLKTK

SEQ ID NO: 461359 - protein, 346 aa, unidentified
MTIVEAARAVTGGIDTHGEVHVAAALDEIGGLLGTNSFRADPDGYSALLSWLESFGEVSKVGIEGTGSYGAGVARFFARAGVHVVEVDRQNRQARRQAGKSDPLDALEAARAAQSGRAHGTAKSRDGSVEAIRVLVVAKRSARGARIKALGQMRQLTFSAPDQLQSRLKGLPIATFVTAAQGLRPTRSPDVVTAATKASLSSLAHRVADLEAEISDLDAMITPLLEETAPELLAVYGVGIDTAAALLVAAGDNPDRLHSEAGWAHLCGVSPLEASSGKVTRHRLNRGGDRQANRALWHIVITRLASDPRTQAYMERRVKDGRSKSEAIRMLKRYVAREVYRYLPRA

SEQ ID NO: 461360 - protein, 387 aa, unidentified
MNKSNRVIGLDVHPDSFAGAVLLKGKDAASARVVSTSRRVELPELEKWAARHTGEQDVLVLEASGNAFAVAERLRVLQRQVVILDSHRAGKVGKAYCANDRVDAIKIARIYLTALSPVVWQPDAKTRERREVFSAYQAVVKEATRLKQQLRSMLNEHCVRLESGFRLSHPSAINRLLKLREWTPVRAMLLEQLHRGLVSAQARRTRLRRYMAQEVLDEPELLRLTRLCGISLITLYGLSASIGDIKRFSNSRKLSAYFGLNPSVEQTGNWEGEGALKRHGRGALRALLVQSAKKLLRVNNPLQKWGLAVATRRGRNKAAVAVARKLCVAVWHVMQGHVIGAIERMTTLHTKLHKLATELGLNTIKSQGYETKEAFVQKKLYLLRSYA

SEQ ID NO: 461361 - protein, 387 aa, unidentified
MYYIGIDISKFKHDCAVIDDVGDVVTPSWSFANDREGFLQFKALLDSLGSETRIGLESTGHYGTNLKLFLESCSTTFMEFNPLLINRFIKSKSLRKTKTDSIDCEMIARYLMTVEYKPYPPSFYHTEKLKSLTRFRDNLVRQRSRQLVELTNILDKVFPEFKPFFKGKFSTTAFHILINYSSPERIANMNSKSYETLRKLSRGRFSLADFTTLKHFARNTVGHPDDFLISEMAMVIDIFSQLDSKVDETEALIEECVLEINPPMLSIPGIGVESAAVILAEFGDFSKFQNPAQLLSFAGMEPGYFQSGTSESAGKMVKHGSSYLRYTLMNCAQSVVNYEPTFAEYYAKKRAEGKTYRVALSHVAKKLVRVIFTLQTKNLVYDSDSLR

SEQ ID NO: 461362 - protein, 355 aa, unidentified
MDSKKYIGMDVHKESISIAVMNGAGKIVMECVIETKASMILQFIDGLRGDLQVTFEEGTSAAWLYDLLKPHVTKLLVCDPRKNASMREGNQSDKIDARRLAELLRLNHLSPVYHGEHGLRSLKELVRSYLTVTKDLVRVMTRVKAIYRSWAIPCTGKQVYAPRHRVEWLGKIGEPGVRRRAEFYYQQLDALRSVRQEVRRELLAEGKKHKAWKLLCQIPSIGPIRAAVLLGILQTPHRFRTKRQLWTYSGFGIETQSSADHRSVDGQLERVKKQSSIRGLNRNCNHDLKNLFKGAAIVASSKPGPFQEFYTALLTKGLRPEMARLTLARKIATIVLMVWKRGACFDAQHLKPQTA

SEQ ID NO: 461363 - protein, 482 aa, unidentified
MTPNFPNTAAITAASPNDISKERRRRLRKLARFSHVRQSVIERIMHGWSPQQIAGRCGWSAIRSASVMRRSTSSPIPQTARPSSCGGTCRSVERDAGRGMPDGVTVAASARNSTFFTVLIQSPNASSSGIDGVDTPPRRQRDISCCLGSPFILEVFMESAAAIGIDLAKSVFQLHGADATGRPLFRKKLTRGQLRTFLASHPPTIVAMEACASSHYWGREIGAMGHEVRRIPPIYVKPFVKRHKNDAADAEAISEAAVRPTMRFVQVKTAEQQSRAMVFKTRDLLVRQRNQIVNALRGHLMEYGIAVPAGLTFVRKLEREIEDPDTALPLLVVELARLHLDQLRGCNEKIAAVERQMKEEAKRDPEAIRLQTAPGIGPVSAMAIKAFGPDMNSFQRGRDFAAWLGLVPLQKSTGGRQKLGRTSKMGQRDIRRLLIIGAMTRIRWALKNGAPSGSWLKQMLERKPRCWLRSRLRTKRRARSGR

SEQ ID NO: 461364 - protein, 354 aa, unidentified
MDSFPDLVADVSGGNVVGVDTHRDFHVAAVLTAVGRVVAAELFPTDTAGCEGLLVWAEQFGPVDRIGVEGTGSWGKGLTQTLFEAGHTVVEVNRPNRQRRRRRGKTDVTDAIAAALAVISGEAAAEAKRPDGPSEQLRMIHNAREGAVKARTAAINEFHAQIVTAPRQLRDRFGPLRTTNAVRVAAVEQPASGSDPTTAIATVVLASIARRIQNLDTEIKALDQHRRHVLDSHAPAGLRQRCGVGDWVAAQLLITVGDNRGRIRNEAGLAALCGVSCVAASSGNHQRHRLNRGGDRQANRAIYTIALTRMRHDPRTRAYVDKRTKEGKTTKEIIRCLKRYIIRELYHDLTTPLT

SEQ ID NO: 461365 - protein, 318 aa, unidentified
MNDAKYIGLDVHQATITVAVRDSAGKLVIEAILETKAETILQFLRGVRGSLHVTFEEGTWAAWLHDLLKPHVTRVVVCDPRKNALLKVGNKNDRIDARKLSELLYLNKLSPVYHGEQGIRTLRELARSYLTITRDLTRVMSRLKAIYRGWAIPCAGQQVYAPHYRGEWLAKISEAGVRRRAELYYLQFDTLAALRQGVRREPLAESRKHPATRLLRQIPSIGPIRAALLIALIQTPNRFRTKRQLWAYGGLARRTYTSGEYRFVSGELKRSKKVLAVRGLNLNHNHDLKNLFTKALQRERLLLRDPFRIFTKLVLLEG

SEQ ID NO: 461366 - protein, 326 aa, unidentified
MNYKLGIDVSKVKLDVALLKADGKYRSKVFGNDAAGFKNLLLWIETNVPAGKADVHVCMEATGAYHEALALFLHDQGVAVSVVNPLLVKRFIEVDRVRNKTDEGDAKCLARFCQMTNPELWEAPSIGVRTLQALVLRLDTLQEMRQGELNRLDVAHASVQQSIRDVIADLERSIEMVRKQIQSTIDDDPDLKQRHSLLESIPGLGDKTIPQLLAYIGRPERFKNVKALIAYAALAPLIRQSGTSLNKHKGTHPQGHRALRSALYFPAMVAGKYNPVIAAFWQRLKAQNKPGKVIVVACMHKLLAIAYGVLKSGKPFNPDHLKPMAA

SEQ ID NO: 461367 - protein, 413 aa, unidentified
MEIVIERCGALDVHKDSVVACVRVPGPDGGRLQVIETFSTTTSGLLTLRDWLAAYRVTVVGMEATGVYWKPVYYVLEEAFTCQLVNARHSRQLPGRKTDVADAAWLCQLVEHGMVRPSFVPPKPIRELRNLTRYRAAQIEERTREAQRLDKVLQDAGIKLSSVASDVLGVSGRAMLRALVAGTRDPAVLADLAKGALRKKLPQLREALLGRFSAHHALLVGTILAKLDFLDEALAALSAEIEVAIRPFAAEVDLLRTIPGVDRRVAEGMVAEIGVDMTRFGAAGRLASWTGMCPGNHESAGKRARGTTRKGSKWLRSYLRQAAKAAGGSKGTYLAAQYARLRGRCGPAKATVAVGHSIIVAMYYMLERRQPYQDLGPDYFLRRPAREHHARRLARQLQALGYKVTLEPAEAAA

SEQ ID NO: 461368 - protein, 342 aa, unidentified
MEKVSIIGLDLAKRRLQAHGAHADGGVAFRKTLSRDRVLAFLAERPRCVVAMEACGSAHHWGRAIGALGHEVRLIAPVYVKPFVRRQKNDAADAEAISEAAVRPTMRFVAVKTKEQQARAMLFRTRDLLVRQRTQLINALRGHLAEHGVVSPQGPANVKGLAEAIESEMTSLPLLVVELSRLLLDQLDGLSKKILELEKATVQEATHEATLRRLQTMPGVGPITAMAIGTFAPPMAVFRRGRDFAAWLGLVPRQHSTGGKPLLGKTSKMGQRDIRRLLITGAMAVIRSASRKGGPEGSWLHRMLARKPRMVLAIALANKMARAIWAMLTRGEDYRVPAAAAL

SEQ ID NO: 461369 - protein, 360 aa, unidentified
MTTTMTFAGLDVHARSTHAAALDLLSGELRRARFAAGNEEVIDWLAGLPQPLRACYEAGPTGFALYRFARAAGIDICVVAPSKTPRASGDRIKSDRKDAELLARLLLAGQLKPITVPSPALEAARHLCRAREQVRGDLMRCRHRVSKLLLLHGRVYPEPTTWNERHRRWLAGQRFDESTAELAYLDTLAAVDGLVARKQALDERLSRLAPEGEWAAAVARLRCFRGIDTLSALVLALEIGDFARFGRPAQLASWLGLVPSLDQSGESRRQGAITKTGSSYARRLLVEAAWQYLREPRIGVTLRNRQQGQPAQVLQIAWRAQHRLYRLQQRLRARGKPGNVVTVAVARELACFLWAAAVSE

SEQ ID NO: 461370 - protein, 367 aa, unidentified
MPSLTNNSATLTQVTVAHTYRFVVGVDTHAAAHSYAIVDSAGALLDEQAFPTTTAGIGRAREWIARRTNGDLDGVLVAAEGTGSYGAVLAENLAEVGYRVVEAPTPRRERGRGKTDAMDAEIAARNTLTLPVTRLRDRRGGQDQVALQVLTTAREQLNAERLRAINALTALVRTHDLGIDARRALARTQIRQIAAWRRRSEPVGLATARAEAVRLAGRVAQLEADLKSNRDQLTVIVTDRAPELLGMPGVGAVTAAVVLCVWSHPGRVRSEAAMAQIAGTCPIPASSGNTVRHRLNRGGDRRLNWALNTVVLTRMRTDPTTRDYVARRTAEGKTGREIRRCLKRYTTRQIYRTLNAAAAPDLHTMAA

SEQ ID NO: 461371 - protein, 346 aa, unidentified
MMIIGCDFHPSWQQVSWLDTETGETGEQKLVHASGDARRFYEQLAAPVLIGMEATGNSQWFVELIEDLGHEIWIGDAAQIRASYVRKQKTDKRDAEHIRKLVVEGRFPRLWTPDREQRDLRQLVLHRHKLVMIRSRVKNELQHLSLNKGMQKKRTLWSQAGQKLLRALPLKPWAACRREDLLGLLAMLDEQIGKLDRAVQQAAEENPQTKLLMTQPGVGPNTALAYVLTIGDVNRFHRGKQVASYLGLIPREESSGGRQKLGAITKQGNRMLRSLLVEAAQVAVQHDPGLRQHYRHRCHQKPKAVAKVAVARKLAVRLYWMLRTQVAYPEIVRIESSSGLALVGAS

SEQ ID NO: 461372 - protein, 420 aa, unidentified
MTKKKDSTILSVLHPVCCGLDVHKKTISACIVSPDKNGEPQTKIREFKTFTDDLNLLKEWLIENDCPIAAIESTGVYWRPVHNVLENHINLVLVNARHIKNVPGRKTDIEDSKWLAGLLRNGLLAGSFIPDKEIRQWRDLVTLRKSHTKTVGDYKRRVHKLFECANIKTSSVVSDLFGVTGRNIMNMLCNEHATVDIMAVEKCAKGSLKNKIPELVRSINGFFEDHHRFQLKSMLSAIDHHLQEITNVTNRLKLLMEGHQELLNKLDEIPGIDEFSAQSVISYIGIDLADFPSESAICSWAGLCPGNNESAGKRKSGKSPVRKNPFKTLMVEIAWGAIKKKGSYYKEKYYRLKARRGAKKAIIAIAHKILKAIYHIIKFGKTFKDPGKDFFVKKNSKKQISSLQKRAEKLGFKLVAIEEK

SEQ ID NO: 461373 - protein, 345 aa, unidentified
MNVTTVGIDLAKNVFSVHGVDAHGKPVLKKTLSRGKLLECFANLPPALIGMEACSGAHHWARALRSLGHAARVIAPRFVIPYRKSGKNDGNDAEAICEAVSRPAMRFVPVKSVEQQAVLSLHRIRSAVVAERTAQINQIRGLLAEFGLIMPRGRYPAQHHIPDILEDAENGLPSLARRLLADIYQRIQALNQQVLAYDREIESLARHSEPARRLMTLPGIGAVTATALVASVVDPAQFGNGRQLAAWLGLVPRQYSTGGKTRLGRITKQGDKYLRMLLIHGTRAVLAALKDKQDRTSCWLRELIDRRGYKRAAVALAAKNARIVWAMLTRGEAYRTQPASQAVAA

SEQ ID NO: 461374 - protein, 328 aa, unidentified
MSYVVGLDVSMEETACCARNAEGRILGQGKTVADPDAIAAALARFGRPTRVVLETGRMANWLHRQLIARDLPAVCVDARQAHAVLSQMPNKTDANDAAMLAELARTGFYRAVRVKSEAAQGMRALLKARELVLRQRMDLDNTIRGLLTSMGVRLPKGPRRWADRVELALEANEALALALKPLLRLREDLARSLLTEARGSDLCRRLMGVPGVGAITAYAFLATIGDPTRFAHSRSVGAYVGLTSKRYQSGEVDYTGRITRRGDGMLRTLLFEAASSLITRAGGGGALREWGLRFRARVGHKKASVALARKLGVILHRMWVDGTEFRAA

SEQ ID NO: 461375 - protein, 344 aa, unidentified
MQIARIGLDLAKYVFEIHGVDAHGKTVLRKTLRRHALTMFFANLPPCLVGMEASNGAHFWAKALSELGHDVRLISPQFVTPYVKSNKNDRNDAEAICEAVGRPNMRFVPIKSAEQLAVQAVHRIRSRLVADRVRVVNQVRGLLGEHGIVVAKDIGNLRRALAKIVGDNEDQALNPLVRALMGELREELTELDARIAGYDRKIREFYRNSEICQRLGKVEGIGPVTATALVATVGDRSSFKNGRQFAAWLGLVPKQRSSGGRARLFGISKRGDRYLRTLLIHGARSALGRVRDKQDPRSLWLGKMRQRRHPNIVAVALANKNARIAWSLLASDRVYDAGLSVRAA

SEQ ID NO: 461376 - protein, 398 aa, unidentified
MTESSDDESVQVFIGVDVGKDTHHAVAINRSGKRLFDKALPNDENKLRSLISDLKQHGQILLVVDQPAAIGALPVAVARSEGVLVGYLPGLAMRRIADLHAGEAKTDARDAAIIAEAARTLPHALRTLKLADEQIAELSMLCGFDDDLAAQTTQTSNRIRGLLTQIHPALERVLGSRLDHPAVLDLLQRYPSPEKLASLGEKKLAAQLCKLAPRLGKRLAADIAQALAEQTVVVPGTNAAAVVLPRLALQLITLRKQRDEVALEVEQRVLAHPLYPVLTSMPGVGVRTAARLLTEVACRAFASAAHLAAYAGLAPVTRRSGSSIRGEHPSRRGNKALKRALFLSAFAALRDPISRAYYTRKMSQGKRHNQALIALARRRCDVLFAMMRDGTFYTPQAS

SEQ ID NO: 461377 - protein, 355 aa, unidentified
MNKFKYIGMDVHQSSISIAILDAAGKLVTEATVKTETAAIVDFFRGLRGTLYVAFEEGTYAEWLYDLLAPKVTKIVVCDPRQNPQRKSGSKSDKIDAQKLAGWLRLGILKPVYHGSQHLRALRELAHSYLCLVRDATRVMNRLKALYRGRGIGCGGRRVYAVRWRGLWLEQLREPGVHCRAQLLYQQLDTLRTLRKEARRALLAESQKHTAHKLLRSIPYLGPVRVALLIALLQTAHRFRGKRQLWAYAGLALVTRSSADYRVVDGQLERSRKPVFIVGLNANHNHDLKEIFKGAAIAASVRPGPLQEFYASKLAQGMKPELARLTLARKMAAITLTLWKKGGRFDAEKLKLQAA

SEQ ID NO: 461378 - protein, 346 aa, unidentified
MSILAERVDVVIGVDTHTDTHTAALLTAAGAIVADLTVGADEQGAAKLLAWVEARAEGLRREWIVDGARSHGVGLTRYLLAAGQIVRDAARVPGAARRRSGKSDLLDAVHVARIALTAEQVADPRRDGDREALRILHTVRRHHTDTRTATVNLLKSLILTAEDTLRAQLRGLNTDRQVRHLATLQPGGGDTVDRIRHEQLHTLAQQISALDRILTDNLKQIRTLVAAICPALLAEPGIGPVSAAAALTAWSHPGRLRNEAAFACLAGVNPIPASSGRTQRHRLNRGGDRKLNAALHTIVKSRRRHHQPTIDYVDRRTAEGRTPKEINRSLKRYVARHTYRIMEANA

SEQ ID NO: 461379 - protein, 294 aa, unidentified
MIIIGADYHPGFQQIAYVDSETGELQERRLQQREEAEKFYRELAVQGMKVRVGMEASGHARWFERLLGELQFELWIGDAAEIRTRRVRKQKTDRQDAQLILKLMLKDDFPRIWVASWENRDARQLLWHRHRMVQARTRIMNQLQAVALNEGLRSKKRLWREAGREQLAAIRLAPWASRRRQDLLELLDRLNPSIAKLTEAVEQEAEKCPEAQRLMTHPGVGPLTALAFVLVIGTAERFRCGKQIASYLGLVPSEDSSGERRRLGHISKQGNSLLRFLLVEAAQVTVRSNQEWRR

SEQ ID NO: 461380 - protein, 417 aa, unidentified
MTEDVEWFAGVDWASQTHQACLVDAGGKIVGERGFAHSGAGLAELCSWLLTMTRAAATAIAVAIEVPHGPIVEALLERGFRVYAINPKQLDRFRDRFTVAGAKDDRRDAHVLGDSLRTDRHCFRQLSAEDATVIELREWSRMSEELQQERNRLANRVREQLWRYYPQALAISDDLAADWFLQLWAAAPTPATARRLQESTVEGILKRHRIRRITAAEVLVLLRQKPLTVAPGTAEAASAHISTVAQRLTLVNRQIKQAHQRLDALCDRIAENEGDSATGQKSEQRDVTILRSLPGVGRIVLATLLAEASEPLRRRDYHALRTLSGVAPVTRRSGKYCIVVRRQACHMRLRSAVYHWARVATQHDQRSRHRYAELRKRGHSHGHALRSVGDRLLAVACAMLTRRTPFDPDYPVKQMAA

SEQ ID NO: 461381 - protein, 368 aa, unidentified
MSNFITSFVGLDVHQDSIAVGVAPAGREEPRFVGTVAPQWASLCKALSRLGRREGLQIVYEAGPCGYTLARQLRAHGYACEVIAPSKIARRPADRIKTDRRDALLLARAARAGEMVSVMIPDERDEAIRDLSRAREDAVHARLKARQQLKAMLLRHGHRYSGRSSWTPAHERYLAAVSFTQAAQDITYAEYRSAVRDGHERVERLTEALRAQLEHWRMRPVVEAVMSLRGIDLIAALTLVAEIGDFTRFARPHELMGFLGLVPSEYSSGATRRQGAITKTGNSHARRVLVEAAWNYRFPARVSRVLQLRQQDQPKAVREIAWRAQLRLARRYRHLSARKLALNKICVAIARELSAFVWDIARQVKPTA

SEQ ID NO: 461382 - protein, 408 aa, unidentified
MSKTCGIDWSERHHDVAIVDDQARVVGRARVSDDTAGFTRLLELLAEHSDGEDGPIEIAIETDKGLFVAGLFAAGFTVFAINPRAVARYRERYGQAGGKSDPGDAGVLANILRTDRHVHRPLPADSELVRAVKTCARQHQEAIWARQQAMNRLRSLLHDYYPQALQAFPNLAHRAAASVLRAVPTPQTAQRLTLNRVVALLKKAGRRNDPGLAETIRTTLRAPALRQPAPIEHALGVAAVGLIDVITAMSDAITALEAELATVFDEHGQAAIITSQPGLGPVLGARVLGELGDDPHRFTDTAGLRSFAGTAPITRASGRSRVVTSRRICNRRLGDACHWWAFAAITKSPGARAHYDHRRAAGDTHNAALRNLANKLLAKLWHCLQTGTLYNEATAWPAPTDTPEQAAA

SEQ ID NO: 461383 - protein, 343 aa, unidentified
MQIVRVGLDLAKYVFVVHGVDARGNVVLRKTLRRSAVSNFFANLPPCLIGMEASNGAHYWARVLSELGHEVRLISPQFVTPYVKSNKNDRNDAEAICEAVGRPTMRFVPRKSVDQLGVQAIHRIRSRLVGSRTRLVNQIRGVLSEHGIVIARNIAKLRQGLADMVGSNERNVSDLVRALMGELQVELAEFDRRIAAWDRRIRELYHGSELCQRLGKIEGVGPLSATALMAAVGDRRCFKNGRQFAAWLGLVPKQRSSGGRERLFGISKRGDRYLRTLLIHGARAVLCRAGTKQDPRSRWLGKLRERRHPNVAAVALANKNARIAWALLSGNEPYDPTLTVGTA

SEQ ID NO: 461384 - protein, 377 aa, unidentified
MNASRTALQEKHTGEASELYMAFELGEKNWKLALSDGTRSPSRYTVTAGDTAVLLECIAKAKARCGFPKRARVHSCYEAGRDGFWLHRWLLESGIDNIVVDSASIEVNRRARRTKTDRLDGDKLLAMLIRYHAGERRVWSVLRVPTLEQEDERRAHRELERLVRERTAHINRIRALLVMHNLRVKYVGGRLWQRWWAAHAGELLPGVRAEIEREGERLLLVRAQMRAIEAQQHQAVAAGSEPQVAPLAKLGAVGVSSGWVLVKELFGWRRFGNRREVAGCLGLAPSPYSSGKLETEQGISKAGNRRVRTLMVELAWSWLRNQPQSALSQWFSKRFAAGGKRMRRIGIVALARRLAIALWRYLEDGLIPEGAKLKAIG

SEQ ID NO: 461385 - protein, 340 aa, unidentified
MPLYGGIDLHANNRVVVLLNEQDQVVYEKRLPNHLPTVLDLLDPYRAEIMGFVVASTYNWYWLVDGLMEAGYRVHLANPAAMQQYSGLKDTDDHSDARWLAHLLRLGVFPEGYIYPKAERAVRDLLRKRAHLVRQHTANVLSVQNIIVRNTGTRLSIKRIRELTKQELEGLLPEVAQVLAVTSSLAVLACLSHQIKTLEQTVHKRLKHTPSYEQLLTVDGIGTILAPTIALETGTIGRFPTVGHSASYCRCVDRSKIRNGKRKGQGNVKNGNRYLGWASMEAAQFALRFHPSAQRFYQRKLAKSNNNTTLARKAVAHKLSRACYDSMRDRVPFDALKAFG

SEQ ID NO: 461386 - protein, 344 aa, unidentified
MNSMHYIGFDIHKKVISFCEKRIDGTIVEQGVIRATRASLDDWLSQRRSIWAGAMEATLFTGWIYDYLLPHAVELKVAHPEMLKAITASKKKNDAADAEKIADLLRCNLLPECYMAPEEHRNLRRILRYRNLLVRESAKMKTKTATLLMEVGAEYNKRRLHGGRYFKELLNKLEYIPESVLNLLWMSRSSVEMFDKMQKTLVSALLDDTKIRRRVDLLRSIRGVGEVTALTWVLEIGDVNRFGKISQAVSYCGLCSAQKESAGKEMRGPISKKRNKHLQTVLIEAAKLAPHWNPQLAEVYDREISKGHRNRATLAVARKLVAYMLFVDKNREPFTPREVLDEAA

SEQ ID NO: 461387 - protein, 331 aa, unidentified
MNFNLFIGIDVSKSTLDVHLKPIGCYKAFSNDPHGFITMVEWIMDQAGKFCHKELVFGLEHTGLYSENLILFLDQNDFAFTVIPGLELKRSLGIRRGKSDKADARNIAEYIYEKREKIKLYKLPSETLERLKKLASLRERMVKERAAYQVRMDEYLEQFPDSTFETYLQTQQELIHCFNSQIERVEKDIERLIKEDSSLSDQYKLINSIKGVGPQTAIMMIILTNGFSSFDNWRKFASYAGIAPFPNQSGTFNGRTKTNKLANKRIKSLLTMCASTAIQFNPEMRKYYENRVQMGKNKMSTLNIIRNKLTARIFAVISRNTPYVEIHKYAA

SEQ ID NO: 461388 - protein, 391 aa, unidentified
MSMYFVGIDISKYKHDCCIISAADQQVVSKFTFKNDKDGFSELLTALRALSSPEDIRIGFESTAHYALNLELFLEKAHHSFMEVNPVLISEYKKSTTLRRTKTDRVDCESIARWLMTVEYKPHSKGFYHAYSLKSLTRLRDKLIRQRSFYLVKITNVLDHTFPEFKPFFNERFSKTALYLLENYGSAEKMARMNTASYEKLRSLSRGKFSPQQFLALKYLAANTVGVNNSIFDTELNSLLTLYKTTAEQICILESQITELIEEVHPHYMSIPGIGPISAAVIYAEYGDISNFSRPSQMLAFAGLEPGVNDSGTESHGGRMVKRGSSQLRYVLMNCTLPLIRFDMTFAAYYARKRAEGKPHRVAMSHVAKKLVRVIFALERQNTDFVAQALR

SEQ ID NO: 461389 - protein, 359 aa, unidentified
MAETPETSHVVGGVDTHKDLHVAAVVDHYDRVLGTESFPTTRHGYRLMLIWMRSFGDLQRVGIECSGSYGAGLLRYLQTAGVEVLEVVTAPDKNERRRRGKNDDFDAESAAHAAFTERRTVTPRSRDGMVESLRVLRVCRKTAVQARRIALQMIQTTIICAPDRLREPLRKMTRMQLIRTLAAWRPDLTAFRQVEEAYRISLKSLARRYLELHDEIADLDDMIEAIVKDLAPELLEQIAIGLNSAAQLLLTAGDNPERLKSEASFAALCGVNPVPASSGKTVRHRLNRGGDRAANSAIHIIAIGRLRLDPRTQAYVAKRIAAGNSKLEAIRSLKRYIAREVFGIIMRRYKEINQTQIAA

SEQ ID NO: 461390 - protein, 323 aa, unidentified
MPSVVGIDIAKHTFDIATCQANGKYRTKAKLANREAGFETLHQWLLKHSEPQAWILMEATGVYHEALAEWLHDKGYRVCVLNPAQVAYYARSQLQRVKTDKVDAKLIAAYGERHQDELRAWQPESRALRRLRALVRRLEDLQEIQQMERNRLEVADTSVHDSIQSVLQHVDRQIAETIRAIKQHIDDDPDLRGQRDLLTSIDGIGDKTAALLLAELGDPLRFAGSRALTAFAGLNPRLQESGVYRGQARISRTGSSRLRAGLYMPAVCSLKRNPAISALRDRLKAKGKSGKQIVCAAMRKLLSIAYGVLKSGQPFDPRLAIAH

SEQ ID NO: 461391 - protein, 332 aa, unidentified
MSAVVCGLDVHKETSYATVLDRDGQVLVQRKMRNEDIPVFLEMTHPDRLAMEASTYIIPLYRKLTEKGYIVTVSHPRKTRLIAEARIKSDKVDSRALAELLRLDSLPTSYIPPREIAQIREKVRRRAFLVRQVTKLKVKIRDALAAEGVKPPSGHGLFTAKGVEWMRSLGMESVDCYLRLIEPLKEEVKLVSGDLKRGAGKDAEVQLLTTIPGVGYYIALLVKSEIGDFRRFSSGDHLASYAGLVPSTRSSGGVERHGGITREGSRWLRWAMVEAAMVHVRYDTPVTRFYHGVAERRGKKAALVAAAHKLTEVCYSVLVHGRPYFNPLDAQA

SEQ ID NO: 461392 - protein, 428 aa, unidentified
MNFNTQNAKIASITEKTLIVGIDVGSDTHFARAFDWRNYEYTKKPLEFSNTEAGFQMFKAWVEDIAEKQGKTAVIPGMEPTGHYWFALGKFLQDSGMKPVHVNPHHVKKSKELDDNNPNKNDRKDPKTIAALVNEGRFSYPYIPTGIYAEIRSLSNLRFQTQEELTRIKNRIARWFAIYFPEYKDVYGDLMAVSGRMILKEAPLPEDIRMLGVNGVNQIWRNAKLRGAGMKRAKTLVSAAEHSVGSKEAPETARIELKNLLDDMDVYATRLEEILQNIEGKLKTIPYVDKLMEIKGIGLVTVSGFIAEVGDIRRFDNPKQLQKLAGYAIVANDSGKYNGESRISYRGRKRLRYVLYEAAISLVGKNAEFKEIHEYYRTRKENPLKKMQSVVAVACKVLRVFYAILTKGVDYDPLKLISDIKRPQLQAA

SEQ ID NO: 461393 - protein, 397 aa, unidentified
MYIVGIDIAKRKHEAAVIDGEGTVIIKPFSFTNNCSGYNRLLAMLAKAKLPLDEVSFAMEATGHYWLALFTRLQKEGFRVQVINPVQTNSIRSFYIRQVKTDPRDALLIAEVIRFGHFSESTLHPENIYELRELCRGRHAIVSMQADVKRKVVALLDQVFPEYETAFTNLFGDTSMAILQTCPTPKELSETPLEELCHLIEVSSHKRFRMAKAQELQALARNSFGFAMAGDVFSTMIRLYAKHLDFLKQQVREMDRKIAEIMETLDTPITTITGIGPTLGAYILSEIGDISRFSSAAKLAAYAGIDPTMRQSGEYNGVRNRMSKRGSPYLRHAIWLAASSAVLHDPALKLYFQKKRDEGKPYMASVGHACRKMVSIIYAVMRDNKAYTPYIPNEISA

SEQ ID NO: 461394 - protein, 344 aa, unidentified
MAIVGGLDIHRRQITYDWIDTTTGETGRGQLSPATRLELRAWLAQFDGPQADFALEATTGWRFVAEELERAGFRAHLAEPADTRALRGPKRRAKTDRTDAHHLRELLRAGTLPGSWMPPPHIADARTQVRLRRALVGERTGWYQRIHAILFHHGLPERSQLLTADGRAWLARIELPPVARQAVDLALRMIDHLEVELDTLDAQLARIARHQPGCTALMGRYGIGWLTAVAIWAEFGDVRRFANSRQAVRFTGLDITISESDGKRARGHLARQGSPVLRWALHEAAMCAARPSSPDHAYYLQVKQRLGGKRAALSVARKLAREAYHTLRELGDQALVPAELPTAA

SEQ ID NO: 461395 - protein, 359 aa, unidentified
MIVIGIDPHMKTHTAVAVDAASGRTLAEKTVSADARGHDELLAWARSLGRERFFAIEDCRHVSGRLERHLLPRGERLVHVPPKMMAGARCSARSYGKSDPIDAAAVARAALREPDLPEAGLAGPEQDVRLLTDHRDDLVGERQRIQKRLRWNPHDLELDLELPPRVLDRYVWLERIELALRSLPPSTRSRIALEQTRRCRELTAEIRALERETRALMRVLAPELLALPGCSALLGAQLVGQVAGASRFRSEAAFAMHSGTAPLPVSSGKSTRHRLNRTGNRRLNAVMHMIAITQARMHPPAIAFMERKKAEGLSPREARRCLKRHIARTVYKTMLRGEQARMGQVLQAEFGAEMLAVAV

SEQ ID NO: 461396 - protein, 338 aa, unidentified
MGTYAGIDLHSSNSYIGIIDEQDRRQFGKRLPNSLTQILVALEPFKKNLEAVVVESTYNWYWLVDGLQEEGYKVHLANPSAIKQYEGLKHTDDKWDSFWLAHMKRLNILPEGYIYPKEERPVRDILRRRLLFVQQRTAQILSLQSAISRNLSLRMSGNAIKKLKEEDTEDLFDSPFLVLTAKSNIAVIQFLTKRITAIENAVKSHAKLREEFQLLKTIPGIGNILALTIMLEVGDIGRFPKVGNYSSYCRCVKSEKISNKKKKGENNRKNGNKYLSWAYVEAANFAIRFSPEAQKFYQRKMAKTDKIVAIKALGNKLARASYYIMRDRVAYDSSKLFG

SEQ ID NO: 461397 - protein, 429 aa, unidentified
MRTESTPGARGPVFCGVDTHADSHWLCVLDWRGRRVLSRRFPADAAGYEALAGAIAAAGEPACVAMEGTSSYGAGLTRHLASLGMPVREALSPAGTQRRRPGQGKCDESDAERAARAAMSGSKLGTPKSQDGWVDGVRCMLAARSGAVKARTSAINTARSLLTTAPEGLRSRFRGMGGPRLMEELPSVRAEGALGAALGALADLWAAARDAALDMELAIEASLEENCPALLAMYGCGPVSAAKLAVAAGDNPGRLRSEASFAAICGACPVPASSGKTVRHRLNRGGDRQANSALHEIARQRVMRDPETAEYAERARGRGKSDREVMRCLKRYVAREAYRALMRPHEIRRPADASELVAARRAARVSQVRAASILGTSEKYISMLERGQRELKPIRRAYEAWVEAGLPLDWDRQAFEAERKMDSKKHLAK

SEQ ID NO: 461398 - protein, 407 aa, unidentified
MDIVHQRCAGLDVHKDEVVACARSVSGRRVVRTPARFPTTTQGLLALADWLAQHQCAMVALEATGVYWKPVWHVLEGTTPLMLANPSHVRAIPGRKSDMNDAAWLADLVAHGLVRASFVPPPHIQELRDLTRTRKQLGRQIAQHSLRLQKTLEDANLKIASFVSDLLGVSGRAILRGLIDGESSPDQLLAKTTGLLRADPQQLRAALEGRVRDHHRFLLQLHLTQIEALEKGVGSLDARLQVLLGPFEAVTARLCTIPGVSTVVAQTLLAEIGDDMGRFPTAGHLRSWVGLCPRLDESAGKRRSTRIRHGAPWLKTVLVQAAWSAIRHRDGYLHAQFQRLKAKRGPKKAIVAVAASLLTAAYFMLRDNVEYRDLGVHYFDRHDATRVATRLTKRLEALGFKVQLTAA

SEQ ID NO: 461399 - protein, 349 aa, unidentified
MSQTLSDAVAVIGIDIGKNSFHIVGLDGRGAIVLRQKWSRGQVEARLANLPPCLIGMEACVGAHHLSRKLKAFGHDARLMPAKYVRPYSKGQKNDFRDAEAIAEAVQRPTMRFVAIKTTDQLDLQALHRVRERLVSQRTGIINQIRAFLLERGVAVRQGLRFLRVELPRILAAPPDVLSPRMVSVIEGSGSGWRRLDERIDHLSGEITALARQDVGCERLMSVPGVGPIISSAMVAAIGTGDVFSRGRDFAAWLGLVPKQISTGDRTILGKISKRGNRYLRVLFVQAAWVVLIKPQSWERHGLKSWIEAAKKRLHRNVLAIALANKLARIAWSVLAHGRSFETSKLATA

SEQ ID NO: 461400 - protein, 348 aa, unidentified
MVHFVGLDVSVKETSVCVVDDAGKVIFEQKVLTEPADIIALLTSLGVTYGRIGIEAGPLSQWLVNALTAADLPVICVETRHMKALLTAQQINKTDRNDARGIAQMMRVGLFKPVHVKTLVAQEQRMLLTSRKLLQRKLLDVEADLRGTLRNFGLKVGVVGGSRYEARVRELVAGFPRLAAIVEPLLSVRRVMRQQFAVLHKMLLDMVRGDPVCRRLMTAPGVGAVVALTYRATVDQPQRFVHSRAVGAHVGLTPKRYQSGEIDYDGGVSKCGDALLRTVLYEAAHSLLTHSRKWSWLKAWGVRVAQRRGIRRAIVAVARRLAVVLHRMWIDGSEFRWRKDSAAVPAVA

SEQ ID NO: 461401 - protein, 419 aa, unidentified
MLADLTSEEQEMQVLHERCAGLDVHKKTVVVCLLTPAGKEVRTYGTVTQQLLALADWLEAERVTHVAMESTGVYWKPVYNLLEDRGLELLVVNARHIKNVPGRKTDVKDAEWIADLLRHGLLRASFIPDRDQRELRELVRYRRTVIEQRAQEVQRIQKVLEGANIKLSDVASDIMGVSGRAMLKRLIEGEEDPVLLSQLAQKGLKKKQAQLQQALTGTVGAHQRSMLGHLLGHVEFLEQQIAELDRQIEELMRPFEPVIAHLDAIWGLGRRTVEEILAEIGIDMSRWPTHRHLASWAKISPGNHESAGKRYSGRTGMGNRWLRAILVEAARNVSRNPHSYYAALYHRLSGRRGKKRAMVAVAHSLLVAIYHMLKEGTVHHDLGSDHFERLNREQIARRALRRLERLGYQVTIQEAEPAA

SEQ ID NO: 461402 - protein, 411 aa, unidentified
MEKVYDKCCGIDVLKKLIVACLKKGNTQEIREFGATTRELLEMADWLKDGGCEMVAMESTASYWKPLYNIFESSDLNAIVVNARHMKAVPGRKTDVKDAEWIADLLTHGLLQASYIPDKDQRELRELVRYRKSLVGERNRELNRLQKMLEGANIKISGTITDINGKSARNILEHILSGKQIDSAEYDILYEKKVIAHNLKASKEQIIDDLNGVMSDIQRKMMRLLLKHLDELNAIIKELDDDIDSFMKPQEKQAAKVIQDIPGIANTSAQAIISVLGTDMERFPSDRHLASWAGLCPGDNESAKKRKSGKTRKGNALLRETLVICAHSAVRNKKSYFYAQFMRISAHRGKKRAYVAIAHTILIAIYHILKEGVTFKDLGADYYNQFNKERKINAYLKKLKALGWEAPVVAA

SEQ ID NO: 461403 - protein, 370 aa, unidentified
MDDRITVLGLDVHKETIAAAMLTAGTESPRDWGQVPNTPEAVRKLIQRAQGRGPVVAVYEAGPCGFTTHRQVTELGVRCVVIAPSLIPVRPGDRVKTDRRDAAKLARLFRAGELTEVRVPSADQEAARDLVRIREDVLENRLRARHRMSKFLLRLGRIWRETKPWGAVHAAWLRAQRFDEPAWQQTHDAYLRTLAETDEHLRVLTEQVGDVATWPAYREVVAALRCLKGVDTLSAVTLAAEIQDFHRFPNAPAFMAYTGLVGRERSSGERTRRGGITKAGNAHVRRVLVEAAWSYRHAKNTVGAGLTVRRAGVSPELVRVAQRAQDRLTRTFWRLVSRNKPSQVAVVAVARELAGFVWALARQAVPEAKA

SEQ ID NO: 461404 - protein, 382 aa, unidentified
MQTIDTVNPTILLAIELSASTWLVAARVPGREKPHLHRIDGGDTAALLALISSLQVRAARGLDATIGVVCCFEAGRDGFWLHRLLTAHGVVCHVLEPTSILVNRRARRAKTDRLDAEGMLRVLAAYLRGDHQACSMVRVPTPEEEDAKRTHREREKLVQERLRIENRIEALLFTQGIRKRPSLRSWERDLAVLRTGDGREIPRHLRAELDRLRRRLVMTLELIREVEAERDQAAKTKPQDRACHKIAALSRIRGIGENFAAVLTREVFYRSFDNRRQIASYVGITPMPYQSGGMDRDRRISRAGNPRARTTMIQLAWLWLRYQPGSELAEWFRERVGTLAGRTRRIAIVAMARKLLIALWRYAETGVIPAGAEIRAETTVAA

SEQ ID NO: 461405 - protein, 427 aa, unidentified
MRVAISLSGYTLTKAGDQGRSRSDRNAKELPTFGQRRRGAKIGGVQSHQSQPIERGSPMEQITRAVVRGQAVRVGVDLAKRVLQVHAVDAAGQVLATRALARDKFIAWCAQLPAGCIVAMKTSSSSHHWARKLIALGLDARIIAAELVSPYRRQGASGKNDANDAAAVCEAASRPQMHFVPVKSIEQQSMLCVHRLREGFKADRVALHQPHPWPLGRIRPGFAQGPTALEAVLSDTLEDASNEMNTLARLCVQQAQTQWRELDAHIAWCDERIAAHANDNADVKKAATLMGIGPVGASAAVATVGDFKQFSHAAQFGAWIGLTPRQHSSGGKNNLGGITKRGDNYLRSLLIQGAKSAVMTTHKRSDPISLWAAALRERVGWQKAAVALANKNARILWAVMTRGEAFNARHVSVKPGASQLAPAPATA

SEQ ID NO: 461406 - protein, 401 aa, unidentified
MDVHRDFLVACIASTNDRGITSYKSKRFSTYTGDLRRCVEWLSENNCRDVCMESTGKYWIPIYNILEQSCKIVLAHPKYVKAIRGKKTDKKDAKWIADIFKHDLVSGSFIPPADIRQLRDLMRYRWKLTNFSTGEKNRAQNCLTVSNLKLDDVFSDVFGKTATAITDRLLESNEPFDVKPYLNRRLKAPADKVQQAVDGQLCVEQAEKLRIIRSHLADLATAKANLESLILSVAEKYSPQLTLLATVPGIQSFSAVAILSEIGADMSVFPTSKHLCSWAGLTPQNNESAGKKKTTRISRAGAYLKPLLVQCACAIVKSNKHPEIRNRYLALKKHRGHKKAIIAISRMLLTAIYNILKKNEPYNPDLYRKADLPPAHREVSVEQAIFILQRQGYLVSPPATT

SEQ ID NO: 461407 - protein, 374 aa, unidentified
MRSPNNTLFVGLDVHKESIAAAYAPQEPGSEVVALGNIGTRQCDIDKLLRQLHSKGRHLKIVYEAGPCGLWLHRYLHKKGLDSSVVAPSLIPKRPGDRVKTDRRDALQLARLERAGELTPIHVPDIEDEAVRDLSRAREDAMRDLKAAKFRLKAFLLRQDIRYEGQARWTPAHLRWLARVVCPTPAQQIVFQEYLRSINEQGERLARLEQALRDQMPHWWLAPVVEAVQALRGVQFTTAVTIIAELGDLNRFTHPKQLMSYLGLTPSEYSSGPRRQQGAITKSGNTHVRRVLVESAWAYRHPAKVSAYLQKRIGHLPKELQDLSWKAQVRLCKRYRALCARGKHVNEVLVAIARELAAFIWAIAKSVPVAHPAR

SEQ ID NO: 461408 - protein, 359 aa, unidentified
MPFAGVDAHKRYSTVVVKDETGSLLCRASLQNDVGSFREFFGAIDGPTKAVLEAGRDWGVIYDLLEGIGVEPVLANPMKTRAIAEARIKTDTVDATILADLLRADLIPVVHVPSREVRTQKNLLRQRLWLVELQTRIKNRIHNIIDRNHVGSPPCADLFGQAGRRFLDQLQLPSPDDRLLKAHLELLDLVQSQIGKSEKWIDEALYQRPEVAIMRTLPGVGKILSAVVAVEIDDIHRFSHPGKLCAYAGLVPTTYASGGKVRHGRLLPSCNRWLRWAFVEAAWIAQHCSSYCHTYFERIKRRKGANCAITALARRLCEITWHCLTDSRPYEERMKMPIRKELSRPPSPVLGRLGTSQTD

SEQ ID NO: 461409 - protein, 407 aa, unidentified
MDLLKTVFGIDVSSRKSNVCIMVNGQKVDDYAISNDMVGFNQLLDDLKQVTKPQIIFEATGVYSRRLQAFLDMHKLRYVMMNPLEAKRKTKDDLHQNKTDKLDALYLAKLQSEHPQRLAYVQSKEYQELMANNRIYEQASHDLITNRNRLHKAIQLTFPEIEHLMVNPRGKNYWSIVLRFPHPDIVLETKEADIIDFLKGLSGIGKKRANDIMQSLIRLAKVACPAVKKDSAHIRGLEMAINNILSAEEACQTALKEMTKLAPKRDLEILTSIPGIGENTALRIISELGDIRRFNNPSQLNAFVGVDPQVYESGNLTAHLSISKRGTAIGRKVLYLAINQIQSAKKAGNPSHIADYYEKRKRSSETASHKKAAIASIHKLLRTIFALIKNDQLYSYDVAKHNQRLLS

SEQ ID NO: 461410 - protein, 391 aa, unidentified
MPMYFVGIDISKYKHDCCIISAADQQIISKFTITNDKDGFEQLLTALNSLSNPEDIKIGFESTAHYALNLELFLENAHHSFMEVNPVLIKEYKKSTTLRRTKTDSVDCESIARWLITVEYKPHSKGFYHAYSLKSLTRLRDRLIRQRSFYLVKITNVLDHTFPEFKPFFNERLSKTALYLLENYGSAEKMARMNSASYDKLRCISRGKFSIQQFLRLKELASNTVGVNNSIFDLELNTLLTLYKSLSDEINTLETEIIKLIEEVHPHYMSIPGIGPISAAVIYAEYGDISNFSNPSQMLAFAGIEPGINDSGTESHGGRMVKHGSSQLRYVLLNACLPLIRFDLTFATYYEKKRAEGKKHRVAITHVAKKLIRVIYALERQDVDFNAQKLR

SEQ ID NO: 461411 - protein, 426 aa, unidentified
MRVLYDRVAAIDVHKDMVKVAIRVPGAKRGTRKTDVLEFRTFYGVLQAMARELRGRGVTHVVMEASGVYTDPVYYALRELDFTEVMVINPAHAKALKGHKTDAKDAIRLLDLYECGLLSGSYIPDPDLREVRDLARYRMKTVQARTSEIQRLQKTLETAGIKLSSVVSDVTGGSATAMIEALISGERRGAVMADLAQTRLRAAGKMADLSMALTGRFTDHHALMCRLHRDRITIFDDAVKDLDAKIAPLVARYAREAELLKTLPGFGDVIVAGWLGAIGPAPHQHFATASRLASWATLCPGNYMSARKSKGGRTGDGGAYIKPLLIQAAWAAVRVPGRLQARFGRLVRKFGGPRNKGAQKRAITAIAHTLLKIAYSVLKTGKPYADLGADFYTRRESPDARQDYLMRQLRKLNPGCVITITPAEAA

SEQ ID NO: 461412 - protein, 438 aa, unidentified
MKSTQNKKINQVKETTMVVGIDVGSVKHYFRAFNWRGIELTKKPIPFSNSMEGFTAFSAEVVRLMEQNGLEEAMVGFEPTGHYWFNLGQFLSGKNIKFVMVNPLHVNKTKELDDNSPSKNDCKDPRVIANLVREGRYFFTYMPTGVFAELRNASNRRFVLTEELIRTKNRLQKWIAVYFPEYKGIYTHIDAKGGMLVLKTAPTPEEIIKLGVDGVIQIWKEAKLRGNGHKKAMLIVNAASQSIGLTEGLEEARMEIQDLIEDYELQMKRLEKVNSLIENLCKQIKYVDKLLEIKGIGIITVAGFIAEVGDITRFDNAKELQKLAGLELVADSSGKHNGKTRISKRGRKRLRYLLVQAAVSVIGKNDEFRQIHEYYTTRKNNPLKKMQSLIAVACKLIRVFYVILTKGRSYDASKMLGDISGKRNHRQGRRGESGYLGG

SEQ ID NO: 461413 - protein, 421 aa, unidentified
MNAWNEVTHFAGFDWAKDHHDVLVLDNTGKIAAELRFEHTAAGWSLCQQKLAAFPHLAIAVESGHGAAIERLMVLGYRVYPVHPRSSKSYRTRKLPSGTKTDRIDCWALADALRLEGESWHMLNTPEPLVQRLRLLCRDEVALIEQRTALINQLQQALYEYYPAALAAFDDWTSLSAWAFVARFPTPQALVKAGKRQWEKFLHTQKLYHPEWYQKRLAIFAKADEFCGPEAVTAAKSVLATALVKLLQTLELQLASYRLLITECFKQHPDYHVFASLPGAGPKLAPRLLAELVALQSLADQPQVLQCLAGMAPVSYQSGKVSVVYLRRQCNRFLRATLHLWVDLSRHYCDWARIYYEAHKKKGQSHACALRCLGMRWLKILAAMIRSHTPYDAALHARSQLQHGSWVLQLQPKLSITKDAS

SEQ ID NO: 461414 - protein, 394 aa, unidentified
MVYVGIDVAKDKHDCFIVSSDGEVLFDVFTIQNNMDGFEDLLFKIKSAEKDSDNVKVGLEATGHYSCNILGFLKNKGLTTIVINPLYTSLSRKSTSLRKTKTDKVDARTIAGMIMSDVSLKPYSDKLYHNEDLKSLTRYRFDKVMQRAKLKQSVSRLVNILFPELETLVSTLHGKAVYELLLEFPSAQHIASANLKHITHLLNTSSKGRFKRVTADEIREAARKSISSYLPAKSLELKHTIKLIRELTSEIAEIEAEIKKIMDAIDSPILSIPGIGQNLGAMIIAEIGDFSRFDNPDKILAFAGCSPTTYQSGQLYSSHAKMEKRGSRYLRWALLNAAAYVCNWEPTFAAYLQKKRSEGKHYYVALSHAAKKLVRVLYHLETTGETYSPTAILS

SEQ ID NO: 461415 - protein, 385 aa, unidentified
MVAQLLAIPAEGPVWDQAVMGWTPPRRRWCARVVAFLTTEQEASVSEASTIGLDLAKRVFQAHGADASGKVVFRKRLRREQVLAFFAGRAACVVAMEACSSAHYWAREIGELGHTVRLIPPAYVKPFVKRQKNDATDAEAICEAAQRPTMRFVSVKSEVAQANAVVFRTRDLLVRQRTQAINALRGHLGEHGVVVAKGPSHVAKLIAHLEDPATGLPEAARTVLRVLTASLQFLSERIDLLDREIARRAREDKEVRRLTTIPGVGPVIATALAALAPPADAFRRGRDFAAWVGLTPSQHSSGGKQKLGATSKMGERTLRRLLIIGASSVVQKAIKHGTPSGSWLGRMLARKPRMLVIVALANKMARTVWALRATGEIYRAPVVAA

SEQ ID NO: 461416 - protein, 337 aa, unidentified
MDTESGEFAERRLAHREEAEGFYRELGAHGVSVRVGMEASGQARWFEGLISELQFELWIGDAAEIRTKRVRKQKTDRQDAQLILRLLMEDRFPRIWVPSWENRDLRQLLWHRHRMVQARTRIMNQLQSVALNEGLRCKKRLWRDAGREQLESFRLAPWASRRRRDLLELLDRLTPTIAELTHAVEQEAEKCPEAQRLRTHPGVGALTALAFVLIIGRAERFQCGKQLASYLGLVPLEESSGQRRRLGHITKQGNSLLRFLLVEAAQVTVRSDPEWRSKYFHLAMRRGRKIAKVAMARRLAVRMYWMWRKGWDYEQMTKFSSHAGQPGNRDGVRLNTE

SEQ ID NO: 461417 - protein, 408 aa, unidentified
MEVLHERCCGLDVHKRAVVACLLTPGPRGQPNKETRTFSAMTGELLALADWLAAEGCTHVAMESTGSYWKPVYNLLEDRFQLLLVNAQHLKAVPGRKTDVKDAEWIAQLLRHGLVRASFVPSRRDRELRELIRYRTSLTRERAAEINRLQKTLEGANIKLAAVATNVVGVSGRAMLEAMIAGEDEPTALAALAKGRMREKQSALEAALEGRMSSHQRFLLRQQLRHIDDLDAAIARVSAEIEERLRPFQEMAGRLMTIPGIGGRTAELILAEVGPDMSVFPTAGHLASWAGLCPGQDESAGKRRSGRTRKGNSWLRTGLVEAAQAAGRTKTYLGEQYHRIAARRGKRRAAVAVAHSLIVIVYHVLATERTFEDLGYRYLDERHRHRTTQRLVHRLSALGYTVTLETAA

SEQ ID NO: 461418 - protein, 424 aa, unidentified
MKVTYLTCCGVDVHKSFLVATIITTTGGIEPSYQKKRYSTFNNSILEFKQWLLDNDCHDLCMESTGKYWIPVFNLLEDEINVTIANPKWVKAVKGNKDDTKDSKWIGDLFRLGLVKGSYIPCKKIRILREFTRYRYKIVSCRSSEKNRYQNALTVCNVALDSVVSDIFGKSSTSIIDYLLEQSGNSINHEEIASKLLKSLKSKEDAVIESIEGYQMTDSQKYRMHLVRAHMDYITAEINDVDREIEKLISSDPDFENALQFLMTIPGVKRDSAITVISEIGIDMTQFSSSKRLCCWAGLTPGSNESGGKKKSVRVTRAGVYLKPALVQCAHAAVKSEKSPYYKKKYESLMKRRGKKRAIVAIARMILTAIYQMLSTGESWNPSDLYKIDIPEALLEKQKAKAIKQAMKLLQREGLYPPPEPIAS

SEQ ID NO: 461419 - protein, 420 aa, unidentified
MFSDTTLIVGVDVHQRRNVTLVMDGGGDAVDNHRHFANNRLGSDQFASYLADRAQSGSFTTIHIAAEATNNYWLPFFCHLAETPALAAWPVTLYPFNPRLVANFKKALGEEEKTDLRDAGVVAERLRFGKKLPRPFVMDELYLPLRTLTRYRYHLVRELVRVKSYCLSLIYLKATDYTDKKKKPFSNPFGATSQAVLRQFATLDEIVNTPLDELAEWLDVKGKRRFPNPEENARKLQQVATEAYQLPEEWTAVIHDLVSLNLRHIACLETLIGRVETAITQQMENIPHTLETIPGIGPVFAAGIIAEIGDLARFEYNEAKVASYAGLRWPRSQSDEFEADDRRMSRSGNHFLRYYFCEAAQLVRLQAPEYRDYYNRKYKEVRKHQHKRAIVLTARKLVRLVVRLLTTNEPYRLRRQVSNE

SEQ ID NO: 461420 - protein, 388 aa, unidentified
MHIVTDRPHAPTAIRTDLGAIFISLELSRSTWLITSLSPGGGEKMSKHTVRSGDVAGLWARFSRLKDKVQVRTGQTVPIIVIQEAGLDGFWIHRLLQDKRVESYVVDPASIATSRRRRRAKTDKIDGEALVRALLAYKRGEPRVCAMVRAPTPQEEDRRRICRERKTLTAERVEHVNRIKGLLFAQGITDYEPLSRKRRERLEELRTGDGRPLPEHLKAQIGRELDRLELTLQQIKSVETERDAMLSPSDEGTRAPGAMLQNLKGIGAEFAGVLWSEGLFRSFSNRRQVAAYAGLAPTPWRSGSVAHEQGVSKAGNPRLRTTMIQLAWLWVRHQPRSILTLWFHQRVALNGGRARKVLIVALARKLLIAFWKYVTTGVVLEGAETTAS

SEQ ID NO: 461421 - protein, 351 aa, unidentified
MKHYIGCDAHKKYSIFVTINERGQSSSPERVIHDRDLYRKYLDCLPPGLPIAIESVGNWYWMIDEMEKAGHRPVLVNPKKAKLLMGHINKTDKLDARGLAMLNLHGTLPAIWIPPAELRDQRELVRMRMSFVAIRTKLKNRIQATLAKYALSIDVSDIFGQKGREILNQVIQELPPETHRSMEEHLKLLDQVSQQINEIESRILQIVKLTPQMQLLKTIPGIGNILAITIALEIGDVHRFPDAMHLASYCGTVPRVNSSGGKTYYGQVRTDINHYLKWAFVEAASGIAARVKQLEGRHVATLLNRIQSHKGHAKAIVAVARHLSEATYCMLKKNGPYQEPGTLRTVSTSQG

SEQ ID NO: 461422 - protein, 429 aa, unidentified
MSEEKSLELRVSVDVGYRRHSVAMGLSSGGVLEEFEIDHRPEGFQEFFSRIEKHHDKKHCAVAVAMEGYNGYARPLDSLVRQRGYRLYNLNNLKFARFKEIFPGAAKSDRIDARKGLELFQLSDHLPLAKEVLQEVIGTAPENEVLKRLTRRRRRLVNERVRVVNSLQADLQAVCPGLLEITGEASNQWFLNFLLSADTLPQLARLRRSTLLKIPSVGVKSAAIIEGWQKRAHFSQEVEWVGEMIQEDARRCLELDEKIKRLEVKIAEMAKGSTIAKVLRSIPGFGAVCTSELAGEIGTIERFASEGSLSLYIGMSTLDNRSGKYQGTKAPKHVNTRAKAAMMIGVDRHRKYVPESQRYYEKKRSEGKKHNQAVRALGRHLSRIIYKMLTEEREYQIRPERGNTKTKVRSGSSIKTQIRRPKISAKKTK

SEQ ID NO: 461423 - protein, 339 aa, unidentified
MKRYVGVDLHKNNFQVCYLDEKGIKQQVYAVSKAGIKEFKKSLTKTDEVGVEATGNARYLTGEIEKEVKRVVIINPWQFKVISQSVKKTDEEDAKVIAKYMSKDLVPEVRMRTKEEQEISSLITTRDKIVKLRTSLKNKVHGILNANGYVTKKEMFSSEKAFNNIFKLDISEAYKFELKVIVQQIKSLTNSIDEITEELSKRGKELKGYKNLKSITGIGDVSATIMLNAIGDVKDFEKEDKLSAYFGIVPRVSNSNETIRHGRITKMGNKIARTALVQSTLIAIRYNSYLRSFYERLKAKKGSGKAIIATSRKLLGIVYRALKYDLVYEDFNRYKLAAT

SEQ ID NO: 461424 - protein, 331 aa, unidentified
MKKLALVGIDVSAKELVVALERASGPLQESSFSNDAAGHRKLIRFLMNNGFRAQVCVEATGVYHLDLCLALHGTKDIEVMVVNPRAAKDFHRAQLQRSKTDRVDARSLLEFLRRMDFAAWEPPRREILHLRGLSRRIQALLVNRAQEKNRRHADGAVEDTSPAIQKSIDRHIAAIEEEMEILSQAALELIHADAQLAKRFAYLTSVKGIANASGITILAELAVLPADMTVRQWVAHAGLDPRCNESGSSVRGQVRISKVGNRHLRRALFLPAMVASQHEPQVKAYYQQLLERGKKPLQALVAVMRKLLHAIYGMFKNERDFDGAKFYAMNA

SEQ ID NO: 461425 - protein, 355 aa, unidentified
MDNTKYIGMDVHKETISIAVLSSSGKLVMESIIETKASTIVQFVQGLRGDLRVTLEEGTWAAWLYDLLKPCVREVLVCDPRKNALLKVGNKSDRIDARKLAELLRGGHLSPVYHGEHGVRALKELSRSYLTLSGDVARVMTRLKGLYRSWAIPCAGKQVYAPRYRAQWLGKITEAGVRRRAEFYYEQLDALRSLRQQVRRELLGESGKHDASKLLCQIPAIGPIRAAQLIAILQTPHRFRTKRQLWAYGSLGIETHSSADHRYVDGQLQRSKRQVSLRGLNRNHNHELKNIFKGAAIIAATKPGPLQQFYDALVAKGTRPEMARLTLARKIAAIILIVWKRGVCFDAEHLKLQTA

SEQ ID NO: 461426 - protein, 315 aa, unidentified
MTNRTKSKTIINVGVDVGKQFLDIFIYEKALHWQEENTADGIKRLLKRLAHYEVERLVMEATGRYEFNLAQAAYEKKIPVCIVKPLAVRKYAGAIGQLAKTDKIDAALIAEFAATVQPRVTPQKSKNLIAIKDLIARRRQLMGLRTQELNRIKIMGKTFEVSCKRILRTLDAEILRMEKRLAKHVEEQADWTEKHTLLKTAPGVGNTLIYTLLADLPELGTLNNKEVAALVGVAPINRDSGKLRGKRRIRGGRHSVRTILYMATLSATQCNPVIKDFYKKLVQQGKHKKVAITACMRKFITMLNAMVRDECVWAY

SEQ ID NO: 461427 - protein, 366 aa, unidentified
MSSLTSPAGAIHLGMDTSKNTIVVAVLMPGEEVPVIDRMWNEEGSVRHLVGRFPDRTALRTCYEAGPCGFGLHRLLASMGVACDVVAPSLIPRRAGERVKTDRRDAGRLARLHRAGELTAVRVPTEAEEAVRDLVRARAALLADRKRAQQRITAMLLRHGRAWRATYWTAAHEQWIAGQRFGEPALASALAHYRAALDTRRAELDAVEDELAAWAARPPLGEAVARLGCYRGIAELTGLTLAAEVAGWRRFGSARAFMGFTGLVPAEYSSGERTRRGSITKAGSAPARTALTEAAWAYRFRPAIGVALRRRQHDAAPDTLARSWQAQRRLHARYKAMTARGKPAGVAVTAMARELAGFAWAEMTSC

SEQ ID NO: 461428 - protein, 326 aa, unidentified
MAFIELPILGIDISKAKFDVALLVDGKVKKTRVFENNLAGFKALSLWLIKNDITHLQACMEATGCYGDELATFLYDQGFEVNVVNPAQIKSFSGAQLNRAKTDKADAKLIAQFCASMHPTAWVPPPVHVRELQALVQRLAALQQMERQEQNRFGTAVPVIQPSIKSVLTTIKAEIKAVEQMIRDHIDRHPDLKDKSNLLDSIPGIGVATISRLLAFVGDVDRFNDAKALAAFVGLNPTVHQSGSSVRGKSRLSKKGNATIRKALYMPAVVARRYNPTIKEFAQRLKKSGKSNMLIIGAVMRKLLHIIYGVLKSGKPFDANYAVKNA

SEQ ID NO: 461429 - protein, 411 aa, unidentified
MELLHPRCAGLDVAKDEVVACMRVPDGRGGRGQEVRTFQTFTSGLEALADWLAGEGVTQVVMEATGQYWKPVWYVLEEQGLELLLVNARHVKILPGRKTDVCDAAWLAELLEHGLLRGSFVPPAPIRELRDLTRYRKRLIQAHASEGQRVQKTLEDAGIKLDSVAADVLGASGRAMLSALVAGERDPEVLAELAKGRLRAKLPQLRQALRGRFGAHHALLIRLALAHLEQLEASIAELDAHIDRVLAPFAQARDRLDTITGVGKRAAETIIAEIGVDMAVFPTAAHLASWAGRCPGNNRTGGKRRSGKPTKGNRWLGEILIECAWAAARSRDTYLSAQYWRLARRIGKKKAAVAVGHSILVIAWHLLTNDCDYNDLGGDYFVRRDTDRQRQRAIAQLQALGYRVALEPLAA

SEQ ID NO: 461430 - protein, 352 aa, unidentified
MVIIGCDFHPRFQQIACVDTETGECVERRLQHTAEAERFYRCLAGRRVRVGVEATGNFRWFRRLLGELGQELVLGDAATIRASNPRNQRTDKRDARHILRLLMEERFPSVWQPGAENERLRQLLSHRSSLVRMRTRIENQLDSLGKNEGLVGSRRWTGRRRREVEALKLEGWYAERRRDLLGLLDGLEERIGPLEQAVRAAAEADPQARLLMTHPGVGPVVSLAYVLTIGDWQRFPRGKQVASYLGLIPCEESSGDKRRLGHISKQGNPLLRWLLVQAATVAQRHDPHWHRQYMRLSMAKHHGVAKLAIAHKLAVRLYWMLRSGQDYQQVTERGSHAGQSACPNGCGTTPRT

SEQ ID NO: 461431 - protein, 344 aa, unidentified
MQHYVGLDLSVKETSVCIIDKAGKVIREVKVATKPVPILAVLTEEALAIERIGLEAGPLSQWLYSALAEAGLPVICVETRHMKAALSAQINKSDRNDARGIAQMMRVGLYRPVHVKTLASQKRRMLLTSRQLLQAKALDIENDLRGTLRNFGLKVGMVGTVKFEARIRELVADHPDLAAIVEPLLIARRVLREQLDVLHHQLLEIVRHDEVCRRLMTTPGVGPVVALTFRATVDVPSRFNNSKAVGAALGLTPRRQQSGEIDRMGGISKSGDAMMREMLFEAALVLMTHSRKWSWLKAWGMKIARHRGMKRAIVAVARRLAVIMHRMWVDGTEFRWTRKEAAAT

SEQ ID NO: 461432 - protein, 374 aa, unidentified
MGDHSEVFIGIDTAKSRNAVAIAEAGRRGEVRYLGEVDASDAATRKLIAKLAARYSSLTFSYEAGPTGYGLYRLIESLGHTCIVAAPSLIPKRAGERVKTNRRDAEGLARLLRAGELTAVWVPDGRHEAMRELARGRDAARQDLTRKRQQVSSMLLRLGRHYPGVKTWNARHRSWLANLKLEHREQRFVLEELLQAERQAGERVQRLEEAIREAVADWSLGPIVPALMAMRGIDVIAAVTLLAEIGDFSRFKSPRQLMAYLGLVPSERSTGESVKRGPITKAGNGRARRVLVEAAWSYRHPPRVGYEKQARVAAAPRRAREIAWKAQVRLCKRFRTLSRKGKKSTVVATAIARELAAFIWAIVREVGMTSARER

SEQ ID NO: 461433 - protein, 378 aa, unidentified
MTIRKYVGFDVHLATIAFCILDGAGKILWEGVFRNTAETILDFVGGIRGEVHFTFEQGTQAAWLYDLVRPRVSSVLVCNPRYNRVVLCGDKSDRIDARKLAEQLRLGALKPVYQTEYSLRPLKQLVLGYEALIRDSVRTMTRIRSLFSGRGISCQGGGLYHPAKHDFWLEKIIEPGLRFRLQILFQQLDSLMPLREEGKKQLLLESRKYPAVKLLKRIPCLGPVRSAQIVAVVATPHRFRTKRQFWPYCGLAVVNRTTSDYEIVNGRVQKKIRKASTRGLNRDYSRILKRVYKSAALQGTTHKLLGPIYRALLQKGLDPAMARLTLARRLSSTSLAIWKKEAKFDPSIFLANRVDIKNCKEEKRKNKLSLNKRKGTVQ

SEQ ID NO: 461434 - protein, 350 aa, unidentified
MDTSKNITIGLDLGDKFHIAVVFNSDGNELKTAKVTNTKAGISKFFKSYRYAKVAMEAGTHSPWISRLLNEIGLTVYVGNPRKLRVIWDSTDKSDARDARILGMVCRIEPRMLHPLKHRSSQAQADLAAIKSRDMLVKTRTQLINHVRGLVKANGERLPKCSTESFARKCEPLVPPELRFALHAVFQTIFGLNERIKELDRQIEQLSMERYPETQYLRQIPGVGPITALCFVLTIEDPARFAKSRQVGPFLGLTPRRDQSGDTDKQLPITKAGNTYLRQLLVGSAQYIMGPFGPESNLRAHGLSIAARGGKNAKNRAVVAVARKLAVLLHRLWVSNDTYQPFYSINKKAA

SEQ ID NO: 461435 - protein, 389 aa, unidentified
MIFLGIDVSKFKHNCFLSNGDNFDLGQHFEIENSREGFDFLFNKLSPYDRDNIRIGLEYTGNYHLNLSRFLLDLNFNIHFFNPFQTSLFRRADSFRNTKTDKVDAFFIAKLLKTTYDSNPTLFEFYHNYDLKSLCRYKSVLKKDRSRLKNSIISCLDIVFPELCNVCNDVFSKYVLAILYEFSSAYEISKANITRLSNLIKNASRGAYSKDKALVIRDAARNSIGYVSSSVSFQLKQSIDYLYFLDKKIDEINEMIKPLLDDINSPIMSIPGIGIELGPTIISEIGDISRFDSSSKLLAYVGLDPSINQSGTFHSSFSTMSKRGSSYLRDSLFKAAFIISQIEPVFKEYYLKKKAEGKHHYVALTHVARKLVRLIFHLLKENEVYVSKV

SEQ ID NO: 461436 - protein, 340 aa, unidentified
MYYIGLDVHKKTISYCTKRVDGTVQAEGKLDSTRLALDAWLPGLPQPWTGALEATLFTGWIYDYLKPHAHALKVANPAMLEAIAVAKKKNDQVDARMIADLLRCNLLPQCYMAPSEFRERRRTLRYRNLLVRQNVQMKNRTAGLLMETGVAYNKQKLHGKAYFAQLRKSPEVPECIQPLLKIGRESIERIAKLDRALMKALKSDPLLVARVERLLTIPCVGEVTALTWVLEVGEVSRFSSVKDAVSYCGLCSAERSSAGVQKRMPISKQRNKHLQTVLIEAAKLSQHFNDDLTAVHEKALAKGNKNRATIAVARKIAAYLLAVDRREKPFLEGEESADAA

SEQ ID NO: 461437 - protein, 323 aa, unidentified
MSSFVGVDVAKNTFDIATHSPNGKHKTKAKLANETKGFKEFEAWLHKQVEPSALIVMEATSVYHLELAEFVYNKGYRVCVVNPATTNAYAKSELRRIKTDKSDAKLIADFAKEKHEKLQLWAPEPLKYRQLKAMVRRLDDLQEMEQMELNRLDVSDEKVKNSINSVLRHIEKEIAETHKAIKKHIDDDPDMRQMRDLIVTIDGIGQKTLERLLAELGDLRKYANPRQLVAAAGLNPKLQDSGLLKGRTVISKIGSARVRAGLYMPGLVALKHNKAIMAMKDRLKANGKAPKQIICAAMRKLLHFVYGVLKSGQPYDPKLALAQ

SEQ ID NO: 461438 - protein, 344 aa, unidentified
MEKFSRIGMDTSKQIFQLHGVDGSERVVLRRKLRRKEVLAFFSRLAPTVIGIEACGGAHYWARELMRLGHEVKLIAPQYVKPYVKRGKNDAADAEAICEAMSRPTMRFVPVKSAESQAALMLVGLRERLVRNRVQLANAIRGYAAEFGIVAAKGRGRIEPLLLRLQADETLPALARTLFAEHAKEYAWLKAQLQAIEAKLMAWHRANAPSRRLARIPGVGPVIASLLAMKTPDPHAFRSGRQFAAWIGLTPKDHSTAGKVRLGVITRAGDATLRSLLVVGATAVIWQARRGTGRSASPWLLALLQRKPPKLAAVALANKIARIAWKMLTTGENYDARRALAVTA

SEQ ID NO: 461439 - protein, 367 aa, unidentified
MKKDNTVRKSSGVKTRASGRLTIGLDLGDRSSRYCILDAQGEVLSEGSVATTKKGLAEVFASKPRSRIALEVGTHSPWVSRYLADLGHEVIVANARRVRLITDSSRKDDRLDAKTLGRLARIDPELLSPIRHRSEQAQADLMVIRARAALVEARTMLVNSARGLTKSYGERLPSCGTGQVGENLAEPLSAPLQGALKPLLAVVESLSERIREYDGQIEQTGKQRYPETELLKQVHGVGTLTALTYVLTVEDPHRFRRSRDAGAYFGLRPRRRESGASRPQLRITKEGDAYVRKLLVQCAHHILGPFGQDSDLRRWGLELALRGGKNAKKRALVAVARKLAVILHKLWVSGEVYEPLHVRKDGKAVAA

SEQ ID NO: 461440 - protein, 364 aa, unidentified
MKIVGCDLHAGQQSIAMMDSETGELSEKLLKHEGNAVREFYSSLEGPVVVGIEATGAMQWFLELLEELGIECRVGHPAKIRAAETRQQKHDRRDAEVILELLLMKNRFPDIWMPSSEQRDLRSLLRDRHQWVKMRARLQHTLQAIALNHALRKGKALWTATGRQALQDLALPDYTAQRRDELLRLYMQLEQRIQQLDKQVEKEALGRPQARRLLTHPGVGPVTALATEVFLGDPHRFDTANQVASYIGMIPCEHSSGKRRRLGKLTKEGNSLLRYLWTEATLHAAVKDPELKRFYRRKLVQKGMGKARVATARKLGIRLWIMLRDEIDYEEFCRRGKLPQKGKTHAGMPDFNSGPARAVTGSTE

SEQ ID NO: 461441 - protein, 525 aa, unidentified
MLSSGYVLAAKADRAVVSSNPFASMVKGCFDSFIGDVTSTIPFRRLQQVINPLQNVSHYLTEGCSMTKKLRLEQAKEIRRSGKSTGFELINPDAAGIDIGSEEHWVAVPEGRDEHSVRKFGCFTADLHEMANWLKQCGVKTVAMESTGVYWISPFQILEQHGVEVKLVNARQARNVPGRKTDVSDCQWLQRLHTYGLLSGSFRPEDQVCVLRSYWRHRDNLVRYASAHIQHMQKAMSEMNIQIHKVLSDITGVTGMRIIRAILSGERNGEVLADMRAPGVKRSEEDIIKALQGDYREEHLFALRQAVELYDFYHDKIRACDDKIERCLKGFETIAGSDKIPPKKGKHKARKNECIVALQTELHRITGVDFTEIDGLDVLSINTILSEVGLKSEAFPTVKSFTSWLGLCPNNRITGGRIKSSSTKRVSNRAATAFRIAAQSLANSKCALGGFYRRLRARLGSPKAITATAHKLARIFYVLWSTKQRYQDVGVEYYERQYKERVIRNLKKKAHELGYKITLQEVGVS

SEQ ID NO: 461442 - protein, 484 aa, unidentified
MKTKRANAFRSTKKCHRSQKGPIKVAANMPVLNAHACGIDVGATEHYVCVPEDAVPAGESNVRSFGAYTAELDKLVEWLRACGVTTVAMESTGVFWIALAQKLEAAKIEVILANARHLRYVPGRKTDIKDCQWLQQLHGYGLLNGSFRPAQDICCVRSLMRHRQNLTQSCGRQVQHMQGALQQMNVHLHHAVSDLNGETGLRILDAILAGERDPKKLVELRDAACTKSTVEELAAALEGDWREEHLFVLRQALETYRHLLKQMAVCDQQVEKALAAVVIPAREEPPEPAPKNPLAKAEATKKKRFKKCKGGTGLNQDVTGELKRLCGVDLTQMIGLNVLSVLIIISEIGLDMSRWRNAKAFCSWLGLCPGNKISGGKVLDSRTAHVVNRVAILLRTVAPSVGRSETWMGVFHRRMRARLGPAGANTATARKLAALVYHLLTYKEEYIDVDQLIYEEKIRTTRINRLRKQAQELGLEVVEKSLVA

SEQ ID NO: 461443 - protein, 315 aa, unidentified
MSGPAVCVGIDVSKATLDLALRPTGERWTLANDEAAIQALVHDLRPRAPSLIVLEATGGFEHAVVAALAAAGLPVVVANPRQVRDFARATGQLAKTDAIDAQMLALFAERVRPEPRPLPDEAAQALDALLTRRRQLLDMLVAEKNRLGFARPVVRRGITQHIHWLERRLGDVDHELGEMIERSPVWRAKDNLLRSVPGVGPVLSRTLVGELPELGHLTREQIAALVGVAPLARDSGTLRGKRMVWGGRAPIRTVLYMSTLAAVRCNPVIRAFYLRLRAAGKPAKVALTACLRKLLVILNAMVRSNTPWQPAAAVV

SEQ ID NO: 461444 - protein, 355 aa, unidentified
MDSKKYIGMDVHKESISIAVMNGAGKIVMECMVETKASMIMQFIDGLRGDLHVTFEEGTWAAWLYDLLKPHVTKVVVCDPRKNALLKAGNKSDRIDARKLAELLYLNKLQPVYHGEHGVGTLKELSRSYLTITKDLGRVMSRVKAIYRSWAIPCTGKRVYAPRHRVEWLGKIGEPGVRRRAEFYYQQLDALRTVRQEVRRELLAEGKKHQAWKRLCQIPSIGPIRSAVLLGILQTPHRFRTKRQLWTYSGFGIETQSSADHRRVDGQLQRAKKQSSIRGLNRNCNHDLKNLFKGAAIVASSKPGPFQEFYTALLSKGIRPEMARLTLARKIATIVLIVWKRGACFDAQHLKPQTA

SEQ ID NO: 461445 - protein, 401 aa, unidentified
MNTTYVGIDWAKDEHRVCVLGEAGRIVQQFAVRHDRDGLHDLQRMLRAHGRPEDLPVAIERPSGLLVDTLLEAGHPVVPIHPNAVKASRPRYRANLAKDDRGDALLLADLLRTDGHRFDPLTPLSDEMRAIRCLARSRDDLIKQRVMLTNQLSSLLENGWPGALGLFGDLASPIALAFLGRYPSPGDARRLGVKRMRAFLAKHAYSGRTQPETFIERIKAAPHSRQGRLEADACREVVLALVSTLRTLIQRIDEVTRAMVHATRESAMGRLVMSFPRTGDVNAAQLVAELGEDPRRFAGRDHLASEAGASPITIASGKHTRVAFRYACNKTLRKAVTSWVNNTRFASPWAQRKYRQARDRGHKHTHAIRILARAWLRILYACWHNGTPYDPTIHHGQTAQG

SEQ ID NO: 461446 - protein, 408 aa, unidentified
MNPLFVGIDVSSKNNVAYLMKPDGSKHSSFSVQNNLGGAKLLSERIVSALGSMQLERVVIGLEATSIYGDSLVYALREDGRLGRVQRKIHVLNPKQVRKFKEAYSDLPKNDWVDAFVIADHLRFGRINREVYMDDYRYKALQTLTRARFDVIQNLTREKQRFANYLFLKCSGMAQDKDIQNTSATTIALMEHFETVDDLANADLEELTAFITETGRGKFADPDATAKAVRAAAKGSYRLPKTVNDTVNQAMAVSIASMRALKGQVKVLDKAIEQQFEIIPNTLTSIPGIGKVYSAGIIAEIGDIHRFDSQASVAKYAGLVWNRSQSGDFEAEHSRMIKSGNRYLRYYLLEAANSVRRCDSEFRRYYDLKFKEVNKYQHKRALALTARKLVRLVFRLLKDNRLYIPPEG

SEQ ID NO: 461447 - protein, 356 aa, unidentified
MRSLGVSHPILGALTPQWRYLNDQSALLCRFGMSLDGTILREVVVTTDPDAIATCLAVDQERLERIGLEAGPLSEWLVRGLADHGITAVLMETRQVRAALSAMIVKTDRKDARGMAHLLRMGWFRRVHVKTMDAREQRTMLSARSTLMARLKDIENSVRGLLRGFGLRLPLLLRGRWDAGVREAVAGHPSLLQILDPLLTARRVLREQLILLDKRMRDAARVDRVCRRLMTPPGVGAIVAMTFRAAVDQPDRFRSSKKIGACFGLTPRKYQSGETDRDGAISRAGDTSVRVALFEAAHVIMTRMASWSTLKAWAMNVARRRGAKRAKVALARKLGVVLHAMWIKETDFRFTGPTSV

SEQ ID NO: 461448 - protein, 429 aa, unidentified
MNFRPIAGIDVGKFFSEMAILSPSNEVIARMKIHHDSSSDVERVVELLKKTEKDFDSRPFVVMESTGHYHKILFHSLCKAGLEVSIINPIQTDSIKNIGIRKVKNDKADARKIALLYRFQELKTTNIPDEDIECLRSLCRQYYKLSDELTAYKNRLTGIVDQLMLNFKDVFPNIFSKAALAVLEKYPTPAHILKANRNKLIALIQKNSRRSLKWSTAKYNLLVSKAREFAPLTVHNFSNIAMLGVYISMIRTLEDNLAKVLKTIHLLIAEDMAKDMPMLALTLELFQSLPGIGLLTAATILAEIGDFSAFSKPGKLVAYFGIDPSVMQSGEFTGTRNKMSKRGSRLLRRVLFTTALANIRTKRNKEACNPVLLEFYKQKCQSKPKKVALGAVMRKIIIYIFAVLRDRKPYQLRSPQEHAQILAAKHIAA

SEQ ID NO: 461449 - protein, 364 aa, unidentified
MFYLGIDQHSKQLTVNLRNEQGETAVKRQVSTKWNRVRAFFDDLRREVEPDGGFMAIVEVCGFNDWLLKMLDEYGCQQIVLIQPEKPTKRKTDRRDASQLAELLWVNRDRLAAGRKVNGLRRVQPPSEQDAADRQLTTFRKRVVTSRTRTINKVKQILLKHNLLQECPTKGIQTKKARAWLAELPFEKIDRLELDMLLEQWDLWNTQLEELDKQIASRQAEHPTATILATVPGAGTFSSLALASRIGPIERFAGPDSLANYWGLTPGCRNSGKVTDRLGSITKQGSAMARFVLGQMVLHVLRKDPHMRNWYRRIKKRRGTKIARVAVMRRLATIIWRMVKYEQPYVPGGPEHVKRMQVTMAALN

SEQ ID NO: 461450 - protein, 343 aa, unidentified
MQNSNVIGIDLAKNVIQVCKIDKHGELISNRAISPSKLKELLANSIPSIVSMEGCGACHYWARLAQKYGHDVRVISPRKVKAFLQGHKTDANDALAVAIAATQFGMVFSQIKAEEQQSLQTLETSRKFLDKELTALNNHLRAYLYEYGITMNRGRKSLRATIVMVLDDLDTRLPQCLKNTLKTLWERYQLTVVQLKETEKYRAALVKQLAPCKRLMELEGIGEVCAAMLYASMGDGREFKNGRQASVYIGLTPKQYSSGGKIIMLGIDKRGGNKPLRAALYQGALSVISRLPSEPRTAKEAWLLKLVERAGVKRACIALANKTVRTAWALLATGKSYEPVSLS

SEQ ID NO: 461451 - protein, 412 aa, unidentified
MDVIYPQCCGLDVHKKTVTACLITSIEGLEPVKEIRTFRTMTADLLALADWLQEAGCTHVAMESTGVYWRPVYNLLEGQFALLVVNAQHIKAVPGRKTDVKDAAWIAELLRHGLWRGSFIPSNPQRQLRELTRYRSTLVQDRARTLNRLQAVLEDANLKLASVVTDIYGVSARAMLEAILAGERDVEALADLARGRLRAKHDQLKEALEGRVTAHQSFLLTEHLSTLEYLDEAIARVSGEIDQRLIADQEAIALLDTIPGVGQRAAEIRIAEIGTDMSRFPSAKHLASWAGMCPGNYESGGKRLSGKTRKGSRWLRQVLVEIAHVAAKTKHTYLAAQYKRIAARRGKKRALIAVGHPILTIVYMMLTRKQPYQDLGAAYFDQREQQRVERRLVQRVERLGYEVSLQPRVLAS

SEQ ID NO: 461452 - protein, 315 aa, unidentified
MNLGIDVSKNTLDCCLISDGIFFERQFKNNRAGFEQLKAWLKESGATNALHCCCEATGKYYEAAADYLAESYVMSVENPRKIKGYGNAKLQRSKTDRLDARLIAQYCRDMKPRAWKKPSEAQTQLKELNQYRQRLKAQKAAEQTKLHTAPDYLVPLIEDTIRHLQKQIKAVQEKIGKFHQDYPDYKANRNRLKTITGVGDNAADTLLTVLAEQDRFENQRQFTAYLGLDPKQFKSGTSVKGRERISKVGSSRLRTALYMPAMHAYRSRTFAPFVSRLKANGKRPKQIIVALMRKLAVIAYNLIKTGKDFEPERYK

SEQ ID NO: 461453 - protein, 390 aa, unidentified
MIYVGIDVAKDKHDCCILGPDTEELFPVFTIRNNSDGYGELFHKIESVSKDKSQIKIGLEATGHYSYNILGSLLDHGYHTFVINPLHTNLYRKGQSLRKTKTDKVDARSIAEMLVTDKTLKPYTGTSYHSEELKSLTRYRFELVKERAKLKTSVSRLVNILFPELESLVPTLHMNSVYRLLQELPGAYFIASSNLTHLKALLADASKGHYGREKAIEIRETAKSSIGSLMPAKSMELRQTIRRIDTLTSDIKEVEQSIQKIMDECGSPITTIPGIKYRMGAMILAEIGDFARFSNADQVLAYAGLSPSTYQSGQLISSYARMEKRGSKYLRYALFNAAIYASVWDERFRLYLSKKRAEGKHYYVAISHVVKKLVRTIFRMEITHTSYQPL

SEQ ID NO: 461454 - protein, 340 aa, unidentified
MRLYGAFDLHSNNNYLAIVDQAGKRIFKRRLSNDVPTILDTLERYRKDIVGLAVESTYNWYWLVDTLMEQGYRVHLANPAAMQKYNGIKHSDDKDDAIWLADMLRLGILPEGYIYPKEERAVRDLLRKRTHLVQLRTSLINSLQNTIARQCGFRVTANDIRRIKDNKIQILLDDQVEEVLIVSQLSKEAIDFFNEKIRTIERVVVSKVALRSNYQTLRTIPGVGKILALTIMLETGPITRFAHAGKYVSYCRKVSSQWTSNGKRKGKGNKKNGNGYLSWAFAEAAEFARRYDPRAKAYYNRKAQRTKPIVAQHALSHKLARAAFYMMKNQEPFMAEKAFG

SEQ ID NO: 461455 - protein, 431 aa, unidentified
MAKAKTSRTVDIVYPVCCGMDIHKNFLVACVAVTDERSHTEHHIRRFSTYTKGLRALVDWLKSFDCQDVCMESAGKYWVPIFNILEAAGLRVCLTHPKYVKAIKGKKTDKKDAKWISELFKCDLVRSSFIPPADIRQLRDLCRYYVKLTYISVSEKNRAQNCLTMCNFKLDDVFSDLFGVSATRILDALLGHGGAGFDIAPLLDRHCKATAEEVADALDGELIPEQVAKLSLIRQHRDEILKLQASLESMILQLAEKYNPQIELLLTVPGISDRLTAIRILAEIGADMTVFETSKQLCSWAGLTPQNQESAGKKKTTRIGRAGAYLKPLLVQIALAVSKSDQHVELKSKYLALKKRRGGKKATIAIARRLLTAIFHMLNKGEAYNAELYHKADKPPKERIMTPDQAIDFARRHGFLIEGFDPPPQNPHAVA

SEQ ID NO: 461456 - protein, 384 aa, unidentified
MKATRIGIDLAKSFFHLVAMDTRGKVLWRKALTRRRLLEFLVQVKPAEIAMEACATAQHWAREIQKCGHEVKLIHPKFVTPYRKSSKNDFNDAEAICEAMSRPTMRFVAVKTLEQQDMQTLHRLRRLMIKHRTQLANHLRGLLAEYGITVRMSIAALRREAAELAADPERLTGGLRRAVNDNLEQLALLQRQSRELDRDLASACKADERCRRAAEVPGVGPLTATALVAKVGNARQFPSGRALSAYLGLVPGQNSSGGKQVLLPITKKGDRYLRTLLIHGARAALQAAPRHDDARNQWALRLRRKSGPNIAAVALANKNARVLWKLLTSGQHFQSQPATPEAVPAQPAHRWASGKHAGRRAALRLEHDASTTERDFSASPPAGD

SEQ ID NO: 461457 - protein, 409 aa, unidentified
MNVVYARCAGLDVHKKTVVACVVTPEGREVRTFGTRTRGLRELAAWLEERQVTHVAMESTGVYWKPVYNLLEETECALLLVNAHHIKQVPGRKTDVKDAEWIANLLQHGLLTSSFVPDRKQRELRELVRYRRKLVQMRSSQVARVQKVLEGANIKLASVVSDVMGVSGKSMLTAIVEGETDPERLAALGKDNLKASKEELAEALDGIQGVHQRMLLKSQLAHIDFIDAELKQLDQEVERRTNLFPDDIKALDEIPGIARRGAEDILAEIGTDMDQFPSANHITSWGKLCPGNNESAGKKKSGRTGKGNPWLKSALVEAAWAAVRKKGCFYGDLYRRLSMRRGKLRAIVAVARRILETIYFILKRKEPYREINVDELNKAQREHQLRRALRNLARLGYAVAPEHLEPLAS

SEQ ID NO: 461458 - protein, 369 aa, unidentified
MTKSITVERQQASNFAEKKYTVGLDLGDRWSWYCVLDEAGEVLLEQKLATTPKAMQEVFGAMPRCRIALETGTHSPWVSRQLAQMGHEVIVAHARNVRRIGESSRKDDRLDAQTLARLARIDPQLLRPIQHRSEKAQGALMIIRVRAALVGVRTSLVNTVRGLAKSMGERLPQCDADQMGVLQAVSLPPKLRQVLVPLLKEVESLTEKIKNSDREIEQIARKDYPETALLQQVGGVGPLIALTFILTIEDKNRFQKSRDVGCYVGLRPRRSDSGQSQPQLRITKEGDPYLRTMLVQGAQYILSRRGPDTDLKRWGLNLAKHGGKRGKKRAVVAVARKLGILLHRLWVTGEVYEPLRNHNARQEQKKAAA

SEQ ID NO: 461459 - protein, 345 aa, unidentified
MVILGADLHKRWHTVVAVDDTCRKLGEKTIPATPDGHLELRRWAARFPERRWALEDCRHLSRRLEVDLLRSGESLVRVPPTLMAGVRRSVREPGKSDPIDALAVAQAALREPDLPVATLDGPERELRLLVDHREDLVAERTRHISRLRWHLLDLGIDEPGPRSLDRAAVQADLEARLAGRTEPAARLARDLLGRIRALTLVIRSLGREIGDLAASLAPTLLALPGCGRLTAAKIVGETAGMSRFHSKDAFARHNGSAPVPVWSGNVTRHRLSRGGNRQLNLALHRIAITQMRIDERGRAYLERRRAAGDTKTEAIRALRRRISDEVFRRLRADEAARVMPLATAA

SEQ ID NO: 461460 - protein, 338 aa, unidentified
MNDNVIGLDIAKNIFHMYSVGADNKPIKKKLKRVELLAFFANYPVSLIGIEACGSAHHWARELIKLGHEVILLNARYVKSFVIGNKTDFNDAAGIFDAVTRPNKRTVTIKTIEQQDIQLVHTIRKGLIGKRTALANQTRGLLSERGIIIPKSINQLRKQLPLILEDAENNLTPLSREMFAEHYERLVILDDEIKSQDQRIRRLCQANELSERFTEVRGVGALVATAVLFDIGDGKGYARSSDYAANLGVVPRQHSSGDKQVYLGISKRGNRYIRTLLIQGARAVLIHCHKKQDKLSLWLQSLIKRRGFNKAAVALANKNARILWAMTTQGTKYDASLV

SEQ ID NO: 461461 - protein, 356 aa, unidentified
MSVISQSRPFVIGVDCHARTHTYAVIDALTGQVLACEQFPAAHAGLCRALSWVARRTGGDATALWVIEGIGTYGAGIARVVADAGYDVVEAPRMNARGRRGTGKSDPLDAQRIAAGVLGLDEQQLRRPRQDQGVRAALRTLVSAREQLATERTMKVNALTALLRVNALGIDARRPLAKAQILTVSKWRERDESLEVVVAREEAVRIARRIGELGEQLVANEARMTSLIQATPAAPLLEIRGVGAVTAATFITAWSHPGRVRSEAAFASLAGACPIPASSGNTSRHRLNRGGDRRLNRALHIATMVRMTHDPETRVYTERRLREGRSTRDIRRSLKRYLARSIYRQLNALHEAQTMA

SEQ ID NO: 461462 - protein, 456 aa, unidentified
MTPRKTKNLRMPTQPSEPLRVVNPNAAAIDVHSEVHWVCVPSDRDPQPVQKFGSFTVDLDAIADFLARCRITTVVMESTGVYWIPLYELLERRGFRVLLIDPRKARRLEGRPKTDRLDCQWLQRLHAYGLLAGAFRPPDQIVELRTYLRQRQMLLTYAAVHIQHMQKALEQMNVKLTEVVSDITGATGTRIITAILKGVRDTQVLAKMRDCRCKNDEETIAKALQGNWRAEHLFTLKQAVELYGFYHQQLTACEGKIEALLGTFADRSGGKPLRPKPGGRRTANAPGFDARTLLYRFSGVDLTVIEGIESTTALVILSEIGYDLSGFPSVKHFTSWLGLCPNRKISAGKVKSSHVRPGRNRVAQALRLAARALHSSKRALGAFLQRLKSRMGKAQAITATAHKLARLVYAVLKNGTEYVRKGLEEYETQYRERLVRNFQRKARELGFTLVPAVPVG

SEQ ID NO: 461463 - protein, 396 aa, unidentified
MPATTRHARVPALPESTTVQAPLLYLALDLGERHWTLAFTVGRGQRPRVRTIPAGDLERLTTELAAARRRFGLPPEARVVSCYEAGRDGFWLHRAFLASGVTNVVVDAASIEVPRRARRAKTDRLDARKLVTMLVRYTEGERPVWHVVHVPSEADEDRRHLERERETLVADQTGLVNRIQGLLATQGVRLALRGDVPAQLAAVRRWDGTPLPPELRARLEREWMRVEAVRTALRALTTARHRRVTTPTPPAADAAAVHLTRRLAALGAVGETTAWLLATEMFSWREFRNRRQVGGFVGLTGTPDQSGDRIREQGLTRNGSVELRARVIELAWGWLRYQPASALSQWYRQRYGGGNARLRRIGIVALARRLLIALWRYAMGGPPPAGAHLKDDAMVA

SEQ ID NO: 461464 - protein, 407 aa, unidentified
MEIVHAKCAGLDVHQKTVVACARIAAKGRVTHEVRTFGTTTRDLLALAEWLTAHGCTHVALESTGIYWTPVWHVLEASFTLVLANPRHIRNVPGRKTDVNDATWIADLLAHGLIRGSFVPPEPIQDLRDLTRTRKQLMREIARHSLRIQKTLDRANVKLNTVLTDILGASGRAILHALIAGERDPERLAALASGRLKASRVDLVTALHGRVTPHHCFMLQLHLTQIEALEAAVRDLEARLGDALAPFRAAVDRLITIHGIAQTAARVLIAEIGADMSRFPSSAHLLSWAGLCPRLHESAGKRLSTRTLPGNPWLKTTLVQAAWAAVHKKDTYLHAQFLRLKSRRGPKKAIVAVAASILTAAYHILKHGVDYHDLGGDFFDRRDKAKLAKRLIARLHDLGLTVEVRAA

SEQ ID NO: 461465 - protein, 387 aa, unidentified
MQSVTSATAVATTARANNITLFASLELSKSKWVVTINSPGSEKFSKHVVEGGDGAGLLDLLSRSRAKAEQRYGVQIKTIVIQEAGLDGFWIHRLLLANGVESHVVDAASIAVARRHRRAKTDAIDGETLLRTLMAWARGERRVCSMVLAPSPEEEDRRRLTRERGTLLKERIQHTNRIRGLLSGQGVRDYNPLRRNRFERLEALRTGDGRELPAMLKAEIRRELDRIALATTQLAAVERARDALIRTDAEEPNNPAALLLKLKGLGPEFASLLWLESLFRSFGNRRQVAAYAGLAPSPWQSGGVERDQGISKSGNRRLRKTMIELAWFWLRHQPDSALSRWFQVRVGAAKGRIRRIAIVALARKLLVALWRYVTQGVVPEGAVLKAA

SEQ ID NO: 461466 - protein, 342 aa, unidentified
MNLFSIGIDLGKTVFHLVGLSQFGEVIVRKKFSRTQLLRFTANVQVGLIGMEACGGCHFLGRALREQGHEVRLMPAQYVKAFVKTNKNDFIDAEAIAEAVSRPSMRFVPIKTDEQLDMQSLHRVRERWIMRRTAVVNQIRGLLLERGITVRTGRCHLDAALPKILEDGSISLSGALRFLLVELKQELEQLANHIEQAETLIQRAAQQSETCQRLDAIPGIGPLTATALIAAIGNGGAFRKGREFAAWVGLVPREHSTGGKQKLLGISKRGNSYLRRLFVQGARAVLQFREKQSSGLSAWLAQLTSRTHYNVAGVALANKLARIAWAVLATGEAYRPTVLACR

SEQ ID NO: 461467 - protein, 344 aa, unidentified
MGDDPACTRLTRTGNIMNEATLPTLGIDISKDSFHLELSCNHKLRHRKFSNRQEGFAELCIWLVKHKAPRVHACLEATGPYSEDLALYLHQQGHRVSVVNPAQIKAFGQSELRRNKDDQPDAGLIRRFCEKQQPAAWTPLPAPVRELQALTRHLENLHETRQQQLNRLEGNKTKGVVKSLRKLVAYLDAEIARTEKQIEDHIDNHPDLQGRCQLLESIPGIGKRTAAKLLAEIDDISQYKSARQVAAYAGLTPKNNRSGTIRGKTRLSKTGNARVRKALFLPAMTAKRYNPIVRSFCQRLANHGKNKMQIIGAAMRKLIHIVFGVLKSGKTFDPNHELFLNSAP

SEQ ID NO: 461468 - protein, 416 aa, unidentified
MRRVIGIDTHRTFGEVVIWEDGSLRHAGRIGMTRTALEGFGKNLLATDEVVIEATGNCMAVSRVLTPFVKRVIIANPLQVKAIAHSQVKTDKIDAGTLASLYAAGYLPEIWTPDASTERMRRLVCRRYQVVRHRTRIKNEVHSILYAYLIPKCPHADLFSNVGRAWLLKQPFPDDERIAIERHTRELDRLEEDLTALDKEIAGSALTDPAIKRLITITGVNVTVAAGLVAAIGDIRRFGSPQKLVSYFGLNPHVRQSGLGAAHHGRISKVGRSHARAMLVEAAWAAAKTPGPLHAFFVRIRAKRGHQIAAVALARKLTVLCWHLLTKETDYLWVRPALVANKVRKMELQAGQPQQKGNRRGPTYAYNIKELRAREMNVAHHAEAAYENFVRQWQPRGPKKRCASASKRQGTNSQAT

SEQ ID NO: 461469 - protein, 346 aa, unidentified
MNYIGIDVHKSICTAVVMNDDEKVIDQIIDFGTNDEGCSFIVDRYSPEDSYILFENLTTAHRVYHFFKDRGYRVEGLHTGHGCVTEISKTDFKTDLEDATKLARMCKDHFTGRREYALAHFADIDSMKAKELCRVMNDCSEQRDKLNLRIQAYMDLFDIHLPKGLKNVYSNKAMAYLKSLNHPALNIMVEDMASAMAHIETAREGLESLFKDNEDVQNLMSIKGIAIQTAATIYTAIDGIERFETPESLVSYFGLKITRHESGGDRDLHGHINKRGDPLVRKYLANVVVKHSIYYPDSDLAGFYKRKKEVMPHWKAVTAAMRKLVCIIWAMLTRHQVYRFSSPVKA

SEQ ID NO: 461470 - protein, 361 aa, unidentified
MKEEQATAGSHTVVGGVDTHKDLHVAAVVDEHDRVMAAECFPTTRHGYKQMLAWMRSFGELARVGIECTGTYGAGLLRYLQQAGVTVLEVTTPDKSDRRKRGKDDTLDAQNAAHAAFAGVRTVTPKTRDGMTESLRVLKVCRKTAIAARRVALQLIHNTIVCAPDELREPLRAMTRMQLIRTLAAWRPDLSDYRNLASAYRIALKSLGRRYLELHDEIADLDVMIVALVDELAPELVSRASIGYESASQLLLTAGDNSSRLQSEASFAALCGVSPVPASSGKVIRHRLNRGGDRAANSALHIIAIGRLRTDARTKAYVAKRVGEGHSKLEAIRCLKRYIAREVYYVIRQRDRQIGQTQIST

SEQ ID NO: 461471 - protein, 348 aa, unidentified
MLKIVYPICCGIDVHKGFIVACIASANGQGVTTYQSKRFSTFTNDLRRCAVWLAKNNCKDVCMESTGKYWIPVYNILEATCTIVLAHPKYVKAIRGKKTDKKDAKWIADIFKHDLVSGSFIPPADIRQLRDLMRYHWKLTSFTTGEKNRAQNCLTVSNIKLDDVFSDVFGKAASAITARLLENNEPFDVTPYLTKGIKSSVEKIQAAVDGEMCAEQAEKLRIIRSHMDALELCKLNLQSLILTTTEKYLPQLNIVATAPGIQAFSAIGIISEIGVDMSVFPTSKHLCSWAGLTPQNNESAGKKKTTRISRAGAYIKPLLVQCALCAIRAKQFPEVRHRYLTLKKATGP

SEQ ID NO: 461472 - protein, 428 aa, unidentified
MSESIAAAALQAVAAYIGIDWADQKHDVVLRSASQPNKVEHRIIEHKLEALMEWVGQLQQRFGGQGKILVCLEQSRGALIYHLMGYEFFELYPVNPLQLARYRETFSPGGAKDDRADAELLCELLYCHRDRLRAWKADSELTRKLVFFTEGRREAVDQRARLSQAIKSQLKVYFPLALELLNNDTTTALAADLLLRWSSLEALQKQSAHTLRKFFYGHNCRGEAKMLERLQLVQEAQPLTQDAAVIEPAALRVQMLACQLKHLLPDIARYDKKIAEFFAVHPDRFLFENLPGAGLALAPRLAVAFGSDPNRWESAQEIATLLGIAPTRRASGKKTGKKASVHFRQACPKFHRQSFHEFAGCSIRYCPWADAHYQTQRARGKGHHTAVRSVAFKWIRICFACWKQRIPYDPQRYLQALQRRGSPLADAC

SEQ ID NO: 461473 - protein, 315 aa, unidentified
MTPAPWFVGIDVSKAQLDIALRPEGRFVVPNDETGRAHVVERLRALPVALIVLEATGGLELPLIGALVAAGLPVVVANPRQVRDFAKATGRLAKTDPLDAQILAHFADVIRPVPRTLPDEQMQALAALLARRRQLIEMLTAEKNRLGSVPHLVHKRLNAHITWLEREVTQAERVLAHAIGESPLWREKDDLLRTVPGVGPGLARTLIVDLPELGTLSRKQIAALVGVAPLNRDSGTLRGKRTVWGGRAHVRAALYMAALVGSRCNPVIRSFYQRLCDAGKAKKVALTACMRKLLTILNAMMKHRTRWSTNEIVCP

SEQ ID NO: 461474 - protein, 410 aa, unidentified
MRVIGLDVHRSFAEVAILENGTIQHAGRFKLEHWRVIAFGKTLKRNDEVVLEATGNTSVIVRLLTPFVRRVVVANPLQVRSIAWAKVKTDKIDAGVLAKLHASGFLPEVWIPNEETEALRRRIAERNQLVSQMTRLKNRVHSVLHANLIPRYAGKLFSKRGRTWLDTQPLPEDQRRQIGRHIDEHDRIAIELVALEKNLAENALRDDRVKRLMTIGGVNAIVALGVLAAIGDVARFSSPQKLVSYFGLNPKVRQSGDRPAYHGRISRQGRAHARAMLVEAAWSIATQPGPLRAFFNRVKQRRGQQIAAVATARKLAVLIWHLLTNEEDYAWTRPALMQWKIRELELRAGRASRRGGNKPGPARDYSLKTVRDKEREWLGLAEAGYRRFVSAWKEKPPTRRPGAAKEVRRS

SEQ ID NO: 461475 - protein, 420 aa, unidentified
MQVICERCAAVDVGKDVIAVAVRTPGKGTDGRKTEKRTYRAFYGVLREMAKWLVSLGVTHVAMEATGTYSMPVYYALMESGFEQVLVCNAGHVKNVPGRKTGLADAEWLAQLLECGLLRGSFIPPADVKAVRDLVRYRAKIAQQRVSEIARLGGVLQDAGIKIDSVASSIATQSGRAMIEALIDGERRGAVLADLAKGRMRSKIPDLPVALEGRFGEHHAMMCRLHLDHIAYLEKATAELDARIEAMMQPFRAARDLLITIPGIGAVAAAAVISEIGPDPRQYFPTAGHLASWAGLCPGNHESAGKRLRGKRRHGNIYLQPVLVEIAWNAVRHDGYLKSLYHRHVTRNGGYRSSAAKNKAITTVAHAILVIIWNMLSTGRPYEDLGTAYFEHRNDPDREARRLIARLEALGKHVTVHDAA

SEQ ID NO: 461476 - protein, 347 aa, unidentified
MRFYTKQHPFYCGIDLHARSMYVCIVNHDGEILVHRNMKAAPEPFLKAVAPYRDGLVVAVECIFTWYWLADLCTQEGIPFVLGHALYMKAIHGGKAKNDKIDSQKIAALLRGGMLPQAYVYPAEMRATRDLLRRRMHLMRKRAELLAHIHNTNSQYNLPEIGKKIAYKANRAGVAERFPDPAVQKSMEVDLALIDYYDPLLNDVELSIVRLAKQHDPDTFYRLQSVPGIGKILSLVLLYEIHDIRRFPRVQDFLSYCRLVKCSKESAGKRYGTSGAKIGNAYLKWAFSEAAVLFLRDNPAGQKYLTKLENKHGQGKALTLLAQKLARAVYYMLTRHTAFDLHKFLHA

SEQ ID NO: 461477 - protein, 373 aa, unidentified
MNTIYIGVDFHARQQTICYLTTETGELVTTALKHEPKTAVRTFYEQFSGQVIVGLEASGYSPWFERLLEELGHQVWLGDATEIRRRARWRQKNDRRDAELILDLMLHDEFPRLHRPSLQSREVMRMLRYRQKLIKMRTMSKNSLQSLALQSGIARRGRLFTREGKAELDAAVMSAAMEWQREHWWQLLEALNQQALEAMTWLKGAGQNDVSIARLRTHPGIGLLTSLCLVHTLQPVARFRNTRKVAAYAGFDPLERSSAERKHFLGISKAGSRVLRYLLVEAANIAVRKDEELKRFYQRLAQRRGRPKAKVAAARKLLIRAYIMMRDEIDYAEFRRRAVAARLARLRQGPPIPAALIGQPASTARQEPLPRGK

SEQ ID NO: 461478 - protein, 347 aa, unidentified
MAEYVGMDVSLEEVSICVMDGSGRVVARGTTPTDPAAIVAFIEEQAPDVVRIVHESGQISIWLTRELRALGAPVICIDARMAHKALSARPNKSDRADAEGLAHLARTGWYREVHVKSAASDRLRTLIGARDRLLRIRKDIEGHVRGVLKTYGIRLSPVTSARNRASFRDQLQAVAQGDPVLEVVATSFIVAHEAVCNECAAIEDEMVALARESALARRLMTVPGVGPIVALSFIATIDDAARFGKSTQVGAYLGLTPKRYQSGEIDHSGRISKCGDAAMRALLVEAASTLIAKVKRFSPLKAWAVRLAARKGFKKAAVATARKLAVILHRIWCDGTTFAWRRQAATG

SEQ ID NO: 461479 - protein, 338 aa, unidentified
MKKYSGIDLHSNNNVVVVIDEADRVVYRRRLPNELGKVLEALEPYREELAGVAVESTYNWYWLVDGLQAAGYKVHLANPAAMKRYDGLKHSGDDTDAVQLAHLLRLGILPTGYIYPVAERGLRDLGRRRLQLVRHRTMHVLAVENVQARQTGARMTGDRVKRLSAQEVQALGLPEDVTLGLQANVAVIGTLNEEIAKLEKHLLERLKPQPEYALLSTAPGIGRILGPIILLETGSIERFAAVGNYASYARCVDSARLSNGKKKGEGNVRNGNKYLAWAFIEAANMARRWCPEARRFHDRKRAKTNTIVATKALAHKLARACYHMLKTQQPFDMKRCFG

SEQ ID NO: 461480 - protein, 430 aa, unidentified
MDEVDRNRLEEFRQLRQEIRQSEGHLVVGIDIAKEHHHAFFGTATGKTLLRRLVFSNDGEGFRKLLDHVEALRVQHGLKKVVYGMEPTANYHKPLGEYLIHMGRTVVLVSGVTVKHNRDSLDGRWDKHDDKDSANVADLISQGKCLYYEHPSAKLRGLRGLLSLKRRLKRQEQSYRVRIRNHLIAQYFPEMDSDYGRSEALGLAIVRWCFPVSQITQIDVDPFIERVTSRRIRMEKRRRLEVIWEKAGESIGCDAVPGLDHEARVTVEGLKQIREVIKETEDKIEELCKEFPGYEYLLTMPGFGPDVSAKVLGAVGDPDRFLNGKQVLKLAGYDLSADRSGKSSDKAVPKISKRGKADLRYALYQAAFIASTKNRDFMLYYTSKIRGREKEKGIHTKMLVKLSAKLLVIAWTLMKKKEPFNPAYLKAKLN

SEQ ID NO: 461481 - protein, 352 aa, unidentified
MMIIGCDFHPRFQQISFLFEETGEWGQRRLMHTAEAEQYYRSLSGTRVRVGIESTGSYGWFGRLLSELGYELLVGDASQIRASNPRRQKTDKRDAEHILGLLVADRFPAIWQPPAENEQLRQLLLHRSRLVRLRTRVTNQLDGMAKNEGLLVPGGWSGKRRKGIEALPLPGWYGERRKDLLGLLDRVEERIAPLNKAVSQAAANNAEACLLMTHPGVGPVVSLAYVLTIGNWQRFPRGKQVGSYLGLIPSEDSSSDKRRLGHISKQGNTLLRWLLVEAASTAQRYDASWHRQYVRLSMTKHHGVAKVAIAHKLAVRLYWMLRSGQDYGQMMERGSHARQSECPVGRSRRPIE

SEQ ID NO: 461482 - protein, 436 aa, unidentified
MTLINFVAANQKYYAFNLLSVFIMVFWSVQYLLQHLLVQTQVSHQLLQPLILILQLPQTPQFRHARPGKFFLPVNGMDYFLPLRLTVRNVLTRRITMNIVFLGIDLAKNVFQLCGLNQAGKPVYTKCTGRKELLQTLANIPACLIGIEASTGAFYWQREFEKLGHKVKVISPQYVRPFVRGQKNDGNDAQAIAVALMQPTMQFVPPKSPEQQDIQALHRARQRIVNHRTATVCQIRGLLLDRGIPIGSAVSRARRAIPLILEDAENGLSSRMRRTIAELYDLFNDLGRRIHFFDKEIETVFRQSEACPRIAKVKGIGPKTATAVVAAIGKGTEFKNGRHFATWLGLVPRQHSSGDRQVLMNMTKKGDKHLRTLFIHGARAVVRVATNNNDGHMNQWVNQLKERRGFNKTTVAVANKNARIIWSMLRNDTGYQVVCN

SEQ ID NO: 461483 - protein, 402 aa, unidentified
MLFAGIDIGSERHMVAIVDQSGAVLLRATAVTEDATGYKRLLELLGSASDCLVAMEATGHYWRNLFAALVTAGFKIALINPLRSSRFAEEELQRTKTDAIDALGLARFAAQKRPSITQLPESALLELRELVRLKDQLIQQFGDRVRQLHRAVGLGFPEFTRHVRTLDSQLAISLLARYPTAAALRTVSARRLARLCYDGSHNVGEELARALLAAAKQSVAAHHGEPYQLQMRYACEDLSVLRRRLRSLDSDIERRLQQHEIGKLLTTIEGIGPQTAARIIAEVGDPARFHSGGALASYVGVIPRVHQSGKRKFSSAAKVPLGNARLRRALWMPALTAIKHNPWLRAYYQRLRSAGKQPKVALVAIIRKLMTAVYSVAKHRRPFVLPPIYTPAAGGAVVALAH

SEQ ID NO: 461484 - protein, 348 aa, unidentified
MVVIGSDSHKRSHTVVAVDATGRKLAETTVAATSTGHLELVRWAGRFVEVTWALEDCRHLSRGLERDLLVAGARVVRVPPKLMAGARRSSREPGKSDPIDALAVARAALREDLPVATLDGPEREVRLLIDHREDLVAARTQAQNRLRWHLHELDPGNEPPSRSLARAHVLADLERDLAERSGVVARLARELVVRVRELKATINTLEREIADLTAGLAPSLLALAGCGPLTAAKLVGETAGVGRFRSRAAFARHNGTAPLPVWSGNDVRHRLSRGGNRQLNVALHRIAITQLQRPGPGLSYIEHRRAAGDTKTEAIRALRRRISDEVFRRMLHDEAARAALPSGLAAAA

SEQ ID NO: 461485 - protein, 454 aa, unidentified
MKKSPSTFLDTLTCIHPNAAGLDIGSREIWAAVPGDRAPEPVRMFSTFTPDLVRLADWLVACRVETIALESTGVYWIPVFELLEARGFKVSLVEPRQLKRVPGRKSDYLDCQWIQKLHSLGLLTASFRPDGEMCALRTYLRHRAQLLQHRAPHILHMQKALQQMNLQLHHVLSDVTGVTGLKIIRAILAGERDPLKLAHLRDPGCKSSEDRIAQALTGTWRPEHLFALKQSLALFDFYTQQVAECDTTLERQFAAMKPRWPGEVPTDLPPLKPDSHSKNQPSRRTRADLLRLTGVDLVAVHGISASLAQTILAEIGTDLSAWPTEKQFCSWLGLAPHTDISGGRVLRSRVLKTDNRAGQAFRQAAASVLRSQCAFGAYYRRKKAQLGPMPALVATAHKMARTVYYMLKHHVPYRDIGADAYEKSQQEREVATLKRKAAKLGFTLTLHEPILATT

SEQ ID NO: 461486 - protein, 419 aa, unidentified
MSFKIFKFNCCGLDVHKTWIYACIGITDSNNRTEYKQARFSSFTKGLNELCDWLAKYNCKDVCMESTGKYWIPVFNILEQHSFWVTLSHPKYTKPMKGNKTDRKDAKWICDLYMCGMVKPSFIPPADIRELRDLVRYRFKLTCMITGEKNRAQNCLTVSNLKLDDVFSDVFGKSSRSITEHILQHPGEKFDIAPFVDSRCKTPITEIQAAVDGAISKEQVVKLRQCLDHIDELNKHISEVEQEILRLSDKYEAALNLIRTVPGFNKNPLTAIQVLSEIGGDMSVFPTAKHLVSWAGCCPRNDQSNQKIKSTRISRAGSYFKPVLVQVANALIKSKKHSEFTSRYKRIKARRGHKKAIIAICRMILTAIWHILTDLKPYTPEGFLDSRPVNKEKVLTTSQALNLLKQRGYFIKDDPLSVS

SEQ ID NO: 461487 - protein, 361 aa, unidentified
MKVPVFFYESKAEQFERYYNLHLGLRATISLFKFRRFKMNKFVGIDISKKTFDIYFEHNDNGSHLTLQQREEDYKMLVHLIGNDRICVMEATGNYHVHLADYLYQAGIKVVVENPLKIKRFSQMSLQRTKTDKADSQLIYEYGKVILSDAKHHYWQPRNTEIGHLKQYDTVRHQLIKQRTALSNSEEAMAGLTGLNKEVTDVLRTIVVAVEKAIKQLDEGMLKLVKAHHAHSFDLVTSVPGVGAKTATMVICLTDGFQTFSPDNIKQFISYIGMSPRTFESGTSIKGRAHISKVGNSRLRSMFYMCSWTAKTRNPQCAELYERLKEKGKPEKVIKVAIAHKLIRQVFGVIKSGSPFSAEYA

SEQ ID NO: 461488 - protein, 343 aa, unidentified
MPGIVTIGLDLAKSIFQIHGVDNTGRTILRRRLSRHELVPYFAKISPCLIGMEACSAAHHWARELSRFGHSVRLIPPQYAKPYVKRNKTDAADAEAICEAVARPNMRYVPIKTLDQQSVLSLHRVRALFVRQRTAAINTVRGLLTEFGIIAGKGIGRIAELRHRANEADNEALPDEARAAITEVFEHIDALTKRIDATEAKIVAWHKSSEASQRLASAPGVGPITASAIVASVGDARQFRSSRHFAAWLGLTPRLHASGGKEHIGRISKGGDRYLRALLIHGARAIVGTSFRKDVPPRLWLKQLLTRRSVNVAAVAVAHKTARALWAMITREEGYRRIAVQAA

SEQ ID NO: 461489 - protein, 374 aa, unidentified
MADYSEVFVGIDTSKLRNAVAIAQGGRNGEVRYLGEIENTEAATSKLVKKLAAQHRRLTFCYEAGPTGYGLHRLIQALGHECVVVAPSLIPKKPGDRVKTNRRDALNLAKLLRAGELTAVWVPDARHEAMRDLVRTREAAVDDLKSKRQQVLSLLLRLGRHFTGKRTWTRAHMNWLVSQKLAHREQRIAFEEMLLAARQADERVIRLERAIAAAVPDWSLAAVVTALMAVRGLDLISATIFLAEIGDLSRFASPRQLMAYLGLVPGEESTGDRVWRGGITKAGNHRARRILVECSWSYRHPPRVGKKKLAKVEAAPPAVQEIAWKAQARLTARYRALARRGKRPTLIVTAIARELSGFIWAVSRAVGAPTTPAR

SEQ ID NO: 461490 - protein, 346 aa, unidentified
MPETEVDTFAGIDVSARELSVALRRGKGEDKPAIAKFSNHHAGHKALIAHLFRGGRRVRVCLEASGNYSLDLALTLQAHRQVEISVINPRRARRFAESLGQRSKTDPVDARVLCEYAARMPWVAWQPPSSVALHLRAVARAIADLAVIHTQQNNRAHASAASQALPVLVVKEMQRHQKYLEQRMTRLRREALRLIAGDSELDRRFRLMLTTTGIAETSALQILGELAVLPDILDARQWVAFSGLDPRLFKSGKSVEKRPRISRGGSRHLRRALYMPALVALRRDPYLRCFYQNLLARGKARLQAVVAVMRKLLHALFAMFRTNQPYDGSKLCCAVEMAGHAIAACA

SEQ ID NO: 461491 - protein, 391 aa, unidentified
MIYVGIDAAKDKHDCCILGGNGQTVWEAFTFQNNQKGFEQLRTAIQTSSEAEGSGQIKAGLESTGHYSGNLEAFLRDSGVELVVFNPLQVNLYRKSQTLRKTKTDKVDAKCIAQLLMTAESNPVSVSYQIQELKALTRHRSRLVSQRTKLKISISRLVVILFPELPTVCNSITQAAIKAMLLELPGARHIAACRIDRLTNLLRAASKGRYDRAKAEEIKSLAQQSIGANSPAAALELQLTIQHLDFLLQQINQLDKAIRTAVVQTQSPIMSIPGIGPTLAAIILAEIGDIHRFSSPDKLQAFAGLDPSTYQSGNFKANRTPMVKHGSTYLRWALMQAARLAAVHCETFNRYLAAKQAQGKHYFVALGHTAKKLIRVIFRILSTNEVFVPQT

SEQ ID NO: 461492 - protein, 347 aa, unidentified
MASRNAAKLARHNSNSHVGLEPVSQVREAYPMNNKTQVQINVGIDTSQSQLDIYVRPTGDYFSVENTPQGAKQAAIKIRKYQPTRVLIEATGRLELNFVCAAHNAGLPVVVCNAGQVRQFARSTGRLAKTDKLDAQDIAHFGEALQPALTIIKPDKLRDISDLITVRRQCLDMSTMQKNRLLRMPKSVQTPIRRILKAIQKEIERIDQKLDKLVDAIPQWREQRDLLMSAKGVGKVVAYTLMSELPELGKLNRKEIAALVGVAPMNRDSGSYRGKRRVSGGRSKVRTVLYMSMWSTIQYDPKIKATYERLLAAGKPKKVALVACMRKQLTILNTMMKNGAHWSEKLA

SEQ ID NO: 461493 - protein, 358 aa, unidentified
MHATMIGLDIAKSVFQVHGEDSSGQIVLRKRLRRAEMEAFFAALPPARIGIETCGSAHYWGRTLRALGHDVRLIPAAYVKPFVRRNKTDARDAAAICAALGRPDMRFVAIKSVAQQAARGLERSRDLLVRQHTQLMNGVRSQLAELGLVAAPGKRGFATLVTLVAAADARVPAVQLDTLRLLVEHIERLGGAIAVLERRIVAAARAHPAMRRLATIPGVGPLSAHAIVTAIGDGKQFASARDFAAWCGLTRRVDQSANTRRERGLSRQGDKGLRKLLALGASALLRSVRSRPARATSWQRGILARRPVKVAVLAQAARNARIAWAMLQSGETYRRPARQAVDHSAAAAGLAAVAAPAD

SEQ ID NO: 461494 - protein, 394 aa, unidentified
MVEKNSRKLVIFCTILNGELAMKATKESKQPDVNSIMVGCDLHSKNMLVKIAVGREKPRMGSYANTFVGRRRLIADLAKQSLKAGGAQVHVLYEASGLGWTLRDELTEAGMSCGVVAPTKVERSPKQKRTKTDEKDAERLLALLRGHILAGNELPLVWVPDKQTRDDREITRARQDVSDKLTKVKAQVQMLLQRNAIEKPKSAGGAWTVRWREWIGELAGPNTQRPGMRIALSSLLRQAQALNEELELLDAEIGKLAQQPRYSKPAAALDAIPGVGPLTAMVFLTEMGDLTRFKNRKQVSAFLGLVPSSNESGEKHDRKGRITREGPARLRKILCQAAWAWVRLNEGPNRIYHAMVDRGKNKKRAIVAIMRMLGVYLWHTGQRSNQPVHVAKAG

SEQ ID NO: 461495 - protein, 415 aa, unidentified
MSRFERRRRAQTARAVVGVDAGKYKHVLVVRPHDGPDSKPFTFDVSREGFDAAVQFIWAAAPDATPETTIVGIEFAGSYGFTFAHDLARQGFEVVTVLPAHSKRWKEVVHNQRLKTDAKDAMVITDLVAQGNFIAFAFLDPAYADLRSLVSARERLSVERRALIARIKSVLEGVWPEFERRFKNFGKRTPIALLEAYPSPKAFLDAPKRSVLRLLRKESRGHLGETTYEELKVVAERSVALPFSEGAAKSEIPLLIERLRLCEEQIRTIERWMVETLGRIEASRSVLSVPGVAPVTAAVFLGSIGDPKAYETKEQVLKVAGLSLIESSSGTRAGEVHISKRGRPLLRRHAYMLALRLVQEGGIFRKEYEAYLERHGPKKKIPALVAISRRALALIYSVARDGRLWTPEPPSRRKT

SEQ ID NO: 461496 - protein, 383 aa, unidentified
MEAKRNEVDPLEPGRHRCARVEMCSNHSRDRGSTMNVTTYGLDVAKRVFQVHWVEPQTGEVKRKRLARSEVSAFFARRESGVVAMEACGSAHHWGRLLKGLGHEVKLIAAQFVRPFVKTNKTDAADAEAIWEACQRPRMRFVAVKSAEQQAVLSLHRIRQQLVKIRTMQAHQVRGLLYEFGVVVPQGWRVLLTQAGPILAEATRCPAPELVRCELLRQLDGLRTLTTRIAELERQIGGWQRRESECQRIAAIPGVGRLTASAVVATVADARTFRSGREFAAFLGLVPRQAGTGGRVKLLGISKRGDPYLRTLLIHGARAVLRQQSRADRTLDPWLKGLLARRPENVASVALANKMARTIWALLAHGRAFDRSWSRALTVPALH

SEQ ID NO: 461497 - protein, 424 aa, unidentified
MSQRTLTERVTMVKPGMLLVGIDLGRDDNVAVVLTDTAQRLTRFKFPHTRAGYDFFYRQLEQLRAQHPGQGLLIGMEPTNHYWKWLAADLEAHQPPLPYRLVNAYTVRKHREGEQLERAKDDVRDAFQIAELLRTGKFTETQLLQGAYAQLRQYATLHMRLRHDAAQLQNVLTTAVDLGFPELRQVFKDLSGETALALLRTASCASTIRKLPLSEFLAQVREQLQGHRLSVSKLKQAHALAQTSVGLVDTGALHFTIQVYSEQLAHAHESLKRTETALVELFLTLPEAPYLLSLPAISPLFAALLLAELGDPRDFSCASQWVKLAGVQPVADSSGHRTRSPTPMSHKGRSRLRELLYWLVLRWVQHDPYFKAEYERLQTRPQHPLTKMEALGALMNKALHVIWAVLRDRTFYDPQYRQAGAGAL

SEQ ID NO: 461498 - protein, 386 aa, unidentified
MQTVADQSEAPTAIRTNLGAIFVSLELSRSTWLITSLSPAGGEKMSKHVVRGGDVAGLLERFAQLREKTRARTGKVFPFVVIQEAGLDGFWIDRVLQNEGIESHVVDPASIATSRRRRRAKTDRIDGEALVRALLAYKRGEPRVCAMVKAPTPEEEDRRRLCRERKVLIAERVRHVNRVKGLLFSQGISGYEPQRRDRRERLDTLQTGDGHLLPDHLKAQVCRELDRLELLLEQIKAVEAERDVLLAAQQVTAPATMLLDIKGIGPEFAAILWSEGLFRHFDNRRQVASYAGLAPTPWQSGSVDREQGVSRAGNPRLRTTLIQLAWLWLRHQPKSALALWFEERVRRNGGRHKKTTIVALARKLLVALWKYVTAGVVIEGAVMKAP

SEQ ID NO: 461499 - protein, 452 aa, unidentified
MCLADRPILEPNAGAGDIGAREIYAAVPPDRDENPVRVFLTFTEDLQQLAAWLVRCGVTTFAMESTGVYWIPLYDVLEQHGIQPCLVDARNMKNVPGRRTDWHECQWLQYLHAVGLLRAAFRPEGEVCAVRALMRHRNDLAQMANQHIQHMHKALTQMNLQIHHVLSDITGATGLSIVDAIVAGERDAGKLAQFRDPHVKASEETLRKSLQGNWRSEHLFTLCQSRQSYQHYQEQIQKCQQEIEKLVVALVPRVDPAERPLPPDRKRKQYGRKQKTINPQTGFDVRTESYKLFGVDLTQVPGLALMVLALFSEVGRDMSRWPTAAHFVSWLGLCPDNDISGGRVLWRGRRRVQNRAGNLFRLAAHALHHNPTPMGDYLRRMKTKLGPAAATTATAHKIAIIFHTMIKNQVEYDATLWAQRDAQREKRLDAKLKRQAQQRGYKLVPLEENTAT

SEQ ID NO: 461500 - protein, 345 aa, unidentified
MNKVIAGLDLHSNNVVVGIMDMDGKRVASRRLPCDLKDVAGFLKPFKKRLELAAVESTFNWYWLVDGLRALGYPVVLANPAAMAQYSGVKHADDEHDAFFLTELARLKVLPTGHIYDAQLRPVRDLLRRRLMLVHQRTSLMLSFKSLYARTLGQELSLGELRKLTVEQAQQVYQHPANQLIAGMQMQQIEHLTQSIEKIEKGVLACACELPYYCRLETLPGVGKILGMTITMEVGDIKRFAGPGNFASYCRAVKAERTSNHKKKAENNSKCGNKYLAWAFVEAANFARRYDGQCRKWFDKKAAKTSNIIATKALACKLAKAAWYLMAEDAPYSAQRMFGQPPTTQ

SEQ ID NO: 461501 - protein, 425 aa, unidentified
MNYKQNEKINQVKESTLVIGIDIGSTTQYARAFDWRSIELGKVFTFSNSREGFEAFKAWMRHLQDKYRKSDVIVGIEPTGHYWFDLGAYLEDEGILLVMVNPYAVKQTKELDDNSQSKNDRKDPKVIAKLVTEGRYSAPYTPDGVYADLRIMVANRKRLIREMTQIKNRFARWFAIYFPEYTDVFGDYEAQSSMLLLKKVCTPEAIVELGAEKINQIWRDAKLRAVGMKRATTLCETAKRSIGLKKGSSAARYEMKLLLEDYEYKKAQLDAVIEEIEKLCRKIPESEQMLAIKGIGVITVAGFLAEVGDVRRFESPRQIQKLAGLSLRENSSGKHKGQTTISKRGRSNLRAVLFNAAIPLIATNPEFKSLHEYYTTRANNPLKKKQSVIAISCKLIRVFYAILANGVTYDAQKMLSDIHRQPQAA

SEQ ID NO: 461502 - protein, 487 aa, unidentified
MAAGKKSADGRGGAPAGTVGVAAEYGGHGAEVSEDQARVIERAAAIDVAKGTGMVCTRVPGSRPDRRRQKVWQVPATYHEVIALMDHLRCEGIQRLVLESTSDYWRIWYYLAEAAGLEVWLVNARDVKHLPGRGKSDRQDCVWLCKLNERGMLRRSFVPPQAVRDLRALTRTRSRLAQDQARHQARVEKILEDALLKISVVISDLFGASGRRFLDALVAGERSPAALAALGDKRLKATRRELEEALTGKFRSIHAFEIQTHLRILDVITEEIARLDEAIGEQLALVPRTAPACTACGEIGGSHAPGCAGEGTPLPGLAERIDEITGVGVCNARVIIAELGTDPSQFPTPGHAAAWARLTARTLQSGQSARPGRTGKGNPYLRGALGQSAMAAAHTSTRLGVMYRRIARRRGKQKAIVAVARVICEIAWILICDPGARFEELGPDYYIPRSRERQTRDKIRELSRLNPGMKVLLVPDDGPGPHAGAAA

SEQ ID NO: 461503 - protein, 346 aa, unidentified
MKITTVGIDLAKLVFQIHGVDERGKVGVRKQLKRAEMSSYFINLEPCLIGMEACGSAHYWARKLEGYGHTVKLMAPQFVKPYVKSNKNDMADAEAICEAVGRPNMRFVAIKTVEQQAILSVHRARQGFVKARTAQGNQIRGLLSEFGVIIPQGIRSITKQIPEILEDGENGLPGTMRNLLERLTENLKEMDRQVKELEEKIQLWHRENAASRKLAEIPGLGPITASAIVATVGDAREFKNGRQLAAWMGLVPRQHSSGGKQNLLGISKRGDTYLRTLMVHGARAVIRFAENKTKPDVWLGKLMARRNKNVAAVALANKNARVVWALLANDRIFRPDYTPAAVVAGM

SEQ ID NO: 461504 - protein, 498 aa, unidentified
MIFVGIDVAKDKHDCFILNSEGTVLADVFTIANNRIGFETLLSRIQSCSQGESKIKVGLEATGHYSYNLLGFLLDSGLTTYVINPLHTNLYRKSLSLRRTKTDRIDARTIAMMLMSDVDLKSYSNTAYHNEELKSLTRYRFDKVKERAKLKSSVARLVNILFPELEKLVSSLHIAVVYALLSNYPGASYIANANTEELAETLCTASKGRYTKSKTAEIQVAAGVSIGSKMPAKSMELKHTIALIRELDKEISEVESAIDKITSQMDSPIFTIPGIGRHMGAMILAEVGDFSNFASADKLLAYAGLSPSTYQSGQLEAAEQIRKSKTVTYSVTLKPFRKDMQCGCCGARLYWHPKSNQWFCRECGMWSKPTQAEETFNSIVEKLRWLRQNLELIHPPAGKANVQSMGTTLLDREIRQALMDAEPDADALITKILHRAELEYKFCSAGDADPATLLIQKACTEYKPTEGFPETFYKEVVSKVILYRDTHIEFKLQNGQIV

SEQ ID NO: 461505 - protein, 369 aa, unidentified
MNKFSKYVGLDVHQETIAVAVADTAGEVRYMGEIVNTPEAITKLVAQLKRSTGRLAFCYEAGPCGYTICRQLRELKQDCQVIAPSLIPKKPGERVKTDRRDALSVARLHRAGELSPVWIPDEAQEALRDLTRAREDMKHLQRQAKQRLLSFLSRHGHRYNGRSRWTQAHWRWLESIKFSRPEQQIVLQEYIDTVQACSQRVASLDREVETAAHASPVWPVIEALMALRGISLLAAVTVVAELGDLARFANAPQLMAYLGLVPSEHSSGKRERRGGITKTGNGHVRRVLIEAAWTYRHAARKTAILQRRAERTPPEVQEIAWSAQKRLCQRFRNLMARGKLKNQVCTAIARELVGFIWAIGQYVIPLTRT

SEQ ID NO: 461506 - protein, 433 aa, unidentified
MKVLYERVAGIDVHKDMIKVAIRSPGDKPWTRKTEIFEFRTFYGVLQQMARELRKRGVTHVVMEASGVYTEPVYYALAEQDFTEVAVINPAHAKALRGHKTDAKDCARLAELFECGLLRGSYIPVPELKEVRDLTRYRIKTVQARTSEIQRLGKALESAGIKLGSVASSITGTASTAMIEALIDGERRGGVLADLAIGRMRTAGKLADLSMALAGRFTDHHALLCRLHLDRIAVFDDAVDGLDKRIAGKAARWQREQGLLTSVPGFGDVVAQAWLGEIGPAPHRHFASCEKLASRVSLCPGNNISARKRKHGRTGDAGTYIKPMLVQAAWAAIRVRGRLQARYNRLVRRFGGDKNPGAKKKAITAIAHTLLKIAYQVLKSGVPYQEPGADFYTRRESPEHKQAWLERQLQKLHPGCTVTITITPPEAALPPGA

SEQ ID NO: 461507 - protein, 413 aa, unidentified
MSKLKIVYPICCGMDVHKDFLVACIATTNKSNITEYQSRRFSTFSKGLRTLCDWLAENNCRDVCMESTGKYWFPVHNILESTCNVVVTHPKFVKAIKGKKTDKKDALWIADLFKHDLVRGSFIPPPMIRQLRDLCRYWCKLTSYTTGEKNRSHNCLTVSGFKLDAVFTNIFGKSATAIIQQLLDKPGEDFDLKTLVDGRCRTPLEQIREAIEGGFVPAQADKLRIIRAHMDSLDALKQQLESKIFSLAEPYTTQIELLLTVPGISDRLTAIRILGEIGTDMSVFETSKHLTSWAGLTPQNAESAGKKKTTRIGKAGIHIKPLLVQCAITSSKSSKHPELKNKKQILKKRRGGKKATIAIARRLLTAIYHILKKGEAYNPLLYVREEKLPENRVITQEQALSLVLKMGYAIRVS

SEQ ID NO: 461508 - protein, 402 aa, unidentified
MRVLYERCCGLDVHKKSITACVLTPEGKEIRTFGTMTDDLEELVEWLKQKQVTHVAMESTGVYWKPIYNLLEAEPIDVLVVNAQHLKAVPGRKTDVKDAEWIADLLRHGLLIPDRAQRELRELVRYRRSLIEERAREFNRIQKVLEGANIKLASVVSDISGVSAQQILRALIEGTDDSAVLAQLAKGRLKQKIGELRRALKGIMGPHQRMMLSEQCRHIEYLDEAIARLSREIEERTRPFHEALELMETIPGVGRQSAEQIIAEIGTDMSRFPTAAHLASWAGMAPGNHESAGKRLSGRTRKGNKKLRACLVECARAAARTKNTYLSAKYHRIAKRRGANRASVAVGRTILEIIYSVLTRKEPYRELGADYWDQQREAAIVRQTVKRLEGLGYEVKLEKTSA

SEQ ID NO: 461509 - protein, 344 aa, unidentified
MSGVITVGLDIAKHVFHAHGVDDQGRALFSKRISRGKLLDFFAAQPSCTVALEACGGAHHWARQLTQLGHEVRLIPPAYVKPFVKRQKNDAIDAEAICEAAQRPNMRFVAVKSEQQQAAGLVFRTRDLLVRQRTQLINAVRGHLTEYGWIAPKGPSHVAELAHLIEEKRMAGSLPEAARAMFRLMLDQLASLNGRIAVLDKEIARRAREDEVSRRLMTIPGIGPISATAIAALAPPVETFAKGRDFAAWLGLTPVQRSTGGKQKLGATSKMGERTLRRLLIIGSSAVVQQASKRGAAKGSWLEQMLARKPRMLVTVALANKMARIVWALLVKREVYRAPVAANA

SEQ ID NO: 461510 - protein, 343 aa, unidentified
MSGAHEGKQVVGMDLHRRRSVVVRMTDTGERLETVRISNDPDYLRAVMARAGDAPEVVLEATYGWYWAADTLAELGANVHLAHPLGVKMFGLRRVKNDERDAADLADLLRMGRLPESWIAPPATRELRGWVRHRAKLVGLRSSVKNQIYAVLAAAGVAVSMSDLFGVAGRQLLATTLLAVESRSRVDSLLRIIEALDFEIDLYARLIAGRLRTDPGYHAIQTIPGVGPLLGAVFVAEIGDISRFQRPEQLASWAGLTPKHHESDTTVHRGRITKQGSRLVRWAAVEAVQRVPAHTRLGQTRDRVGQRRGRNIGAVAAARELMTLVFYGLRDHHIRCLTSTPAA

SEQ ID NO: 461511 - protein, 410 aa, unidentified
MDLVSAELPAKTLVVAIDPGKVSNRVLLATGEQGLIGEPVSLPVQREGIDRLCELIYASGATESVIAVEATGSLHLAWAAELERRFPGSLRLFAPSETTAARTQLGSRRFKDDDRDCAALVSLARQGRGRAHRPGILEALLDAVRHRRRLISQRKVARQHLHHQLNALCPGLSAPSGHGRALALETPTGRAVLACAVDLRGRAPSVRSLIARAPGRLTKANASWWARRWRACLPPPLDAELRAERLGRDVKRLEALKADVGAVEAQIAALLAESPGQVLTTLPGVAATRAAAFAVHALPIERFPTAEHLYSSTGLAPARYESATVRKSRAISRQAPGERRDALMAIAWGLSQHCEAFRQRDRELRGRGMRPIEARVALARHACRLCHRMLQTQQPFDQRRYARARHRRGR

SEQ ID NO: 461512 - protein, 366 aa, unidentified
MKKHTTINPSLSADVSTCTTVAVDLAKRVFQVAGEDSLGQVVYEDRIKSREGFYAFLRKLPASVTVLMETGPGAQAWARLLQTQGNPVRILPAQRVADHRSGPKNDRNDVLAILRAGRDDSISAVPVKSTSALAMQALHRARQGYVRRRTAMGNQVRGLLLEHGVAMAQGEAAINRVVPRVLEDATQPLPDLLRELIDELLGEWNQLGERIDVLTARLETAANDDKTAKRLMTVRGVGPIIATALLAKQTEPERFANARQFAAYFGLVPSQNSSGEKVRLGKMSKRGDAYLRSLTIQGAHSVLRQIRPDSEHPDDRRLQRWISRLGRKEAAVRLANRNLRILWVLLQNDQIYSRQPGNNQEVAMSQ

SEQ ID NO: 461513 - protein, 337 aa, unidentified
MTIIRIGLDTAKHVFQVHGVDENEQTVVRRQLRRGEMGKFFTKLAPTRIGLEACGASHYWARLLHELGHEVVLLPPQYIKPYVKRGKNDANDAEAICEAMSRPGMRFVPIKSAECQAELMLLGVRDLLIKQRTAVINTIRGYAAEFGVIATRGPGKWPSCCNRRMRRRRACRRWRWTCSGCSPLQLDALDVKLKLIETRLMALHRENPVSQCLVSQPGIGPIGAVSFALRVTDPKSFRSGRHFAAWLGLTPKDNSSGGKRRQGRISRQGNEALRKLVVLGATAVIRFARPGRASPWLLNLLARKPKKLAAIALANKMARTLWAMMVSGELYRRPLPV

SEQ ID NO: 461514 - protein, 334 aa, unidentified
MNTIAIIGIDLGKNTFHIHCQDNSGNTLLRKKFTRNKLMEYLTGCPSTTVVMEACAGAHFMARRVIDLGHEAKLISPQFVRPFVKSNKNDFVDAEAICEAASRPSMRFVQPRTETQQAMRALHRVRESLVRDKVKTTNQMHAFLLAFGISMPVGIAVIKRLTTVLAENTLPPYLVGLLMRLHRHYLYLVEHITEIENELEQELANDDIGQRLMTIPGVGPITASVLSSQLGDGKQYRCSRDFAASTGLVPRQYSTGGKNTLLGISKRGDKKLRQLLVLCARVFMQRIKSQSGKLAEWVKKQMERKHSNVVACALANKFARIAWAITTQHTVYEK

SEQ ID NO: 461515 - protein, 334 aa, unidentified
MENIALIGIDLGKNSFHIHCQDRRGKAVYRKKFTRPKLIEFLATCPATTIAMEACGGSHFMARKLEELGHSPKLISPQFVRPFVKSNKNDFVDAEAICEAASRPSMRFVQPRTESQQAMRALHRVRESLVQDKVKTTNQMHAFLLEFGISVPRGAAVISRLSTILEDNSLPLYLSQLLLKLQQHYHHLVEQIKDLESQLKRKLDEDEVGQRLLSIPCVGTLTASTISTEIGDGKQYASSRDFAAATGLVPRQYSTGGRTTLLGISKRGNKKIRTLLVQCARVFIQKLEHQSGKLADWVRDLLCRKSNFVVTCALANKLARIAWALTARQQTYVA

SEQ ID NO: 461516 - protein, 355 aa, unidentified
MNDAKYIGMDVHQATISVAVLDSAGKLVMEAILETKAETILQFIHGLRGSLHVTFEEGTCAAWLHDLLKPHVTQVLVCDPRKNALIKAGNKSDRIDARKLADLLYLNKLNPVYHGETGIRALKEVARSYLALTRDTTRVMNRLKALYRSWAIPCAGQKVYAQRYRSEWLAKITEAGVHRRAEIYYQQLDALRSLREQVRRDLLAEGRKHRAMKLLRQIPSIGPIRAVLLIALMQTPHRFRTKRQLWAYCGLALKTSTSGEYRIVEGQLKRSKKFLAIRGLNANHNHDLKNIFKGAATRAAAVPGPFQEFHAGLVARGMKPTMARLTLARKIAAITLIVWKKGVGFDAEHLKQQAA

SEQ ID NO: 461517 - protein, 339 aa, unidentified
MGRFVGVDLHRNSFLVCFFDAEKGEKKFRNYYLRRIREFLMDLEEDDLVAVEATVNARFFKKEVEKKVGKVIVVDPYKFKVISESVKKTDKRDAELIAFYLSKGMLPEVRMKKEEIAEVESLAHTRDKLVKLRTALKNKVHNILRMYGIETNREFLSSEKGLEQALSYEIGDTAKVELKVCIDQIRSLTKSIEEIEETLVNKGKNMKGFKNITSIKGIGEKSGTILLSVIGDINDFKSRKQLDAYFGIVPRVNNSNETIRHGRITKRGSKLGRTTLVQCTLIAIKYSKYLAKYYNKLKAKKGSGKAIIATARKLLGIIYDTLKYELEFEDFPNFVFKTA

SEQ ID NO: 461518 - protein, 367 aa, unidentified
MKKVSTVAAEPSKKISQQKLTVGLDLGDRNSWYCVLDESGQIQLEQPVRTTAKALSEVFGAMPRSRIALEIGTHSPWISRLLSALGHEVIVANARKVRLIGESRKKDDRLDAQTLARLARIDPQLLYPVKHRSVQAQADLTLIRGRAGLVRARTGLVNTARGLAKSYGERLRSCNVRHLNPEKAESLSPELQAALEPLLNAIESLSERIVEYNDRIENLAQQSYPQVALLKQIKGVGTLIALTFLLTLEDPHRFRKSRDVGGYLGLQPGRRKSGQSEPQLHISKEGDPYLRTLLVQGAQHILGPFGVDCDLRRWGLKLAERGGRNGKKRAIVATARKLAVLLHHLWVSGEVYEPLHNRDRTTVTAAA

SEQ ID NO: 461519 - protein, 354 aa, unidentified
MKYFVGMDVSLEETAICVVDETGQMIKEARATSEPDALHALLASFNLPFERVGLEACSLTAWLHGELTSAGWPAICIESRHAKAAMGAMPNKTDRNDARAIAQIMRTGWFKAVHVKTPTCRSWRSLLVARRAVLNQMRTIENVVRAILRETGLKLGTPARKDFVVRAREFVAGEKGLAMMIDPLLEILATMLREFTRLTKQVLVIVRDEPVCRRLMSTPGVGPMTALAFRATIDQPERFKKSRDVGAHLGLTPRRYQSGETDIQGRISRCGDELARTALYEAAHSLLIRSKKWSALRAWGMKIAKRRGMARARVAVARKLATILHRMWVDNTEFRFGREQAANPTIKAITVVAA

SEQ ID NO: 461520 - protein, 375 aa, unidentified
MNDITKFVGMDVSKEKISVGVADAGREPARYWGEIPHEVEYIRKLIKRLGKPEQLRVCYEAGPTGYELQRLFTSMGVECVVVAPSLIPKQPGNRVKTDRRDALRLAELLRAGELTPVWVPGEEDEALRDLVRAREDAKEDLLRAKHRMRKFLLRHGIDNPPGVRAWSPRYRTWLKGLKFSSSALQATFDEYRLSIEEIEGRIRRLESEIHEQAEKSVHAPVIKALQTFRGIKETAAVTMVAEVGKFSRFKKASQVMGYSGTVPSEYSSGAKTHRGKITKTGNNHLRRILIECAWSYRYQAAMSEAIKKRQEGQPASVQAIAWKAQVRLCKKYRRLVSKGKSGQVAVTAVARELLGFIWAAACEVEKQMTQRENAA

SEQ ID NO: 461521 - protein, 452 aa, unidentified
MVDTIYVGVDIGKTGHYAGLISTPLLDHHKVFSRCPAFAFSNSREGFEKLLHAIKIHVSRLKNAHVLMERTGHYGAALEQFLQEHGVTLYRIQAMKRYGQEKSDRRDAQALGLRLYNQIERRAPVTDEQERVHRLLPPSPVATMLRGLVKHHSELTRETVRRENKLTAICDELFPEFTQVFKKPNTLAALAIREKFPTPQDVARASLDDLCAARQWRYPSRGGLAQLQELSRVTIGTKDISRRRSLLIEQEQLIAEWRLHQTHISRLESEITDILANSREGQILLSFTGVGPVTAAVLLAAIGNIANFATIGKLRLSLGWGIRHSQTGTTFDSSKRDRAGNKQARSAIYMSVINMVTYDAAWKAIYDPLVARMCPFDVKRGEYVGKTRVIGRIAGQFIGLLYRLLKKDADLLTGLPPGSDLPAPELYSVEKHLRAIGRTHRTHAVAPSAAAL

SEQ ID NO: 461522 - protein, 364 aa, unidentified
MQVRHIFVGIDLGDKNSVARIAVDREKTERFGFVNDRRGRRRLMEEVKGRAAQVGGAEIRMAYEASACGFVLADEAQAEQIHCAVLAPTKMEKSVEQRKQKNDDRDADDVVEKLRGHVLAGNRLPMVWVPDVETRDDRELIRTRLELAEKQTKLKSQIQMLLKRYGQEKPSGLGAGWSIAYRHWLKVMAQTESGRLGAGGRQALASLLRQLNFIEDEIRQMQREVEQLSRQSRHKAFVEELTQESGVGVLTAMVYRTEIGYAGRFRRGRQVGKFTGLTPSSHESGEQTDRKGHISRQGPSRLRKVLCQASWVRIGQHEGDRRVYDAVVRRNPKKKKIAIVAIMRRLAVRLWHRMRQVELRLAAA

SEQ ID NO: 461523 - protein, 335 aa, unidentified
MSTSSNPLPRLGIDVSKLTFDACLCTPEGSTHSASFANNPDGFTKLDLWLHKHGASHTFAGLEATGPYGVLLLWHLHRQDHTVHQLNPRRVKDYARSQGRRVKTDRADAAVIAAYLKASEGLIPWQPPVQALIDLQALIRRRDDVMTALNAERSRKDTCSSLVVVASLQRQIDELKAEVARLDKAIDKQVLENTALQKSERLLRSIDGVGRMVAATILAEVPAISAFNRARDVAAFVGLTPSLAQSGTSIRRRGRMTKEGSSLLRKMLYMAALQAVKRPNNAFHKCYTAFVERGKPKMCALVAIMHKIIRIAFGVLKHDTPFVENFAKLPHQKLT

SEQ ID NO: 461524 - protein, 355 aa, unidentified
MYGLKHQKEKRSMDHFAGLDVSVKETSVCIVDETGKIVREVKVASEPEALLSVLKNPAYRFKRIGLEAGPLSQWLFSALAEAELPVVCVETRHMQAVLKAQINKTDRNDARGIAQMMRVGLYRPVHVKTLRSQKLRMLLTHRKLLQSKAIAIENDLRGTLRNFGLKVGMVGTVKFEARIKELVENLPDLAVLVEPLLVVRRVLREQFVILHRRLLAIVRDDEVCRRLMTTPGVGPVVALTYRATVDVPARFRKSKAVGAVFGLTCSKYQSGEIDWSGRISRCGDEMMRVMLYEAAQSMLHSKKWSWLKAWAMQIARRRGKKKAIVALARRLAVIMHRIWVDGTEFRWTREQAVTA

SEQ ID NO: 461525 - protein, 372 aa, unidentified
MDQHSRLFIGLDVSKLKISVAVADGERGGEVRFFGDIPSDPASVSSIVQKLAKRGAKLHFCYEAGPTGYELYRQLTEMGHDCVVVAPALIPKRPGDRVKTNRRDAVSLARLHRAGELTAVWVPDRGHEAMRDLVRAREAAQEAQKRARQQLQSFLLRHGRIYSGRSSWSLAHMRWISTLKFEHPAHFIVLKEYCQAIEDAEVRLKRLTDLISETVKSWTMAPVVEAYQVLRGVSLIAAVVFVAEIGDIRRFENPRQLMAFLGLVPSESSTGEHVKRGGITKAGNSRARRMLVEGAWAYRFPARVSRTKQAQLEGLPRTVREIAWKGQLRLCSRYRKMILAGKHKAIAITAIAREIRAFLWAIGQEVQPAHHA

SEQ ID NO: 461526 - protein, 460 aa, unidentified
MTLLGKLGSELPRRYYLSIDVGYKEHVAGVISLQAFVRGDDRWKRARCMHFPSTQAGLRKLQGYLDRFSTDHSEFFGLSEPTGGHYGATVFQYLLDQEYNMNLVENATVSHVREKIFPGLPKTDEMDTRVMNRIGYLHEAVGEEFTLCPLELPDPDSKHLLALCRDSWKLSTIVTRARNQFTQLMAVTFPELKTFFTSSVSTVVPVRLVAAYPSPALLAEATTGEVKDVLWQAGSYQHAHRASDLLALARDSSSLLPDSGRAWRLEWLTNFLLDNFQYQAQLDKRIKKLLAQREDYALIAKVPYSGPNSLGTILAVTNNADRFSNYRKYVAYTGYFAGLRKSQTIDRTKMSNRGNRDLKRAYFQIAAPLVWFDKGENPYKTLFQDRMAAGREWYKAMPFVCAALARHIYHCLKFNDPYDVGKAFRGTSLQPASEEEWLDLGANLEEKFEVMETHLCQIEG

SEQ ID NO: 461527 - protein, 390 aa, unidentified
MQTVADRSEASTAIRNNLGAIFVSLELSRSKWLITSLSPDGGEKMSKHVVRGGDVTGLLERFTQVREKARARTGKVFPFVVIQEAGLDGFWIDRVLRNEGIESHVVDPASIATSRRHRRAKTDGIDGEALVRALLAYKRGEPRVCAMVKAPTPEEEDRRRVCRERKVLIAERVRHVNRVKGLLFSQGISGYEPLRRDRRERLDTLQTGDGRPLADHLKAQVRRELDRLELLLEQIKAVETERDVLLATQQVAVPAPAAMLLGIKGIGPEFAAILWSEGLFRHFDNRRQVASYAGLAPTPWQSGSIDREQGVSKAGNPRLRTTLIQLAWLWLRHQPKSALALWFEERAKRNGGRLKKTTIVALARKLLVALWKYVTAGVIIEGAVMKASGR

SEQ ID NO: 461528 - protein, 366 aa, unidentified
MHEYNTVVGLDLSDKKANFCTLDWDSGEHLQEGKVALTKSGLKNMFGGMERALIVCETGTHSPWVQHTLEALGHAVFVADARRLRLISENDRKSDKHDAELLARLARADLDLLVAVHHRGPKAQADLSVIKAREQLVRCRAKTINAVRGIVKSNGDRLDSCAASSFTKRVREQIPKALRTAIFPLLEAIEQMTKSIQQYDRRIEHLCKEYPETEYLRTVQGVGPVTALSFILVLEQPERFGNGRDAAAYLGLVPRRDQSGDSDPQLRITKSGNKLMRKLLVQCAQYILSRGRDSELRQWGQKLAGRGGTKAKKRAVVAMARKLSVILYALWRDESDFNPFHLTKPPEREDIAEELEEASEEIAVPA

SEQ ID NO: 461529 - protein, 425 aa, unidentified
MTPAIQKQIDIHAQSETEAAAQSLNLSRIFKKMKPFPEKMDRPPLVVGLDLGRGRWHAVFQSARKSGHRDFPGMGKAQALVSAIRSEMGLLGLSDTRDVVVCHEIGRDGWWVAEYLEAHGFACVVLSADVLSGNGRAAKTDPLDAKRLAVRLGRFFDGELECDHVVLRPRPDILEGRAVSRGRAEAVTMRTRLGNQFKSILSLHMEVPPGLDIRKADVDGLRDALGRPLPPAEAEELKRLQRHFKEMDADVAVADRRMKGEMSAARQTREAGGALTRREAMLVELALLKGVGPRIAWVLVHELFHKDFSSTRQVGSATGLVAIPRSSGSSDRCAGISRRSNNRLRATLVELAWLWLRYQPGSALSRWFGERTEDGVSSRRMRKVAIVAVARKLAVALWKFLGRGELPEGATKADAKGAKGAAKAA

SEQ ID NO: 461530 - protein, 338 aa, unidentified
MQAYAGIDLHSSNNYIGIINEQDQRLYGKRMPNDLNHVLMALEPFRDQLEGIVVESTYNWYWLVDGLQEHGYKVHLANPSAIKQYEGLKHTDDKWDAFWLAHMRRLNILPEGYIYPKEDRAIRDLLRRRLLFVRHRTSHILSLQSMITRNLGIKVSGNKIKKLRGEDVDGMFNSPNLIFMAKNNIAVIRFLKKIITDIEKNVKSQVKLRKEFAMLLTIPGIGDILGLTIMLEVDNINRFPKVGDYSSYSRCVKSERISNGKKKDQNNRKNGNKYLSWAYVEAANFMIRHSVKAQSFYQKKKAERNGIVAIKALSNKICRASYYIMRDHVPFDEDMLFR

SEQ ID NO: 461531 - protein, 338 aa, unidentified
MKLYGAIDLHSTNNVTVVINEQDQVVYEKRLPNDLSLIAQQLSTYRRSLEGIVVESTYNWYWLVDGLMEKGYRLHLANTAAIQQYSGLKYTDDHSDARWLAHLLRLGVLPEGYIYPKQERAVRDLLRKRGQLVHQRTANLLSIQSLISRTTGNSISAQYIKALNIQRVDGVFPNPDLVLALKANLAVMKSADAQIEILEKAVQDRVKLRPEFRFLKTVPGIGPILALTIMLETGEIERFASVGNYASYCRCVGSQKISNGKRKGSGNTKNGNKYLAWAFVEAANFAIRFNSRIKSFYQKKKSKSHAIVAIKAVAHKLCRACYYIIKDQVAFDITKAFA

SEQ ID NO: 461532 - protein, 427 aa, unidentified
MTNSQNKKFNEVENTDAIVGIDIAKDIHYAGIILPNGREIKKAFSFHNNKKGFKSLVKEIQNVLMLMDLKTVIIGMEPTGHYWKCLARYLQEIEWVKVVTVNPKHVKDSKELDDNCQTKSDKKDCITIARLIKDARYFEPYLPEGIWAELRNMSNTRQDIVRKSNSVKCRLVATIDEYFPEYTKVFKKIDSRTSMEIIKECPFPEDIKIKGKAGLLEHIKQTVKRGYSKQQVIDIYNSAVESIGTIEGIKTAKIQLELYIEEQELLEKQVEKIEEQLEELLQETGYYENMISIKGIGIVSAAQLIGELGDLTRFESYEQIRRYAGLNLVENSSGNHKGKTSISRRGRGTLRSILYRIAFTMANKNEEMKQLYKYLKERKENPLKSKQALIAVAGKILQIIYTIVVSNAKYEATRVFNIERLEQLKAA

SEQ ID NO: 461533 - protein, 310 aa, unidentified
MEAIVVGVDVSKDRLDVHVHPSAESFAVARNAEGLDALIAKVAPLGVHAIAVEATGGFETVVAASLGAAGLPVIVVNPAQVRAFALALGKRAKTDPIDAAVIARFVEATKPEIRPLPDADTRLLADLVARRRQIIQMIVAERQRERQLPSRQLKKSAARLIKALEKELNVLDEGIDESVRGSPVWCEKEDLLKSVPGVGNVTARTLLAELPELGALSRREIASLAGLAPWTRQSGKWRGKSFTGGGRTTVRTALFMAAMVAARRNPVLKAFHQRLIAAGKPKMVALVAVARKLLTILNAILRDKSPWQTA

SEQ ID NO: 461534 - protein, 358 aa, unidentified
MHKDSIAVAYVPEERGAEVVSLGAVGPRQCDIDKLIRKLQSKGARLVFVYEAGPCGYWLYRYLTRKGLACHVVAPSLIPRKPGDRVKTDRRDAITLARLMRSGDLTSIYVPRLEDEALRDLSRGREDAMQDLKRSKRRLKSFLLRHDVRYEGRANWNPAHLRWLAQVVCPTPPQQIVFQEYLRAVTEQHDRLVRLERELQEAVKGWRLYPVVEAIQALRGVELTGAVIVMAELGDITRFDSPRKLMSYLGLTPSEHSSGERRRQGGITKAGNGHARRVLVEGAWAYRYPAKVSRHLQLRLEKLPAEVQAISWKAQVRLCRRYRQLTARGKHVNQVVVAIAREMAAFAWAIARLVPVAV

SEQ ID NO: 461535 - protein, 376 aa, unidentified
MLSIGIDVSKGKSTVCGMKPGGEIVYTPFEIQHTREGMSDLVSLLRGSGEEVRAVLESTGSYHCPVVAALLENGIFVSVVNSLRMKRFCSQSIRKVKTDRIDAMQIALYGLAYWQELQPARLPEDTYRELQLLARQYYQMTSMLIKAKVDFNAICDQVLPGMQELMNDHAGRHKLSDFVLRYRHTTHILEMGETRFRKDYCKWAEKKGYRNRERMAAHIFATAQNGIPVLPNAPSTQIVITEAIRVLHTVEASRDAILTQMQALAKTLPEYSLVREMPCIGDTLAPRLIAEIGDVRRFHSKRALIAYAGIDAPPYQSGKFCANNRHISKRGNRCLRKTGYEVMQSYVMHKPANDPIFTFIEKKRGEGKNGKLAMVA

SEQ ID NO: 461536 - protein, 340 aa, unidentified
MFTNFVGIDVSKSKFDLALIKGQDKDHVIQGVFDNTRIGIKSMSKFLEKEHNVQLSETIFCMEFTGVYCRPLTSYLVEKECNVWLEMPVNIIRSLGLQRGKNDRVDAHRIALYAYKNRDDVKLWKPQRDVILQLRDLLALRERLITSQKALTNPIEELIAMDAKNAAARVRKGCQKTLSSIEKEIEQIDKELDDIIKGDPQLKELFQLARSVPGIGKFTALFMICFTNEFSMYTNPKQLACYCGVAPFEHSSGSSVRGRTRVSHMANKVLKRMLHMGAMSVISRDPELRGYYQRKIAQGKNKMLVINAVRNKIIHRLCAVIKRGYEYQSEIIFKERLVLS

SEQ ID NO: 461537 - protein, 357 aa, unidentified
MDEYIAFDSHKHYTLMEREAVGSRRVVQRRIEHCPGAIRQALAGCRPGTTVAVEAMGSWYWIVQEIEQAGLVPALVHPRKAKLMMGMINKTDKLDVHGLNRLQRNGTLPTVWIAPADVRDLREVTRTRMVLTQHRTRLKNRLQATLSKYGLAIEDCSDNFGAKARRQWPELLARLPVQTRWCSELLWEQLDLVNRQIDRQEERLEELVEITPQIGLMRTLPGIGLILAGVTAMEIGTVDRFASAERLASYAGTTPRVHSSGDKTRYGRLRPDVNRYLKWAFIEAANSVALHASRKPERHVSQLYRRVRSRRNHAKAVGAVARHLAEASYWVLKRSEPYRDPSMGRAKEGVSAAAACL

SEQ ID NO: 461538 - protein, 416 aa, unidentified
MDVVYERCAGIDISKADVKVCIRVPGAGRRRRGEVRTFTSMTSGLLAMRDWLLAEGVTVVGMEATGIYWKPVFYLLEHDMECWLLNARHMKAVPGRKTDVKDSEWIAKLVEHGLVRASFVPPEPIRQLRDLTRYRTEVIRERTREAQRLAKLLEDAGIKLSCVVSDILGVSGRAMLEALIAGERDPRVLADLAKRRLRLKIPDLIEALTGRFGEHHAFLARAMLDRIDAATAMEVRLSARIGTALEPMRRSVDLLATIPGVSTRAAEVILAEIGVDMARFASAEHLASWAGVCPGNHESAGRQPTGRDPARQPLAQGRTGPVRDGRRPYQEHLPRRPLPTPGRPPRQTPGGGRPGTLPPDRRLAHAHPRRPTPGPRRRLLPGTHREDPGHPTAGQPAQPTRLPGQPAAHRDFLTTS

SEQ ID NO: 461539 - protein, 430 aa, unidentified
MHNKNYISVGIDVSSAFSFMTILAPDETVILKPFKITHNNKDSLERAVSEIKKAEELYSLESRTFLEFTGIYHFPLFCYLVDCGFNASIINPIITHSTKNGNIRKVKNDKIDSKGIAKLGLSKDVPVSQFPEKLVLELRSLTRKYYDLTDERSAHINKLKGDLHTVFPQYLDIFCDVTGKTSTMILRQYGTPDKILRGHKKTMIEKISKASRKGLAKASERYEKLCAAANAAKTFGCQIDSIYFNISLTLDLVEKLDSALDSILNRIRQLITFNKNEKFIQQIKLLNTIPGVGFLTAVTIMCEIGDFSAFRNPKQLFAYFGLDPEVNESGKFVGTQLHMSKRGSRIARRAIFAVALASIRTKRNGEGINPYLRKYYELKSVQKPKMVAIGAVMHKVCNVVFAVLRDEKAFELRSPEEHCKQYQRPALAAA

SEQ ID NO: 461540 - protein, 418 aa, unidentified
MGKDRRAVEVVHARCAGLDISKRDAKVCVRIAGAGRRKTVETVTTWSSMTSQILALRDHLIAERITCVVMEAPSDYWKPFYYLLEDAGFDVLLVNARHVKNLPGRKTDVADATWLAQLGAHGLVRASFVPPEPIRHLRDLTRARTAITRERSREVQRLEKLLEDAGIKLSAVASDILGVSGRAMLESLIAGNNDPAALADLAKRRLRSKIPALTEALTGRFTEHHAFLVQVHLDLVDQHTAAINDITSRIEVTIKPFRWFRDLICTIPGISTLTADVIIAETGADMTRFPTAAHLASWAGTTPGNNESAGKVKSSQTRPGNPYLQGALGAAAMSCAQHPGTYLGARYRRIASRRGPQKANVAIQHSMLIAIWHMGTNGCIYDDPGADYFNRLHPERAKKRAINQLEAMGYNVTLTHVS

SEQ ID NO: 461541 - protein, 449 aa, unidentified
MEILYARCAGFDVHKKTVRVCFLIRDEHGQSHKEFRTYGTTTEELLKLVDWLKEQGCTHVAMEGTGVYWKPVYNLLEGNFELLVVNAQHIKAVPGRKTDTKDAEWIADLLQHGLLKASFIPSAPQRELRDLTRYRTRLVEERTREVNRVQKTLEDTNLKLGDVVSDVMGKASRMILGAIADGETDPVRLANFAVGRVRASQQQLVAALTGHVDDHHRFLLHEHLTQIEHLDRAIERVTKEIARRFTPPPPQDTHPVKPDGESEKGGANTSHAAPQSSGDTAEVTWEDAVVFLCSIPGMSERSAYGVLAEIGIRMQQFPTAGHLASWAGVCPGNNESAGKRLSGKTRKGDPWLRRILIQVAHAASRQKNCYLAAQYRRIAARRGAKRAAMAVAHSILVIIYHLLSERTSYQERGDAFFEERDREATERRLVNQLTRLGYQVELQPIAQAG

SEQ ID NO: 461542 - protein, 339 aa, unidentified
MFYVGLDIHTKRIAFCVLSDQGQLVQRGQVRGLDEVLRILKALPDRFEVCYEASCGYGHYHDLLQPLAARVLVAHPGQLRLIFRAKNKNDRNDAERLAKLLYLGETPIVHVPSLQVRTWRELINCRSQVIAKRTRAKNAVRALLRGAGIAPPKQPGLWTKKGLAWLRRLELPTPSQQLRRDLLLEEIETLLRQVRRIEQQLNHQAQHTPAVGQLRSIPGVGIRTAEAVAAFVDDPERFGNAKAVGRYFGLVPCQDQSGDKNRLGHITREGAPVVRQLVAEAAWQAQRRSPAVRAYFERIQRDDPRRKKIALVATAHYLVRVMWAMLKRGTLWEEKAPAN

SEQ ID NO: 461543 - protein, 350 aa, unidentified
MKSYTTIGMDLGDRHHIAVVLDADGNEIEAARLVNTKVALKRFFQQHTGASVAIEAGTHSPWISRLLEALNCKVYVGNPRKLRLIWDCTDKSDLRDARMLAMIARLEPRLLWPIRHREMSAHNDLEVLKAREMLVQSRSKLINHVRSAIKGIGERLPKCSTASFANRVTDLIPEALQPALLPLLETIAQITEKIRALDKQVHTLALERYPQTRWLQQVQGVGPVTALAFVLTIEDPGRFAKSRMIGPYLGLTPRRDQSGQVDKQLPITKAGNSYLRKLLVNCAHYINGPFGADSDLKRHGLTIAARGGKNARKRAAVAVARKLAVLLHRLWVSEQNYVPLYRRVTVEKAA

SEQ ID NO: 461544 - protein, 443 aa, unidentified
MAMRVRNELTIQNPNAAGIDIGGSSHFVAVPQDRSDTPVREFGCYTQDLYELAAWLLFCGITVVALESTGVYWVPVYEVLEACGIEVMLVNAHGIKNVSGRKSDVLDCQWLQQLLSFGLLSAAFRPSAEVCALRTISRQRDTLLQGQACCVQRMQKALTLMNIQLTNTITDITGTTGLAIIRAIVAGERNPQELAKLRNYRIHASEAEIAKSLEGTWKEEHLFCLAQALELYDTYRQLIAKADAKLESLIAPLRRQGADAAKAAKSKKRGGKNAPGFDVRDALREWAGVDLTRIGGIDVCTALKVLVELGTDLSKFKNVKCFCSWLGLCPGTRISGGKRLSGATKRIPNRVARALKLAAQGLHHSQCALGAYYRRMAARLGKGKAITATAHKLARLVYALLTQGGEYVEQSQAQYEEKFQDRTLKYLQQKAKTLGFDLVPHAV

SEQ ID NO: 461545 - protein, 402 aa, unidentified
MKKHSNSRKKSEATTKRAKSRGPVQRDTKEVLAELVGKLKEKLDPKKAAAASAGDGHPRGELRPNLDRLTVGVDLGDQWSHYCILGLEGETLAEGQLRTTQEDFATFFQGLNAARVVVEVGTHSAWVQEVICGCGHEVLVANPRLMEGSKRRKRKNDRIDANKLARLGRVDPESLYPIQHRSREVRQDLVMLRARDALVAARTEIINTTRGLVKSMGTRLPKCSSRSFAQKGEETVPVEMREALLPLVRLAAALSADIKEYDKKIESLGREKYGHTTLLRQVKGVGPITARAYVLTLENPQRFAKSRDVGPYLGLVPKQEDSGESQPQLGISKAGDTMVRKLLVGSAQYILGPFGPDTDLRRYGLRLCERGGKNAKKRAAVRRRERRLRWRGSWRCCSTGSG

SEQ ID NO: 461546 - protein, 350 aa, unidentified
MVVVGADVHKRTHTFVAVDEVGRKLGEKVVEATTAGHRQAVRWARTQFGVELVWAIEDCRHLSARLERDLLSADQKVVRVPPKLMALTRKSARTRGKSDPIDALAVARAFLREPDLPVASHDQVSRELKLLVDRREDLVAQRTSTINRLLWRVHELDPARAPKPASLDLAKHRKLLGDWLAAQPGLVAELARDELADITRLTEAINTLAKRIGERVRVIAPALLAMPGCGELTAAKIIGETAGVIRFKSEAAFARHSGVAPIPVWSGNTAGRVRMTRSGNRQLNAALHRIAVTQIRLDGLGQTYYRHRLAHGDSSSEALRCLKRRLARVVFGHLHTDHNNRTQPSQPAAA

SEQ ID NO: 461547 - protein, 437 aa, unidentified
MLRSSTPSRLVQREAPPDRGHLLPGGGVMDQLIERCCGLDVHRDTVAACVRVPGPNGKRQQEVRTFRTTAAELLALRDWLEAHRVTHVAMESTGVYWKPVFYVLEEAFTCLLVNATHIKQVPGRKTDVKDSVWIAQCLECGLLRGSFVPPAPIRELRDLTRHRRVLIQERTRAANRLHKLLQDAGIKLASVATNILGVSGRAMLEALVHGTTDPEVLADLARGRLRKKLPALRQALAGRFRPHHAFLVSQLLAHVDYLEEAISMVSEEVEGRLAPFTQHLMQLDTIPGIDKRTAEVLIAELGVDMSCFPSDRHLASWAALCPGNNESAGKHRSGKTRRGNRWLRTALVEAAWAAIRVKDSALGARYRRVMRHRGHKKAVVAVAHAMLRAVYHLLAEATVYREPGADYYDRRHAERVRRRAIQLLERQGYRVVLEPAA

SEQ ID NO: 461548 - protein, 424 aa, unidentified
MELLHERAAGLDVHKDSVVACVRVMSGGKVKRECRTFDTTTTGLEALRDWLISFGCTVVAMEATGVYWMPVFKILDDEDAYELIVANARHVKGLRGRKTDMNDATWLADLAAHGLIRASFVPHEDFHELRTLMRSRKQFVREQTGHVQRIQKTLTEANIRLDSVMSDIMGFSGRRMIEAMIEGVSDPDKLAALGTRGLKATKEELRAALHGRLTDHHRFMLQLHLKQYDAFEETILLVDREAEARVARMDKDVKDKEAALSALIVLLATIPGVSRLSAMTILSEIGRDMSRFPTAEHLIAWAGLCPGQNESAGKRRNGRLRKGAPWLKTMLVQCAWAAKRSKNSYYKAQYYRLKARRGSQKAICAVAASILTAIYHILKDGVPHEDLGVDYFDKRKPEAKVKRLVGQIAKLGFEVTLKPIAKAA

SEQ ID NO: 461549 - protein, 366 aa, unidentified
MKKIITVAKNRNEIFKQQQLTIGVDLGDRISRYCILDETGNVILEQSVPTTPKGIQQVFSKISRCRIALETGTHSPWVSRLLTQLGHEVIVAHAHNVRLIGESTRKDDRLDARTLARLARIDPELLGPVRHRSAKAQIHLTVIRARATLVSARTALVNAARGLTKSYGERLPKCGTEQMNREIAKGLSPELRDVLGPLLGEIESLNERIAEYDQRIEQIAKEVYPEVVLLKQVKGVGTLIALTYVLTLDDAHRFRRSRDAGCFLGLRPGRRNSGMSEPQMHISKEGDAYLRTLMVQGAHYILGPFGQDSDLRRWGLKLAARGGKNAKKRAVVALARKLAVLLHRLWVSGEVYEPLRNSHKAMRAVA

SEQ ID NO: 461550 - protein, 366 aa, unidentified
MKKTSTDRVNGNMIFKGHQLTIGLDLGDRWSFYCVLDEAGQVLLEQKLPTTPEAMKQTFGKIPGSLIALETGTHSPWVSRLLSELGHEVIVAHAQKVQLITKSNRKDDRHDARTLARLARIDPALLGPVRHRSAQAQLHLTVIRARAELVSARTALVNAARGLVKSYGQRLPKCGTYQVSEKLAEGLSAELREVLVPLFKEIASLNERVKEYDERMEKIAKEVYPEVGLLKQVKGVGTQIALTYVLTIEDPYRFRKSREVGCFLGLRPGRRNSGESEPQKGISKEGDRYLRTMLVQGAHYILGPFGEDSDLRRWGRKLAERGGKNAKKRAVVAVARKLAVLLHRLWVGGEVYEPLRNSQKAMREVA

SEQ ID NO: 461551 - protein, 340 aa, unidentified
MQISTIGLDIAKNVFQVHGVDGAGRTVLNRKIRRDRLLPLFKGFEPCLVGMEACATAHHWARELTALGHQVKLMPPAYVKPYVKRHKNDAADAEAICEAVRRPTMRFVPIKSADAQSILMLHRARYLLVRQRTAQVSAMRAHLAEYGVVAPRGIAHVRDLLALLESGDARLPDLARQTLLLVAHMIDALSQQIRKIEIELLAWHRTNATSRRLETIPGIGFITATALAATVGDARAFRSGRQFAAWLGLVPRQNSSGGKNRLGGISKMGDRYLRHLLVVGATAVVRYTKRKATAVSIWAHKLLERKPARLVTVAVANKMARIAWAVMARGETYRTASVPA

SEQ ID NO: 461552 - protein, 344 aa, unidentified
MKVTTLGIDLAKNVFQLHGVNEYGKTVIKKQIRRDQMAEFFANLPACLIGMEACGSAHHWARKLEGFGHTVKLMAPQFVKPYVKTNKNDAADAEAICEAVARPNMRFVPIKNIEQQAVLALHRVRQGFVKARTAQANQIRGLLSEFGLIVPQGIGYIASRVPELIEDAGNELPGSFRMLIERLLDHLRALDRQVVELETQIVRWHCQSAASSKLAQVPGIGPITASALVASLGDAKNFDGGRQVAAWLGLVPKQHASGGKQKLLGISKRGNTYLRTLLIHGARSVIYRAQNKPESCRWINGVVSRRNKNVAAVALANKNARIVWALLAHEREFRPDYTTAKAAT

SEQ ID NO: 461553 - protein, 342 aa, unidentified
MTYVGIDQHRKFSVFAVMDKKGNLISQKKIDNRKEDKIREFLAPLKQPINAVLEAGRSWYWLVNLLRKEGVKVTMANPLKVRVIAEAKIKTDTIDAKILAHLLRSNLVPEAFIPNQYQIETKELLRYRVTLVRMQTALKNKIHAILAKHNIHPPMSDLFGRQGRRFLESLTLRPRYRQILDEYLALLDILKEKILTVNNQIRAQVLQDKEASLLTTIPGIGYFSALTIVSEIGKISRFKTSKKLCAYAGLVPSTRQSADKVYHGKLTKQGSPYLRWVLTEAAQKAVVKDPGLRAFYLRILKRRGKPKAKIAVARKILTICFRLLTDKRPYRIQRGTDILPGH

SEQ ID NO: 461554 - protein, 318 aa, unidentified
MAQTSPHVGIDVSKARLDVALYPESDRFCVDNTPEGWAELARRCGQIGAVRLGMEASGGYEHGVMHALQERGFSVHLLNAKRVRDFAKALGRLAKNDRIDAAVIAQFVAQIRTRPLPPRDHDRERLVATLRARRQFTEQLVALRHQANGRADPLLARLGKTIAASLQAAIRAIDARMAEIVRANPVMARRHQVLRSAPGVGPVLACTLIAELPELGTISRKRIGALVGVVPYDFDSGSMKGRRCIWGGRNAVRDVLYMAALVACRHNTRMREARANLDARGKPPKVALVAIMRKLLTTLNAMLRDGTPWNQPTAANPA

SEQ ID NO: 461555 - protein, 355 aa, unidentified
MNQDKYIGMDVHQATISVAVMDSSGKLIMECILETKAATILEFIAGLRGTLSLTFEEGTSAAWLHDLLKPHVSHLVVCDPRRNALLKDGSKSDRIDARKLAELLHSNKLHAVYHGEHGLRTLKELGRSYLTITKDLTRVMSRIKALYRSWAIPCSGATVYARRHRAAWLAKILGPGVRLRAERLYQQLDLLQPVRQEARRDLLVESHKHHAVKLLRQIPSIGPIRAALLVALLQTPHRFRTKRQLWAYSGFAVETHDSGEYRFVRGKLVRNRERITVRGLNHNHNHDLKNLFKGAAISASTRPGPLCDFYVARVEKGMRPTMARLTLARKMVAITLTIWKKGVEFDAKPLNRQAA

SEQ ID NO: 461556 - protein, 427 aa, unidentified
MAGENFWVGIDWADQTHQVCCLDNQGKISWEQQVLHQQADIKRLIQRFQGLKGQVHIAIERAHGLLIEAILAAGLTIYPINPKQAHSWCQSLSVNAAKSDPGDAYTLAEGLRLFHPHLKPLAPEDPLTRELRLLCRDEVTLIQERTALVNRWQATLKEYYPLASEWFSEANCQTAWDFVLEFPTPVTARQARRGKLTGFLKKHHIGISPLWQKRIDQVQTSQNWQADPATERAKSLLAVSISKQLRTLEANLKTYREQIELLFAQLPDKDIFSSLPGAGSKIASRLAAEMGQDRNRFPNDMSLLCHAGVVPLTSASGKHRSVKARWGCNKNLRNTVHLWAFLTLENCEWARAFYDQARQVGQSHATALRNLGRKWLKILRRMWQDHRTYDEQKYLSSLKKHGSHLVKLIKPFPTVEQTRNSMITVEV

SEQ ID NO: 461557 - protein, 378 aa, unidentified
MTKIMRYIGMDVHAETIAVAVVDEDGTERDVGVIPNRPEAIRKCVKKLGQPEELRCCYEAGPTGYVLYWQLVRMGIECTVVAPTLIPTKAGDRVKTDRRDARKLARYLRSGDLTAVWVPDEAHEALRDLVRARQAAKRDEKRARHRLQKFLLRHGQRPPQGVKAWSALHRGWLQKLTFEQATLEVVLREYLHEVLHGEQRVERLDAAIEQAVEGAPETIRAVVGALQGLRGVRKVTATAVVAEIGQFSRFPHPRQLMGYSGAVPSEFSTGGPGNHQRGGITKTGNAHLRRLLGEAAWCYRFRPAVGYPLKQRQQGLPAAVTEISWKAQVRLCNRYRRMVGRGKIKQKVVVAIARELLAFMWAIGVEVEKQQEQTRTAA

SEQ ID NO: 461558 - protein, 421 aa, unidentified
MLAVGIDWAESFHDVALGRPGEGVVEQFRVEHSVAGVARLVARCLELEPDPAEIRVVLETRHGVLVETLLDAGFTLLPINPDLVARRRGPAKKKDDAEDARICCLIALDQFMNLRKLIPHGDLAGELRAIARDDERAARDERRLLNRLRTDLLATFPAALTIAGDDLSSPVILKMLASWPTHTQLAELDHDAVESFARSARHGWPQRFATHVRDALAAEQLPARDYLVRAKATTIALTATQLLALREARRNWERRMGELLLGAPREGRAKQPRNPNPGKAVPGGEIYLSFPGLGDRLAARIAGEIGDHIEQFDTPNALQCYAGTAPVTRRSGRSELVIARRLAHNRYLGAAVHQWAFCSLRRSAWAREFYDAKTAKGKSHHSALRALANRWLELLWHCLTHNVRYDESTHIRNRHNTQPAA

SEQ ID NO: 461559 - protein, 387 aa, unidentified
MNNAMGAKMQTIKTKAGVDVSAKTLRAVRRGGTDDEEREFSNDAAGHRELLKWVGKSARVCMEATGVYHLQLALLLRRAGVEVMVVNPRVAKDFARALGNRSKTDRVDAWTLLEYVDRMEFLAWEAPSQAVLELRELGRRMGELVQELVVEKNRSHAKGASRISKFVMADVKAHVAQIEKRIKQVEAAAMQVVQGDDDLRKRFEILRGVRGVGRRSAIQLLTELAVLDPTMTVKQLVAYAGLDPRSYESGTSVHKTVRISKTGNARLRAILYMNALSAIRHDRGARLFFAGLVARGKKKMQAIVAVMRKLLHGIWIVQQRRVTFDSSILFAASLAKAESSDSAVAAIQPEPSQSHPKGRSEAEELRQQLDTGSAQATRSPRKRSKAA

SEQ ID NO: 461560 - protein, 355 aa, unidentified
MEKAYDGRQVVGMDLHRRRSVLVRITEDGRRLGMARITNSPEELRAQIARAGKSPKVVLEATYGWYWAADALAAAGAEVHLAHPLGVKAFSYRRVKNDERDAADLADLLRMGRLPEAWIAPPRVRELRELTRYRHKLVGLRTSCKTQVHAVLGKLGIPVGYSDVFGKAGSAWLDELTLPQPYAGKVTSLRQLAGQLTTEIAMLSRVIADLLADHRGYQVIQQLPGIGPVLAAVIIAEIGEVTRFKNAGQLCSWAGLTPRHRESDTKVARGHVTKQGSRLLRWALIEAIQRIPADSVIGSVKAAIVARRGKEARNIAKVAAARRLLTLVYYGMRDGQIRCLTAGQPPVTQPPARAA

SEQ ID NO: 461561 - protein, 350 aa, unidentified
MNKVTTLGIDLAKTVFQLHGVDLTGKVVWRREVRRAQLMKFVAQLEPCLIGIEACGGANYWARRFAEFGHQVKMMSPQFVKPYRKSDKNDRNDAEAICEAVTRPSMRFVAVKSVEQQDMLTMHRVREGLMKERVALINRIRGSLSEYGIVIAKDVSNLRRELPGILEDAENELTAVARQLFSELYEDLSAREQRIRQLEHSIRALGSRHDVVRRLQTVPGIGYLSATALYGTVGDAKHYRNGRQLAAWMGLVPRQSSSGGKQRLLGITKRGDKYLRKLLVHGARSITTRAERTPRPPDRWLNELRERRGKPRSYVAQANKTARIAWAIMAKGEVYRAPAAALEASAAVAA

SEQ ID NO: 461562 - protein, 387 aa, unidentified
MKKNTTTKKSPKKASAKGHNQQIRQLAAKQRLTVGIDLGDQCSRYCILDEGGNVVSEDQVPTTKAGLDSLFAKMPASRIALEVGTHSPWVSRHLAAMGHEVIVANARQVKLITQSVRKNDRIDARQLARLARVDPKLLSPIRHRGEQAQRDLAVIRARAELLAARTQLINSARGLVKPFGERLKPCDADQVTAGLGESLSEGTQAAIGPLLQTIETMSEQIGKYDEQIAEIEKRYPETKLLRQVYGVGPLIAMTFVLTLDDAGRFAHSRDVGPYLGLTPKEQASGNSQPELGISKAGDGLLRSLLVQGAHCMLRKGAPESDLRAWGLGKMGSGGKRAKKRAIVGVARKLAVLLHHLWATGEVYDPQYNRKAAEAAAAKAQGKGKVAA

SEQ ID NO: 461563 - protein, 404 aa, unidentified
MNAVGIDVSKGKSTVTIRRPGGKVVLAPRDYKHNRSAIDALINEIKGLEGETKVCMECTGRYYEPMATWLTSAGIFVSTVNPMLIKDFSDDSLRTPKTDKADSQKIARYTLDRWDKLKQYGLMDETRNQLKTMNRQFDYYMEQKTSMKNNLISLLDQTFPGANDLFTSPPRADGSQKWVDFVYTYWHVDCVAGKSLDAFTEHYRNWCSRKDYGFSAKRAREIYEISKDLIAVLPKNGTTKLIIHNAVDQVNSISKTVETLRSKLYDTAATLPEFPIVMAMDGIGPTLGPQLMAEIGDVTRFKHRGALTAFAGVDPGSNQSGQYAQKSVRTSKKGSPHLRKTLFQVMDGLIKRSPADNDVYLFMAKKRAEGKPYYVYMTAGANKFLRIYYGRVNEYLNSLNQETQ

SEQ ID NO: 461564 - protein, 348 aa, unidentified
MRGAVHMQITTIGLDIAKHAFQVHGIDAAEKVVVRKQLRRSQVLAFFKALPPCLVGMEACASAHYWARELTRLGHQVRLMPAKDVKAYVKRNKNDAADAEAICEAVRRPTMRFVQIKSVEQQGRLMLHRTRDLLMRQRTQAINALRAHMAELGIVAAQGREGIKELLTIIASEEDARLPADAHTSLVVLAAQLQALQTMIRSIEKRIVVQHCANEASKRLQTIPGIGVIGAAAITATVPDPEVFRSGRDLAAWIGLVPREDSTGGKHKLGPISKQGDQYLRRILVVGAHAVLKRARLHPEQYPWLTQLLARKPFRVVAVALANKMARVAWALLAKGGTYRAPSLAAAT

SEQ ID NO: 461565 - protein, 369 aa, unidentified
MEKDTTYVALDDSKRKIVVGILRSGDTQPELREIANDPRQIRALFERLKREVAVAACYEAGVSGYDLHRQLIALGVAGAVIAPALTPRRPGQRIKTDRRDAAKLVRLFRAGELTAIHVLDESEEAVRDLVRCRDDIRRDVLRWRHRVLKLLARHGRACLTGKNWSQAHWRWIREQRFDLPPLQRAFEATLFALEQALARQAELDKELEAVAATASYREPVGWLRCFRGIDTRSAIILLAEVVDFQRFRRPRELMAYLGLVPSEYSSGESQRRGALTKAGNSHARRILVEAAWHYRHRPTIGRALATRTHGQPDEVVAQAWRAQQRLHRRYRHLVGHGKRTPVAVAAVARELVGFIWAAMTRHESRRAAA

SEQ ID NO: 461566 - protein, 338 aa, unidentified
MNIVFLGIDLAKNVFQLCGLNQAGKPVYTKRTGRKELLQTLANIPACLIGIEASTGAFYYWQREFEKLGHKVRVISPQYVKPFVRGQKNDGNDAQAIVVALMQPTMQFVPPKSPEQQDIQALHRARQRIVNHRTATVFQIRGLLLDRGIPIGSAVSRARRAIPLILEDAENGLSSRMRRTIAELYDLFNDPGRRIHFFDKEIEIVFRQSEACQRIAKVKGIGPETATAVVAIGKGTEFKNGRHFAAWPGLVPRQHSSGDRQVLMNMTKKGDKHLRTLFIHGARAVVRVATNNNDGHMNQWVNRLKERRRFNKTTVAVANKNARIIWSMLRNDTGYQVV

SEQ ID NO: 461567 - protein, 383 aa, unidentified
MKAVCGLDVHKDSVYLCILSEFGELIEKVFGVLTYELEEMRTLMLHHHVVEVSMESTSVYWIPIWRVLSPHFKLNLANPYFIKQLPGRKSDVKDAQWIAECTMKELIRGSFVPPETIQQLRQYDRRIFDLNEEIVRKLSKLDAVLQRCNIRLSNYVSNVDSKSYKAVVRAISQGITDPEELVKLIHGRIIKHHGMDVITASLKGVVSLAEIDMISQLRDELDMAEAHKEKCQARMLEICEREFPEELKRLQTIPGIKERAATSLIAEIGTDMNKFETANHLASWSGLKPRNDESNKKIKSRSITHGNVYLRKTIIECAWAASRTKDCFFSRFSYHQTQVRKKNKMKVLVAVARKMLIAVWHVLHDNTNYIDFTTDRKTSRTRG

SEQ ID NO: 461568 - protein, 338 aa, unidentified
MFYSGIDQHKRTSVITTLSDSGACVRRATLPNDRALLTHYFRQLPGEHRAVVEATGRWYWLRDLLVPLGVDLRLAHAKLLKAIAYAKVKTDAVDSLTAAQLLRAALVPEAHMIADHLRGPRDVLRTRLTLVERRVSCANSIDRLLEKFNVPAVEQLPPLYQLQAGAHQAQAELLASQIKELEQSIQGELLETAAVQRLLWIPGIGRLLAFTIALEVGDIQRFPSVRQFWSYCRLVPGAADSAGRQRHRPSKDGNRYLKLAFSHATIRAIQHYPEIRQWYQRWKRKKPLRVARALVAKELAQSVYHVLKDEVDFNQLFKDTPLTQRKKEKWPRRASPSA

SEQ ID NO: 461569 - protein, 396 aa, unidentified
MNRIWAGIDAGKGHHHCFVIDGEGTKLLSRRVANDEPDLLQLITDVLALGDEVIWAIDLADGGAALVIALLLNHDQEVLYIPGRTVNRATAGYRGEGKTDARDAHVIADQARMRRDLQPIRPGDEAIIELRLFTGRRADLVCDRTRAVNRLRGLLTGIFPAFERALDLGNHGPLVLLTGYQTPAAIRRLGASRLEQWLRNRKLRWCGALARTAMEAAERQHTSVAGETTVAVMVATLAREVIVLNEKISEIDRQIEVSFRAHSQAAIVASMPGIGNLLGAEILAAIGGDIDLFGSPDRLATYAGLAPAPRDSGKVSGNRHRPKRYHRRLQRALFLAAMSSITCCSESRRYYDRKRAEGKRHSQAVLALARRRVNVLWALLRDQRHYELTPPVATAQ

SEQ ID NO: 461570 - protein, 409 aa, unidentified
MHVLHERCCGLDIHKKSIAACRLTLGPDGRPKKEVQTFGTMTADLEDLARWLEHAQVTHVAMESTGVYWQPIYNLLEERFTLLLVNARHIKAVPGRKTDIRDCEWIAELLQHGLLKGSFVPDRPEREVRELTRYRTSLTDERSAEVNRLQKTLEGANSKLSSVATDIMGKSGREMLEQLVAGTTAAAVLAELAKGTLRNKIPELERALAGRFGPHQRFLVAQQLAHIDFLDETILKLDQEVAERQRPFEQAKERLQTIPGFGRRATENLLAEIGMDMTRFASAKQLASWARMCPGSEQSAGKRKSSAIGQGNPWLRRTLVQTAHASARTKTYLGAHFQRLARRRGTKRAAIAVGHSQLKIVYHLLRLPVVYNDLGPDYFDRRDSTALQRRLVTRLEHLGFEVALKPRPA

SEQ ID NO: 461571 - protein, 374 aa, unidentified
MSSDGITWVGLDAHKKSIHVAMLVPGREEPVSWQEANEESAVRRLARRLNREGPGEVRACYEAGPLGYTLQRELEAQGVICEVVAPSLIPIKPGERIKTDWRDARKLAEMLRSGMLTAVQPPNEADESLRDLCRGRDSVRQDLARSRHRMSKFLLRRGSRYHDTQRHWGVRHMKWLRPLRFEHAAAQAIFDHYLLTIDHLDERQRQVDAQLGLFGSQEPYCQPVAWLRCFRGIDTVTAVSLVAELHDFRRFRSARSLRAYLGLVPSERSSGEQRRQGSITRAGNHHVRRLLVEAAWHHRHRPVLSQPLRKRREGQPAHVIAIADRAQERLHGRFIRMTRRGIHYNKTVVAMARELVGYLWATLYPRETEAPPSA

SEQ ID NO: 461572 - protein, 349 aa, unidentified
MRFYNGQHQHYCGIDLHAKTMYVCLLDREGQVLVHQNLRASPADFLATIEPYRNGLVVAAECMFTWYWLADLCGREGIPFVLGHALLMKAIHGGKAKNDRIDALKIATLLRGGMLPQAYAYPAGMRATRDLLRRRLHLVRKRGQLLAHIQMTSHQYNLPPLGKRIAYPSNREGVADHFGDPVVRKSIAVDLALLDRYDDLINDLELYLVRRAKQHDPNAFHRLRTIPGVGKVLALTILYEIHDVKRFNRVQEFASYARLVKCVRESAGKKHGTSGAKMGNVHLKWAFSEAALLFVRHCAEGKQMLARLEKRHGKGKALSILAHKIGRAAYYMLAREKAFDVQRFAATAN

SEQ ID NO: 461573 - protein, 465 aa, unidentified
MGKGSGNGTTRGDRKRNARRERLRGLLPRDGAVIGIDLAEDKQALAVIDHDVRVLARKTVKVKAFRLGQALDWAAAQAKVKGFERVTVACEPTGPRWMQVQRLCAERGLPLVCVQPLVSHIAREQQDYTTHKTDESDCVLIGRLAAELHCYIPEELDETWAHLRHLGRRRVQLITAATASVQRIRDFLSVAWPTVTEACAGPFESVTWLAALQVVTARCGGDPARLASTGVEEFTALVRGAVPGWGGKKGWGRICGRVFAALTDTEGVVAWSRRGLLRRVADELADLQRTRAQLRAVAADMVMVLGELGLSRLGDIPGLTAVGAAAILAETGDPRRYDSSSSLVKHAGLSPSENASGAFEGQAHISRRGRPGLRLTAWRAVWPMLQFNPVLAAKYAALTRAADAAAADAGSQRARAAAAAARARRAKARVACAASLLRWIYSMVVHGTSWDAAVASGAACRPEAA

SEQ ID NO: 461574 - protein, 387 aa, unidentified
MLLDHPTDGPAAIRTQFGAIFVSLELSRSNWLVTSLSPGKGEKMSKHGVTAGNIAELMKLFAELKRRAQARTGESYPIITIQEAGLDGFWLHRVLQQEGVESHVVDPASIATPRRRRRAKTDRLDGETLLRALLAYKRGEPRVCAMVVAPSPDEEDRRRLCRERKTLIAERIEHVNRIKGLLFAQGISDYAPMRGDRRARLEALRTGDGRVLPAHLKAQLRRELDRLELLLGQIEAVEAEQDALLAAAGQPATGSAPDPVTMLLALKGMGPNFAAVLWSEAFYRQFANRRQVAAYAGLAATPWRSGGIQREQGVSKAGNPRLRTTMIQLAWLWVRHQDQSALTQWFKAHSDRGRKRAIVALARKLLVALWKYVTAGVVIEGAVMKIA

SEQ ID NO: 461575 - protein, 316 aa, unidentified
MTNRKSAEAGVNVGVDIGKEYLDFHIHERDVYWRSDNTPDGIRYSLNRISRYQVARLVMEATGRYELLLADAAFERKMPVIIANPRAIRRYAGAVEQLAKTDKLDAALIAEFAARIQPKPSRSQSKNLREIRDLLARRRQLMNMRTRELNRQSIMGDGVLASTYRRLIKQLDKEVEWVDQKLNAAIEKESAWDEKKALLKSVPGVGDVLVHTLLGDLPELGTLNNKQIAALTGVAPMNRDSGKLRGKRRIRGGRSTVRVVLYMATVSATLCNPAIKAHYQNLVAQGKHKKVAITACMRKMITILNAMVRDGEPWAA

SEQ ID NO: 461576 - protein, 415 aa, unidentified
MALKIVYNICCGIDIHKNFVVACIAKTDMQGVTTYERHHFSTYTKGLKQLLKWLLDRNCKDVCMESTGKYWIPVYNVLEHDCSIVLAHPKYVKAIRGKKTDKKDAKWIADLFKHDLVAGSFMPPADIRQLRDLMRYRFKLTCFKSSEKNRYQNCLTVSNIQLGNVVSDTFGKSSQKIIAKILENPDDTSFDIGSLIHGSMKNKLPELELAIDGYITPEQAAKLKIIKEHFDNLEARKAELEELILALANPYQQEISIILTAPGFKNTFTAIGIISEIGTNMEAFPSAKHLCSWAGLTPANNESAGKKKSVRVSKAGCYIKPLLVQCANAAIKSKKHPEIRGRYLRIKKRRGHKKAIIAIARMLLTALYHMLKNGENYNSDLYQKSDILPTTREITVEQAILMAQFQGYRIKSATD

SEQ ID NO: 461577 - protein, 321 aa, unidentified
MIVSDSLKFVVGMDVSKDRLDVATWPESASGVSQFSNDPKGHDQLIAHLQKVSPRLIVLEATGGYQRSVVAALAAAGCPVVVVNPRQVRDFARAVGILAKTDALDAAVLARFGASINPTLRPLPDAQATTFGDLLARRRQLVELHGAESNRLAQAVAPKVKASIQAVLKVLKKQIESIDDDLDGLIQQCPCWQEKETLLTSVPGVGTQTARTLLACLPELGAISRQAVAALVGVAPLNRDSGTLRGKRSIWGGRKVVRTALYMATLVASRHNPVIKTQYQKLLAAGKSKKLALVACMRKLLIMLNAILRTKQQWRPVHATS

SEQ ID NO: 461578 - protein, 299 aa, unidentified
MGKYSEAFVAFDVAKRKHAVAIAEGGRTGEVRFLGDVENSPLPIERTIKRLAGRYDRLHVCFEAGPTGYGLYRQVQALGHDCLVVAPALIPKRAGERVKTNRRDAVTLARLHRAGELTGVWAPDPAHEAVRDLVRAREAAADDLRRKRQRLLSFLLRHSRIYNGGGHWTLAHRRWLASQKFDHAAQQIVFQEGVDAIEDALVRLRRLEKQLMLIVPEWSMAPVVEAYQAMRGASFLVAVTFAAEIGDVRRFDTPRELMSFLGLVPAESSTGDTIRRKGLTLAGNRRARRALIEAAWTYR

SEQ ID NO: 461579 - protein, 334 aa, unidentified
MGQITTVGIDLAKNVFALHGIDEEGVAVLRRGVGRTRLAELVAALPPCLIGMEACSGAHEWARRFERFGHTVRLMAPKFVAPYRKSGKNDGNDAEAICEAVRRPNMRFVPVKSAEQQSVLTLHRVRQGFVEERTATINRIRGLMSEFGIVLPQRAVEVRRGAAAAAEALPALARRGIEDLLAHLRTLDARIGEYDRELERLARSEEAPRRLMGLHGVGPMTALATVASVGRAHEFANGRQFAAWLGLVPRQWSTGGKPRLGHITKRGDPYLRTLLIMGARSVLQLATQRTDRLSRWALALKARRGYHRACVAIAAKNARIIWALLARGEAVRSA

SEQ ID NO: 461580 - protein, 347 aa, unidentified
MEEVITIGLDVAKGVFHAVGRDACGKKLFSRQLRRGQVLGFFARQAPCVVAMEACGSAHDWARRLEAVGCRVKLIAPIYVKPFVVRNKNDERDADGLSQAAQRPDMRTVGIKSAEQQARASLHRVRDLMIRQRTQVMNQIRGVAAEFGLTTRVGRPGLKDLIAQAKAADLPAPARQAIAVQARHLDQLDEAIADLTAQVVRQAKASADARRLMTIPSVGDVVADAFLARLPDLSTFKTGRDLAAWLGLTRLDRSTGGKPRTSGPISKKGDKALRRLLVLGATAVIARQQRSGRLDPWIAGVIRRRCFRVAAVALAAKTARIIWALLVRGGTYQSGHQPIPGPIPAAA

SEQ ID NO: 461581 - protein, 371 aa, unidentified
MKEYSTFIGMDVHKNSIDIAIAEDGRNGQVRHYGKIDGTLCALDKVVRKLVSKGNQLHFVYEAGPCGYQIYRHLTAQGFDCDVVAPSRIPKASGNQIKNDRRDALMLARLHRSGDLTPVYVPMAGDEAIRDLTRAREDAKSDEKRSKQRLLSFLLRSGIRYTGGSPWRIAHMRWLSDIKMSHRSQQIVLQEYIGTVNQCKERVQRLTEQIQQLLPNWQLFPVVQALQSMRGVSTIVAATTVAEIGDLKRFQTPSELMSYLGLVPAEHSSGPKIKRGSITKTGNGHVRRVLTEAAWSYRLPARISRALLKRQEDLPESVCDIAWKAQLRLCSRYRHLWNKGKAKQVIVTAIARELCGFMWAIANEIEAPANT

SEQ ID NO: 461582 - protein, 457 aa, unidentified
MSQTKRPRKLRDFSTVNPAAAAIDIGAKIHVAAVSPSRDKEPVRTFRTFTDDLYRLADWFAGCGIKTVVMESTGVYWIPVFEILEQRGFQVMVVNARDAKHVPGRKTDVSDAQWLQRLHEYGLLRASFRPQAEIAGLRAYLRQRERLLDYAAAHIQHMQKALMQMNLQLHHVVTDVTGVTGMTIIRAIVAGERDPNILATHRDRRCHASVETVCQALVGNYREEHVFALTQALELYDVYQTKVTACDKQIEAILKRLKKNAAPPASKLLPVRQRTRQPNAPAFDARAALHAILGVDLTQITGLGPSLALELVGECGTNLAAWPSAKHFTSWLALAPHNKISGGKVLSSKTRRTSNRAASLLRLAAGTVGRTDTALGAFYRRLSARVGKAKAITATARKIAVLFYNTLRHGMSYADPGATYYEERYRQRVLHNLQRRAKSLGFALTAVPPDPIQAVVS

SEQ ID NO: 461583 - protein, 386 aa, unidentified
MQKLNDLSRCLTPLEPDSTLIAVVEMSLSSWLVAGIVPGVERQPLKKLAVDESVLLKLLHRWREEAEKAGYMIKRIAVAFEAGRDGFWLARWLRARDIEVHVIHTSSVAVSREHRRAKTDRLDSELLKRAFLGWLRGERDHCKMVAIPTIKDEDGKRPNRERESLVGEQSRIINRIKATLVRLGIRGFNPKLKKAAERLEGLRTPEGELIPPNTLSELYRDMERRRLVRDQIRQIESARLDRLEHAPGEGAHAMVRLLARVMGIGIETADMLVQEVLSRNLRDRRAVARYAGLTGSPDESGKKRREKGLARSGNARVRRGMIQLAWRFLLFQKDSALAQWFRARTENARGTRKTMIVALARKLLIALWRLVREGVVPDGVILRPAQ

SEQ ID NO: 461584 - protein, 341 aa, unidentified
MNKPSTICIDLAKNVFQVALFNQHGKLKSNQKMSQAKMVTFIAQYPASMIYMEACGSAHYWGRYFQNNKHHVHLLPPQIVRMYRAGNKNDANDALAIYEAAQRPGIHFVSVKTTEQQDIASVLHLRESYIKQRTAVANRIRGFALEYGIKFPQSITKLRALLPLELEDPNNGLTSSARFVLHQLLNQLIELDKPIQEVTDYLIAYAKQIPACQLLITLRGVGWIVASALYARMGDASAYKCGRDASASIGLVPAHSGSGGHNKLLGISKKGDRTLRAVVVHGARSVVSNIKDKSDQLSCWLRALLERNHFNKVVIALANKTVRMACAMLKSNQPYQEKLPA

SEQ ID NO: 461585 - protein, 374 aa, unidentified
MAEQIFKYSVGCDISKDAFNVCILEVSQDMQSKVKASHKFKNETKGFKEFDAWVKKHKRHDVPTGFYMEATGVYYENLAWYLFEQEYNVFVLLPYKTKHYLKSIGIKSKNDKIDAQGLAQMGSEQKHNPWRPHSKSIYALRALTRQHENVTKLKTSLQNQLHANEHSAVRNATVKKQLNATIRLLEKQLDELAGEISNLIDADEKLNQKYCQIESIRGISKLSWATIIAETSGFETFENQRQLVSYAGYDVVENQSGKHVGKTKISKKGNSRIRRILYMPSLVSVRLKEPALFNLYQRVHERTGIKMKGYVAVQKKLLVLVYHIWKNDKAFQSDYSKIFGEEESKNLFPFGFEETIKESSPDKRATQDEHSYEL

SEQ ID NO: 461586 - protein, 340 aa, unidentified
MQITTVGLDLAKSVFQAHGVDEAGGTVLVKRLHRKQMLPFFSKLPPCLIGMEACGTAHHWARTLAAMGHEVRLIPPSYVKAYVKRGKSDALDAEAICEAVQRPTMRFVPVKTVAQQSILMTHCARSLLVRQRTMVANALRAHLAELGFVANPGIANLAKLAQQALSGESSLPSYARTTLDILVRQILVFTDEIAALDQQLLAWHADSEASRRLSAIPGLGIVTATAVAATVTDPEQFRSGRQFAAWLGLTPQQCSTGGKTQLGGISKQGDRYLRRLLVVGATAVIRHTKDKATPLANWIRKLLEKKPFRLVSVALANKLARIAWVVLTRKEAYRAHEMIA

SEQ ID NO: 461587 - protein, 429 aa, unidentified
MNISTSIAEADSKYVWSVGIDWADEKHDISQRCWADGRYQTFQIGADPVSVRTWLEELKELAGPQGRIVVGFEQNRGSLFEMLREQKDWLDLCPLNPLTLSRYRQSFYTSGAKDDPLDSQLIEELVRKHLDRLRLYEPPEPVLRQLDLLCQLRRKAVDSAVGLENQLRSHLKVYYPLAVELHEDLSSTLTLHFLKRWPTLQSLKRAKAQTLRSFYYQHHSRSQSLIEERLQKIARAEAVTEDGTLIDPLVLSVQGLVNQLLAHKASEAAFDKAVQKLALKHPDYEIFNSLPGAGPQMTPRLMVAFGSNRSALTDPSQMQKKSGIAPVLDRSSQSQRIHRRWCRPKFLCQTFHEFAAYSIPHCTWAKAYYEQLMARGKSHHTAVRALAFKWIRIIFRLWQDHTTYDEERYLRDLQKRHSPLSQKIQLQPL

SEQ ID NO: 461588 - protein, 347 aa, unidentified
MAFIGVDLHTNSFTVCRLEADGKEQLETFQLAAADLERFCASLDADDDVAVEATGNSAWFCSEVRPCVGRVVVVNPKQFQVIRKSVKKTDRHDARALAFFLSKDMLPETRLKTAPEGELASLVHTRDVLVKNRTRLINKIHALHVRHGIKLKKESLSSRRGLMALTIGRFSALEQVEIKVVRDQILGLIASIAEIDAAIEPAASDMDGYDGLTSIKGIGPRSAAVLLSGIGNIADFDSADKLAAYLGIVPKVSQSNDTDHHGRITKRGNRLMRTTLVQCTLTAIRYSGYLNAFYRRIKDRRGPGKAIIATARKLLTIIFDTLKNGWVFEDFPNFIIAGKENPARQSS

SEQ ID NO: 461589 - protein, 354 aa, unidentified
MNRTTKYAGMDVHQATTLISVRSEGGRVMARTILPTEEEAIVEFFRGMRGTVHVALEEGTQAQWMHDLLVPLVDRVIVCDRRGKSRRGNKGDQVDADELSELLRRGALRSVYHGSPDRLTLKELTRTYQNVVEDSTRVMQRLKALFRARGIKAPGKRVYHPTNRSEWLAKLSDPGVRFRAQVLYAHLDVLRELRPKAKAAMVAEARRDPAWPVLTSIPFFGPVRVALLLAILRTPWRFRTKRHLWAYCGLAVVTYSSADHTLVDGRPVRRRRAPMTRGLNRNHNRVLKDIFKGAATAATGRPGPLQEFYHAMIARGMREELARVTLTRKFAAITLRLWKKGERYDPTQLTVQAR

SEQ ID NO: 461590 - protein, 271 aa, unidentified
MGEVSTVGIDLAKSVFQVHGSDPSGAVIFRKKLRRDQVLSFFSTLPRCVVAMEACASAHYWAREIAAVGHDTRLIPSAYVKPFVKRQKNDMADAEAICEAAQRPTMRFVQGKSAEAQASGVIFRTRDRLVRQRTQLINALRVHLTEFGYIVRQGVGHVGKLVELVADPASDIPPVARPVLAVITQSLQALQSQIALLDREIAHRAKTDPVAKRLMTIPGVGPVIATALVALAPAASTFRRGRDFAAWLGLVPRQHSSGEGAAGAHNKDGRA

SEQ ID NO: 461591 - protein, 344 aa, unidentified
MEYYAGIDVSLESSSVCVVDAKGQVLREAKIASEPEALVGWFNQLGVELARVGLEAGPLSQWLYGGMRDAGVAAELLETRHVRDAFKAMPVKTDRKDARGIAQLMRLGWFRSVHCKSLPAQETRALLTARKLVQSKHHDTEMSLRGILRGFGLKVGKTSQRTFASRVRELVAGHSTLQLVAEALLAARAALGEQLSKLEKRVRMLARGDQQVRRLMSTPGVGVIVALTYAAAIDEPTRFRSSKAVGAHFGLTPKKYQSGETDVTGRISKIGDAGVRTALYEAANVILTRPVKGSSLKSWAMRLAARAGMRKAKVALARKLAVVLHRMLVDGTTFSAERAAATRA

SEQ ID NO: 461592 - protein, 350 aa, unidentified
MTIKHYIGFDVHKKTISYCVKAADGNIHEEGILRAIPMVLREWAGKRQEPWHGAMEATLFSGWVYDALKPFASALEIGNPSMMKAISAAKKKNDKLDARKIADLVRCNLLPACYVAPQEMRELRRLLRYRNVVVAQAVRMKNKMSGLLMEVGAEYSKQRLHSKKYFSELLDQLEEVPESVKDLLRLSRGSVEMFETMQRQLLNRLQKDPLLVKRVQLLRSIGGVGEVTALTWALEICDPQRFHCIADAVSYCGLSSALVSSAGKQQRGPISKQRNAHLQTVLIEAAKLAPRWNRQLAELHERERKRGNCNRATLAVARKLVAYLLAVDKSGQAFQVRNPPPAEPGVDKVA

SEQ ID NO: 461593 - protein, 414 aa, unidentified
MNAAGIDVSSRKSTIAVLRPFGEVVKVPFEVSHTAEGLASLARQLKAIDGETRVVMEHTGRYYESVANVLHESGLYVSAVNPLPIKEYGGNSLRKVKTDKADAMKIARYALDNWCDLRDYTPMDTVRYDLKTLNRQFQLASKQKTASSNNLIALLEQSFPGIRKCFEGPVRKDGTQKWVDFAHTFWHADCVRKLSLNAFAERYRKWCKRNRYQFSTEKTDEVYELAKSAVVLVSKTEVTKVLIKEAANQLTSISRSVETYRTEMNRLTSQLPEYPVVMEMYGVGESFGPQLMAEIGDVRCFERKQSLVAFAGIDPMPNQSGEKNVRSNKSSKRGSPYLRKTLFNIMTVHLQRAPANEPVYQFLDTKRAGGKPYYVYMMAAANKFLRRYYAKVRDYLASLDSLPPVDMDSTGLNK

SEQ ID NO: 461594 - protein, 358 aa, unidentified
MTYRTSIGLDVHARSISACALDHLTGELAQRTFPDPIPQDIIDWAAGFAGPTRAVYESGPTGFSLARSLNASGLECVVGATSKMLRPSGDRVKNDKRDAVLLARMLSTGNIPEVRIPDPEQEAAKDLVRMREDARSELTAAKLRFSHFLLRKGHAYEKGKKTWTRKHMDWIRTLKFDTALDKAVFDELLAGVLAATDRKDRIQRLVEEEAKSDRWSPMVARLSCMKGISAYTALAIAVEIGDFARFPNARAFQSYVGLLTRENSTGDKVRTGGITKTGNTLVRKLLIEASWLYSRPRMLNPTIDAKDVPPEVVEHARKGCIRLKKRADHLKSRGKKGCVVVTAISRELAGWVWALATM

SEQ ID NO: 461595 - protein, 454 aa, unidentified
MKHEPEEIPDAEHELVIERVAAVDVAKASGKVCVRVPGKAGRRVSRVWDVAATTAAVTELAEDLVELGVERVTVESTSDYWRIWYYLLEAAGLEVQLVNARDVKNVPGRAKTDKLDAVWLAKLTESLLRPSFVPPTEIRRLRDYTRLRADLTHDRSRQVQRLEKLLEDALVKLSTVATDIMGVSGRAMIEALIAGQRDAKVLAGLARGRMKTKRAALIEALSGRFDDHHAELARMLLDQIDALTAQIDTLTARIEQLLAAMPEAQPVDPRRDGPTSGHPVGVTADTLAECARLTTVERLDEIAGIGEHNAQVIIAEIGLDMSRFPTPAHLVSWAKLCPRTIQSGPVTRGGRTGKGNPYLKGVLGDAATAAAKTSTFLGERYRRIVKRRGKLKALVAVARSILVIVWNLLNDPTARFHDLGPDYHTNRIATERRMRNHIAQLTAMGYRVTLEPAA

SEQ ID NO: 461596 - protein, 466 aa, unidentified
MENNYILYVGMDSSKGKADAAILKVSDRRSVKPKFLRKKLSFKFVKSEVTSFLETVRSYSDDNCTSICFALEVTGIYSTNVYNFIKDNLNDNESIKFLNTDFVNQWRNAHNIAKSDPLDAQTISTIIGTDSDVQYVNDNVFKNKNGYQDLKALVHRHYQIKKIYSQEINRLIAQCDCLFPELQYVFEPKSAAFIAVLSSYPTTHDIINASRLEVFNVVYEATKHRCSMDKIDKLFDLCHDTLVPDIISSYGRSIILDLIENIKNIKGQLKMIERYIRNVASLNPAYKLLLSITGCGPITAATIIAETGDIKRFKNADCYVSYSGTSPKNKRSGTSVETMGKISKKGSRYLRHAIYMIAEFARRHNPVLKHQFERIKNGNKKRHKLANIAIANKIARYIYSIMKNESSFVILHEHIMRLPEETRYTFFNSISLDFPKNTRKQIYQYSDINGEIHKFVYTKSEETMII

SEQ ID NO: 461597 - protein, 427 aa, unidentified
MNYTQNRKIEQVTDQTLVIGMDIAKQKHYASMVDARGRVLKKPFPVIQSRSGFEQFYASIQEAMKEFGKTEVIVGIEPTGHYWLNLAYFLEEKGIPLVMVNPMHVKRSKELDDNLPTKHDAKDALVIAKLVKDGRFSYPRILHEVEAELRAGSTFRESLTKELNAVRNQMIRWLDRYFPEFVQVFPSFGKMALVVLEKTPFPMDIANQTVEGLMERYRQSERLKCPQKPKVQKLLEVARHSIGITEGQQMARIEIATLVRRYRQLEQEIAALTEELTALAQTTAEYEWLQTIPGLGDATIIELLSEIGSFAQYQDSRQLIKLAGLTLKENSSGQHKGQKRISKRGRKRLRALLFRVMMPLIRHNEAFRQLHEYYTTRPINPLRKKQSIVVLCGKLLKVLYAVCVKQQAFDGERMIQDIFFQSQAQAA

SEQ ID NO: 461598 - protein, 340 aa, unidentified
MERRYIGIDLHRNRFTCCIRLENERTYVTEWRLEDLERFVKKLRPSDEVAVEITSNTRLFHDAVAPQVARVVVVDTNQFRVISQSVKKTDPNDARLLSLYLSKGLLPEVRMKDKEHGQLASLTQTRDTLVKLRTALKNKVNNILSARGLNLAKEALSSEKKLAEVLELPFDEIVRIELRVIVEQIRSLNRSIAELEKTIGEEGSKLEGHKGLSSIKGIGKITSAILLSVIGDVNDFPDEGHLASYFGIVPRVSNSNQTERSGRIHKRGTKLGRTALVQSALIAAKYSSYLKRFYEQVKARRGAGKAIIALARKFLGIIYRTLKNKWVFEDFPNFVLVEES

SEQ ID NO: 461599 - protein, 339 aa, unidentified
MTQHAAFDVSLKVAHGCIVDASGQVLKEGKVAAEPEAMAAWLNKHAPELARVGIETGPLATWHLHALRKLGVPVVCLDARHAHKVLSCWPIKTDKNDARGLAELVRLGAFRQVAVRSEASVRRRALLGAREQLVKMRRDVENQIRGLLRSFGRLLGSARGRAFAGRAKELVADEPLLAAIIEPLLRVRERLVDEVAALEGKLVAEARTDPVCRRLATVPGVGPITALAFQSGVDDVTRFEDRRQVGAWLGLVPRRHQSGKMDYSGKISKAGDGRVRALLFEAAHVLLSRVKRGCALKDWAEQLARRVGMRKAKVAVARKLAVLLARLWAKEEVFRWQAA

SEQ ID NO: 461600 - protein, 339 aa, unidentified
MAILYVGIDLAKNVFAIHGVDELGKPALVRPSVPRARLHQLVAALPPCTIGMEACSGAHHWARLFAQHGHTVRLMAPKFVAPYRMSGKRGKNDAADAMAICEAVQRPSMRFVPVKSQDEQARLCVHRVRQGLVEQRTATINRIRGLLSEFGIVLAQKAATVRREAAAHLEDLPGWANTAVGDSLSELHRLDERIAEYDRHVVLMAREDDRSRALMQLSGIGSTTASALVSTIGNARDFKNGRQLAAWLGLVPGQYSSGGKARLGSITKAGDGYLRTLLVLGAKAVLAAAKNKDDRLSRWAMALEVRRGYWKAVVAIAAKNARMAWAVLAKGENFKPLEA

SEQ ID NO: 461601 - protein, 418 aa, unidentified
MKSMEITAVGIDVSKRKSTVAIRRPGGVIVACPFDISHSSHDLEKLVSILKTTGGDIRVVMEHTSNYWKPIALTLKNAGFYVSVVNAMLIHDFSDNSIRKLKTDRADSLKIANYALTFWNQLPPFNDEDETRLVLKEQSRMYERLASTATSLRNGLIALADQTFPSIDQAFGHAIKNADGHEKWVDFFSIYWHRDCVLRLSIEKFTESYRKWCLRRNYKFRTNTAHKLYALAQDAVPSLPKNNGTKALVLQACKSLNAVCEAKQSTQEEMNRLASLLPEYEVVMQMEGTGPITGPALMAEIGDVRRFKNKKALVAFADIDAPPFQSGNFESKSRHVSKRGSPHLRRTVFLVANIILTLSHKDNSVFCFMDKKRAEGKHYYVYTIAGSAKFLRIYYARVSEYLRTQEPPAAAICLDCKD

SEQ ID NO: 461602 - protein, 346 aa, unidentified
MKKIFIGIDFSKEKFDATVIKAEGVEERAERLHEVFDNKVSGFRRLLRWVKSVADEPDAGLWLFCGENTGGYSKALCNHLYVSGYDMWLENALSIRRSSALQRVKSDKADSGVIAEYAMRNYDQMRLYKPLGKNLERLREVFLYRHNLVKMKASMTVRKGEKKLTQEKSDISRFMAQSSKHLISEFNKKIAECDMKIEKIISEDEELRRNFEIITSVPGVGTQNAVCLMVYTDNFSRFDYDSRKIACYYGVAPFGRQSGTSVNTPPHVSPFANKLIKALLTQAALASINCCPQMAVYYRRLVEAGKKKPVAVNNVKNKLLHVITAMVRNGEMYNPDHDYYAALKVA

SEQ ID NO: 461603 - protein, 414 aa, unidentified
MDTIYAKVAGLDVHQKFITVGIRCRLDTGKTFAEVRTFGTMTRDLRALADYLEALGVTHVAMESTGVLWKPVWNILDGRFTLLLVNPRHVKQVPGRKSDVSDAEWIAQLLQCGLLRGSFVPRRELRELRDLTRFRAQLASEQTRLANRIHKVLEDANIKLGAVASDILGKSGRAMLRALIRGERDPERLARLAEGRLRAKIPELELALEGHFSDHHRFLVEHLLGHLDELERHVEELSGRIAERLRPVLDAARLKRLDAIPGVNRTTIEGVIAEIGADMSQFPDEHHLSSWAGICPGNEESAGKRLRSHTTRKNRWLRRALVEAAWAAGRTKESYLGAQYRRLAARRGKKRALLAVGHSLLVIFYHMLKSDVEYKDLGVEYLDRLDPERLRRYLVKRLERLGYRVSLTTQDEAA

SEQ ID NO: 461604 - protein, 337 aa, unidentified
MEYCGLDLGRRSSRYCIVDNARDVVQEGNVRTHKTHLRRVFSKREPMRIVVEATTACFWVADQLIELGHDVRVVDPNQTKAIGAALIKHDKLDARVLAQLCAADLLAEVRIPTLEQRLGRMPLTARDVLVRSRTRIVNCIRGMLASEGFVLPSTSPKRLVSLLDEEPPPDIPPALYAALVPLLEALVGLEANIEASTAPVYELAKTDPVLRRLQTVPGVGPITASLFVSAIGDPHRFRSGRAVGAYLGLVPRLYQSGATLRRGRITKHGNAQARWALTISANALLLSKKDSALQRWGQNLVERIGRQKACCAIARKLASVLWSLWKNEQSFQAFAPN

SEQ ID NO: 461605 - protein, 514 aa, unidentified
MSEGTAVPPFSRLSPRLLRKHSAWHIRHIPLTQNFHPQPLAPARKADWVHAHCARFRSPYAAQDKPFASGFTNPDPNGGDIMLKINYMSTLFVGIDVSSKTNAVYAMDFEENKYISSSFGNNQPGADQLVDMIAECMQKHQNLDTLLIVLESTSVYSVHISNFLSTSEVLMPYKPYVFCVNPKATSNYRKSYIGMEKTDPTDAYLIADFGRVGRTKKLEPWRGGQFIALKRLTRHRMHLSECITREKTYMVSNLYLKFSELQLLEGDDKPFGSLYGATSSAVLTEFLSPQEIIDMPEEDLLAFLAEKSRNRISDISKTSELLRKAARDSYRLDKCMYEPLNISLASSFNCIHAYQKEIRLIEQAIEKCINGMNPNALIILRSIPGIGPVWASGILSEIGDITAFHSSDALAKYAGLYWPKGDSGNFTSEDNNMSKAGNPYLRYYLGEAANSVRKHIPEYADFYARKYAEVTRHQHKRALALTSRKFVRLVFGLLVKNQLYTGEKLDTEYNIETN

SEQ ID NO: 461606 - protein, 422 aa, unidentified
MQNNAARKRKQVPEGYLIVGIDPHKKKHAAVAITQDLTIRDRFKLDNTKEGLEFMVRRVRTEMVKSDCRGVMFAIETGGHYWRNIAYFLDEQGIPFRFINQYTLKRRREGKDLNHKKNDYRDSEVAAQLLCTGEFTESTIPQGVYAELRTAHNAYRRLVKERTRITNLMKGLMDGLFPEFVQVFKDPCAVTALCVLSCCAIPGIIAGMTQGEFAATIEAHYHGRRLMRRKLVALHQVATSSIGIAAGARSVASEITFLVEKLELINGQICSIERTLVSLVDETEEGKYLLSIRGLNYIAVAGLLAELGSFKLYRTSKQMIKMAGSNPTESESGGKRGAHTPMSKQGRPVLRYCAWTSVIPMLRFNTDFRAWAKQRRERPAHANPLGGREVVGAALNKLLRLVFAMVKNQTLYLSPQLTPMTN

SEQ ID NO: 461607 - protein, 373 aa, unidentified
MPIYSTAFGMDVHLRSTTVCALDAETGEAVTRRFRGNPWGEVAEWMSGFPGPSLAAYESGYLGFAPQRELSGLGVDCVVAAVSKVPRSAADLSSKNDRNDAARMAKAILSHDVTPVWVPSPEIEGLRDLAAAHDAATARLAAAKQRLLAFLARRGYVYGGTTPAGNPRKYWTYGFLRWLDGIHPADDGGIRALAALRNEVEAADETREALLAEYRAAVAAGPLSAEVEALQSIKGCGFALAAAFASEVGDFSRFRSGRQVTAYFGLAPKQRSSADSVRLGGISGAGNALVRKLAVEGSWCYAQAGHQPKLMPKGSGVPLEIRMHGRKGSERLLRRREEMIARGMPQAKANAATAAELVRWLWALGTMCREGAE

SEQ ID NO: 461608 - protein, 332 aa, unidentified
MHMLAIDLGKQSFHIYGISDDGEVVSRKVGRAKLVDAVTRLQPRLVAMEACASSHHWGRTFEALGHEVRLIHPRFVKPFVKGSKNDAVDAEAIFEAATRPTMRFVPLKSVEQQDLQALHRTRDRLVVQRTALINHTRGLLAEYGIVMPAGASRFRLQIDKMIETAELSDLAKPLFRQLVEEYRDLDARVSALDDMLVKICRTDERCKRLTTLPGVGPIVATSLVAAIDDGRHFKSGRALSAWIGLVPRQYTTGGKPRLGGIGSRANHYLRRQLIHGARSALLRISKHEDRRSKWAQDLLSRAGHNKTLVAMANKTARMAWAILRSGESYKIA

SEQ ID NO: 461609 - protein, 363 aa, unidentified
MSESTTVTVGLDVHARSIRLAVVRADELLEERTLPYDEEAVERLLRRWPRVRCCYEAGPTGFGLHRYLVERGIDCAVVAPGLVPRRPGDRVKTDPRDARKLARLHAGGLLEPIHVPSRELEAARDLVRAREDGRLDRMRDRHRLSKFCLRHGRLLPTSCWGVARRKWLSEQRFEYAAEQITFDSYLHAVDLVDARIGQLECAIREAAERGPWRGLVARLRCLRGIDTLTAFALVAEIGDFNRFRCAEEFMAFVGLVPSEHSSGEQRRQGSITKVGNSHVRRLLVESAWHARRRPTVGYELARRQRGQDAAVIERAWRCQQRLCQRWQRMAGRGKPQQKIVVACARELAGFVWAIATDQPLRTT

SEQ ID NO: 461610 - protein, 352 aa, unidentified
MEKITTVGLDLAKQVMAVHAAGSDGRMVLRKVLRRDQLLAWSAALAPCVIAMEACGGAHHWARELVRQGHTVRIIAAEFVQAFRKSGKNDANDAEAICTAARQANMRFVAMKSAEQQAALCVHRLRQGLVEERTALINRLRGLLTEFGVVAPLSPEKLRRELARCQDPQDTRLPPPVRQLVGDQLTALDQLEARMATYAEQIAAQARESEVAQRLQTIAGVGPTTAAAMVATVGAPQEFRNGRQFAAWLGLTPKQHSTGGKTRLGRITKRGDAYLRTLLIMGAKSALQAALRKPPEGRHSLQRWIVVVLGRIGYHKTLVAIANKHARIIWALLVKGGDFDVQRATSTAVAAA

SEQ ID NO: 461611 - protein, 386 aa, unidentified
MEQKQTQASVEPLEPERHRCARVAVDLNHTRDRGTTMNDITTYGLDLAKQVFQVHWVDVQSGEVRRKTLPRRQVTAFFARAARGVVAMEACGSAHHWGRVIANLGHEVRLIAAQFVRPFVKTNKTDAADAQAIWEAAQRPEMRFVALKSEEQQAVLSLHRMRAQWLKIRTMQANQIRSLLYEFGVVVPLGWRALLKSVPEHLTVGGPVPTLLHNELIEQLEALRTATARITALDKQLASWQRAEPECQRIMAIPGVGSLIATAVIASVADARQFRSAREFAAYLGLVPGQSGTGGRVKLLGISKRGDTYLHMLLIHGARSVLLSHSRRRRDRPLDVWLAALLQRRPGNVVAVALANKIARTIWALLAHERTFDAQWHRVATANVAH

SEQ ID NO: 461612 - protein, 416 aa, unidentified
MLIVGCDIGSETHYIRAIDVRGRELSPGAFEFSNTSEGFENAKAWVLALAAKHDKKQIVQGLEPTCHYWFALAAWMISNGISVVQVNPYAVKQSKEIEDNSQLKDDRKDPKLIANLVKDGNYGMPYLPEKVYADMRRLSMFRDQFTEDRIRNINRLHRELKIYFPEYMDAFGKIDGAFTLEVLKVSAIPTDITALGAEGMKNIWHNAKLRGRGYSRANEIVNYAEKSVGLTDGTDAGREAVKWYAEQILRLDEQLAEIESALHEKCREIPYAENILAINGVGENILAGILAEMGDISRFDDVKEIQKLSGMGLVACSSGKHKGQTKISHRGRKRLRYWLFQAAKSAVSHADEFKQLHEYYTTRSNNPLKKMQSLVVIACKILRVIYTILKIGTTYDPQKLLKDIKHPAASQAPMAA

SEQ ID NO: 461613 - protein, 326 aa, unidentified
MEQTRRVDILGVDISKKSFNVALLRQGKYRHKKFSNDLEGFKKLSRWLEDQVVEDLHACMESTGVYGEALAEYLYDKGYKVSVVNPARIKGFAQSELIRTKTDKVDASLIARFCQAMRPGLWIPEPKEIRELRSLVRRLEALDKMRQQEVNRLDVSEEVVKKEIRDHINYLSEQIETVKKRIKGYINKNPQLRDKQELLDSIPGVGEETISQVLSHFGYVEKFSSAKRLSSYLGISPRAYQSGSSVRGRSKMSKIGRSSLRKTFFMPALASLRFNPIIREMKERMEKAGKPKMVIVGAAMRKLVHLIYGVLKNKKPFDPNYCAKIS

SEQ ID NO: 461614 - protein, 368 aa, unidentified
MKEVTTRYVGLDVHKATISIAVADDGVAPVLFGTIANDATAVRKAVSQLKRGGKLVAAYEAGPTGYGLHRQLTQLGADCVVVAPALIPRRAGDRVKTDKRDAIALARLLRSGDLTPVWVPGQQDEALRDLVRSRFDAKDDLRRAMHRLAKFLLRQSIQAPPGIKPWSARHLQWLETLRLDHPTSQLVFQDYRVAVHAARERVRRLEADLERCAEQSPRLGTILALQVLRGVAFLSAVTIVAEVGDFRRFPNAPRFMSFTGLTVSEHSSGQSRRQGRITRAGNRYLRHILVQAAQNARFAPSLEGELKRRLKDVPADLVALSVTAQNRLHRRYRHLDRRIGRPKAVTAVGRELAGFVWAIGQRMEASAA

SEQ ID NO: 461615 - protein, 337 aa, unidentified
MACEKTFIGIDVGAGELVVVARASGKSASAVTFENNAADHHKLIQKIRKMGDCVVCLEATGTYSMDIAIALFDAKIPTMVINPKVSHNFAKVLAKHSKTDAVDGDTLAQYAECMPFVSWVRPTNEAMELRVFARRVRALTDQKTIAKNQAHALSFVATTPKAVIKDLQLSITQLENRILALNKAALKHINAFDALKNAFVLLIGVTGIAQTSAIALLGELLLLPSGLGHTQWVKFAGLDPKHFRSGTSVEKKARISKQGNHYIRAALYMPALSAKRHDPYVKAFFDHLIDMGKTPMQAVCAVMRKLLHALHGMLTNNQPFDNTRFYAKSSENNQVSA

SEQ ID NO: 461616 - protein, 312 aa, unidentified
MTDIICGVDVSAETLDARIGRDGPWQRFARSSEGIEQLAAFCRAHQVSLVVMEATGGYERLPAGQLWADEIPVAIVNPRSVRRFAEAMGRLEKTDRIDCGIIAWYAETKRIKPTPPASATQARLTALVLRLRQLTDLRTQQINQRRLVTEPDALASFASVLAAVAGQMRSLEAMIAKAIDADPLWAALDQAFRSIKGVADRTVARLMAEMPEIGTLSNKAVAKLAGLAPIARDSGQVAGRRSVRAGREGVRSILFVVAEIVRRHDPDFAAFHQKLCAAGKPKKVVRVALARKLLVRLNAKARDVRNELARAA

SEQ ID NO: 461617 - protein, 397 aa, unidentified
MYIVGIDIAKRKHEAAVIDGEGAVIIKPFSFTNNCSGYNRLLAMLAKAKLPLDEVSFAMEATGHYWLALFTRLQKEGFRVQVINPVQTNSIRSFYIRQAKTDPRDALLIAEVIRFGHFSESTLHPENIYELRELCRGRHAIVSMQADVKRKVVALLDQVFPEYETAFTNLFGDTSMAILQTCPTPKELSEMPLEELCHLIEVSSHKRFRMAKAQELQALARNSFGFAMAGDVFSTMIRLYAKHLDFLKQQVREMDRKIAEIMETLDTPITTITGIGPTLGAYILSEIGDISRFSSAAKLAAYAGIDPTMRQSGEYNGVRNRMSKRGSPYLRHAIWLAASSAVLHDSALKLYFQKKRDEGKPYMASVGHACRKMVSIIYAVMRDNKAYTSHIPNEISA

SEQ ID NO: 461618 - protein, 368 aa, unidentified
MNKRTYVGLDVHARSVKGCAIDRETGEILRQSLAANDAGVAEWVSGLPGPVLVVYEAGPTGFGLARLLVGAGIECLVVAPSKLQRPPGDRVKTDARDAEHLARLALLGQITSVRVPGRADEAARDLVRAREDVRADLMRARNRVSKLLLRHGLVYSGGHAWTDAHHTWLHRQRFDDPALQAAYEAGLETAELTLDRRNRLDAKITALAATDRYAPVVHALMCLRGISVLTAFGLAVEIGDWTRFTGSTIGAYLGLVPSEHSSGASRSQGGITETGNIHARRLLVEAAWHHRRPYTHASRDMRARWDAADEVSRVRGHQGNHRLHHRWDQFEARHKRRVIANVAVARELAGWCWSLAAQVQREQPWTDE

SEQ ID NO: 461619 - protein, 340 aa, unidentified
MGFFVGIDVSLENSAVCAVDEHGKLLKETKVASDPGALNACIRSMPGVVEAIGIEAGPLSQWLHKSLTDLGLPVVLMETRQVKAALKAAPVKTDRRDAAGLARLLQMGWFRPVHCKSLSAQELRVLLGARRSVQDAAINIEMSIRGMLRNFGLRLGRIGKVSFEDRVRELTDGNKLIQLSIEPMLRARAALRSELVRLERLARDITREDPVCRLMMTMPGIGPVVALTVRSTIDDPGRFRRSKDVGPSIGLTPRRYQSGETDIIGGVTKAGDLDMRTALYQAATVVIHRSKKPTWLRAWAERVVRRRGAKRAAVALARRMGVVLHRMWVDNTEFQAARQV

SEQ ID NO: 461620 - protein, 358 aa, unidentified
MRSSGRFATIIVVVFGKEEMTMAYYIGLDVSVESTAVCVIDAAGCVKKEFSARSHPEDLANALDPFSDEIAGIGLEAGPMSGFLVEGLKQRGLDSVLMETRRVHAALSAIPVKTDRRDARGIAELLRMGWFQPVHLKTPAARDLRLMLSARDSLGRRIRELDNSVRGLLRGFGLRVPTGARGRFCDLVRDLIAGNPVLEAAIFPLLSARDKMAAEFAKLDKLVRDQSRNDDVCRRLMTIPGVGAVVAMTFRAAIDDPTRFRSSKSVGACFGLTPRRYQSGETDRVTSITKAGDASVRAALFEAAHVMLVRTTRWTPLRAWAMRVAARRGAKRAKIALARKLAVIMHRMWIDGTEFKTA

SEQ ID NO: 461621 - protein, 350 aa, unidentified
MKTIIKQVVGIDVAHKELVVSLGKMHDDWSPEVYANKKFANTQKGFMTLVAWVRKLSYPGCPVRFVMEATGVYHESLAYFLDEKGYELTIVLPNKISNYFRTLEVKTITDKTSADAIAMFGLEKKLESWKRPKKIYRDLRQLTRERDQIVQERTMVKNQLHAEQAEANPNPSSIQRISKRIAFLNNQEKEIRQEIAALAKTDQQVSSAVEITSSLPGVGCLTAVIVLAETNGFELIRNKRQLSSYAGYDIREKQSGTSVKGKPRISKRGNKYLRKAMHLPALAAIRHDERFKAIFVRLVSSHGIKMKAAVAVQRKLLELMYIVYKTNVPYDKSYLENQQPAGPQCKAKKN

SEQ ID NO: 461622 - protein, 380 aa, unidentified
MFVALELSRSTWLVAVNAPHIDKISKYRVEAGDSAALLGLLSRLRAEAERRSGRSVKTISIQEAGLDGFWLHRLLQTNGVESHVVDAASIAVNRRRRRAKTDRIDVETLLRTLMAWARGERQVCSMVRPPSPEEEDARRLTRERATLVTERVRHVNRIKSLLATQGVFVFEPIRKDRRKRVEQLRRWDGQPLPPRLQAQLLRELDRLELIISQIATLEAERDRILQANQAQTEGATRRATVEPAVVSAPGPLLLRLRSIGPEFASVLALEAFYRKFGNRREIAAYSGLTPSPWKSGGIDVEQGISKAGNSRLRRTMIQLAWLWLRHQPGSELSCWFRHRVGDQRGKIRRITIVAVARKLLVALWRYVTQGVVPNGAEMKA

SEQ ID NO: 461623 - protein, 354 aa, unidentified
MFVGVDTHKKTHVLVALDTDGRTHGSRTVANTPEGWAAALQWAREQHQQQVRWGVENSGSLGKGFAQFLLAQGEADVREVVPQRTAQYRRRGRSQDKTDVADALAMARLLRAEGEGLPMVQADDASTALRLLSDHRDNLVVDRTRLTNQLHAQMLQLDPGYGARSGPLTRAAGVRYCQDLQLPAGDGIVQTRLLVVRQLAGRVAQLAAAIKEITAAISQRVVATGTRLTSLPGVGAVMAARLLGELGCIPRVRSAAALAALAGAAPLAVASGGRHGHRVNPGGNRKLNRALHIVALVQRRCEPRAQAYYEKKRAEGKTGRAAMRCLKRRLVDVVFRLLVPTAQTTPAVVVPQAA

SEQ ID NO: 461624 - protein, 335 aa, unidentified
MQIKHFIGIDVSKETLDLSVVVDGKNLQYFCIKNRTVEIKSTINKIMKGLGATVDDTIFCMEHTGMYNLPLVKWLQIHQGKMWLESGVHIRKTLGVVRGKNDKVDSSRIAMYAYTNRHQIKFWNPPRKLIERIAALLSQRARMNKAKKQLNTANKEQKRLLDKDIMKSLNKYTQKTILVINKQIGAIEKEILGLINDDVKLNRIYKIITSVHGIGFVTASYILVTTNEFININNPKKYACYSGVVPFEYSSGSSVRGKNRVSHMANKNIKSLLHMSALSAIQMQGDLQEYYKRKVSEGKNKMSVLNAIRNKLVLRVFACVNQNREYEKKYEYTLV

SEQ ID NO: 461625 - protein, 377 aa, unidentified
MSANGMVRPCSCPASDESGKGLQTKEHAMSQSLNSAIAVIGIDIGKNSFHVVGLDDRGAIVLRQKWSRGQIEVRLANMPPCLIGMEACVGAHHLSRKLQAFGHDARLMPAKYVRPYSKGQKNDFRDAEAIAEAVQRPTMKFVATKTAEQLDLQAMHRVRERLVSQRTGIINQIRAFLLERGMPVRQGLRFLRAELPRILATPPDVLSARMVQVISDLAEDWRRLDHRIDHLSNEITLLARQDTGCERLMSVPGIGSIISSAMVAAIGTGDAFTKGRDFAAWLGLVPKQISTGDRTILGKISKRGNRYLRVLFVQAAWVVLIKPMSWERHGLKHWIEAAKKRLHRNVLAIALANKLARIAWAVLAGSRTFEANKIQAA

SEQ ID NO: 461626 - protein, 387 aa, unidentified
MSQLNDLSRSLVALEQDATLIAVIEMGQSSWLVAGVVPGIERNPLKKLSPDRDRLLQLLHRWRKEAVQAGRTIKRIAVAYEAGRDGFWLARWLRAREIEAYVIHPSSVPVSREHRRAKTDRLDTELLKRAFLGWLRGEPKHCSMAAIPAPEDEDARRPSREREGLVGERTRIVNRLKANLARLGIRGFRPNLAHASSRLETLRTPEGAAVPENTLAELRRDMARLRFVKQQIKEIEGARTKHLERASGERRAGMVRLLTQVVGVGIETADMLVQEVFSRNIRDRRALARYAGLTGAPDESGQKRRERGLAKAGNARVRRGMIQLAWGHLVHQKNSSLADWYRRRTADARSGTRKTMIVALARKLLIAFWKLVTTGEAPAGLLLRRAA

SEQ ID NO: 461627 - protein, 475 aa, unidentified
MAARKNDNAKVSGAAGQHGGDGAEVTEERVEVVTYAAAIDVAKGFGMVCTRVPGSRADRKRQKVWRVDASYGAVVALMDHLRSEGIQRLVLESTSDYWRIWYYLAEAAGLQVWLVNARDVKHLPGRGKSDREDSVWLCKLNERGMLRRSFVPPEGIRDLRSLTRTRSKLAQDQARHQHRVEKILEDALLKISVVISDLFGTSGRRFPGALVAGQRSPKALAALGDYRLKASTAGLEAALTGRFREVHAFEIATHLRLIDAINAEIARLDARIEQQLASIPGVAPACGDCGLIGGGHSPGCASDGTPVLGLVERLDEVTGVGVRNAQVTIAELGTDMSVFPTPGHAAAWARLTSRTLQSGTTTKNGRTGKGNPYLRGALGQSVMAAAKTDTRLGEQYRRIARRRGKQKAIVAVSRVICEISAILIADPGARFTDPGADYYSRVNPARQTRSKIRDLERLNPGMKVTLTPVETAATA

SEQ ID NO: 461628 - protein, 373 aa, unidentified
MKKVRFLGLDVHAETIAVAVAEPDGEVRSLGIIPNREESVRKLVRKLGPAEQLQACYEAGPTGYVLYWQLTALGVKCEVVAPSLVPVKAGDRVKTDRRDATKLARSYRAGDLTAVWVPNQEHEALRDLVRAREAAKQDQLRARHRLSKFLLRHGRRVPAGIKVWTQRYQDWVKEQVHFEQPAQEFTLLDYVHEVEHMTDRIRRLEQAIGEAVKLAPPGMQEVIQALQALRGIAQISAVTIVAELGEISRFEQARQLMGYSGAVSSEHSSGKRTQHGPITKTGNAHLRRIAMEAAWAYRHRPTIGAALRKRQEGLSEDVKEIAWKAQYRLHKRYRNLVAAGKEKQKVVTAVGRELLGFIWAIGVQVERNSKRVA

SEQ ID NO: 461629 - protein, 345 aa, unidentified
MTVLNIKKNNHEAKLSLQAGIDVGSEELILVIRKNSKPFNPQKFSNTPADRARLVKKLVKLPGIIVCLEATGIYHFDLSIALHDAGVSLMVVNPKASHNFAKVLMKNSKTDAVDANTLAEYAERMDFVAWTRPSDEKIALRCFSRRINALTHQKAAAKNHLHALTATQATPKAVLRDAKLAITHLQKRIDRLKTEALVLIGKHSELERVLELLTGINGIAETSAIALMGELLLLPPDLSHREWVKFAGLDPRAFDSGKSVHKKTRIAKAGNRYIRAALYMPALSAHQHDPHVGAYFQHLVVDNGKEKMQALCAVMRKLLHAIHGMLKHDKPFDNTRFYAIPAVVG

SEQ ID NO: 461630 - protein, 421 aa, unidentified
MADDLVLAARIGIDWADDHHDFCLQEAGSSRVETGRIPQEPRALAEWVAGLRQRFGGRPVGICLETSRGPLIAALIEQDFIVLFPVNPRTLKRFREAFAPSGSKDDPIDAGLLLELLDKHEDRLHRWMPDDAETRAIARLVEARRKAVDLRTRLTNQLGAELKGYFPQALSWAGELDTQLATDFLQRWPTLQDVQRQKAQTIRKFYYGHNSRRAELIEQRIEEIRTAIPLTTDPAIIETSVLVVQMLARQIEALRPSITRYDKEIARRFGSHPDAHLFESLPGSGPAMAPRLLSAFGTRRERFKAASEVQEYSGIAPVTRRSGKQCQTTWRWSAPRFVRQSFHEFARLSIQYSAWARAYYELQMERGKSRHAAIRALAFKWIRIIYRCWQARIPYDEARYIQGLWARRSPLVHRLGLPAAA

SEQ ID NO: 461631 - protein, 323 aa, unidentified
MDGSFVETPSIFVGIDVSQSAWDVHLLPEGRSFTIRVEDGAAQRLLDKLGAPKAAFVVLEATGGCERRLVAELIDAGWTVAVVNPRQVRDFAKALGRLAKTDRIDAETLALFAQRVQPRPTQKTPEKQQELDALVTRRRQLVEVRSMERMRKRQTTFKATGRSIEKLLKVLDQQIAAIEKAIAKLIESDDDWRAKRDVIESAPGLGPATSSTLVAELPELGRLNRQEISSLVGVAPMNHDSGSFRGQRRIRGGRSTVRAALYMATLTAMRFNPVLRSFAQRLHKAGKPFKVVITACMRKLLTILNTMVRNATPWNPQLSTEQR

SEQ ID NO: 461632 - protein, 339 aa, unidentified
MGLYTGFDLHSSNTYVGIIDDDGKRMWKKKLRNDPGLISSTLRPFKEEIVGIVVESTYNWYWLVDLMMEEGYRVHLANPSRVEQYSGLKHGDDEDDAFWLAEMLRLKILPEGYIYPKEQRPLRDLLRKRGHLVRIRTSLIQSLQNILARNMGSKMNTHHLKSLSTDYVTPLLAGNDDLSLAGKVSKDAIDALTRQIKAIEVVVEKRIDIRRPYDLLLSLPGVGRVLALTIMMETGPIGRFREVGNYVSYCRKVPAARFSNEKKKGTTNRKNGNKYLSWAYAEAAELARRLDSGARSYYDRKLRRTNAPVAHSALAHKLARAAYYMIRDGVPFMPERAFA

SEQ ID NO: 461633 - protein, 308 aa, unidentified
MELLQERCAGLDIGKKDLKACVRTPNPSGRRSRRQEIRTFATTTNALLELRDWLVAQKVTLVVLEATGDYWRGAFYLLEDCLNVILVNAAHAKGLPGRKTDVCDAAWLCQMGECGFLKASFVPPEPIRQLRDLTRYRATLATERTREAQRLEKELEDAGIKLSSVATDILGVSGRAMLTALIEGERDVHTLAEMAKARMRPKIPQLVEALTGNFGEHHAFLCRLHLERIDQLSAAILELSERIEEQMRPFARQLEHLITIPGVGQATAEVIIAETGADMSRFRTAGHLASWAGLCPGHHESADKRKSG

SEQ ID NO: 461634 - protein, 352 aa, unidentified
MIVLGADTHKRSHAIAALSAATGELLGEQTVQVGAKRFAALLTWARTLGGERVWALEDCRHVSGSLERFLIERGERVLRVPTKLMADARRGARGRGKSDSIDALAVARAALREGLDVLPAAQLEGPELDLRLLVDHRERLVRQRVALNSTLQWHLHDIWPELQLPGSSLFYGNWGPRIARRLARAEQTMRVRIARDELRRIRELTQTINALEAEIAQLVARIAPQLLSEPGFGPLTAAKLVGEIAGASRFASDAKLARAAGVAPIPVSSGKTNRHRLDRGGNRQINAAIHRIAVTRTRCHPETRAYIARKRSEGKTTKEAIRCLKRHLARRVWHLLQTTSPNPNQAINTSTP

SEQ ID NO: 461635 - protein, 466 aa, unidentified
MQPNRRRSLGKPRVSPTVFDRLNPHVAGIDCGSGEHFVAVPPDRDPHPVQSFPTFTSDLLRLADWLAACRVTSVAMEATGVYWIPIYEILDARGFEVLLVNARHFKNVPGRKSDVSDCEWIRELHSVGLLRGSFRPTDAIVALRAYMRHRQTLVESAGTDTQRMQKALVQMHLQLPLVVSDITGVTGLRILRDIVAGQRDPQHLAAHRDARVRASTADIVAALTGHDRPEHLFVLQQNLELFDACQAQLAACDRAIDAHVQTLTAQRPPPVTPLPDPRVTKKPHDHQPRFEIRTPLFQLTGGVDLTQIDGVAPYTALKLISEIGLDMTRWPTEKHFTSWLSLAPKNKISGGRLLSSRTPPSANRAAVVLRMAAMSLGRTQTALGAFYRRLAARIGKPQAITATARTLAALVYRALKGELVYRDPGADAYDIQQRARVLRRLRQRAATLGFSLVNRDTGEILAPAIP

SEQ ID NO: 461636 - protein, 418 aa, unidentified
MNAEYAVLVGLDWADQKHDLCWRETATGKIHTRVLEQRPERINEWIVELIAKYPGRRIAVCLEQSRGPVVYALMGYAEVDLYPINPLSMAEYRKALRPSGAKDDPSDAALLLDLLERHRDRLQVWRPDTEPTRLLRSLCEDRRKAVDARTALCNSLGARLKEYYPQALELVGEDLGSELGCALLLKWPRLEAIAAARADTIRRFYYALHCRSEQQIQERLELIATSRPLTTDGAVVEAGIRWVQTLVAQIRPFNRAIKAYDERIAELFKTHPDGFIFASFPGAGKQLAPRLVAVFGTDRSRYETAVNLAMYSGVAPVIERSGQQVWIHWRWHCPKFLRQSLVEFAGHSVMFSAWAKVYYQEQIKRGKRHPAAVRALAFKWLRILFRCWKDRTPYDEAKYLAALQRHGSWIVTALKNVA

SEQ ID NO: 461637 - protein, 319 aa, unidentified
MQCIGVDVSKQILVTYDGERERVFPNRKGLPELAAFLDHGREVLIVFEATSTYSRNLEALCRERGLPMVKLNPRLIPNLREVSNKRGKTDQTDAELLYRYGAEWGGGEAREPQAVDRLTRAISVQLAIYRVIQKARVAYQGLFEALSQDPATPKGLLAELTGMITSLKEKERECIARAQELIAEEEKAAASFQALLSIPGVGPITALTLLVLFRRYPDTNRRQIVALAGLDPIEHRSGSAVHKKPRISKRGSGELRKRLYEATLPAARFNPAVKEIYRRMKERGKPEKVARIAAARKLLLIAHAIYKSGESYRAPQEAT

SEQ ID NO: 461638 - protein, 341 aa, unidentified
MQTFIRIGVDLAKNFFQVHAIEREGGSPLTRKLTRRKFRELFSKLAPCRVGMEACGSSHYWGRELRAMGHEVVLMAPAYTKPYVKRGKNDAADAAAICEAMSRPDMRFVAIKSADQQAVLMLHKTRDLLVKQRTMGVNALRGHLQEFGLIAAKGIHRVEDLIALARTDAGLPQEAKQAVEILAWHGEQLDAKIDALEKTIAQASAKNPTSRLLNEVPAIGPLIASAMTASVPDPSVFKSGSDFSASLGLTPSQHSSGGKEKLGAITKKGNRYLRKTLVVGCTSVLRVAHKYKGALAEWIAAMKARKPERVVAVALANKLARICWAIMATGESFRQDMYTRA

SEQ ID NO: 461639 - protein, 327 aa, unidentified
MIEHYIGVDLHQAFFQVCAVNAIGTRLWEERFPRSEAGVAALLARCDRRTSLAVEASTPTWHFADAVSDHVGDLRVVDPVKTKLKAGYAAKTDRLDARRLADALRRDSVVGIYYPPVAIRELRELCRYRHAIVQVRTALINRLRAVLLRQGIVDGRRLARTRSDAWLKTLTLPPRAAASVAGLRRLLTTVRTAAADADREVLAAVAVDPIAQRLQAIPGFGPVLSLMVRAEVGTLTRFPTPAHLASYAGLVPSVDASARRIRYGRITRRGSPWLRWALVEAAIHGTKRHDRIGRWGRRLAVRKGALNARVALARTLCEDVFRHWPID

SEQ ID NO: 461640 - protein, 413 aa, unidentified
MNEGYRRCCGMDIHKDTVVVCALPPVGEEGQKVRKVYGTFRNDLIRMRVWLKQLKVTEIAMESTGVYWRPLWSVLEEEGFRLLLVNPVQVKALAGRKSDGRDARRIAEYLQDGRLDGSFVPSPEIRQLRMMLRHRISLLEQRNEVHNQIRDLFETANFKLSSVITDLMGVTGRGIVEALIAGEDSPDRLSWKVRGSLRKKEKLVKESLKGYFNDFHRSMLESHYKHYQFLTKEVAVFEERIAKAMEPYASQVELLTSIPGIDRMVAWHLLAELGIDLKAFPDAAHCCSWAGMVPGENESAGKQKSSRCRKGNKTLRRVLTQAAWAVSHCKAGYLRAFFHRVKARRGWAKAIVATSHKILVIAFQVLKTRTPYVELGSDYFDRLNPARTARKLVQRLEALGLQVQLSPIVGSNA

SEQ ID NO: 461641 - protein, 418 aa, unidentified
MTATDTTASTLLVAIDISKHRHEVLISIPGKTRRRRLTILNTLEDFQRLSATLASYGLPVRIGFEATGNYHRTLAHHLGRAGFELKVVSSVGLARTREALHNSWDKNDPKDAQVILHMLEIGAVQFFHDPIMVGTADIQELSKTHEIVSRSKTELWHRILTHYLPLYFPEAERFHRSSRTDWFLAFLEKYPSPRMISAMSRDAFIADAWEVVGRKVSKEQMLSDIYATAAGSVGLPVKPDSDAVRMFRLVLAEGRSLIRQRNEIEARAVELLSDLSDYQLLTTIPGIGPINAMTILAEAGDLRRFRHHRQFLKFCGMDLATVQSGMFRGQSRISKYGNARLRRTLWMAGQTAVLKRTNSFRDKFERYISKDRHNAHLRRKAYTAIAAKMARTVHAVVNHGEPYRPFFEGVSPGGRTSL

SEQ ID NO: 461642 - protein, 415 aa, unidentified
MALKIAYKICCGIDVHKTFVVACIASTNDKGVTSYESHRFSTYTSGLKTLLQWLLDRNCKDVCMESTGKYWIPVYNILEKDCKIVLAHPKYVKAIRGKKTDKKDAKWIADLFKHDLVAGSFMPPADIRQLRDLMRYRFKLTCFKSSEKNRLQNCLTVSNIQLGNVVSDTFGKSAQAILDKILENPADTSFDLEPLVFKSLKKELSELRDAIDGYITPEQAGKLKVIKAHYENLESRKAELEELILALAAPYQQELAILQTVPGISSDFTAIGIISEIGTNMEAFPSAKHLCSWAGLTPTNNESAGKKKSVRVSKAGCYIKPLLVQCANAVVTSKKHPEIRNRYLRIKKRRGHKKAIIAIARMLLTALYHMLKNGENYNAELYQKSDLPPVDREITVEQALIITRNQGYKIKSATI

SEQ ID NO: 461643 - protein, 362 aa, unidentified
MFRPHTLYIRIRIVRKVSEPAFAMKDQDVTDVIRRKQQTAMRYIGIDVSKATFVVAYSSDKGGEIRTFNNTTTGIKQFIGALPKDGSIHGVMEATGNYSALLLYMLNVAGITVSMENPLKVKNFAKAMLSTIKTDKSDARLITLYGEKMNPRPFKVQGEAILRLRQKRTVIRQLTKQITAMSNLRGSLACLPVPDKGATHTVDETIKFLEKKRDRLQSELTDLVEVEFSRQLALLTTIKGIGITLATALIITTGGFTYFQNAKQVSRYLGICPTYEQSGTSVNIKGHINRNGDAYTRGLLYIAAWPASRFNAQCKETYTRLRQNGKSGKLAMIAVANKLVRQAFAVVAHDKEYVDGFVSNRP

SEQ ID NO: 461644 - protein, 384 aa, unidentified
MDVFIGIDVAKEVHWACAMDRNARVLFSQAVGNDPAAIVSLIGKIEALEAENTRTAIDMLGGAASLLCAMFAEAGLPLVHTPGLAVNRARQGIRGGERKSDPKDAVVIAELARTRPDLRAVEPPDPLDAEIRLLVSRRRELVTEQTRRAARLRDLLSGLFPALERRIDPTTRTGLVFLSHYAAPEDIRAAGAKRITRRLTKAATGLRQAAQAQTVTIPGAQLRAEIIADIAREALAARDRLKATDHAIRERLANHPDTALILSMPGMGATLTAEFIALVGRIDRFDSADALAAAAGLAPVLRQSGKTSFLRRAAGGDKALKRVFYQAAFTSLGRPDSRAFYDRKRAEGKRHHQAVIALARRRVNVLWAILHKRQPFRENFKMAA

SEQ ID NO: 461645 - protein, 367 aa, unidentified
MARSGVFTEGASSEGRPVFMLHAGLDLSRRRLDFCLLDERGERVEAGVARPDRAGLEAFARGVEQRHGAVVVSAAIESMNGARFVHDTLERCGWQVEVADAQKVKGLAPLACKTDRIDAWVLAELSRRELVPAIWLPRFEQRAERERARWRLFLVRKRSSLKHRVHAQLLAFGHGCPVSDLFGRRGRELLARLEFPEPWRSGVLAAIAMIDDLDRQISGIERELRTLGADHRYVPLLMSAPGIAWVLGYTIAAEIGDISRFASPRKLAGYSGLCPRVYQSGQTDRRGHLTHAGPKYLRWALMEAATHGCRHPLYRDRYQRTKARLGKQRGPKVAQVDIARRLAEAIWYMLTRNQPFAPAGATQALAA

SEQ ID NO: 461646 - protein, 354 aa, unidentified
MPRKTTSLEAVATIGIDIGKNTFHLIGLDKMGAIVLRQKLSRSQIDARLANMPPCLIGMEACVGAHHLSRQLKAFGHDARLMPARYVRPYLRGQKNDFRDAEAIAEAVLRPTMKFVAIKTVEQLDLQALHRVRERLVCQRTSVINQIRAFLLERGIAVRQGLRALRSAMPNILAMTDKLSPRMIHMIEDLCTDWRHLDTRVATVSNEIETLSEQDDGAKRLMTVPGIGPIISTATVAAIGKGDVFSKGRDFGAWLGLVPRQMSTGGRTVLGPISKRGNRYLRMLFVQAARAVLLRPQSWAKYGLKSWIEAAARRLNRFKLAIALANKIARIAWGVLHGGRNFEVRSMRTASQAA

SEQ ID NO: 461647 - protein, 351 aa, unidentified
MSQQINISVAAVGIDIGKNSFHIVGQDRRGKIVLRQKWSRGQVEARFANMSPCLIGMEACVGAHHLSRQLRALGHDARLMPAKYVRPYSKGQKNDFRDAEAIAEAVQRPTMKFVATKTADQLDLQALHRVRERLVSQRTGTINQIRAFLLERGIAVRQGHRCLRTELPRILATSSDTLLPRILRIIEALAVDLRRLDERIEGLSSEIEQLAKQDAGCERLTSIPGIGPIISSAIVAAIGTGDAFAKGRDFAAWLGLVPKQISTGDRTILGKISKRGNRYLRVLFVQAAWVVLVKVKPTRWAGHGIQPWIEAAKKRLHHNVLAIALANKLARIAWSVLARGRSFEASKLQVA

SEQ ID NO: 461648 - protein, 414 aa, unidentified
MLKIVYRICCGMDVHKSFVVACIASTNDQGVTTYKSKRFSTFTGDLRRCAAWLSENNCKDVCMESTGKYWIPIYNILEPTCNIVLAHPKYVKAIRGKKTDKQDAKWIADIFKHDLVAGSFIPPADIRQLRDLVRYRCKLTNFTTGEKNRAQNCLTVSNFKLDDVFSDVFGKAASAITTRILENPTAKITDVSGFRTKGMKASNEQVLAAVDGEMCEEQAEKLRIIRSHMDSLELCKLNLESLILSTAEKYLPQLNLVMTAPGIQSFAAIGIISEIGVDMSVFPTSKHLCSWAGLTPQNNESAGKKKTTRISRAGAYIKPLLVQCALCAIRAKRFPEVRSRYLALKKRRGHKKAIIAIARMLLTAIYNMLKKNEPYNPELYRKGDRPPAHREVSVEEAIFILQRQGYLVTAPTTA

SEQ ID NO: 461649 - protein, 506 aa, unidentified
MKVQASKPTFTIDYNPIGQYGSNICRQDIGRKRPYRSLLRQRYWAWSFTSKLITMAKVAKRKQTSKGLRLEVVNPNAAGIDISPKEMQVCVPSDRDGECNRTFGVYTEDLHYIAEWLKACCIDTVAMESTGIYWLPVFRILKESGFDVILVNASDVKNFSGRKTDASDAEWLMMLHSYGLLKPCFQPENIARTMRNLVRHRDNLIRSASREVLHLQKAMEQMNLKLDNVFSDILGKSGQSVIKAILNGERDPKVLSDLADPRCRTSKEEMEKSLQATWDEEHLFEMRQSDSLYQFYQQLIAECDAKINEIAMQYSATVDAPKTELLRSGKYNAKKNRIGFDVEKVAFELWGVNVMRIPGMSRGALLRLVGELGAGFTTKFVDVKHFVSWANLVPNNKISGGALLSSKVPKKKNPVGIIFRQAANTLKAAKNPLGNYFRHMRAKGGHLQAMVATGKKLASIFYCMVQRKVEYNEKVYCNHRKQELQNKVAYLHKRLQRMESELANCG

SEQ ID NO: 461650 - protein, 393 aa, unidentified
MKNVYASVRAVGMDVHSKFSTVTMRDDKGQVVRRERLDHRDRAKLRQVLSHWPKDAPMVMEASFGWGWLADLMKELELKPELSNCYKIEQMRKARGLAKTNKKDADLLSLLPYEQGGWWKVWMAPPEVRDRREWMRHRSSLVAVQTETKNRISALFHRHGIIHEFSDLFGVAGRKFQARLCQEGRVGEVVLMPGAWAALKGLVELLDHVRSQLARIAQELRGQLDGSEMARRLDGIPGVGLILAHTLMAEIGLIERFANHRALASYSLLAPIANDTGEEDGKKPLGRHLGHRGNRTLKWALLEAAHGAVKTGGKWRRIFDAATDGGGNNRNRGYVKVARELTKIVEVVMRKKVDYTDQPPRRPGSSPRKRMDAFLGGTRSGTGQPSRPMAAVH

SEQ ID NO: 461651 - protein, 412 aa, unidentified
MINVSPLWTLQCLSSGPDQMLRQPTLTAKRTMTRAGDVNDGLDRGAAIRERPPTASMCQGGGVEQPPGEASMGQASTIGLDIAKWVFQAHGADATGRVVFRKRLVRAKVLEFFAGQPPCLVALEACGGAHYWARELGKLGHTVRLIPPAYVKPFVKRQKNDVADAEAICEAAQRPGMRFVPVKDEAQQANTVVFRARDLLVRQRTQCINALRGHLAEYGHVVPQGPAHVDRLVALVEDPKSAVPESARGILQVLIRTLNALEEQLKELDGEIARRAKTDPVARRLMTIPGIGPIAATAITALVPAPEGFRAGRDFAAWLGLTPLQRSTGGKHKLGAISKMGERTIRRLLILGASAVVRWASRRGAAAGSWLARMLARKPRMLVTTALANKMARIVWALLVKGGTYRAPAVAA

SEQ ID NO: 461652 - protein, 389 aa, unidentified
MLLDHPSDGPTAIRTQFGAIFVSLELSRSNWLITSLSPGKGEKMSKHNVTAGDVAGLMKLFAELRRKAEVRTGQSYPIITIHEAGLDGFWLHRVLHQEGIESHVVDPASIAMPRRKRRAKTDRLDGETLLRALLAYKRGEPRVCAMVVVPSPEEEDRRRLCRERRTLIEERVTHGNRIKGLLFAQGIFDYAPLRRDRRARLDALRTGDGRELPAHLKAQIGRELDRIELLLGQIKAVEAAQEALLAAARTPASQEAAPDPVTMLLALKGMGPNFVAVLWSEAFYRQFANRRKVAAYAGLAATPWQSGGIRHEQGVSKAGNPRLRTTMIQVAWLWTRHQPQSALTRWFKERSPQGRKRAIVALARKLLVALWKYVTQGVVIEGAVMKPVA

SEQ ID NO: 461653 - protein, 411 aa, unidentified
MRLLVGDDWAQDHHDIEVMDEAGRVLARKRLPEGVAGIGQLHELISRFLPEQGTDTEVQVGIETDRGPWVAALIAAGYTVFPVNPLQASRFRARHGVSGAKSDAGDAHVLADMVRTDAHQLRPAAGDSEAAGAVKVVARTHKTLIWERTAVVQRLRHQLREYFPAAVAAFEDLDAPDALELLAKAPDPARAAKLTRAQVSAVLKHAGRRKIAARTDAILAALRSPQLAQPPALTAAYAATVRSLIAVIATLNEQVAVLQGQVEAHFGQHPDAEIYRSQPGLGTITGARVLGEFGDDPHRYASSKARKNYAATSPITRASGKKKIVAARFVHNDRLIDALMIQAFAALRVSPGARAFYDAQRASGHEHNDALRRLANRLVGILHGCLKTRTCYDEATAWGHRENTGQSPLAA

SEQ ID NO: 461654 - protein, 349 aa, unidentified
MSIIGCDLHTRYQVIAEVDTDTGEMTTRRLEHENGEAKRFYAGLTNPSLIGIEATGYTQWFERLAGELGHELWVGDPAEVRARAGRRPKTDTRDAENLLELLLAQRFPRVWVPTPGERDFRQLLKHRDKLVKMQTSIRNQLHFLAMSQGVCRKQRLWSERGREELEGLGLGTWARRRRQELLELLDGLEPRIEEMDQAVKAEAERRPQAVELMKQKGVGPVTALAFVLTVGPIERFPTSRKLVSYLGLNPSEHSSGGHQRLGHITKHGNEMLRWLLVEAGHTAAQHDEELRRRYLRLKFRRGSNVAKVAIARRLAVHLYWRLRRYAADSHAQQPGVARGGRQPVHRNSD

SEQ ID NO: 461655 - protein, 515 aa, unidentified
MWDIWLNEESNNHDILDMKTTPRDLKSDRVSPATPAAPAKRSRRSRPPAQSPATDGLEQINLHAAGIDVGSAENFVCVPASAVKAGEASVRAFKVFTADQDALVEWLQACQVKTVAMEATGVYWMSLFDKIEAAGLEVLLVDPHSVRQVPGRKSDVMDCQWLQQLHTYGMLRGAFRPAAAVRKLRVLCRHRADLVCEGASHLQQAQKALVQMNVQLHLVVSDINGETGLRIIEAILAGQRDPAELAKLRDPRIKKSTVAEMTAALTGHYPEEQLFALRQNIDAWKFFQGQLAACDVQIEAALKAMASAAKAGAPPAPPKPVPTAAPGSAGAKKKRSRPLHGNNALTVDLSEQVRRICGVDLMNVCGLNLLSVLMIVAEIGVDMSRWRSAKAFSSWLGLCPGTKISGGKKLSRRTRHVVNRAAILLRLAALAAGQTDTWIGRFYRRKRAHLGAPKAITATAHKLACVIYHLLKYQEEFLPLDVAIYDIKAQEQRTRRLRKQAEELGFELVARKEAA

SEQ ID NO: 461656 - protein, 363 aa, unidentified
MNSRYVGLDAHSKNCVYEIQDENGRNVGRGTVPTTPGGLALLREREQLPEGTKVALESGTVAFLVARRLKGLGLDPVVIDAQEVRAKALRPNQKSDRRDAIELCEGLRRGIYRTRVHVPPEEIEAIRETLGRRRHFIGIRTMEINAVKRLLRSSGLPPVRSLSSAKAWEKLLKQVAISPSLHAFASAHYAVWTTAQQQIAALGESLKVQGEPYREELDRLQTAPGVGPIVALTMLATISDVARFPSSKHVASYVGLVPSTYDSGDRVRHGRITRRGSNELRSMLCEAAHHAAKPDNPLNPFFASVCARRGYKMAIVAVAHRLCRILYTMLRRRTEFDLRKLGIEEGCFEQIRVKKYRRITATA

SEQ ID NO: 461657 - protein, 341 aa, unidentified
MGQVSTIGLDIAKRVFQAHGADASGHVVFRKRLVRAKLLEFFAAQAPCTVAMEACAGAHYWGRELGKLGHVVRLIPPAYVKPFVKRQKNDTVDAEAICEAAQRPNMRFVPVKSEEQQANGVVFRARDLLVRQRTQCINALRGHLAEYGYVVPQGITHADAVIAHIEDPAASVPESARAILTVLVATFQALKAQVQVLDAEITRRAKADPVARRLMTIPGIGPIAATAITALVPAPEGFRAGRDFAAWLGLVPLQRSTGGKQKLGAISRMGERTIRRLLILGASAVVRWAGQRGTPANSWLAGMLARKPKMLVTVALANKTARIVWALLVKGGVYRAPVAAA

SEQ ID NO: 461658 - protein, 341 aa, unidentified
MKNKSFIGIDISKNVIDVSFFCEGTPIKDFPHDVFNNSRKGFGEMCTWLKKNHVVLSNCLFGMEFTGSYSMELEKFLNAKKYQFCMLSTHVVKHYPMGPKDKSDKIDSAKIADFLYRYNGTECVKPYKMPDKTMQRLKALMNERKFLVEQRTCFINRRQLCTTKEDALLYDGYIKKFDHDIENIELEIQKLLETDDSLSTTYKNLLAIPGIGFVNAMNVIVITRNFTAFETARQYASYVGVAPHSHTSGTSVKWRPRPSARCDGQAKADLSMAATVAVQYDAELQSFYNRKLGGKQDSDTKRKALNAVKFKLVLRMFAIGKQNRKWEPLDSKSSNEKLAIS

SEQ ID NO: 461659 - protein, 449 aa, unidentified
MSRPQVIDDEEHERIHDRVAAVDVAKDSGMVCTRTPHPSRPGARRSTVWTVKARMGTIRALGRQLRKDGIEIVTLESTSDYWRIWFFVLEACGLAVQLVNAAQAKNLPGRPKTDKLDAQWLARLTELGLLRASFVPPKAIRDLRDYTRARTRLIQERTRCWQRLEKLLEGALVKVSSVASKLTTVSAQDMIKAMIAGERDPQVLAGLARTRMRAKHDDLVAALDGMFDDHHGELAALLLDQIAFLGTRIAQLGARAADLTAAMPEAWGINPDGTTGPDAGATPEAPVLSAVARLAEIPGVSEDLARAIIAEVGLDMSRFPDAAHLVSWAGLCPSARQSGPRSRAGKKGQGNSYLRGSLGQAAIGASRTATFLGERYGRIARRRGNIKAQVAVARSILVIIWHLLANPEARFTDLGYGYYQARTDTDRKIRNHIRQIQALGFEVTLTKAV

SEQ ID NO: 461660 - protein, 457 aa, unidentified
MKSFFLGADVSKGYADFVILDEQKKPVKQNFQLDDTHNGHSVLFGIIDQLLRHHPQSRMFAAVESTGGYENNWYHSLQTFQHALNLSVARLNPLAVMHNSKADLKRNTTDKISARSIAEYLIAHSEKVAYRQHDQWASLRKHWGFIRLLSKQCTQLLNQIEPMLYIANPGLLGFCKDRMPKWVLKLLLKYPTAGQLARAKVSSVAKIPYVSAQRAKELVDMAKQSVASAFDPATQHLMQAIVKQILDLKKTIAIQEARLVDQCDIPEVDLLKTFIGIGDVSAIGIMIEIQTVKRFSNAKKLASFFGLHPVFKTSGDGSSGFRMSKQGRKEPRRILFMVALVAIRSNPLIREVYEHHLAKGKAKMDAIGVCMHKILRIIYGMLKNQTPFDPKVDLNNRQRAVVKTSEPAKDKNRRFQHFDPQAPISRRQNQKRLERKQPQCVDNTMRGVKTPVPESAS

SEQ ID NO: 461661 - protein, 368 aa, unidentified
MKKNSTCLKSPKRNKSRERSITIGMDLGDKTSHYYVLDSEGEMVRESSVATTKKGMKQRFGHLPKCRIAIEVGTHSPWVSRLLSSFGHEVIVANARQVKLISASSRKDDRLDAQTLARLARMDPELLRPIRHRGEKTQGDLMQVRVRAALVDTRTGLVNTARGLAKAMGERLPSCDADQMGVEKMQGLPAVLVEALRPLLETVESLTQQIKASDQKLEQLAGRDYPETELLRQVSGVGSLISLTFVLTIEDPNRFRKSRDVGCYVGLRPRRSESGESRPQLGISKEGDVYLRKLLVQGAHCILSQKSPDTDLKRWGLKLAGKGNKNAKKRALVAVARKLAILLHHLWVNGEVYEPLRNSRPLEPKAAA

SEQ ID NO: 461662 - protein, 430 aa, unidentified
MKKIRENVAGIDIGAKSVFVSAENEPVKSFNTFTSDFNLLRDFLLRMKIETVAMEATGVYWVILYEILEESGIDVWLVDGRETKQVPGRKTDVKDCQWIQQLHSYGLLNRCFVAENEIKELRSYMRLREDHIRSESMHINHMQKALTEMNIRLKEVVSQIHGVSGLKIIEAILSGERDKTVLTNLCHNSILKNKRKEVLKSLEGKYSESKLFALQQAYSAYKFYSKLIQECDSKINEIINKMGNSGNGQTPKKRKVIRHHTPHINNFGANLLNIFEDKDATVISGITDYTWGQLLSEVGKDLSRWKTEKHFTSWLGLSPGQNNSGKKNKRSKKKGHPKAGLIFRMIAQGLINSKKVAIGAFGRRLRSRKGPSIAIKAMARKLAVLYWRIMVKGLEYAESGIEKYEEQLNIQKMKSFKRLAKELNIQTIDI

SEQ ID NO: 461663 - protein, 355 aa, unidentified
MNQEKYIGMDVHQATISVAVMDSSGKLIMECILETKAATILEFIAGLRGTLSVTFEEGTSAAWLHDLLKPHVSHLVVCDPRRNALLKDGNKSDRIDAQKLAELLHANKLHAVYHGEHGIRTLKELGRSYLTITKDLTRVMSRIKALYRSWAIPCSGATVYAPRHRDEWLAKIPHPGVRLRAERLYQQLDVLQPVRQGARRDLLVESHKHRAVKLLRQIPSIGPIRAALLVALLQTPHRFRTKRQLWAYSGFAVEIHDSGEYRFVRGKLQRNRERITVRGLNHNHNHDLKNLFKGAAQSASTRPGPLCDFYVALVEKGMRPTMARLTLARKMAAIALIIWKKGVDFDAKQLNRQAA

SEQ ID NO: 461664 - protein, 413 aa, unidentified
MDAIVERCAGLDVHLDTVVACVLYGKLDIKPKKEVKTFSTTTKGLLELLDFINQKECTHVAMESTGIYWKPVWNILESGAFDLIVENAKKIKNVPGRKTDVKDAEWIASLLRCGLIEKSFVPPERIRDLRDLTRLRKELLGEVNRNKNRIHKVLQDANIKISSVLSDVFGETGKSILNQIIGNQCITEEFIYSLYEGRGKSKLKSTPMEMYEALNGKIRGHHVILLGMHNSNIVFLEKQINELEKEIDILLQKERDSLELLETIPGISKISASSIIAEIGTSMDVFKTEKHISSWAGLCPKNNESAGKKKRSGIKSGNNWLRSMLCECAWSATKKKDSRFKNKYWSMVPRMGRKKALIAIANMMLRLIYHLLKTKSTYKELEIQYFIDKDKRREDRIIKELKSKGYLVEKDSL

SEQ ID NO: 461665 - protein, 344 aa, unidentified
MAIVGGLDIHRRQITYDWIDTTTGETRRGQLSPATRLELRAWLEQFHRQPADFALEATTGWRFVVEELERAGFRAHLAEPADTRALRGPKRRAKTDRTDARHLRELLRAGTLPESWMPPPHIADARTQVRLGRALVGERTGWYQRIHAILFHHGLPERSQLLTADGRAWLASIHLPAVARQAVDLALRMIDHLEVELDTLDAQLAHIARVQPGCQALQRRYGVGWLTAVAIWAEFGDVRRFANSRQAVRFCGLDITISESDGKRARGHLARQGSPVLRWALHEAAMCAARPSSPDHAHYLQVKQRLGAKRAALSVARKLAREAYHTLRELGDQALVPADLPTAA

SEQ ID NO: 461666 - protein, 463 aa, unidentified
MRRKHNESKKIVRIDALKQVAANAAGIDIHLNDHWVAVPETRDSVSVRRFGTCTADLNEIAEWLEQCGVTTVAMESTGVYWIPLYEILESRGFQVCLVNAQATKNVSGRKSDILDCQWLQQLHSYGLLRPSFRPPADIATLRSYVRHREMLLKYRSGHIQHMQKALALMNIKLTSVLKDITGQTGMQIIRAIVAGERDPVFLARFRDPRCRSSQDEIARALEGNYQPEHLFALQQAVELYDIYDQKLAACDAQIADHYAVFEAQVDIVEQPLPPTASQVRYRKKANTPKYDLRTLLYRMAGVDLTTIDGIDILLAQDIISEIGLDMSKWPTDKHFASWLGLAPNNRMSGGKTKSRRTKPTSSRANLAFRLAARSVGRSQTALGAFYRRIKAKHGAPVANTATARKIAVIVYHMLKDKDPYIDPGVSYYDTRYKERKLRNLQRQASQLGWRMIPESEPILEPVS

SEQ ID NO: 461667 - protein, 422 aa, unidentified
MKTPGNKPFSAFIGIDWADAKHDVCIQAADKEHREFSCIPHKVDAIDEWAQSLYRRFGGPIAVALELSKGPLVYALQKYDFFVIFPVNPSTLASYRETFTPSGAKDDPTDAEFVLDLILRHGDCFNALHPQSVEMRTLVSLVEQRRRLVNDRVRTTNRLRNTLKQYYPQALQWFDRIDTPLFCAFIERWPTLVQVKRARRTTLQTFFNQHNMRSAHLLDTRLSSIKAASPLTLDEAVITPNRLQALVLVDLLRVTLAAIKRFDEKIAELAPQHPDYALFDALPGAGPSMAPRLLVAFGEQRDRFKNAAELQRYSGIAPVTERSGKKHWVHWRWQCPTFLRQTFVEWAAQTINKSFWAGVYYRQQRDKGCNHQAAVRALAFKWIRILYRCWQTKTPYNEALYLKSLKRRGSPLLNQIEATIST

SEQ ID NO: 461668 - protein, 316 aa, unidentified
MKNYIGIDISKSSIDVYDGKKSYKFENNEDGFKKIIFLVKDLKETVFIFEPTGIYSYALTEFCDKKNINCVIVSPKVSRDFARSLKVRSKTDKIDAKVLYKYQSHVEPSMIKVPKVNHHAIKIQEMLNSYELLKSTTQQFKNQLESISDNNKNLIRLTNKMIKLHEIEADKLFSKIEKLLISDESIKRKYEAMLTIPAIKNKSALYLISFFLKYPLANAKEMTALVGLDPVMRDSGTYRGKQRISKHGGQQLRNLLFLPTLCSLRFNDRIKVFYTRLTSNAKSKKLAVIAAMRKLILMAFSIFKSEQNYQPLYVEN

SEQ ID NO: 461669 - protein, 338 aa, unidentified
MALYCGIDLHSRDCWLAILDEGLKVVREAKVGNDLEAILEILEPYREDLKGIAVESTFNWYWLVDGLDECGYQMHLVNTWAVKQWEGLKYSDDRHDARWLAHLLVLGILPEGYIYPKQERSVRDLLRRRAFLVRKRTSFLLAMRGAFECRTGLRTTSREVKQWTVEEVESYLEDPVEALGITCLLEPMKSLDGQIRIIERKALTRARLRDEFAPLQTVWGIGKILALTMMYEVGEISRFKKVGNFASYCRLVKTARLSAGKRKGSGNARNGNPYLSWAFSEAAHFAVRYHLPAKKYFQRKRSKTNGIIAIRALAHKLARASYYVMKDQVDFDSERVFG

SEQ ID NO: 461670 - protein, 443 aa, unidentified
MSDDSQGCLVPTARPEPDWAAFVAIDWADQTHAFKLLDLATCRYEQGTLRATADGLNEWVTALQRRFGDRPIAVALEQSRGSLVYQLNKYPHLVLYPVHPNMAAQFRQALHPSGSKSDPSDAAVLLELLEHHRSHLRRLTPESAETRELQMLVEHRRTLVDEKTACSNRLTAALKSYFPQALEWFGDIDSPLACDFLEQWPSLQQLHRTKPNALHKFFTGHHCRGEDRIQERITAIYKATPAVTDGAILQAGSIAVTGWVRVLKALAVGIAEVDQRLKQVVDMHPETYLFEGLPGVGPALLPRLLAAFGTLRDRYDHVQQLQAYSGVAPVTERSGKTMLVRFRRACPKFLRQTFVEFADHSRKKSQWARAFYDLKRSQKMGHQAALRELAFKWQRILFRCWKERKPYNEEVYLRAREKHHSPLATHVEWTEVAGFRKPRLKNA

SEQ ID NO: 461671 - protein, 352 aa, unidentified
MEIIGLDLHKRETQLCRQQPDGHIVDERIPTSRVRFTQTFGGVAPARILLEASTESEWVATHLERLGHTVIVADPNFAPMYATRSRRIKTDKRDARALMQACALGAYRPAYRLSAPRVHARAALAVRDTLVRTRARMITLIKTLVRRDGLRVPTGTSRTVVQRVATLELATTAPALGAELAPLLAMLPGLTAQIATLDATLAAVAADDPVVARLATAPGVGVVTAVAVVATLDDITRFRSAHAVEAYLGLVPSEDSSADRRHLGHITKAGNARARWLLVEAGWRILRSKQPEMAALRAWGRAIAARRGARIAAVAVARRLAGVLYAMWRDAVPYDATKLQRRARRAGAPPGP

SEQ ID NO: 461672 - protein, 391 aa, unidentified
MGKVWAGIDAGKEFHWACVLDASGAEMLSCKVENDEVDLLKLIDEVLSMAEDVVWATDQPGGSAALLLALLWERDQRVLYIPGLTVDRARDAYRGESKTDARDAHVIADQARMRSDLGGLTASEGDLAELQLLLARRRDLVADRTRSVTRLRETLLALFPALERALDLNRRGALTLVAHYQTPASIRRMGRKRLTSFLKNRGVKGAHALAEKALAAAKAQSATLPAEDVAARIVVELAGEALDAKERVEALDGEIRQRFFARPEAKILASLPGMGPILGAEFLVETGDLSAFESSDKLAAYAGLVPAAHDSGKRIGNDRRMRGGNKVLKRVFYQSAFASLRSAPESRAFYDRKRREGKKHTQALIALARRRVNVLWAMLRDGTTFKTPSAG

SEQ ID NO: 461673 - protein, 316 aa, unidentified
MPSSPLFVGIDVAKATLDIALRPSEQLWQIIYDDAQIEALVIQLSELSPTLIVVEATGGLERILVAALVAANLPVVVINPRLARDFAKAIGRLAKTDRMDAQVLAHYGEAIRPSRRPLPDADTQQLRALVDRRRQLMDMMSAEQSRLNTSSARIRDAIEYHLTWLRQQVGRLDEDLDGMLKASSLWREYDAILQSTPGVGPVLSRTLISQLPELGDLNRKEVAALVGVAPFNRDSGTWRGRRTIWGGRATVRAVLYMSTLVATRYNPVIREFYERLLVSGKIKKVALIACMRKLLTILNAMIKHQQQWQPRVAKSM

SEQ ID NO: 461674 - protein, 368 aa, unidentified
MKKHNSSGKNLKQEQKTWKGPLTIGMDLGDRTSRYCILDGNGDVAYEASVGSTSAALKQVFGQVRKCRIAVEVGTHSPWVSRTLKALGHEVIVANPRQLKLITESSRKDDRVDAEMLARLARVDPKLLRPIRHRGEEAQMDLMMIRARAALVEARTSLVNAARGFSKTVGERLAGCDADQMGVEKASELPKELQEVLRPLLEQVEALTARIKECDRKLEQIAKDKYPETTLLRQVGGVGILIALTFILTVEDKDRFTRSRDVGCYVGLRPRRSESGESQPQLRITKEGDSYLRKLLVQGAHHVMSERSPDTDLKRWGMKLAARGGKNAKKRAIVAVARKLGILLHRLWVTGEVYEPLRNANMQIGKAA

SEQ ID NO: 461675 - protein, 380 aa, unidentified
MDKACGLDVHKDSVFACIKDENGKNIFEKRYGTLTPDLADMRKAILANGCGRVAMESTSIYWMPVWRALESDFSLTLTNPYFIKQLPGRKSDAKDAAWIAECLQKNLLKKSFVAGNVLQCMRLYSRQHRRLTTSRVRLEQQMDNQFQRCNIRFSNYVSNQGKNVSMRKIIKKMIGGERDPVKLCAPVHGRTQNRHGKDVITASLTGVIGNADVEMLKQCMEQIELIEKQQATCLNHLEELANEHFAGEISLLCTIPGIQKLSALFILAEIGNDMSVFPKATDLVGWAGLRPRNDETSEKIRSRKILHGNKYLRQILVQISWSVALSNKSFLGKKFKALSGRMKSQKALIAITRKILVIIYNVLKTKQPFDPKKNLQALKA

SEQ ID NO: 461676 - protein, 314 aa, unidentified
MSTQVFVGIDVSKAQLDLALRPEGRFSAPNNEAGCAQVLERLRAVSPTLVVLEATGGLEIPLTGVLAAAGVSVVVVNPRQVRDFAKATGRLAKTDALDAQTLAHFAEVMRPELRPLPDEQTQALAAIVARRRQLVEMLTAEKNRLSAAPKSVCKSLRTHIAWLERELRHTDRDLADAIRESPVWREKEGLLRSTPGMGPVMTTTLLANLPELGTLTGKQIAALAGVAPLNRDSGTLRGKRTVWGGRAPIRATLYMAALVAARFNPVIRRFYQRLCAAGKAKKVALTACMRKLLIILNAMLKHRTPWRGEVVSCA

SEQ ID NO: 461677 - protein, 421 aa, unidentified
MRKDLAIVAVDLAAGEQAAVVADHDSRVLGRRKFRGPARRIEAILDWAAPIAARAGFAGVVVACEPTGHRWKVVLQAARGRGLPMVCVQPMLVARAREAEDYTGSKSDYGDAVIIARLVAELRCYIPYLPAGPWARLRHLGVRRAQLLDRVTAARQCLLDLLECGWPSVLGGAAQPAESLTWRAALTVSASPRVIAAMSLGEFTTAVRRQLPAAGGKRISRRIAVAIHAAAAAPGGVEAEQDALAERAEYACADWLAALAEVQRVEAHMVKILDELHLTHLVTTIPGISAVGAAAILAETGDPGRYDDPRAWVKHAGLAPRANESGTFRGATRTTGRGRPRLRTAAWRAIWGALPHNPVHTSRHAHLTGRGHNKLNDGKARSALAAALLRQLYVVITQRVPWDPAIASGAALPGQVTATAA

SEQ ID NO: 461678 - protein, 387 aa, unidentified
MTVRTVSNLPAAMHVEMARCLFAIELSKQSWVIGFITPLSAKISRRILSGCDWKGLLDLIEEVRARVSRETGRAVDVLSCYEAGYDGFWLHRLLEAHGIRNYVIDPASLQVDRRARRVKTDRIDTERLLRSLMAYLRGEPKVWSVVRVPSVAEEDARRLHRERDRLVSERVQHVNRIKGLCALHGIYDYQPLRPQAMARLEQLRTVQGISLPPRLKSEIKRELQRLELVVEMIATLEAERDAIVEDEASTHVNAKKIQNLHQLKAIGPEFAAVLVGEIFHRDFNNRRQLASYVGYAPSPFQSGNVAHDQGISKAGNRKGRTTGIELAWLWLRYQPDSDLSVWFRARVGTTKGRIRRIAIVALARKLLVALWRYLETGLVPRGAVLKG

SEQ ID NO: 461679 - protein, 348 aa, unidentified
MLHVGLDLSRKRLDYCLLGGDGERVERGAVAPDGDALAGLVRLVELRHGPRAVCAAIESMNGARFVHDVLERCGWEVAIADAQKVKGLAPLACKTDRIDAWVLAELSRRELVPAIWLPSFEQRQERERARFRLYLVRHRSSLKQRVHSQLMAFGHSCAVSDLFGRQGRELLERLVFPEPWRASVLCAVAMIDDLERQIDGIESELKALGACHPYVPLLLTVPGISWVLGYTIAAEIGDISRFASPKKLCGYTGLCPRVYQSGGSDRRGPLAKHGPKYLRWALMVAATNAAKHPLYRERYQHTKQRLGKQRGPKVAQIQLARTLAEAIWHMLTRNQTFAPAGAPLPLAA

SEQ ID NO: 461680 - protein, 354 aa, unidentified
MARYSKEAWKGKHLFVGIDVHRKRWHVTVRSEDGLVLFSNGIDARWEELVRLLSRFSEAGQMSVVYEAGYFGFWLYDRMIEYGVDARVTPPHLIPQRSGNRVKNDRLDSGKLAEFLQSGLLTALHVPTVQERAHRQVSRRRRQMIGNRVRAQNRIKAELRVNGIELPRESRGKWSQVFVDKLRAFRFQDRYQQDSFQTLLNEFDFHSEQIQRQTNLLMELSKSEKYRDRVEILTSTPGIGWISAMELLLELQDVARFQRADRLAAYVGLTPSQYSTGEKLRLGHITRQGKSNLRALLVEAAWRVIKKDGALRQKYERIKIRAGSKRAIVAIARMLIIRLRRILIHKEMYALGLD

SEQ ID NO: 461681 - protein, 369 aa, unidentified
MKNGSTLRVGLDVHKESIAVAYAGEEGTEAVYVGEIGTRQCDIDAVIRKLQSKGAELVFVYEAGPCGYWLYRYLTGKGLTCFVVAPSLIPRKAGDRVKTDRRDAVMLARLARSGDLTPVYVPAVGDEAIRDLSRAREDALHDLNAARFRLKAFLLRNDIRYSGRANWSAEHVRWLARLVLPTPAQQIVFQEYVRTVSERTELLRRLESELLEQAKTWRLAPVVEALQALRGVQFTVAITTVAELGDLTRFDSPRQVMNYLGLTPSEYSSGERRRQGGITKMGNGHARRVLVEAAKAYRHRAKVSEQIQARQQRLPKEICDIAWRAQVRLCGRYKKLALRGKHANTIAAAIARELAGFMWAIAKAQATAA

SEQ ID NO: 461682 - protein, 308 aa, unidentified
MIAVGIDISKSRFDVAVHPTGECWSSETDPSATEILVSRISELQPDRVVLEATGGLEAPLAAALLNAGLAVAVVNPRQVRDFARATGTLAKTDRIDAAVIAEFGAKIIVHLRTPDDEQRSHIRELVVRRGQLIDLITAEKNRRRRVGSDIVQRINRVIVFIEAELADLDDEIGATIRDSDAWQDTADLLQTIPGVGPTIASQFVALLPELGRLNRSRIAALVGVAPYNCDSGAFRGKRMVWGGRVQVRRALYMATLVGTRYNPVIREFYHRLRTKGKSAKVALVACMRKLLIIANAIVRNHQPWTLIS

SEQ ID NO: 461683 - protein, 343 aa, unidentified
MQVSTIGVDLAKNVFQVHGVDNAGKVVITRQLRRKQVIDFFSKIPACLVGMEACGTAHHWAREISKLGHTVRLMPPSYVKGYVKRSKNDAADAAAICEAVTRPSMRFVPIKSADQQALLMLHRTRDLLIRQRTQLINALRAHLAEFGLVAETGREGLAQLAEIITDESNREALPSAMKQALQAIVDQLAALELPIGALDRAIHAHHRANDMSCRIETVPGIGVIAATAIASTVTDPSNFKSGRDFAAWIGLVPRQHSTGGKERLGGISKQGDRYLRRLLVIGATSVVQHARRHPQKYPWIIRLLARKPAKLVAVAVANKMARIAWAIMAKGGYYRAPELAAAA

SEQ ID NO: 461684 - protein, 410 aa, unidentified
MEQQVKFDQVIHCGCGMDVHKKTVVATIRRSDTDFETREFNTYTRSLKSLREWCKSEGVTHVAMESTGIYWKPVYNIMEEDFEVILVNARHIKNVPGHKTDKKDSRWISKLLLSGLLKGSFIPPREIRELRDLVRYKRKVIAEISSEKNRIIKMLEDCNLKLSSVFSDVSGASSSKMINDIIEGNEEVEGLMKHIHGKVQAPRAEIRQALEGTLTDHHRTMLRVIKMSIEGKERIVEELDKQIDACVIQYAIEIEQLQTIPGVGKESAIRIISEIGVDMSRFPNENHLSSWAGMSPGSNESAGKKKSSRVIHGNKHLQTTLVECGWGATRKKDCVLKRKYESLVGRRGKKKALMAVGHKIIIAAYFIIKTKEAYKEPLLNDNPKRKNKQVKNYLARLKELGVEVEVKEVA

SEQ ID NO: 461685 - protein, 437 aa, unidentified
MGKEDEETTMSGKETVQAEPEFVAFVGIDWADQKHVWCLQKANSTQREAGELEHRPEAVEAWVGELCRRFGYGPIAVAVEQVKGALVYMLRKYECLHLYPVPSTMSASMREALYPSGAKDDPRDADVLLELLVLHRDKLRRLTPDNEATRRVQNLVEERRKLVEEKTAQLNRLTGYLKVYFPQMLEWFAKLDSKLVCDFLERWPSLEELQKVPSAELKKFFRHRRGRHGELTEWRMHGIGQATPAIRDRAGIEAKQTVVQVIAQLLRTLLEGIATLERKIAEAAEVHPDFFIFQSLPGAGAALAPRLLAAFGSQRDRYSRAEEVQKYSGIAPVTERSGKKKWVHFRWACSKFLRQSFHEWAGHSIAQSVWARAYYQRQRERGKEHHAAVRALAFKWIRIVFRCWQDRVAYDETRYLTVLAKRGSHLTSAFVDVAVSM

SEQ ID NO: 461686 - protein, 330 aa, unidentified
MKTFFVGIDISKDWLDVAICDETTLEIMLSWRCDNTVEGIEKMIKKCLKQSLGSSIWLCFEHTGNYGLLLSSLLEAQQISYTAVPALEIKRSIGMTRGKNDEVDAIRIATYAATHKQKLKPSKLPGKEILRVKYLLTHRSLLLKTCVQLQNSRKSMLIASKMVDLQDVITDLEKRIADLKAQVTAIEEAIKAELEEDDSLAKTFKKITSVKGVGLMIAASMIVCTNNFSAFENPRAFNCYAGLAPFSFSSGSSIQGKTKTSELRNRTMKALLFNGANSAVLSDFELKNYYNRKIKEGKHRMVVINAVACKMVYRIFAVLKREEPYVNLMR

SEQ ID NO: 461687 - protein, 343 aa, unidentified
MYYIGLDVHKRTISYCVKDAAGHVHQEGKIGSTRRELDAWIKTLPQPRMIAMEATIFTGWIYDHLLPHAEKVKVAHPLMLRAIAAAKKKNDRIDAGKIADCLRCDFLPECHMASTEIRDRRRTLRYRNLVLRQTVQMKNRVSGLLMESGVSYDKQRLHKMGYFTELFSTNEEISDSIRPLLRLGREHILRGQRLDRALTSSLERDPLLSERLRRLRTIPGVGPITALTWALEIGDYTRFPSVKEAISYCGLCSAEKSSADKVMRMPISKQRNKHIQHVLVEAAKLAPRYSHELALVRDKEMQRGNRNRATLAVARKLVAYMLAVDRRKQDFVPAEEMAGKAVA

SEQ ID NO: 461688 - protein, 421 aa, unidentified
MKVTYQTCCGVDVHKSFLVATIVKTTGGIEPSYQKKRFSTFNNSILEFKQWLLDNGCHDICMESTGKYRVPVFNLLEDEINVVIANPKWVKAVKGNKDDAKDSKWIGDLFRLGLVKGSYIPCKKVRILREYTRYRYKLVSCRSSEKNRYQNALTVCNVALDSVVSDIFGKSSTSIIDYLLEQSGTSINHEEIASKLLRSLKSKEDAVIHSIEGYQMTDAQKYRMRLVRAHMDYITAEINDVDKMIENMISSNPDFENAVQFLCTIPGVKRDSAITIISEIGIDMSQFSSSKRLCCWAGLTPGSNESAGKKKSVRITRAGIYLKPALVQCAHAAVKSDKSPYYKKKYGSLVKRRGKKRAIIAIARMILTAIYQMLSTGEQWNPSDLYKIDIPVALVEKKRQKLSSRLRSCCNGKDYFLLMNH

SEQ ID NO: 461689 - protein, 428 aa, unidentified
MDEVDRNRLEEFRQLRQAIRQSEEHLIVGIDIAKDRHHAFFGTATGKTLLRRLVFSNDGEGFGKLLGQAEALRVRHGLKKVVYGMEPTGNYHKPLGEYLIHMGRTVVLVSGVTVKHNRESLDGRWDKHDDKDSANVADLISQGKCLYYEYPTAELRGLRGLLSLKRRLKRQEQSYRVRIRNHLIAQYFPEMDSEYGRSEAQGLAIVRWCFPVSQITEIDVNPFIERVTSRRISMEKKRRLEAIWEKAGESIGCDAVPGVEHEAKVMVEGLRQIREMIKEIDGKIQELCESFPEYRSLLSIPGFGPDVSAKVLGTIGDPDRFQNGKQVLKQAGLDLSANRSGKDSAKAIPQISKRGKADLRYALYQAAFIASTKNQDFMRYYTSKLRGREKEKGIHTKMLIKLSAKMLLIAWTVMRKKETFNPTYLKAE

SEQ ID NO: 461690 - protein, 323 aa, unidentified
MKAELGIDVAKAKLDVALRRPDGKFRHKVVENNPAGFTALSAWLDKQDITELHVCMEATGIYWEAVAEYLADAGHTVSVVNPAQIKAFGAAALVRTKTDKADAKLIAEFCQAQSPVPWQAPSPALRELRALVLRRNALDAMRTQEHNRLLVARDSVRSGIAAHLAYLEKAIAEVEAAIRQKIDDDPDLKQQRDLLDSIPGLGDKTIPVLLSYYGGPQRFDKAKQAVAFAGLDPRQHESGSSVRGKPRLSKVGHAFLRKALYMPAMVTITRTVWGRAFRDRLSAAGKAPMVIIGAMMRKLIHVAFGVLKSGTPFNPALHGLVCA

SEQ ID NO: 461691 - protein, 341 aa, unidentified
MMIIGCDFHPRFQQIAFIDQETGEYGERRLNHPEEAERFYRSLVGRPVRIGAEATGNFRWFRHLMEELGHEFLLGDATAIRAACPRRQKTDKRDARHILNMLVEDRFPVVWQPSVENDHVRQLLLHRCRLVRMRTRIKNQLDSMAKNEGLLSSRVWSPRRRSEIEALPLPGWYAYRRADLLGLLDELDKRIRPLDEAVREAAEDNQEARLPMTHPGVGPIVSLAYVLTIGDWRRFPRGKQVGSYLGLIPEEESSGGTRRLGKVSKLGSVLVRWLLVEAATTAQRYDASWHRQYVRLSMNKHHGVAKVAIAHKLAVRLYWMLRSGDDYSKVMERGSHAGQSV

SEQ ID NO: 461692 - protein, 412 aa, unidentified
MDRFVERCAGLDVHKDTVAATVRVPGGAGQRLQETRTFSTTTGGLLTLADWLESYGVTLVGMESTGCYWKPLYYALEERFECWLLNAQHLRNVPGRKTDVADSAWICQLVEHGLVRASFVPPKPIRELRDLTRYRKAQIEERSREVQRLDKVLQDAGIKVSSVASETLGVSVRRMLDALVAGTHDPDVLAELARGRLRRKLPELREALTGRFRSDHHGLLVSQILAHIDYLDETIAFLSARIEQVIAPFSKQRELLETIPGVARFAAQVLIAELGVDMTVFPTSAHLASWAGQCPGNHESAGKRRSGKSRKGSKWLHTTLTESAKAASRSTATYLSAQYQRLRGRRGPDRATGALRHSILVAAYHILQQKVPYQELGADYFDRRRSSDQRMKRLVRQLEQLGHKVTLEPLAA

SEQ ID NO: 461693 - protein, 412 aa, unidentified
MTNGMRRWFAGVDWGSEKHQVCLLDEAGTVVGERVFQHDAAGLAALCDWLVSVAGDTSSVAVAIEVPHGPVVDVLLDRGFAVHAINPKQLDRLRDRFSPAGAKDDRRDARVAAAGLRTDPHLFRPLQVGDPAVIELREWSRLAEELQQERVRLANRIRQQLWRYYPQLLALSDDLTAEWILALWTMAPTPAKAMRLHEATIAKLLSRHRIRRLDAAGVAEMLRQPAITVAAGVTEAAILHLRSLVARLRLANTEFHQAERKLDELCAKLSQNATAAADGPCDAAILRSVPGVGTVILATLLTEAGDPLARRDHTALRTLSGVAPVTKRSGKTCIVVMRYAAQARLRQAVFHWARVAVMHDPTSRSRYEALRARGHSYGRALRSVADRLLGVACVLLRRRTLFNPNHGTSAAA

SEQ ID NO: 461694 - protein, 355 aa, unidentified
MVSPIKYSVGADVSKSEIYVAMLLQTNDLKTVVKGTRKFANTPDGFKQFEHWIHSHKKFDIAVHITMEATGNYHENLAFYFDSQHFIVNVVLPNKAKKYLQSLGNKSKNDKIDARGLAQMGAEQPLMQWKPFSESIYGLRSLTRYCEQLSTHRTMYKNQYEALSYGMYQMEDIKKQLLELIKMVEKQILDTKKKIETTVKKDKKIWEKMEKILQIKGLGIYSLATIVAETNGFEMFENERQLCSYAGYDVIENQSGKRNGKTRISKKGNSHIRRILHLPALNVVRYGEKKFVQIYERIMSRHNKKMVAYVAIQRKLLALIYALWKKNEMYDTDYQWTFGNVESKVLFPVGSQRAG

SEQ ID NO: 461695 - protein, 370 aa, unidentified
MGPAVEPQLREAPVMSEGSCVGLDVHARSVVAGVIDLGSGEVRSLRVPPGSEATVAWLRTLPGPVRVVYEAGPTGYGLARACADAGISCVVAAPSKIRPAADRVKTDRRDAERLARLLRLGEITAVRVPGPDEEAARDLVRAREDARGDLMRARHRLSKLLLRHGAVYDATAWTRAHDAWLRKQRFQGGPLAIVFDECYSRMIDAKTRRDTLDKAITELAASEPYVDVVERLVCLRGVSTLTAFALTVELGDWNRFRPESLGPFLGLTPSENSSGQRRRQGGITKTGNTHARRLLIEAAWHQRSAPRLSVTLERRRTGKSLAVRAQADSSARRLHGRWNALEARGKPRLIVVVAVARELAGHCWALATME

SEQ ID NO: 461696 - protein, 406 aa, unidentified
MDILYERCCGIDVHKRIIVACLKCGKQQEIREFGTTTDEIRILTKWLQDSDCQMIAMESTGSYWKPLYNIFELSALDAMVVNARDMKNVPGRKTDVKDAEWIADLLQHGLLRASYIPSREQRELRELSRYRKSLIEERARELNRLQKMLEGGNIKLASVVSDINGRSARNLLSRMLKHDTPLTKDEVSGMIHGRLRHKVEAIMKAVDGFLTPLQKQLMLKVVDHIDDMTKRIGEMDELMNQYLTEYHEAIHKLDEMPGIGRQSAETILAEIGLDMSRFPTERHFSSWAGLAPGNNESAKKRRNGRTTKGNITLKTTLIQCAKAAVKKADSFLSAQYQRIVVRRGANRATVAVAHTMLISIYHMLKDNVPFVDLGAAYYNKFNVQSKINHHIKKLKQLGWEPNDATI

SEQ ID NO: 461697 - protein, 311 aa, unidentified
MYYIGIDVSKKDLSVFDGKDLNFINKEGLKSFKKYLKKKYRFSEIAIIFEPTGIYSLYLKEFCAENSIKAYIVNPKQSHNFARALGIRPKTDKIDARILYQFHKLIEAKDIKVPKIDQQAKTLASYLVSYEFALKQRISLSHHLEGLRDKRLITLMKKEQKRAKKLEDKIFNDIKEYLKQNQNLEEDYQRLLTIPGIGEKAAIALLTLFKTYQGTNRVQITALTGLDPVRRESGTSVKYKVKISKNGKGIYRKILFLPTICATVHNQKIRLLYQRLLTNHKPKKLALIASMRKILLIAHAMYRDKTEYVAA

SEQ ID NO: 461698 - protein, 344 aa, unidentified
MSEYVGLDVSLEGTSVCILDDSGRVMLERTVVTNPGSIARLIRAKARRVNRVGLETGQLSVWLCHELRRLGVPVVCMDARQAHAALSVRPVKTDQNDARGLAEMVRMGWYREVKVKTLSAHEQRGLLMARQRLIVVRRQIEGQVRGLLKTFGLVVGTGVGGSFVRRVKQLADRRPSLSGAIHSLLDVLAAATREIVILDKQIAAIARVNISAKRLMTVPGVGPLTALAYVSTIDDPTRFRRSADVGAYLGLTPRRYQSGEIDRQGRISKQGDRFLRTLLYEAANVLMTRVKRWSPLKAWGHRLSKRVGPKKAKIAVARKLAIILHCIWTDGTEFWWTRAEATMI

SEQ ID NO: 461699 - protein, 421 aa, unidentified
MKSASTTVNTALPDEPPNGVTGGLDWSRDDHAVSVINDRGRELVRHTAEHTADGLRQLVAVLVGAGCREVAIERPDGPVVDALLGAGLTVVVINPNKVKNLRARYGSAGNKDDRFDAFVLADTLRTDRARLRPLIPDTPPTLALRRAVRARRDLVIHRVGLANQLRDHLKRVFPGAVGLFADIDSAISLAFLTRFTTQQQADWLTPARLGSWLSKQGYSGKIDAAVLHARLLAAPRGPVGVDGQAHAAITRGFVTVLLVLLEQIKALTAEIETQLAAHADAHIFTSLPRAGKIRAARMLAEIGDCRAKFPTRESLTCLAGVTPSTRQSGKSHVVAFRWACDKQLRDAVCDFAGDTRRANPWAADLYNRARSRGHDHPHAVRILARAWLNIIWHCWQTGEAYDPERHIALQRLLKQDQPEAA

SEQ ID NO: 461700 - protein, 346 aa, unidentified
MEQISRVGMDTSKRFFQLHGVNAAEEVVLRKKLRRKEMVEFFQALAPTVIGIEACGSSHHWARLLRSFGHEVKLIAPQLVKPYVKRGKNDGADAEALCEAMSRPTMRFVPVKTAEQQAALMLIGLRERLIGNCTQLSNAIRGYAAEFGFTAAKGMAHLDPLLERIQADESLPLAARELFAVQSKEYAQLRGQINEVEAKLKAWHKSDECSQRLIKIPGVGPIGAVLLKMKTPAPEQFRTGRQFAAWIGLTPQDHSTAGKVRHGGITRAGDEALRAVLVAGATAVIQQAVRYGGRASPWLDALLKRKPPKLAAVALANKMARVAWKLMVTGDSYSTKSAPAALASRV

SEQ ID NO: 461701 - protein, 429 aa, unidentified
MSEEKSLELRISVDVGYRRHSVAMGLSSGEVLEEFEIDHRPEGFQEFFSRIEAQRKKRNCAVSVAMEGYNGHARPLDSLVRERGYRLYNLNNLKFARFKEIFPGAAKSDRIDARKGLELFQLSDHLPLAKEVLQEVSGTAPENEILKRLTRRRRRLVNERVRVVNNLQADLQAVCPGLLEITGEASNQWFLNFLLSADTLPQLARLKRSTLLKIPSVGVKSAAIIEHWQKRAHFSQEVEWVSEMIQEDAKRCLELDEKIKRLQAKIAEVAKNSKIAKTLRSIPGFGAVCTSELAGEIGTIERFASEGSLSLYLGMSMLDNSSGKYQGTKAPKHVNTRAKAAMMIGVDRHRKYVPESQRYYEKKRSEGKKHNQAIRALGRHLGRIIYKMLKQEREYEIRPEKGDTKAKVGPRSFVKTKIRRPKISSKETK

SEQ ID NO: 461702 - protein, 358 aa, unidentified
MEYGAIDLHKKESQIRIVTESGERYDRRIATTRDRFTALFEGRSPMRILLEASTESEWVAQHLETLGHEVIVADPTFAPMYSERSRRIKTDRRDVAALAEACQRGCYRAAHRRSASQRTVQVHLNVRRELTDTRTRAISLARAVIRGAGLRIRSGSTGSFLVRMAALDLPASISEALVPLQRLIAVLNDELATADDRIASIAAQDPVVARLTTVPGIGAVTATAYVAALDDAARFGRAAQVASYLGLVPQEYSSGEQLRRGRVIRSAHPYVQSLLVQAAWCVWRSKDPRTAGLRGWAQGIAHRRGTSIAMVALARRLARILFAMWRDGVPYNAVCSQSTRAHGGAAIEGTAAPSAGPS

SEQ ID NO: 461703 - protein, 342 aa, unidentified
MKTFVGLDVSQKKTSICVVDHNGNKIRMANVDTHPGVIANYLFSEGFDKSKVGLETGPLCVWLYHSLKSFGLDIDCIHARHVHAALSMQLNKTDQNDAFGIARLVLSGWYKPVHVKSLECHQQRLILTSREKLVQLRVAVTNQIRGLLKTFGVVLPPGKNSVFERSVLESSPSLETVKPTVIMLLDTWEHLSDQIKKFNSMLEKLARQDPVCQILRSIPGVGVLTALSFKTSIDDPSRFRRVSDVGAFLGLTPKKYQSGEVDRNGGISKQGNRMTRTLLYEAASCLLTRYGTDTSLAIWANALRHRMGYKKIIVALARKLTTLMLSMWKSETIYNERLNAIN

SEQ ID NO: 461704 - protein, 363 aa, unidentified
MEVAGRFVGIDLGKRTYEMCIVDQKGKITRTGGKTDFAGIDRLCKKLNGDDAVAIESCNLAFRIERAIRKSVGCKVCVMNAGRLAVIYMSTRKTDKEDSLKLAKLLKNHDEDELPIVTPPSDEEWERRKLLSEYRSLKCQRTKEINKLHAIFEHNGYTQFVRKDMCSEKNRANILPLLRGYEKEEAERLIERLTLLEKQIEQLLQKINAEVESDAKIQKVMSVPGIGPITALAYVAYVGDVKRFDNAHQVSNFIGFVPKVDNSCTICRSGHTTKKGNPLLRSLLVQAAWATVKSKNGGALREKYKYMAESRCIGKGKSIVTIARKLGELLYLILKTDQEYKPQKFVIPEFKISKLAEEAIKCS

SEQ ID NO: 461705 - protein, 358 aa, unidentified
MQRNEISFKGQKIFIGIDVHAKSWKVAIAPEIGAVKCHSQKPSAKELFDFLKKNYPDGEYKAVYESGFSGFSTYYALKEVGIDCIVIHAADVPTTQYEEVMKTDRIDAAKLARSLKTGQLRGNYVPEKQCIDDRSVVRIRRTIQKQLGGYKSRVKHLLHCHGVEMPERFSKVQTHWSMAFITWLKNDVELMSDTRMSLDLLIRQVEVIRGTLLEATQQLRKMSQTERYKRRCDLLRTIPGIGPIVSMCILTEVCDVKRFNNENEFAAYLGLVPTSHSSGEKTVHGEKTFRGNKQLGPMVVEAAWVAIGWDAGLGSKYFQYKKRMQPQEAIVRIARKLSNIIFSVLKNEKEYVPYNTGN

SEQ ID NO: 461706 - protein, 410 aa, unidentified
MMSNQDHLHVDQQFFGGVDWGGSFHQLCVLNTSGALVLQQRINHDVAGLRLLAARIADLGALVSVAIERGEGLLVEFLHTLPTVTLYCVSPKISARARERYRLSASKSDIFDAFVLADTLRHEHRRWRPLSRPSALTAELQAVSRDRQRVLHAKVACESRLRAVLETYYPAPLHLFSALDRDITLEFIRAYPTPDQARHIKTGRMAAFCDRQHYSGRTNPQVLVDRLIPHLLSATDGTTAGKSFAARLFAEELRLHTDHLRAFDRRIDQLLELHPDAPIFLSFPGIGPIVAATLISEMGEDRDRFPTVDVLLAETGLAPVTKASGRTRQVRFRYAANRRMRHVIDWWVFVASREDPWSQKVYQTARARGQGKYRALRGLGARWMRILWRCWTSRTSYNPERHPRPELLSA

SEQ ID NO: 461707 - protein, 355 aa, unidentified
MEGTKYIGMDVHKDSISIAVLNCSGKLVMESIIETKAITILEFVHGLRGSLYLTFEEGTWAAWLYDLLKPHVTKLVVCDPRRNGYLKQGSKSDRIDARKLAELLYSNMLRPVYHGEHGVRSLKELARSYLTITKDQARVMTRVKAVYRSWAIPCAGKQVYGQRHRLEWLGKIQEPGVRRRAEFYYAELDALRSLRLVVRSELLLESKKHNVSTLLSQIPSIGPIRAALLIALLQTPDRFRTKRQLWAYSGLAIETHDSAENQYVNGQLQRSRKQASIRGLNQNHNHDLKNLFKSASAVAAAKAGPFQKFYDAQIGKGLKPEMARLTLARKIAAIILIVWKKGVSFDARYLNPQTA

SEQ ID NO: 461708 - protein, 313 aa, unidentified
MASKAYENYCGIDVSKEWLDFSLENNVFRVKQDKLQIKKFIRKYLQAKASVLCVLESTGGYEHLVSGCLVEAGISVHVAHPNKVVAFAKAKGRLAKTDRIDAKILAEYGEFIQGHELRSPSSKAQLALQELSSRLAQLKMSRHQEGCRLGIVKTPKIRRSLEIMLKALDKQICELEEAILDAIKQDELLKKQFDILQSMKGVGKTLALVILADLPEIGALNKKQIAALVGVAPITKQSGNWHGAATTKYGRATVRKVLYMAALVASRYNEKMRQFYERLIANGKPKKVALVAVMRKMIVTLNAMICNEVCYQP

SEQ ID NO: 461709 - protein, 431 aa, unidentified
MSIITVGIDLAKNVFAVHGVDDNGKPALVKPKVSREHLLPLIAQLPPCLIGMEACSGAHHWARLFRQHGHTVRLMAPKFVIPYRLSGKRGKNDAADAAAICEAVTRPQMRFVPVKEEHQQIILALHRTRTGFVEERTATYNRLRGLIAEVGIVCPQKITALRRALMDHLEDLPGYLNRCVGDLLAHADSLDVRIAEYDRIIRDAAREDARSRRLMDLPGIGPNTASALLASIGGGHDFKNGRQVAAWIGLTPGQYSSGGTTRLGRITKAGDRYLRSLLVMGAKAILSGLGRSRTASAAGREAWSSVAANGRRWWRLPPRMRGWPGRCCGSVRSSACARRTPERAMPKTVFRKRKGAVCAGGRRHEFTHALHALMGSGLDPRRERLIISRGRSHSRPTIEAPARVFHQGPGDMPNMTGCSFAVRHLLHRSAP

SEQ ID NO: 461710 - protein, 320 aa, unidentified
MAKQVEECTIGVDVAKGWLDIYAADRDDLQRIDNSEDAIEKWLCGLGGPARIAIEATNRYHELFIERAFALGHRIFVIDAFKLSRYRDAVGHRAKTDRHDAELLARYLRQEQEHLQCWQPRDPRQARLWRLLKRRATLVQTKVRLQQSLADIGALDDAAKELIRHCQQLVRRIDRELQAQARQLGWQQDLQRSGGVPGLGPTTSLALVATFHRHNFRSADAFVAFIGLDVRVRDSGKFRGRRKLTKKGDPEIRRLLYNAAMSGCKDPHWKHYYQSLRNRGFSGTAALMALARKMVRVCYALLQKQLSFDPGIRLVACSAT

SEQ ID NO: 461711 - protein, 338 aa, unidentified
MVLIGIDPHKATHTAVAVDTEETALAELTVKADHHQVERLLKWAIDFPERRWAVESANGLGFLLAQQLVAAGEDVVDVPPTLAARVRVLGSGKTQKNDPNDALSTAIAAMRAKRLRSVVAENHGGVLRLLVDHHHDLGSLRTQAVCRLHALVRCLIPGGTQIRLSAARAGVVLRSVRPTNAVDVERKRMALGHVADIRRLDAEIAASKARIVTAVAASGTSVTELYGVGPVVAAFLIGHSGDMARFANRDHYASYNATAPIEASSGPRVRHRLNPRGNRRLNHAIHVIAICQIRHPTEGRKYFDRKVAEGKTTKEALRALKRQISNVVYRQLIIDSSK

SEQ ID NO: 461712 - protein, 380 aa, unidentified
MNTTTVGIDLAKSIFAVCEGDYRGHGSRSSILKSGEFLKWLRTLPTGTVVAMEACSSAHSWGRTMQALGLEPRLIAAEFVRPYRKNQRIKNDTRDAEAVLTALHAPGMRFVTIKTEDQQQRLAWHRLREGWKAERTALFNRIRGLLTEFGIVVELGAAKIRRKLAELESDAAYPQSIQLMVQSVRAQIGILDQRLAECERQIARQSKSDPAVARLRSRPGIGPLTADAIVATVGNARQFKNGRQFAASLGITPRQHGSGGKTHLGAITRRGDSYLRCLLVQGARCVLQAALRLHKNKPNTLNRLQLWMITLHERVGYHKAAVAIANKHARQVWAMITRGEAYNAEAYKDWEAAHATVRPGDIQEASDYDLSTAALAAASV

SEQ ID NO: 461713 - protein, 342 aa, unidentified
MYYIGLDVHKKTISYCVKDVSGQIHRQGTIGATRNELDWWVKTVPQPWMVAMEATMFTGWIYDHLLPHAAQVKVAHPVMLRAIALAKKKNDRIDAGKIADCLRCDFLPECHMASTAIRDRRRVLRYRHLLVRQMVQMKNRMSGLLMETGVSHEKKRLHTQRYFEEVVWNHPEVSANIRPLLRVSRESILQCRKTEYALRKSLQRDPLLAERLQRLKTAPGVGPITALSWALEIGDVSRFRSVKQAISYCGLCGAEKSSADKVMRTPLSKQRNKHLQRVLVEAAKVAPRESPELALLHERELQKGNANRATLAVARKMVSYLLAIDRRGTDFVSSEQKNTAAA

SEQ ID NO: 461714 - protein, 366 aa, unidentified
MRVMYERCCGLDIHKASITVCALISEKGKTQEETRRFGTMTADLRELAGWLQQKGIRQVAMESTGVYWKPVWNILEPAGFELLLANAQEVKVVPGRKTDQKDSQWIADLHKHGLLRNSFVPPRAIRDLRDLTRARAILTQEHTSVCNRIQKVLEDANIKLRSVASDVFGASGRAILRALMKEENDPEALANLSKGKLRNKIPQLRRALEGQVTAHHRALITGHWNRMEFLERQIADLETQIAERMKPTPAEMAPTMQNASEDAPVPLSPREEAIQLWMEIPGLSWTSACSMVAELGVNMDQFPTAAHAASWAALCPGNNESAGKRLSGKTRKGNIWLRRTMCEVAWAASHTNDSYFAAQFHRIASR

SEQ ID NO: 461715 - protein, 427 aa, unidentified
MQQEAQEQQEFGAYIGLDWADRTHVISLRGTDSAKVEHYQLVHKPEALAEWVSDLQRRFPGQRVAVALEQARGAVVHALMGYDFLVLYPVNPKTLAKYREAFSPSGAKDDPTDADLLLELVTLHRDKLRAWLPDDELTRTITLLVEYRRQLVATQTSLSNRLTSLLKLYYPQALAWAGELTTVQACDFLQRWPTLAQVQQAAPAKLRQFYLAHGCRKADVIEQRLQEIKLAQPLTRDGAVITASVVMVQATTTQLRPLMEAIARMEKQIGELFRQHADHDLFSSFPGAGPVLAPRLLAALGADRGRFAAATEVQQLSGIAPVMERSGKTCWVHRRWACPKFVRQSFHEFAGQSIRWSTWARAFYDQQRQRGNGHHAAVRSLAYRWIRIIFRCWQMRVPYCEETYCRALQRRQSPLARVLAAPMQNAS

SEQ ID NO: 461716 - protein, 399 aa, unidentified
MERTYSVCCGVDVGKSSHHFAAIIPATGELVFDGKVEQSESGIRDALLSVSLFGSPVVVVDQPGNMAALLFAVCDDMGIAKGFITPRAMSKAIEMYGGDIKTDAHDALVIAEVSSSLPKLVKPVGEKSALYLRLSALMSYDRELTLESTRATNRLHDLLLSVSPALEAHLEGKRVQSNFSLMVLSRYGGPAGLKKAGRGNVRRWLRSRKGMGEAALRRLDDLFEAIGRQSVTIAGSEYVEELIKQEASFLLTVLASRKKVAESRDELLSQMPEARLLMSLPGLGAVTCATFLAEVGDISRFPNASKLASYAGLAPKVRQSGKTIHSVTKPRGGNRRLKRVLVLSAGKSVQFCEESRAYYERKRSEGHSYGSCMMALARRRLNVMYAMLRDGTAYEKQNG

SEQ ID NO: 461717 - protein, 351 aa, unidentified
MKILSLDLGKNKTVGCEYERESGQHRFQTAFSTRSGLQQMVKEIKPDRVVIEVCSIAGWVCDFLREMGIEVQVANTSDDAWRWRKVRKKNDRLDALKAAQLSAVNQLREVHVPRIEVRQWRALIRFRQHLVRRRTKVKNHIRDLLLGEGEILPARQKCWTQMGMARLEAMARPLSELGLNEMWRGELDIELRQLRAAQQEIEVVEEQLDAIAAADPRVQLLRTIPGVGPRLSEAIVALLDRPERFRKASEVSAYIGMVPKELDSGETQRRGRITRQGSRLVRTLLVEVAWTGLRHNAWVRETYQRIHGGKKSRKKIAIVAVGRRLLVRCWAMLRDGTAWQWPESAAGAGTK

SEQ ID NO: 461718 - protein, 351 aa, unidentified
MPKQANTVAISTIGIDTGKNTLHMIGLDEKGEIVLREKVSRNRIAARLVNVVPCLIGIEAGMATHYMARELVALGHVVKQVPPAFAKPFRQGHKNDFRDAHAVAEAVQRPSTRCVPIKTDDQLDLQALHRVRSRLVGDRTAVINQLRGFLLEHGIAVRQGHRFLRQQLPQILAKRTDVLSPRMVKIIADLVEDWAHLDERIERVTDEIESLARADANCGRLMTVPGIGPIIASAMVAAIGDGAAFATGRDFAAWLGLVPKQMSTGDRTILGRITKRGNRYLRMLFIQGARAIQLRSTSWTKHSFGPWLKAAAQRLHCNVLTVALANKLARIALTVLVQARNYETRIEPAAT

SEQ ID NO: 461719 - protein, 370 aa, unidentified
MNEGITYVGLDVHQASTVVAVILPTGELLEDRFATSAEGARRFVRRLKRRSSGPIVSCYEAGPTGYTLQRMLEGHGVSCRVIAPSLIPSKPGDRIKTDRRDARKLADLLTADLLTEVHAPTPEQEAIRDLCRARTSVKGDQKRIQHRLSKFLLRRAIRWTTGRKMWTRAHREWLRGQQLDHEADQITFDDHLLALEQIEGRLQHFDEQLADWADRAPYAEAVGWLRCFRGIDTLTALSVVAEIHDWRRFPSPRALMAYLGMVPSESSSGGRSQRGGLTKAGNSRVRRLLIEAAWHYRHRPSVGYRLAKRREGQPPAIIALADRAQQRLCRRYVRLSARGKAHNQVVSAVGRELVGFLWAAMQGATTEATS

SEQ ID NO: 461720 - protein, 411 aa, unidentified
MDKIYDKCCGIDVHKKLIVACFRCGRKQEVRDFGATTRELLELADWLKEGGCEMVAMESTASYWKPLYNILESSDLKAMVVNARHMKAVPGRKTDVKDAEWIADLLQHGLLQPSFIPDKDQRELRELVRYRKSLVGERTRELNRLQKMLEGANIKLSGTVSDINGKSARSILEYLLTGQSIDGAKYDEMYEQKVIAHNLKATKEQIIDDLNGVMSPLQRRMMKELLAHLDELNAHIKNLDDEIDNFMKPEEKQASQAIQDVTGIGNTSAQAIISVIGADMSRFPTDKHISSWAGLCPGDNESAKKRKSGKTRKGNALLRTTLITCAHAAVKNKKSYFYAQFMRISAHRGPKRAYVAVAHSMLIAIYHILKDGVVFKDLGVDYYNQFNKERKINAYLKKLKALGWEVPVVAI

SEQ ID NO: 461721 - protein, 337 aa, unidentified
MTQITTIGLDLAKRVFQVHGVDAAGKVVLRRQLTRRQVVPFFAKLGRCLIGMEAGGTAHHWGRMLQALGHDARLIPPAYAKAYVRRNKTDPADAEAICEAVGRPWMRFVPIKSEAAQAMAAVHRVRERLIGQRTMVQNMLRGQMAEFGIVVSKGAWHVKELLAELGDPSRLPEPLRQALLGLSQVLAELDRQIAALDGQILAWHKTNQRSQALATIPGFGPILSSAMTVRVPRPERFAAGRDLAAWIGLVPKQASSGDTLRLGRISKQGDVYLRRLLVSGAHSVLNSKSAKTDPWIQRLLASKPRLVVAVALANKMARIAWAVMVRQTGFRPVPAAA

SEQ ID NO: 461722 - protein, 344 aa, unidentified
MDNHTQYLGFAGVDLAKKVMQIHFVTADGEITDKSAKRAEFLDFFRNRGKCLIGMEACGSSQDWARKLEAMGHEVHLMSPKAVKPFVSGQKNDHNDAIGIYKAMFNGVRRVPVKSTEIRDLQTLRRIRSQVTKDKVKEINHVRGLLAEYGIVMGKSLNAFNKDISSALGILTERGDVSPLVAEELRTTVEAIKAKIERQKKLDQEIEQLARGCKNYENFLKTPGVGPFTAAMLCVLLCDPSIFANGRQFAAYIGLAPRSRGSGGKNYVTGIPSKFNCDSESRAVLVECAQAIARCKNKSLWVEEILRRKPKKVALIAIANKLARQVWAMANKGESFKQMAVLTA

SEQ ID NO: 461723 - protein, 344 aa, unidentified
MITFGVDAHKRTHTIVAVDDRGRPVGQTSVGTTSKDHLGLLRWADQFSLQRRWAVEDCRHLSRRLEQDLLTGGERIVRVPPKLMAHIRDSARTYGKSDPIDALAVARAAQREPDLPVARLDGPDRELRLLVDHRESLVAERTRLICRLRWHLHELDPGWEPKARSLDSKQTLTEVQVRLEDRSGVVARLARDLAERCVELTISIKRLAQEITQLAEQLAPALLALPGCGPLTAAKIIGETAGVDRFKSRDAYARYNGTAPLPVWSANKTRHRLSRTGNRQLNAALHRIALTQARWHPSAQAMIQRRRSNGDSGREAVRILKRRLSDAVFQARRTDQRELTALAA

SEQ ID NO: 461724 - protein, 319 aa, unidentified
MLGIDVSKDTLACTLLDPQTQKPIWHRTVPNTTAGINRLLRQTPAQAHWALEPTGRYSLLAATAAHQAGRQVLLAQPKKARDFLRSIQSRAKTDALDSYGIGLFALCRPLPPYPLKSQAVEQLDQLLSVRKSISASLASFGLQARELPHAAPALEPVVAALQTQKKELDRQIAQLTASQQEFSIAAELEKVPGFGKVTAATLASRLAGHTFGHSDQFVAYCALDVGVRQSGKKHGQTGLTKQGDGELRRLLYLAAQSNLRSKNSPFKAQYEKERSKGLSTTAALCAVARKLARLAWSLHKHRTPYDPDRVHRQNLSTSP

SEQ ID NO: 461725 - protein, 334 aa, unidentified
MEQITTVGIDLAKRVFALHGVDAQGRVMLRRTVRREQLLETIATLPPCLIGMEAGSGAHEWGRRFETFGHRVRLMAAKFVAPYRQNGKNDGNDAEAICEAVGRPKTRFVPLKSAEQQAVLSLHRVRQGFVTERTATMNRIRGLLAEFGVVLAQRSPTVRRQALKAAETLPVLARRAIEDLCAQVRILDERIDSYDRDLQQQAQTSEAARRLMQIRGIGPLSALAIVATVGNARDFKNGRQFAAWIGLTPQQHSSGGKTRLGHITKRGDAYLRSLLVQGARSALHTATRHRDRVSRWACELEQRRGYHRTLVAIAAKNARIAWALLSKGETLRPS

SEQ ID NO: 461726 - protein, 343 aa, unidentified
MAGIDLHSNNAVVGLVDQAGRRLAHQKVECELKEIVGFLAPYKPRLESVAVESTYNWYWLVDGLKAQGYPVVLANPAKIDQYSGIKHADDKNDAFFLAELSRLKILPTGYVYDPLLRPVRDLLRRRMSLVHQRTSLMLSFKSLYTRTTGQAMKLSQLKSMTVAEAKALYEHPANQLIAQVHKGHIEGLSKSIEKIEEVVFKASSHLPYYPKLKTLPGVGIVLGLTITMEVGDIGRFADAGHFASYCRTVDSQRLSNNKKKGENNQKCGNKYLAWAFVEAAHFARRSDELCRRWYDRKAAKTSTVIATKALACKLAKAAWYLMAEGSEYDAKRVFPELAVKAQK

SEQ ID NO: 461727 - protein, 458 aa, unidentified
MKIYLGGDASKGYTDWVMISETKKKLLDNFQLDDTFEGHHQLYNAIKGCVEKYPKAEIYAALESTGGYENNWLNTLKSYQKEFNILVARVNPVGVAHDSKASMNRSITDAVSALSIAEYLINHPDKIRYEQDETWKSLRRHWNFVEMQKKQRVQTINQLDMLLYSANPILLSYKTDKLADWLLEVIIQYPTAKLLAKAKAEKLSKIPFLSLAKAEKIIASVQKSIASATDKDTGVLIKQVALQIRMFDQTIDSQMSLIEKELISSDIDLLKTFKGIDTTSAIGLVLEIGAVERFERVKSICAFFGLNPKFKQSGDKIIGVRMSKQGSKKMRKILFNIAFGAIVHNPLIKEIYQRKLSEGMTGMAAIGVCMHKILRIVYGMLKNKKSFDIQIDKLNTNRSAIKQAEKNQQKDAYISKNRRFQEYDKNAPISKRQTKKRKEHVLSQCEITSQSAGSTCSS

SEQ ID NO: 461728 - protein, 370 aa, unidentified
MNDVIRIGIDTSKSVFVLHGVDAAEQPVLCRKLRRRQMAEFFAKLPPMQIGIEACGAAHYWARELTAVGHEVRLLPPQYVKPYVQRGKNDAADASAICEAMSRPRMRFVPVKTAEQQAALMLVGVRDQLIARRTQLSNTIRGYAAEFGVIAAKGLDKIEPLLARIAREPGLPEQAKALFAVLGEELLALKPRLRKLEAQLLAWQRHNELSRRLAEIPAIGPIGSALLAMKVTNPQVFRCGRDFAAWLGLTPKDHSTAGKQRLGVITRAGDETLRRVLVVGATAVIQQARHGRGNPSPWLAGLIRRKAPKLVAVALANKTARIAWKLMVSGERYNRQHARSDFVPPTGSLAPGARRQGRGAPPAAVACGQP

SEQ ID NO: 461729 - protein, 440 aa, unidentified
MGSYAGVDWASEKHDVRVADAAGEKLLAATFAHDEQGLRSLCRQLVRLEVELVAIERPEGLLVERLLDAGLRVLALHPNQVAAARDRFRVSGGKSDGFDAFVLCELARTDNHRFRVLEPDSDQTKALRALTRGREDLVGMRTALTNQLRAELERFWPGPLGLFTDLHGRISLAFLERYPSPADARGLGEARLAGFLARERYSGRQKPAELLAKLRRAAAARVGELELSTRRQLVLGLVAMIKSLNAQIKELERQLARTLGEHPDGEIFRSLFRDPRSVICAAELLAEIGDCRGRYPSRDSLAADAGQAAVAIESGKRKAACFRWGCNKRLRAAFATLADSTRHWHPWAQGVYAAALARGHDHPRALRTLGRAWCRVVWQCWQKRTPYDPARHRALQQHITVTIPTASGPVMDQLATESMAAGLFATNAPTSRQQQVTAAQ

SEQ ID NO: 461730 - protein, 338 aa, unidentified
MGAYAGIDLHSSNNYIGIMDQDYKRLFGRRQPNDLNNVLKVLEPFKADLEGVIVESTYNWYWLVDGLQEHGYTVHLANPSAIKQYEGIKHTDDRWDSFWLAHMKHLNILPEGYIYPKEQRAVRDLLRRRLFFVKQRTANILSLQSTITRNLGIKISANNIKKLNMDDANELFDSSNLVFMAQNNISAIKHLGKIIKGIEKEIKPQVQLRKEFLMLLTIPGIGIILGLTIMLEVGDIDRFSKVGNYSSYCRCVSSKRLSNGKKKGENNKKNGNKYLAWAYVEAAHFATRYIPKAQKFYQQKMAKANGAVATKALANKLARASYFIMRDQVPFDEDMLFK

SEQ ID NO: 461731 - protein, 343 aa, unidentified
MDHFAGLDVSVKETSVCIVDDTGKIVREAKVASEPDALLAVLANPAYHFKRIGVEAGPLSQWLFSALAEADLPVVCVETRHMQAVLKAQINKTDRNDARGIAQMMRVGLYRPVHVKTLRSQKLRMLLTHRKLLQSKAIAIENDLRATLRNFGLKVGMVGTVKFEARIKELVENLPDLAALVEPLLIVRRVLREQIIILHRRLLAIVRDDDVCRRLMTTPGVGPVVALTYRATVDVPARFRKSKAVGAVFGLTCSKYQSGEIDRSGRISRCGDQMMRVMLYEAAQSMLRSKKWSWLKAWAMQIARRRGMKKAIVALARRLAVIMHRIWVDGTEFRWTREQAAAA

SEQ ID NO: 461732 - protein, 343 aa, unidentified
MDIHVLGIDLGKNSCSVVGLDPTGRVLLRRRMRRESIVGLAAKLPGCVVAMEACCGAHHLGRLLAAQGHEVRLMSPEYVRPYVKAQKNDDRDAEAIAEAATRPTMRFVALKTEAQLDVQVLHRVRDRLVSQRTALMNQIRSILLERGIVVPKGRRKLLDALSVLSGESERSGVGPRVRLLLDDMLDQWRGLDRRIAALDDEFAEMARNDPAARRLATIPGVGVLNATALVAAIGDGRTFNRGRDLSAWLGLVPRQATTGGKPKLLGITKRGSKYMRKLIIQGARAALPGLSRTATPLGSWLRGLLSRAHGNTVVVALASKLVRIAWALLRQETVFAAGRLAAA

SEQ ID NO: 461733 - protein, 355 aa, unidentified
MRHVAIDLGGRESQICVRSASGEIELEKRWPTARLVEWLKSQATSRVVLETCSEAFAIADGALEAGHEVRVVPASLVRSLGVGARRTKTDRRDAQILSEVSCRIDLPSVHIASPLARRRKSLCGMREALVGARTQLVNTVRGWLRGEARGPLRSGSVEQFTARVRARYEEEGLPGYVERQLATIDDLSRRIAEADDDLERQARKDDECRRLMTVPGVGPVTALRIAAAVDEVGRFDGAHKFEAYLGLVPGEHSSSERTRRTGITKAGPPALRRTLVEAAWASRRARGSHPMVHWALEVERRRGPRVASVALARKMAGILYAILRDGTTYDPSRGQSTDDAGNPWAALVARAGNST

SEQ ID NO: 461734 - protein, 451 aa, unidentified
MEDEVIKMEIVNPHAAGIDVGSRSHWVGVGQREEDVREYGVFNDDLFSLCDWLKECKVQTIAMESTGTYWQNLYAVLISRGFHVILCNGKFTKNIKGKKTDIKDCQWIQRLHSLGLLSSSFLPEGKTEELRTYCRHRQNLLHESASTSKKMQKYLRLLNLRLDVVVKDTCGLTGLRIIRAICNGEKNPEKLAELRHHNCHTSKADIARALQSNGREDYLFALQHELDMYEYLHKKIEECDLKIEEKLNSIINDDENKKQHHIEPKPHKKVNKNTPKNIDLNLKSYQMFEGTDLLAIEGMSYSTVLALMSEIGVEGIRKFPTAKHFASWLRLAPNNKVSGGKILSSKVPKGSNNLKISLRNAANAIGNLKDSTPLRDFFMRINFRKGRVSAISATARKLAVIIWNMVNKGLPYHNPEEYLFRDQKKKLGLLKRIQKQITKFELESTDFQFSN

SEQ ID NO: 461735 - protein, 356 aa, unidentified
MVKTRLASIHQFVKDFEAQPFCIGIDVHKRSYHVAIRRADGKAMTLVCPADPQGFVEQIHRLSIPVSAVAYEAGPTGFGLARVLRSAGIETLMAAPSRIPRAVSTGAKTDRLDCLRLADYAAKGMIRPIAVPTPQQETQRSLQRRRHSIVDSLRRCKQRIKGFLLFLGLPEPKETERWRGGAAEALIALPLDPHARLTLESHLRELTFYQNELSKVEEQLRQMAQQHCHVLTCLQSVPGVGEVVATTFMLELFDPERFHRAEEVTSYLGLAPMVRHSGEKTPSGRLRPVGQTRLRSLLIEAAWMWRQYDPYARDLYNRFLGRMGIAQKAIAAVARKLAVILWRLYVERRHYRPAVV

SEQ ID NO: 461736 - protein, 334 aa, unidentified
MNYIGMDIHKQFTVAVAKDRDGNLLAEEKFDNHKCNFENFLKDFCPSETKIVIESSSICEYIYEILEEMKFEVKLANLTKTRAIAEARIKTDSIDADTLCDLLRANLICESYIPPKEIRNLRNIMRQRKAIVKGRTQIKNKIHGILLMNGIKLPYSTLGKTAMKWIIDEINTTSIKTILVSYINLIEQYDFELKKIEERIIQIASENNNAKLLTSIYGIASIRALELVSEIGDIKRFNSSQKLCSYCGLVPSIKQSGSTLRFGRLVKQSNKSLKSTLIESSWNLIRLKGENPYREFYKKLSKKKGKQKAICAVARKLCCTVYAMLSKNQEFMFL

SEQ ID NO: 461737 - protein, 348 aa, unidentified
MTTMVEDARVITGGVDTHADMHVAAALDSVGGLLGVQEFPATAAGYASLLSWLRSFGTLAVAGVEGTGSYGAGLARHLAAAGVRVVEVDRPDRQDRARQGKSDPLDAVSAARAALSGRASGVPRGRDGAVEAIRALMVAKRSARQERTQAINQARALIMTGPEELRARFVRRSPAQLIEAIAALRPRPGDVPGYATRVALRELGRRGQFLDAQLDRLDELIGPLVTARAPGLLALHGVGPDTAAMLLVAAGDHPERLRSESSWAHLCGVAPIPASSGKTAGRYRLNRGGDRQANSALWRIVIVRMSSHPATRAYADRRSEEGLSKKEIIRCLKRYVAREVYRQLRDGA

SEQ ID NO: 461738 - protein, 393 aa, unidentified
MICVGIDVAKDKHDCFILSSEGEVLADVFTIQNNAVGFDTLLQTIRCCARPEDKIKVGLEATGHYSYNILGFLLNEGLPTFVINPLHTNLYRKSLSLRKTKTDRVDARTIAAMLMSDVDLKSYTDTAYHNEELKSLTRYRFDKVRERAKLKQSVSRLVTILFPELEKLVPTLHMTSVYALLSEFPDARQVAEAHLTHLKAILSDASKGRYGRDMATTLRDAARCSVGSVMPAKSLELRHTIRLIHELDAEIEDIEAAIQSMMDEIQSPITTIPGIGVRMGAMILAEIGDFSRFDSPDKILAYAGMSPSTYQSGQLSLSGTYSHMEKRGSRYLRYALYNATKYVCHWDPTFAAYLAKKRAEGKHYNVALSHATKKLLRLIYALEKSGLPYSSAI

SEQ ID NO: 461739 - protein, 454 aa, unidentified
MAKKREKRECKAVVLEPDAAGIDIGAEEIYVAVPPDRDEESVCMFSSFTCDLQALADWLQQCGIRTVAMESTGVYWIPLFQILEARGLEVYLVNAHYLKSVPGRKSDVSDCQWIQYLHSVGLLRASFRPTLDICAVRSLWRHRGSLLQMASEHILHMQKSLSQMNLQIHHVLSDITGASGQAILDAILAGERNPVQLAQLCNCRVKSPREKVAKALEGDYRPEHVFTLKQSLDGYRYYQKMIAELDREIQRLMQTLPSAVENGQEIPRRTKHSAFQRQGNDPGFDLREQLYRIAGVDLTDIPGVSAVTAQVILTEIGPDLRRFRHASAFASWLGLCPENRVSGGKVLSCKTRKVKSRAALALRLGANSLSRAKGYFGEFFRRMRAKLGTAQAITATAHKIARVLYHVLRTKEPYAETVFHKCDEHARRRAEMRLRKQAALLGFQIIPVPADSAT

SEQ ID NO: 461740 - protein, 350 aa, unidentified
MPSVADVVDAVVGGDTHSQVHQLELTAPTGAVISTVSVGNAAAGFAAALEWIGAHAPGPRLIAGLEGTRSYGAGLARAFGAAGLVVVEVEQPSRKARRGKGKSDPIDAHHAALATLAMDVARLPTPRADGDREALRILLCAYREVTDTKVRHANQLRALLVTGEDADRALARGAFTLGRLDRIARRRPRGVESREQAVRRAQARRLALACKAAYHEQKALRRHLLELVEALAPAMTAQPGVGPICGAALLLGFSHVGRCRDEAAFAALAGANPVPASSGKTNRHRLNHGGDRQLNRALHDIALWRMRNCPTTQAYVNRRTAQGKTTKEIRRCLKRYIARQQFRFLTAAMA

SEQ ID NO: 461741 - protein, 376 aa, unidentified
MTNTTHRRESTAAAALYVACELSAKEWLLTMSSAPDARRYRARVRAGDGEAVRRVVATTKERLGLGMEAPVRSCYEAGRDGFWPHRLLVMLGVRNLVVDSSSIEVSRRARQAKTDRLDGEKLLRMLLRYWGGERDLWHVVHVPTREQEDARHASRALTTLQADRTRLRNRIHSLLALHGVSRLRIDARFPERVAGARDWAGACLPAGVQARLLATWRVLQTVEAERQPARRLERQQVRASAPATSAQRLAQLRGVAARGATVLADELFSRRLRNRREVGGLTGLVSAPYDSGTTRRNQGLARSGLPAVRRIAVEMAWAWVRYQPTSALTRWYRERFGHGGAVTRRIGIVAVARRLMIALWRYVEHGIVPEGALLKA

SEQ ID NO: 461742 - protein, 357 aa, unidentified
MIAMKYYTSTTKFNCGIDLHARQMYVCVMDRDGKKLVHTNIRNNDFEFFLKLVAPYRHDLTVCAECMFGWYWLADACQAAGLQFVLAHALYLKAIHGGKNKNDRIDSEKLAHLLRTNLIPPAYVYPAAKRPLRALLRQRILYVWRRSELLSRIQSHQLAYNRPTCRQNHYNRDAWTEQLLASEPDPVRQLALQNDLALIGHYDAQLASLEKALLKLTKQTASRDFNLLQTTPGIGDYLGLTLLHEIGDIARFPTVKDFLSYCRLVKGTVASAGKLKGLRGAKLGNPYLRWAFGEAAVIAKRDPAIIGPLAQRLEARLGNKFKANTVLAIKLARAVYFMLKHKTAFDPDRLVAVLSKN

SEQ ID NO: 461743 - protein, 418 aa, unidentified
MQVLYARCAGLDVHKETVVACVRLVVDGEATREVRTFATTTAGLCALAEWLVAEGVTHVAMEATGIYWKPVWHVLSDSPLTMILANAAHVKNVPGRKTDVNDATWSAELLAHGLIRASFVPPREVAELRVLLRTRKQLVREHASHVQRLQKTLEDANIKLDSVISDIMGKSGRAMMEAMIAGETDPHKLVVLADRRIQAPRAKLVEALTGRIKSQHRFLLRLHLGQIDALDRATAEIDAEIEANLAPFRDAVKLLDTIDGVDVLAAEVILSEIGLDMGRFATDRHLLSWACMCPRNDESAGKRRSNKLKKGARWLKATLIQCAWSATRMKGRYLSALYHRLRGRRGPKKAILAVAAAILTAAYHMLKTGTPYRDLGPRHFEPRKRTALASQLLKRLEGLGYTVDIKLLATAEPASVSL

SEQ ID NO: 461744 - protein, 343 aa, unidentified
MQAVTTVGLDIAKSVFQVHCVDMQGNVIIRRQLKRRQVLAFFRKLPSCLVGVEACASSHHWSRELQELGHTVRLMPPAYVKPYVKRQKNDATDAEAICEAVTRPNMRFVATKTADQQSCLMLHRTRHLFIRQQTAVINAIRAHLAELGIVAPVGRKGVEELLRVVADGSDSRLPEIARACLAALGAQLRTLKVQILEFDRRIMAWHRSNAASRRLDAIPGVGPALATALVASVADPKAFRSGRDFSAWIGLVPKQHSSGGKDKLGGISKQGDRYLRSLFTVGALAVIRYAKIHGTGRRPWLAALLARRPTKVAAIALANKMARMAWAMMAKAEHYKEPAALAA

SEQ ID NO: 461745 - protein, 343 aa, unidentified
MKQKATVLGIDLAKRVFHLVGMDDAGHVVLKKRLTREALLPFIAQVSPVIIGMEACGGAHYWARQFRAYGHTVKLIAPQFVKPYVKSNKNDPADAEAICEAVTRPTMRFVPIKEIDQQDLQSLHRARARVVKARTALVNEMRGLLAEYGIVLPQSVTQFRHAFLATLEAERAKLTPLSTELFGQLYEEFGVLEKRLAYYTKKIAAIGEAHPVCQRLMTIPGIGPLTATALVAAVSNATAFKNGRQFAAWIGLVPRQHSTGGKPRLLGISKRGDVYLRTLFVHGARATLRWLRLKTDRRSTWLRGLMDRRGKNKAAVALANKNARIAWVLLTTDQVYIAEQAAA

SEQ ID NO: 461746 - protein, 344 aa, unidentified
MEEVTDEPLYRDRVCGIDIGKAELYATIRVPSDGNPARRASETRSFATTKRGVLALADWLHCWQVPAVVMEATSDYWKGPFYRLEAEGFECVLADAKQVKHLPGRPKRDPSDSSWLAQCFERGAVRPCFVPHPEFRIIRLHTRYRRDLTDERTREKNRTEKLLESAAIKLSSVVTDLHGVTGRDIMDHLIAGERNPKVLAQLARARARRKITELEHALDGAEFFTPAHAALLQAMLARIDGLTAEIAKLTEVIEQLLAPYEEQLQQAESMPGWGRRSAQDAVAETGPDMTKFPTGGHLSSWAGRTPLDHQSGKRAGRARHKKGNKYLAAVTGETAVAAGKTAVL

SEQ ID NO: 461747 - protein, 353 aa, unidentified
MEQRTTIGIDLAKEVFAMCVLSPGGAVVESRTMRRAAFERWLVGLQGELVVAMEACSSAHHWGRRLAAAGHTVRLMAPAFVVPFRKSGKNDANDAEAIAIAARQPTMRFVAVKTVDQQSILSWHRAREGWIAERTALINRLRGLLTEFGFSIAQSAFRLRKALPALSTDAAVPAPMRALLLEAGEQLRCLDARVARCDEQIAAHGRDNDTARRLRGMLGIGPLTSSALVATVPDAAAFRNSRQFGAWIGLVPRQHSSGGKPHLGELTRRGDKYLRSLLVQGARSALQVALRVAPDKATRLQRWILALYSRKGYHRTLVAVANKHARIIWALMARGEHFDNNAWQRHPLQRAAA

SEQ ID NO: 461748 - protein, 354 aa, unidentified
MSNESTAIVATMGIDIGKNSFHVVGLDRRGAIVLRQKWSRSQVEARLANMPPCLIGMEACVGAHHLSRKLQLCGHDARLMPAKYVRPYSKGQKNDFRDAEAIAEAVQRPTMKFVAIKTADQLDLQALHRVRGRLVSQRTGIINQIRAFLLERGVAVRQGLRFLRTELPIILATRSDVLSPRMMRMIEDLAGDWRRLDERIEGLSNEIEAVAYHDPACERLMTVPGIGPIISSAMVAAIGNGAVFTKGRDFGAWLGLVPKQISTGDRTILGAISRHGNRYLRALFVQAAWVVLIRIKDWDRYGLKAWIDGAKKRLHHNVLAIALANKLARIAWAVLRKECAFECVKTRAIASRPA

SEQ ID NO: 461749 - protein, 341 aa, unidentified
MIIGVDAHKHTHHAVILTSTGQRIADQEFPATTPGYTNMLSWAHDHGNIQAFGVESTGSYAAGLARFLISHRIEVREVNTPHAHTKARVGKDDAIDAEAAARKVLAGVANAIPKRTDSVIESIRFLTLTRDSAVKARTAAIVQLQDILITAPARVREEVPTGGLAAARHCRKFRIDQTRLNDPVQAVKYALRSLAARISSLDAEIKELERSLATLVHSIVPTLLSRVGIGTIHAAQLLVTAGENVERFHSEAAFARLCGVAPVPVSSGKSHRMRLHRGGDRKANRALHMIAVVRLRYDARTIDYMQRRLAEGLSKKDVLRCLKRFIAREVYNDLRHDLIAA

SEQ ID NO: 461750 - protein, 393 aa, unidentified
MVCVGIDVAKDKHDCFIISSEGEILADVFTIPNNAEGFDTLLQAIRRSTRPEDKIKVGLEATGHYSYNILGFLLDKGLPTYVINPLHTNLYRKSLSLRKTKTDRVDARTIAAMLMSDVDLKSYTDTAYHNEELKSLTRYRFDKVRERAKLKQSVSRLVTILFPELEKLVPTLHMTSVYALLSEFPGAKQIAGAHLTHLKAVLNDASKGRYGRDMATTLRDAARCSVGSVMPAKSLELQHTIRMIRELDAEIEDIETAIQSMMAEIQSPITTIPGIGVRMGAMILAEIGDFSRFDSPDKILAYAGMSPSTYQSGQISLAGAYSHMEKRGSRYLRYALYNATKYVCLWDPTFSAYLAKKRAEGKHYNVALSHAAKKLVRLIYALEKSKRPYSTAA

SEQ ID NO: 461751 - protein, 313 aa, unidentified
MKKTICGVDVSKAKLDVCIEPGRRFASFDNDAAGIAELARFCREHAVTLVVMEASGGYERRAFVELWETGIRCALTNPRNVRRYAEAMGILEKTDRIDSSIIARFAEAKNLAPTPLPSQAQQRLKALVARLRQVTDDLTVQKQRRASLLDNPEMLASLDEVIALLKRQSRSLEGEIASMIDDDPLWAKLAETWREVKGVAGRTVARLHAEIPEIGTLSNKAIAKLVGLAPIANDSGKRKGKRPTRGGRAGVRSILFLVAAIAARYDKSLGEFRDRLLKAGKEKMVIRIALARKLLVRLNAKARDARAEYANAT

SEQ ID NO: 461752 - protein, 359 aa, unidentified
MKIIGCDLHARQQTLAMLDTETGEIVNLTLTHEGDHVREFYSKFPRPVRVGIEATGSMQWFLNLMEELGIECQVGHPANIRAAEPRKQKHDRRDADLILKLLVENRFPSIWLPSKELLDLRGLLLHRHQWVRMRTRVQNALQAIALANGLRRGPSLWSQAGQDKLASLSLAPHTAHRRSELQALYAKFEMEIEKLNQRVEKQAWERPTALRLMTHPGVGPITALATDVFLGDPTRFVDGKALASYVGIIPREYSSGGRQRLGGLTKQGNPLLRFLWCEAAIHAVRKDPELQRFYLRKLFQKGLGKARVAVARKLGIRLWILLRDQIDYNEFCRRGRMRQKNGGTCAGMPARVIAQTVAD

SEQ ID NO: 461753 - protein, 481 aa, unidentified
MKPKTQEKYEKITKPRTNHWKKMNRKQRRELTRKIQSQDLSLEVVHPDAAGIDIGNESHYVAVPSTRDSQPVQRFGCTTGELKAMAEWLKQCRIRTVAMQSTGVYWVAVYDILEQAGFEVYLVNARDTKNLPGRKSDVQESQWLMKLHTYGLLRNSFRPSQEIRMMRTYWRQRNDLVQSAGRHIQRIQKALTQMNLQLANVLSDVSGVTGQAIIKSILRGERDPQKLAALRDLRVKASEEQIAESLEGNWQPDLLFVLKQEQDGYEFCQKQIAECDHQLSQYLQQRKDRSQGAPLPEEERKGRRRKKKGNTPQFDLREGLFRMSGTDLTRIDGIDVMTATTVISEAGWDMSKWQTEDHFVSWLRLCPDNRISGDRIIGKGRLPTNNRVTIALKIAANGLRLSNTYLGAQFRRLRTKLGDPIAIKAMAAKLARLVYRMLRYGMKYVDQGALFYQAQHRQLQIKQLKWKAIKLGFRVVQADAA

SEQ ID NO: 461754 - protein, 407 aa, unidentified
MDVLIERACGLDVHKKSITACIVTPEGKEIKTFRTHTVFLLDLIDWIKQHRCTHVAMESTGVFWKPIVNLLEAEEIQFLVVNAQHIKAVPGRKTDVKDAEWICNLLRHGLLKPSYIPDRNQRELRELVRYRRSLIQERSREHNRVQKVLEGANIKLAAVVSDIMGVSSRDMMDAMIEGEEDPEKLAALARRTLKKKKEELELALRGNMSAHQRIMLRTMLTHIDFLNEQIVELDIEVAKRLDPFQQDIERLDTIPGIARRTAEQILAEVGTNVGSRFPSAAHLSSWVGLVPGQNESAGKRKSSKTRKGNKYLRSALIEVAHSVCRSDNYLGAQYRRIAARKGRHRAAVAVAHSIMTIVYHLLTRGEDYKDLGSHYFEERQKEAIMKQAVRRLENLGFQVALTASTAS

SEQ ID NO: 461755 - protein, 359 aa, unidentified
MVVERTSVGLDVHARSVVAAAIDGVTGELRRVRLAPSHDQVRSWIEQLEGPVAVTYEAGPTGFGLYRSLTAAGIRCVVAAPSKLQRPSGDRVKTDAKDALHLARLLRFGGITPVTVPTVDQEAARDLVRAREDCRGDLMRARHRLSKLLVRHGIVYSGGQAWTGAHDRWLRQLRFDRPTTALAFESDYEAALAVTARRDRLDKAIIAMAADSEFTPVVRRLCCLRGVSTLTGFALAVEIGDWRRFTGASIGAFVGLVPSEHSSGVSRVQGSITKTGNTHVRRLLVEAAWHHRSAYRPTKTMRDRWALAPVAARQRGDVGNRRLHERWVAFNLRRKRPVVANVAIARELAGWCWSLATIE

SEQ ID NO: 461756 - protein, 400 aa, unidentified
MNPVVGLDVSKGESQVQVFLDKGQPYGKSFSISHTREGLDTFLHFLKNVESITGQQPPVVLESTGHYQTPITQFLEEQDYLYILINPLISYQAKKSNLRKVKTDAIDAYHLCELYYKEELQPYKKRGLQLLNLRNLTRQHGALTDLCMQAKLQFHAILDQVFPEFRTVFGDLFSKVSLHILLEFPTSEEVLKARESELTKRIEAICISRSNAWAQEKAKKIMDAASRNPFQKAVYESHLISLEMYIRMILQYQEHLSNLEHRIDALASEIEEYKIIQSIPGIGEKIAATIISEIGEIERFNHPKKLVAFAGIDPSVHSSGKFTATINRITKRGSSRLRHALYMAVLCGIRSSRNKKLKEFYDRKRAEGKPFKVTIIACVNKLIHWIYTLLKRKETFLDIA

SEQ ID NO: 461757 - protein, 363 aa, unidentified
MNDLSFKNNTFFVGIDTHLKSWRVTIRNSGLELKTFSMNPFPVELFLHLTKHYPDGIFNIVYEAGFCGFWPQRKFIELGLTCIVVNPADIPSSNKEKVVKTDPTDSRKLARELENNSLKPIYIPHVYAEQLRSLMRLRFQLVQSQTRIKNRIKMLLYNYGIIIPKEHLNNSRWSGYFILWLHSVILSCNAGQLTLNNLLLQLQQCRDNLKVVLQQLRTEAKNKSIEPIINSLVSVPGIAFITAMSLFTEIIDIKRFKSFDHLASFVGLVPSLHSSGETEYSRGISFRHNKFLRPLIIEAAWTAIRKDPAITLVYSQLIHKMAKQKAVIKIAKNYYQESGTFGFSKNNIGSCCISINKTKNNTK

SEQ ID NO: 461758 - protein, 385 aa, unidentified
MKNTIVHYEGAASLEAAVKKVKLSGSIIKIGLDVHARLYVAVAQYDCLLPKPVRRLGPSEFVPWVKQLLRADHTVHVVYEACGFGFGLYRELKAAGAHCYVIAPRKLDEQCTRVKTDPRDATTLCQRLSRYLEGNTRELAVIRVPTEGEEQARHVSRQREQLVCLRQKLEAQGRSLLVNHSLPSPAHWWKNQTWSRLLKLLPGWICLRLEIHRPVLLGLEQQIGVLSAQLEATAPADVPAGVGKLTTVIMTREICSWERFTNRRAISSYTGLCPGEHSSGSKRIPGSVTKRGNPRLRAALVECAWRMVRFQPNYPPVKKRLAILAKGAHATGAQRKKAIVAVARHLAVDLWRVHTGRCSAAQLGLKSAETLIVRGEQKAELNALA

SEQ ID NO: 461759 - protein, 338 aa, unidentified
MRLYGAIDLHSNNSFTVVLDEKDHVVYQKRLPNDLKAICEQLAPYREQLQGIAVESTFNWYWLVDGLMEAGFRVHLVNTTAVQQYNGLKFTDDEYDARWLAHLLRLGILPEGYIYPKEARGLRDLLRKRSQLVRQRTTQILSMQNLFSRNTGKSISGKAIKQLEPKALDEMMNEPNRTLAIRSNMVVMRCLDEQISHLEKTIKQQAKLRPEFQPLLSVDGIGNILGMTIMLETGDIKRFADVGNFASYCRCVESKKMSNHKKKGEGNRKNGNKYLAWAFVEAAHFAVQANERIRKFFQRKAAKKNKIIAIKAVAHKLARASYHVMKNQTVFDVTKAFA

SEQ ID NO: 461760 - protein, 377 aa, unidentified
MSEITRLMLTIVRVGVDLAKNLIQVHAVDAAGRKVVARSFKRDPFFAWCEQLPAGCLVAMEACSSAHHWARRLRAKGLDARLIAANFVTPYRMEGKSGKNDATDAAAICEAASRPSMRFVPVKTPEQQGIMSLHRIREGFKEERTACINRIRGVLAEFGLVFGKGHKALRAALADVLEDASNELSGTARLGLQEAFVHWRELDDKLRWCDQQVGRHVRSSAAAKRAARITGIGELAASATTASVGNFTQFRSGAQFGAWLGIVPSQNSSGGKASLGRITKRGDEYLRTLLIQGAKSAVMSAHKRDDPTSKWLVQLKDRIGWQKACIAMANKNARILWAVMTREAAYDPRHVSVKPQCKVPLNERAAAAPPTLAPCPA

SEQ ID NO: 461761 - protein, 424 aa, unidentified
MKNCNKQNEKIELVDEKTLVIGVDVGSYDEYARAFTCRKQELSKKPLHFHNTAEGFKTFKYWAVNIMKTNGLEKIIVGMEPTSIYWEALATYCKDNGMILVHVNPAAVHKSKELDDNDPSKNDRKDPKVIADLVTDGRYQFPYMPEEEYAQLRELSNLKIRTQESLTQCKNRLARWYSRYFPEFKEAYKNVVSKTAMIIMDMYPLPEDIVTLGVEGILQIWRNKKVRAAGESRAKKLYEAAKNSIGRKEAAAVARLEFQSIKEDLDRYQERLEAIDKEVDEILPKIKNADKLFEIKGVGKATVLTFLSEVGEISRFDNPKEIQKLAGYAIVTNESCKHQGEKRISYRGRKRLRWALYQTALSVIGKNEEFRQIHQYYTTRKKNPLKGIQSVVAVACKMIRIFYKILTDGVSYDGTKMTQDIVRV

SEQ ID NO: 461762 - protein, 356 aa, unidentified
MDEGSWVGLDVHARSVAAGVIDRGSGEVRSLRVPPGCGATVEWLKTLPAPVRVVYEAGPTGYGLARACAGAGISCVVAAPSRIRAAADRVKTDRRDAERLARLLRLGEITPVRVPEPEEEAARDLVRAREDARGDLMRARHRLSKLLLRHGAVYDATAWTRAHDAWLRRQRFRSGPLAIVFDECYGRVLEAKTRRDALDEAIAELAASQPYVDVVGRLVCLRGVSTLTAFALTVELGDWSRFRPESLGPFLGLTPTENSSGERRRRGGITKTGNTHARRLLVEAAWHHRRPPRMSAVLARRRSGNPVAVQAQADRSARRLHGRWHALETRGKPRSIVVVAVARELAGHCWALATME

SEQ ID NO: 461763 - protein, 429 aa, unidentified
MVKSRAYRSTSVKHVLLDRVLAGREGQATCMGCDISKEEIIAVLRWGAKDFERPWKVRSPGELGLFVGMLQRVGQDRSLVVAVEPTGTYGDAFRQALSDAGLVTHRVSPKASHDYAEIFDGVPSQHDGKDAAIVAELSSLGKSTLWAFQAPSETDREMAYWVDWQQIQQGSLNGWYGRLEGLLTRSWPEASETLPLSSGVLLRCLAEYGGPRALGADREGLSRVLRWGRGHLSQAKAEQLVGEARGTVGVRQSATDVFQLQQYARSALDCRRAIRQAENSLKKLVQDHATIQAQAAAVGVVTACVLWVHLGDPALYDSGAAYRKAMGLNLTEFSSGTWQGRLRISKRGHSQVRRWLYFSALRWIQVEPIKSWYETKKSKKSGQDDDQVMRAIIGVMRKLALALYQVGARGATFDPGLLFPGSAIAQPVA

SEQ ID NO: 461764 - protein, 360 aa, unidentified
MCRVGKPVNSLLSFLTLQINIMTVQSKRIVQELKSLFAGVDVGAEELILLVRKNGTSCKTQKFTNTPADRARLVKKMVSMPGIIVCLEATGVYHFDLSIALHDAGVALMVVNPKSSHNFAKVLMKNSKTDAVDAETLAQYAERMDFVAWTRPSDERIALRSFARRIDALTRQKAAAKNNSHALNASQETPKAVLRDVELAISQLEKRVASLSKEALILIEKHPDLERVFQLLTGIKGIAQTSAIALMGELLLLPQGLSHREWVKSAGLDPRTFDSGKSVHKKTRISKAGNRHIRSALYMPALSAKQHDPHVKAYFQHLVDNGKLPLQALCAVMRKLLHAIHGMLKHDKPFDNTRFYAIPA

SEQ ID NO: 461765 - protein, 337 aa, unidentified
MTPTTVGLDLAKNVFHVHVADASGHTIDSKKLARRKLLPFFEALPPCLIGIEACATAHNWARQLQGLGHDVRLIPPGYVKPFVRRGAKNDASDAAAICEAVNRPNMRFFPIKSREDQAFLMLHRARGLLVRQRTMAAYAFRAHLVEYGVIVAQGRHRVDTLITKLDELRKDLPDDACFALDALIGQLDALNQQIDSIDARLAEIHKNSAICRLLATVPAIRPITATAFAAAIPDPSAFRSGREFAAWLGLTPRQNSSGGKTRLGGITKQGDRYLRHLLVLGARTVVRYPKARSRVDGPWIEALLQRRRPMVVAVPVANKLARAIWAMLTTGEVYRAA

SEQ ID NO: 461766 - protein, 382 aa, unidentified
MPDVISSAPAAVRMRAALDVHKRTIVCAAQPDDPRAELRLEEIPNTERAVRGLVRRLGGPEGLVVCYEAGPCGYDLFRLLSAMGVACDIVAPALTPVAPGARVKTDRRDAKRLLVLHRAGALKFVAVPTPAQEGLRDLVRCRDDLVCARRAARHRVAKQLLRHGHVFREGKKSWTKTHQAWVRRQRLGDPLAQSALEHMLAHLDSLDAQIAALDHQLDEIAAREPWSDPVRWLCCFRGVTTITALGLLAELGDLRRFATARELMSFLGLTPSEYSSGEQRHRGHITKAGPRHARRLLIEAAWHCQHPPRVSQRIAAVHPHVPPDVAARAFSAQVRLHHRHRHLTSHGKRSTVANVAVARELAGFLWAAMTRQPLPAQEVTAA

SEQ ID NO: 461767 - protein, 343 aa, unidentified
MKLNRIGIDLAKNVFQLHGVDDRGKVVFRKRLTRDKWLSVFCESVEPGCEVGMEACGGAHHWARQLQARGFVVKVIAPQFVTPYVKSNKNDANDAEAICEAMSRPNMRFVKPKTVSQQDIQAVHRIRQELMSHRTAKANQIRGLVTEYGLVAPLGLAALRSAIPCWLEDAENGLTVLFRSLLHGLWEDLRRFDQRIATMDAEVNRIAKSDPVAQRLQQLRGVGPLIATALVASVGTGEQFSQGRQMAAALGLTPRQHSSGGKARLLGISKRGDPYLRSILIHGARATAAAAKHKDDRLSRWVTDLAQRRHLNVAAVALANKTVRMAWAMMRNETNYDPDYVAA

SEQ ID NO: 461768 - protein, 347 aa, unidentified
MDHIIIGVDTHKSNHIAVAINAQGARLGVVTIPTNRQGYRDLEIWAAKFGRIKAFGIEGTGSYGAALSRDLLVKGHTVLDVMRPNRQLRYLHGKSDSLDAESASRSVLNGQASALAKTQTGSSEMIRHIKIVRDSAVKVRSQAMITLKTMIINAPAELRDTLDQIKGPISLIRHIAALRPGDIASPTASAKWAMRALARRWLALHEEIQAHEVELERMAREKAPELMKSHGISTQTVAEMLILVGDNPERIKSEAALAKLCGVCPIPASSGKTNRMRLNRGGNRQANAALYRVAIVRMRDDEKTKTYVTRRTAEGKTRREIVRCLKRYIVREIYRHLCVPPTAASST

SEQ ID NO: 461769 - protein, 379 aa, unidentified
MKEITETGNKVKGRVYPLDNISWVVGIDIGKEKLSCALMKINKALICRFDIEGSLSGYNGLMDRVKRETRGNGKVVFALEPTGHYWMVLGQFFEDHNQSYVLIHPLVVARSREVHHLNKSKTDSLDARLIGELACDKSVIRTQIPEDHWATIRFYAREYIDREKEIAREKNRIMSYLETTLPEFMKIFPRPLCMSGRACLRVLADFKQALKGNGEHFEMRIRKHLACKRLMTSRIRRLHDMLQRGDVLGLRAGRQAMFFRIIHSLDRLEVFEGQEKAAKQAMLDVYEESEYKEYLDSIWGTAPAANALILGFMGDPALYDSPASLVKLAGCDPVPNESGKFKGRTSISHRGRSLLRKAGDRVSFLLEKRNSVFRVFLIT

SEQ ID NO: 461770 - protein, 417 aa, unidentified
MKGLSMQVMYARCAGLDVHKKMVVGCVMVSGNGGNVEQEIRTFATYTSDLLALSDWLKSHGVTHVAMESTGVYWKPAYNLLEGLFELLVVNARHVKAVPGRKTDVKDAEWLADLLRHGLLRGSYIPARPQRQLRELTRHRANVVQRRAQAVNELQKCLESTNIKLASVATDITGVSATEMLSLLLAGQTQPEALAELARGRLKEKRPLLQKALQGRVEAHHRLILSQLLAEIAWCEEQVSEVGMEIAKRLKEHEELLKRLDEIPGVNQRIAQVAAAEVGTDVKAFPSDKHLSSWAGLCPGNNESAGKRHSSRICPGNRHLKVALMEAANAASRKKGSYLRAKYHRLSGRRGRKRALVGVARTILQSMYYIIQRGTHYQDLGENYYDQRNPEKLANRLAKRIEKLGFKVTVQTVPPAP

SEQ ID NO: 461771 - protein, 427 aa, unidentified
MNLTQDAKICQVTEHTIVIGVDIASETHYARAFDWRGKELGSVYIFGNSAEGFYGFTSWMSELAKKANKNHTIIGAEPTGHYWFSLGMYLRDNGIKMVLVSPYHVKRSQELDDNHPSKTDRKDPKTIAKLVIDGRYIEPYIPEGIYAELRVAMNCRWRIIREQTVIQNQIQRWLKIYFPEYKNVYGSFEGISSLMILRIAPLPADVIALGVEGINAVWRKAKLRAVGIKKATRLCEAAAESIGCTDGSIAARMEIMLLLDDYESKLQQYNSVMTTVEELCNQLPEVAELVKIKGIGLVTVAGIIAEIGDLRRFDSPRQIQKLAGLAIRENSSGKHKGRTSISKRGRAKLRCILFRAAISLASQNKEFREIHRYFTTRTENPLKKKQSIIAMSCKLIRVFHAIVVKGYEYDPTKLLADIHRNKMPNAA

SEQ ID NO: 461772 - protein, 364 aa, unidentified
MIVIGTDTHKQTHTCGAVFAGSAQIAGELTAAAREAGFRELLAWGRDLDEERIWALEDCRHVSGSFERFLVAQGERVVRVPPKLMGQSRRGERTRGKSDAIDALAVARAALREGPETLPAAHLDEEALELRLLLDHRENLVKARSEDQQRLRWHLHDLWPELELPVGCLDRIVWLDRLTRKLSRAEQGARVRIARELVRSIRERTRRASELEREIAAMVRTQAPQLLELPGCGSLTAAKLLAETAGAERFASDAKLARLAGVAPIPASSGKRVRHRLDRGGNRQLNCALHRIAVTQGRIYPPAREFLERKQAEGKSRMEALRCLKRHLARRVWRLLIDSEIDLSMSNPVNPQRGSLTPQIAAVA

SEQ ID NO: 461773 - protein, 381 aa, unidentified
MFIEKIGIDLHSNNFTIAYRNELRNILFKKINLFKEDEIESFIKMLSKETILAVEATSNSNYFYRLFKKYVKKIMIVNTKKFDINKRSKKKNDREDAKRILIFLEVGMLEGIWIATDEIRNLRKLVSIQKRLESIQVCSKNMLGNILTANGIRRNKKDIMHADNNSLFYDSNLNENQIFVAENLIRVIKYIEFKNEILKHAIVKSIGKDKRIELLLSIPGIGPYTAAAILSEIGDINRFDSSKKLCSYAGITPILDESNGKRKQKGITKSGRKKLRYFVCFAVNNAIRSSKIFREFYERINGKGNKKRAMVATARKLLTVIYEILSKEEPFKEYKEKLYEKKINNWDKELSMKENDIKIAMDNFLESELLNFSHIKDKMIC

SEQ ID NO: 461774 - protein, 413 aa, unidentified
MDILHRCCAGLDVHKEVVVACLRKLSGGKVEQQVRTFRTETNALLALADWLTDEGVSHVAMESTGVYWKPIWNLFEGVFALVLVNAEHIKAVPGRKTDVKDSQWIAELLQHGLLKPSFVPDKPVRQLRDLTRQRVQLIRQKVQVANRIQKTLEDCNVKLSSVASDVLGASGRDMIRAIIDGETDPTRLADLARRRLREKIPQLQEALCGEIQDHHRFLLGMLMEQVDFLERQIGKLSARIEEVMPAPFAQAVARLDTIPGVDVRAAQGIVAELGADLGAFASSAQLASWAGMCPGNHESAGKRKSGRTTKGNGWLRVLLVQCAWAASHSKGTYLKAMYGRLAARRGKRRALVAVAHRLLQIIYNVLKKGQGYQELGEDYLDEKQDKQRLAQRLLKRLEKLGVRVTVQAEEAVA

SEQ ID NO: 461775 - protein, 389 aa, unidentified
MKIFVGIDIAKLNHFAAAISSDGEILIEPFKFTNDADGFQLLVSKLESFDKNSIIIGLESTAHYGDNLVRYLVAEFYQVCVLNPIKTCQIRKNNVRKTKTDKVDTFVIAKTLMMQDDLRFITFFDLDMMDLKALGRFRQKTIKQRTRLKIQLTTYVDQVFPEIQYFFKSGLHQNAVYALLKEAPSPKEIASMHMTHLANLLKVNSHGHFTKEQAKELRVLAQKSVGANDSAISIQITQTIQQIELLDSQLEKIEAEMTDIMKFNDSVIMTIPGIGYINGGMILGEIGDIHRFSNPNKLLAFAGLDPSVYQSGNFQAKTTRMSKRGSRVLRYALVNAAWNVVRNNATFKAYYDAKRSEGRSHYNALGHCAGKLVRVIWKMLTDEVDFNLE

SEQ ID NO: 461776 - protein, 348 aa, unidentified
MLIIGCDYHPGFQQIAFVDTETGEFGERRLTHREEAEQFYGTLKERSVRVGMEASGHARWFERLLKDLQFELWIGDAAEIRTKRVRKQKTDRQDAQLLLKIMVEDRFPRIWVADAENRDLRQLLWHRHRLVQMRTRVMNQLHVVALNEGLRRKKALWRPAGRSELESLILAPWASRRRQDLLDLLDHLTPKIQGLTRALEEEVEKRPVTRRLMTYPGVGPLTALAFELVIETPERFHCGKQIASYVGLVPSEESSGDRRRLGHISKQGNSLLRYLLVEAAQVTVRSQPQWRSKFFHLAMRRGRKIAKVAMARKLAVHLYWMWREGWDYEQWNKFGSHAGAPGNRHGVQ

SEQ ID NO: 461777 - protein, 347 aa, unidentified
MTYNQPHRFYCGVDLHARTMFVHVLDHKGKTVFEQDLPADPAAFLTAIKPFRKDLVVGCECMFAWYWLADLCEDQKIPFALGHALEMKHIAKAKAKSDRIDAGKLAALLRGGLFPLAYAYPRAKRQTRDLLRRRSFFVRQRSQLIAHIVNTNSQFNLPPLTKKLTYAANRSEAIAERFADPSTRLMVESDLALIADYDRQIARLELHLTRTAKVDDPVTFGFLRTVPGIGPILGLILLYEIDDIARFPAAGNFLSYSRLVRCAHSSAGKVKGSGPKKVGNAHLKWAFSEAACLMIRAVPAVKSWMQRQEKKRGKRKALSVLEAKIGRSVYHLWRKQQAFDLKRFLRG

SEQ ID NO: 461778 - protein, 346 aa, unidentified
MKILKQIVGVDVAQKELVVAFGRLKGDLSVEILSSKVFTNNVKGFEKLLAWTKSLADTQCNVQYVMEATGVYHESFAYYLYDHGLAVSIVLPNKISNYFKTLEVKTITDSTSAEAITRFGLERNTQLWSRPKPIFKSLRQLTRERDQIVLMRTMVKNHLHAELAEAEPGKTSVERMEAQITMLNAQEREIKKEITKLAQDPQVKNGITVMSSIPGVALLTSATVLAETNGFELIRNKKQLASYAGFDVREKQSGTSVKGKPKISKRGNKYLRKCLYMPVLATIRSDQHYKSFYARLVERHGIKMKAAVAVQRKVLELMYTLYKKNERYDKNYESSQNGRKKERQVL

SEQ ID NO: 461779 - protein, 464 aa, unidentified
MRQIQANTRRERREAKKAVARGEQFALIRPHAAGIDLGSHEHYVAVPPELSEPVRKFSCTTSGLRQMAAWLSECGVKTVAMEATGVYWVPVIEVLEQHGFDASLVDARQTRNVSGRKSDEIDCEWIRKLHSFGLLSPAFRPEESMVVLRSLWRHRDGLVRACAEHIQLMHKALEQMNVQLHKVLSDVSGLSGMAIIRAILAGERDGEKLAALCHAGVKRPRSEVARALEGNYRREHIFTLRQAVEAYDFFQRQLEECDRMVEAEMAKLPSRGEQPAPQPEARGSRYRRKNQPHFDLRSELMRITGVDLTKVEGLDSVTVFTVVSETGTDMGRFPSEKNFASWLHLCPNHKITGGRVHSRRVRPGINRAGQALRVAAQSLHHSKSALGAFYRRMKAKLGPQKAIVATAHKLAILIYRLLKHGEAYVSQSEARYLELTRQRTVSHLTRKAHQLGFQLVNTATGEIV

SEQ ID NO: 461780 - protein, 321 aa, unidentified
MSELYNVGIDVSMDRLDVEIRPGGQRLWVANDTAGWIELVVRLRRSVIAAIGLEPTGGYERGVIRALLAAGFSVRRINPNKLRQFARARGALAKNDRIDARLIAEYVALMPTRAVHRNPVVERLAEMVTMRRQLCQEHVAIENQASHLEDAMLRRMAKRRLARIEADIALLGKRLAEHVAAEPVLARRFDLLCSMPGVGATLAYTLLALLPELGEIGRRQIAALVGLAPYDFDSGKFRGQRHIYGGRMPVRNVLYMAALAAFRFNPVLKAFHRRLVGAGKKPKLAIVAVMRKMIVALNAMLRDGTQWADRHSSGRHTVPAT

SEQ ID NO: 461781 - protein, 343 aa, unidentified
MEAKRYIGIDLHRNCFTSCLRLENGREYLKTWKLEQLETFASKLRRTDEVAVEVTGNTRLFHDAVAPHVERVVAVNPSQFKVITHSVKKTDPNDARNLALYLAKDLLPEVRMKDKTQAQIASLTQTRDSMVKLRTALKNKVNNICSGHGVNLNKESLASEKGLKAVLAMQLDPLVNLELKIIIDQIRSLNKSIAELEETIGREGRKLEGHQNLTSIKGIGGLSGSILLSIIGDISDFADEGKLAAYFGIVPRVANSNETEHSGRITKRGTKLGRTTLIQCSLIAQRYSPYLRTYYEKMKGRRGTGKAIVALARKFLGIIYRTLKNKWVFEDFPNFVLAEEATA

SEQ ID NO: 461782 - protein, 428 aa, unidentified
MPYKIAGIDVHKRMLAVAVSDVEVHGEYAFERRQFGSNPAQLRLLADWLLEQQVEEVVMESTAQYWKPVWAALEQYWKPTCKKREGAGSMSATLHLAQAQSNRARQGRKNDFVDAERLVKRLVANELTLSFVPDPEQRLWRTVTRTKYQLTRNRVQLQNRLEALLEEAHIKLSSLVSDLLGVSARRMVQALADGETDPAALAALANYRLRATQERLRDALGACQELNPVYRRLLKRALEELQLIEKQISQLDQEIADLLRPYQDQVQRLAEVPGLGVDSAQQIIAEVGPTAATFPSAGNLSSWVGACPGDDESAGVSHSHRSPKGNRQMRRLLNQAANAAVKYKGGIFEILYRRYVPRLGHKQTIGVIAHRLCRLIWKILYQGVRYEERGPDVRKKSQRCRAARMIRELQSLGYRVEQANSQSADVPA

SEQ ID NO: 461783 - protein, 338 aa, unidentified
MHPTIIGLDLAKHIFQAHGIDAAGKAVLRKKLRRSELIAFFAKLPPCVVGMEACGTAHYWGRELTALGHQVKLMPAAYVKPYVKRGKNDEVDAEAICEAVTRPTMRFVPIKSAEQQSILMLHRTRDLFVRQRTMLVNSLRGQLAEFGLIAPKGVWRVPELEALAQDGELPEPARACAELILMQIEDLQSKIKAIERTILARHRANELSLRLATIPGVGIITATALVATVANASAFRSGRHFAAWIGLVPRQNGSGGKMALGGISKRGEPYLRRLLVLGATAVVRYVRNKPELAGWVNALLARRPARVVTVAVANTLARIVWAIMQRGGTFRERPFGIA

SEQ ID NO: 461784 - protein, 371 aa, unidentified
MAVYREAFVGIDVAKLKNAIAVAESGREGEVRFWGEVDASDTSMRRIIQRIAAKFDRVHFCYEAGPTGYGLHRLIRSLGHECVVVAPSLIPRKPGDRVKTNRRDALALARLLRAGELTAVWVPDEGHEAMRDLVRARASAVETLRVHRQQISAFMLKHSRIYPRKKGWTMRYLRWLQEQQFDHPAHQIALQEMVEAVRVSKERVERLEKVIEEFVPNWSLAPVVRALQTLRGVDLIVAVTFATEVGDVSRFESPRQLMGYLGLVPGERSTGETVRRGSITKAGNGRVRHMLVESAWTYRHPPKVGARKLYRLEEAPPKVREIAWKAQSRLTARYRMLTGRGKRTTVVCTAIARELTGFMWAVAREAQAGRS

SEQ ID NO: 461785 - protein, 348 aa, unidentified
MTTLARSVTGGVDTHLEFHVAAALDERGGLLGVERFETTTRGYKKLLAWLGDFGPVSLVGVEGTSSYGAGLTRHLLAEGITVVEVDRPNRQVRRRKGKSDPKDAVSAARAALSGEADGLAKTQDGNVEAIRVLRVARTSARSARTQALNQMRSLVSTAPEPIRGELRGLSVHRLLARASTYRPGTGRDVVSLTKLTLRNLARRSIELEQEIKGYDAILEPLVTETAPELVDRLGIGPDSAGALLVAAGDNPERLRNEAAFAHLCGAAPLDASSGKQQRHRLDRGGDRQANSALWHIVITRLSYDPRTVAYVERRMNEDQLTKKEAVRCLKRYIAREVFNLLPMDRLTA

SEQ ID NO: 461786 - protein, 412 aa, unidentified
MTEESFTWFVGVDWGSEKHHACILDTRGTVVGERQFPHSGVGLAKLGDWLLSIAGTTATVAVAIEVPHGPVVDSLIDRGFVVHAINPKQLDRLRDRFSVAGAKDDRRDAYVLGDGIRTDRRLFRRLHVADPRIVELRAWSRLTEELQEERVRLGNRVQQQLWRYYPQMQKITNDLAAPWFLELWAMAPTPGKARQLRKSTVEQTLKKHRIRRIDADTVLRMLREPAIKVAEGIAEAASIHLRSLIARLHVVNRELRQAEQKLDQLCAGIGETEGAPGECLQGQDIKILKSVPGIGRINLATLVCEASGPLRSRDYPALRTLCGAAPVTKRSGKSQIVVMRYAAHARLRETVYHWARTATQHDAKSRCRYAALRQRGHSHGRALRGVADRLLGLTCVLLQRQTMFDPHFGQAG

SEQ ID NO: 461787 - protein, 352 aa, unidentified
MKYVGLDWAYRTAQWCALDPGGEIAGEGRFAADRDGLARLVLELGDEVTACLEMMSGALWARDELVACGWQVQVADARKVKTVAPLAAKTDRVDARLLAELSRRQLVPALWLPSLDDRELRERLRRRMHLVRLRTSAKGRIFGLQTQWGIRISLRRLRRADGMTLLERAGVPAVWRHSISECLALIDFLDARIVPLDAELRPFAQADPRAVLLDTIPGVAELLALTIAVEIGEISRFAGPEKLVSYGRLAPRVRQSGEGRPHTGPLNKSGSRLLGWAAVEAAQQAWRESNPWHQLYLDVSRRSRNHNSAKAAVARKILIAAWHMLSRNEPFKPAPRTGATSVPASSRLALAA

SEQ ID NO: 461788 - protein, 422 aa, unidentified
MNYLTDNAFTAYVGIDWADSKHDICVQAAGGQQRELDCIPHQVDQIEEWAQSLHKRFGGVIAVALELSKGPIVYALQKYDFFVIFPVNPSTLAKYREAFTPSHAKDDPTDAEFALDLLVRHPERFAPLKPQSVEMRTLSCLVEHRRSLVNDKTRITNRLRSTLKQYYPQMLEWFEHLDTVLVCDFITRWPTLKQVKRARKSTLEKFFHEHNMRFSHVLEARLKSIKAATPLTLDAAVVTPYSLQALVLTDQLRVSLQSIHRYDDEIAELAPKHPDYGLFSALPGAGPSLAPRLLVAFGEQRERFDCAAAVQKYAGIAPVTERSGKKHWVHWRWQCPTFLRQTFVEWAAQTINKSFWAGAYYRQQRDKGCTYQAAVRALAFKWIRILYRCWQTNTPYNESVYLNALKRRGSPLLNPSTTVKMT

SEQ ID NO: 461789 - protein, 332 aa, unidentified
MVFNHYLGIDISKKTLDAALLLREGVVEGQTKVSNDKKGFKDLLSWLKKLKISPTEVLVCAEHTGIYGYDLQVWLDEKAIKYAMVPALEIKKSLGIRRGKNDMVDALRIAEYAYIRRESIVLTHRPSETIFQLKALITERKLYVRSRAGLLSRKEAMEKYESREGRKRREDAIKKFSSYIESLEGQIEDVICNNPDVLRNYQLVRSVKGIGLINAVNTIVYTNNFTSFQTARQYACYIGIAPFEHSSGTSIKGKTMVSSLGNHQLKCELTMAARNAVCTDPWLKGYYKRKMAEKGNMRGAYGIVLNAVKFKLVVRMFAVIKSGTPYKTLTYC

SEQ ID NO: 461790 - protein, 348 aa, unidentified
MKYYIGLDAHSTTSTFAVVDESGQCVLRETVKTSEQSLVHVINRINGERHMTFEESSISQWLYLQLKDKVDNLLICNPTYVAKKQGAKTDFRDALHLANELRTNHLQPVFHDTSHWMEIRTTVSGYLDIVEEIVRFKNRLKAVFRAEAIQTDENSFYKNSSRVREIKNLAAKFVAEKLFDQIEFLESEKEKYKEVFERNRKKYRPIRNLMTIPGISIIRANIIAAIVCQPARFDNKHKFWGYCMLVRHIQISNGRIYGNKRFYGRRELRNVFLGAAENVMRLDGELRDRYDALRAKGADHKDAKVNLARQIASIALCLLKNNDTYNENYAEHLKERKKLRKEFFEQNL

SEQ ID NO: 461791 - protein, 345 aa, unidentified
MTKVYFRTFHDFQFRAAIDISKHSYAIFCVDQTTGEIFEENRSEKDFLEFFRMKSKSVIAMEACATSKYWARRLSELNHEVLLLPPKKCKPFVDGCKSDRNDARGIYRSMESVRPSPRPITLELQQIDTLVALRKFVVKEYVSYTNALRSHLAEYGKAMPKTIKGFENNASICINELEQEGLGAFLIQRLRDMLARYKDLRREEAEYSREINRLTKESRLGQLLRTIPGVGAIVAACALPMLSDPKAFANGREFAAFLGLVPSHTGTGGRTINGKITKRGDRYLRAMLVQGAMAALRQKVKAPWLERLISREPARKKVAVALAARIARVMWAIANTNQPFELRML

SEQ ID NO: 461792 - protein, 412 aa, unidentified
MELLHRRCCGLDVHKETVVACLRLVSDGKVTTEVRTFQTTTADLLRLSEWLAANECTHVAMEATGVYWKPVWRILDDGEFALVLANAAHVKNVPGRKTDVNDAMWLAELLAHGLIRASFVPDAQTQEMRNLLRTRKQLVREQSSHVLRVQKTLEDANIKLDSVLTDLMGKSGRAIIEALIAGETNPVKLAGLADRRVKASFEEFREALRGRVTRHHRFLLRLHLNQIDALDAAMATLDAQVEANLGPFRTAVELIGSIPGIKNLGAHVIVSEIGIDMSRFPSAAHLISWACICPRNDESAGKRRSNRARKGGTWLKTTLVQCAWAAVKKKDSYLQAQFYRIKARRGPKKAIMAVVASILTAIYHMLKDGTMYKDLGRNHFDRRSSDQQKNRLVKRLVDLGYVVEIKPLAATA

SEQ ID NO: 461793 - protein, 347 aa, unidentified
MSFTNTFDYIKTFIGIDVSKQWLDCIIRPSGDWTRCENQPNGFDQLDRWLRERDVDPQTSVICMENTGVYDDRVLQALTEKGWICCLEKTTILEKVTPDHHRKDDRFDAAGLAEYAERYLDKLNVWEPVDEEIELLRQLFSERRRLVTQRAAVKSKCTQSLHHTQTSSVVAQSWQQQLTFYTEHIDQIESRIRTIIKGHQGMTTYDGLIKSIPGIGEVTSWLWLILFYGQTDLDYKKIASRFGYAPHSKRSGTSVKGKTRSSGHGASEVRQCLCMAVRSASTHCEKFKKYKQKKLDEDKIWPIVRNNLANKLIKTICAIWNSEQPYDPNHTSRFDRQKKAAQYLKKS

SEQ ID NO: 461794 - protein, 411 aa, unidentified
MRLFVGDDWAEDHHDVEVMDEAGRVLAKKRLPEGVAGIAQLHELIGRYLPEDAEDAEVAVGIETDRGPWAAALIAAGYTVYPVNPLQASRYRDRHGVSGAKSDGGDSHMLADMVRTDSHQLRPAAGDSPEAEAIKVVARTHKTLIWERTRAVQRLRHQLREYFPAALEAFEDLDAPDPLELLGKAPDPARAAKLTRAQIAAALKRARRRNIAGKTDAILAALRGKQLGLPAPLTAAYAVAARSLIAVITTLNEQVKILEEQVREHFGRHPDAEIYQSQPGLAAILGARVLGEFGDDPNRYADGKARKNYGGTSPITRASGKKKVVIARFIHNDRLIDALMAWAFSALNASPGARAYYDQLRAKDIEHNDALRRVANRLVGILHGCLKTRTLYDEATAWGHRENPSQSHVAA

SEQ ID NO: 461795 - protein, 347 aa, unidentified
MARAVNYRGIVVGKPLSFQNNEEGFTSLLNWIKELKHLKNLDTTIVGMEPTGHYWINLSKWLVKQNMDVVTVNPHHVKRNKENRDNTQSKSDKKDALVIADMVKNGYYAFVRSTSESFEKLRVLMANRDVIVKRLVSSINQINRWVDVVFPEFREVFKDVSCKGAIATLRLFPTPAELCSLQPQDIVTGWKSCMKRHSGHKKAHSLLALAKRSIGTKQALDAYRLHLRQLFEEYDLASSQLEIVTQEVTNVLEQIPFVKQLLAIKGISEISLAGILGEAGDLSGFAHGNALLRHAGLHLAEASSGKWKGQIDPLPNFHKIIRPVKFNRRNTFIDGIVSASIINNTSR

SEQ ID NO: 461796 - protein, 313 aa, unidentified
MAQMVTNAGIDVSKQWLDVALWPKRDEVLRVNRDAAGLEELALWLRQRHVVRVGLEASGGYEREVIDALEAQGFEVALLNPLQVRRFAQAKGRLAKNDRVDARTIAQFTAVMIEAPQPSRRRELDALSEHLMFRRQLRAWIDDCTNQLEHLRDKALRRKTEARQVKLQGELAAHDKALAKLTAEHADWNDLARRLRTVPGVGPVLSQTLIALLPELGSLSRRAVASLVGVAPFDNDSGQRNGNRHIQGGRAAVREVLYMATLSARTCNPVIAAFAKRLAGKEFKVIMVACMRKLLVILNAMLRDKMDWKAKAA

SEQ ID NO: 461797 - protein, 332 aa, unidentified
MMKDAYPFTQVVGVDVAKAKLDFVLDEGQPPIVIDNTEEEIVCKLIAKIENPKSAIVVMEATGGCEDQLVTLLHRHEIALAVVNPRRIRNFARGLGWDAKTDPIDARAIAFYGRVVRPAAQLAKSDAEKKLKSLVNRRRQLLDLINQEGNRLKQTTDREIRGYIRETLETLKNQMKTIDERLAECVDADTENARKIEILRSAKGVGPVMVGTALAELPELGTLNRGQIGKLVGVAPMNCDSGQTSRKRKTSGGRSYVRRVLYMATLSATRFNPRIKAFYQRLVAKGKPRKVALTAAMRKLLTILNTLIKNDVLWEDSEPDETSVPEELARNG

SEQ ID NO: 461798 - protein, 337 aa, unidentified
MTLYCGIDLHSNNSVVAVLDEHDRTIYEKRLPNELETIIDVLCIYQSELVACVVESTYNWYWLVDGLMAAGFPVRLAHTSALPEYSGLKYSNDFSDARQLAHLLRLGLLPTGYIYPKEERALRDLLRRRLLLVRQRSLHHVSLQSLIARHSGQRLNTRQIKTLTREQMADYLEGHALLGGEITRQARCWLEGAVMRIERELQRHIKPREDYRLLQSIPGIGPVLGTTIALETGTIERFASAGNYASYARCVKSEKISNGKRKGQGNKKNGNKYLAWAFMEAGHYGAIWNPRIKRYYQRKQAKAHVMVAKKAVANKLARACYHMLKRGEEFDVTRAFS

SEQ ID NO: 461799 - protein, 345 aa, unidentified
MTNILKQVLAADVAKNELVVAFGLMYPDTSINIFAYKAFPNNQKGFKDLLIWVTKLAAKEVKVRFVMEATGVYHEKFAYYLTDHGYEVSIVLPNKISNYAKTLEIKTVTDKTASQAICQFGLERKLDIWKKPKEIFRTIKQLTRERDQLIAERTMIKNQLHAEKTEAHPNKDGIMRMNKRIQLINEQEKAIRLAVAKVIKQDKELAAKIDKISSITGVGELTAAIVVGETNGFELIRSRKQLINYAGMNVKEKQSGTSVKGKPKMSKKGNRYLRKAMHLPALSAIRHDPRFKAVFVRLISRHGIKMKAIVAIQKKLLEMIYTLWKTDTQYDKKYLQNKSQEIQTA

SEQ ID NO: 461800 - protein, 389 aa, unidentified
MFYYIGIDVGKFSHSVCILDDSRTKKIFQINNDKEGFEVLRKKLPNLDNILIGMEATGHYFLNIYDFLLKLNINVEQIALLNPLQVKAFRNTNLRGAKSDNVDAERIAELLRFGDYNRCNVSTSSIADLRELTRLRADIVSNTSDVKRKIISLLDRMFPEFNEVFKNQFTFTAVSLLNDYPTPEDLCELSLEKLTSVIKGLSKRGLDKDKILRLYEGARNSIGISFGKEAFRIELNILLERLKVSEKQTNLIEEKIDELVKNFDLNIFTIPGVGNTTGAVILSEIGDISKFSSSQKLIAFAGLDPKLKESGKYQGKTPISKRGSKYLRNALWSSAMVACRHNEKFKEDYKKRRDRGKTHRYAVTAAANKLTKIVYHILKNNVPFDSKLV

SEQ ID NO: 461801 - protein, 339 aa, unidentified
MQVSTIGLDIAKNVFQAHGVDAAGKTVITKQLRRGQVISFFEKLPPCLVGMEACATAHHWARELTKFGHTVRLMPASYVKAYVKRSKNDAADAAAICEAVTRPSMRFVPVKTIDQQAALTLHRCRDLLIRQRTQLINALRAHLAELGMVAAKGKAGVKNVVAIVTGTQLPGPMKQALQALVRQLAALQEQIGELERGIHAQHRASDRSRRLETIPGIGVIGATAIAATVTDPSAFKSGRELAAWIGLVPRQNSTGGKERLGGISKQGDRYLRRLLVAGGMSVIRNARAHPDKHPWVMRLLARKPAKVVAVALANKTARIAWAVLAKGETYRTPARAVTA

SEQ ID NO: 461802 - protein, 341 aa, unidentified
MAEACTIGLDLAKHVFQAHGADASGRVVFRKRLRREQVLEFFAGKPACVVAMEACGSAHHWGRALGELGHVVRLIPPAYVKPFVKRQKNDAADAEAICEAAQRPTMRFVAVKGEAAQADAVVFRARDLLVRQRTQAINALRGHLGEYGLVAAKGPGHVTKLVAHVEGADSGVPEAARPVLRMLVEVVEFLSTRIDLLDREIARRAREHDGVRRLTSIPGVGPITATALAALAPPADAFRKGRDFAAWAGLTPLQHSTGGKQKLGATSKMGERTLRRLLIVGASSVVRKALREGPAAGSWLERMLARKPRMLVIVALANKMARTAWALMAKGETYRTPAVAA

SEQ ID NO: 461803 - protein, 312 aa, unidentified
MEAKFVGIDVSKARLDVDCLPVSTSRQFSNDAGGITALVEWLLGSGVERIVVEATGGYEIAVASALAAAGLPVVVVNPKRVRDFAKAQGVLAKSDRLDARVLALFGERIAPPVRALPQAAQRDLTELLDRRHQLVSMRAQEQARLATVLPVARGDVEQHIAWLDQRIRKHETVLLKRLRANEIWDAKVKLLDSVPGIGPVNLFTLVGRLPELGTLNRQQIAALVGVAPFNDDSGKRRGQRYIRGGRAEVRCALYMATLTAKRCNPVIAQMFERLIAKGKPFKVAMTACMRKLLTILNAILKSTQPWENRLAT

SEQ ID NO: 461804 - protein, 320 aa, unidentified
MTSIAQPRASVGIDISKNWVDVAELVSGRNWRVVQRQKDLEDLVSELVRLEPERVVLEASGGYERALVSMMLAQGLPVCIANPAQARQYARAEGKRAKSDPIDAAMLARMGPALGLVPRHKNVEDQYIISALASRREQLIDIRKAEKSRLEPGPVPSIIARQIEEIVTLIDALIDEVEAQIDALIATNPEWSAVSEACQSVHGVGPQTVRSLVAFMPELGRINRQQAAALAGLAPYNHESGKKKGKRMISGGRPAVRRALYLAALSAQRGHGVFKDFSNKLRKAGAVPKKAIIAVARKLLVYLNSLAKAAIASIPSPKPT

SEQ ID NO: 461805 - protein, 345 aa, unidentified
MMYYAGLDVSLKETSICLVDERRKVLKEGKVGTEPETIAAWLEATGFCLEKVGLEAGSLAPALHDGLVAAGFPVVCLDPRHLKAATSVMPVKTDRIDARNIAWALQAGWYREVHVKSRDTHRIRAVLRSRELLVKTRGALDNHLRGILKAFGLKIGKVAPAGFEARVLELIDGDPVLGAAGDAILRARREVMDRLADLDRLVLDSVKVDPICRLLMTVPGVGPITSLAYRTAVEDPTRFRKSSLVGAHFGLTPSKYASGEVDRNGGITKCGDRMVRALLSEAANVLLTRVSRWSWLKRWGLEVMKRRGKLRAQVAVARRLAVIMHRMWTDWTEFHARRNGDVAPA

SEQ ID NO: 461806 - protein, 385 aa, unidentified
MTQAPSLPSNAVDYNTTLVLALETSGKNWVVAAHVPGTGLVKAKQVIAPNADALEGAVEGYRRRAAAGGQVVERVILVYEAGYGGFWLARWLMARSIEVHVIQPSSVPVERKKRRAKSDNIDVDLLLRTLLAWLRGEPRVCSMVPIPDEAAEDARRPSRERDELVRERISLTNRIGAVLTTLGIDGFNPLRKDRRKRLETLRTPFGQPLPEHAKAKIVRSIDRLELVMAQITALEDQRDAVLEQDAPGTAERMVQALAMLRSIGAQSATVLVYEAFVRHFSSSKALGSYAGLTGTPFSSGGAEREQGISKAGNQRLRATMGELAWRWVRYQPDSALSKWFRERLAGAKGRMKKVLIVALARKLLIALWRYASHGVIPEGAVLKPV

SEQ ID NO: 461807 - protein, 403 aa, unidentified
MNMNAVGIDVSKGKSMVAILRSYGEIISKPFDVKHTVSGIRSLIEQIQSIDGESRIVMEHTGRYYEPLVRELSKADLFVSAINPKLIKDFGDNSLRKVKSDKADAVKIARYTLDSWTELRQYSLMDEIRNQLKTMNRQFDFYMKHKTAMKNNLISILDQTYPGANTYFDSPAREDGSQKWVDFSATYWHVDCVRKLSLNAFIDHYQKWCKRRKYNFSRSKAVEIYEASKELVSILPKDDLTKLIIKQAVEQLNTASQTVEQLRTMMNEAASKLPEYPVVMAMKGVGKSLGPQLMAEIGDVSRFTHKGAITAFAGVDPGVNESGSYEQKSVPASKRGSSTLRKTLFQVMDVLIKTKPQDDPVYLFMDKKRAQGKPYYVYMTAGANKFLRIYYGRVKEYLSSLPE

SEQ ID NO: 461808 - protein, 406 aa, unidentified
MKTIIGIDWSEKKHCVHIYNEAGSLMKRFEIEQSVAGFAELKRRITAVNSQTSHCLIGIETSHNLLVDYLAECGFTLYIVAPSVVKSNRGRQGNSGAKDDDRDAQLLADILRTDRGRLIPWQADGPLVRQMRSLLSWVDDLTKSLTAQHNRLRANLLRYYPQPLVAFGDLTGKVALHLLVAYPAPAEITRLTLDQLTNFCRQHRYYRWDRLPAMLAHLQTPAPQLDAEVVPAYRQQTIFVAQQLLYLSQQKQAAIKQINGLFDQHPDAPIFASLPGAGDLLAPKLLVMFGDHRQHYPHRSILPAIAGTCPITVASGRYRSVRFRHACNRQHRQTAQQFAQSSTRQSVWAATYFSQACERGHTKSHAYRCLANRWLHIIWTLWQTHQSYDEAYHLRQVARHRRPVNL

SEQ ID NO: 461809 - protein, 371 aa, unidentified
MQDNTKYVGLDTSKDTIAIAVADAGRDAPRSWGVIPNTPEAIRKLIRKLGQPEDLDVCYEAGPLGYGLQRMLTQMGVKCSVIAPSLIPSRPGDRVKTDRRDAIKLAHLHRAGELTAVYVPNEDDEALRDLVRCREDAKEDLLRARQRMSKFLLRHDLTSPAKMTKWKSKYMAWLQQLKFSNRALQQTHQEYLHAIIVIAQRIERLEKEIHELAMKSPHKPVIQALQTLRGVKELTAVTLVVEVGDFRRFTTARQFMGYTGLIPSESSSGPVRRQGKVTKTGNTHLRRVLVEAAWSYRYRPALRGDIRKRQEGQSPSVQSISWKAQDRLHRKYLRLLSRGKPSTKAIVALARELAGFVWAISKEEMNSVASN

SEQ ID NO: 461810 - protein, 346 aa, unidentified
MKSQEIKYVGIDCGKKTLEVIRIGDNSLHQRQQFSTTEIGISKLINWLNPNDVVGLEAGSQSFRIAKSILNKGIQVIVLNPGDLATIYQSLKKTDKEDSLKIARLIQRFPIEELPTVPIPNDEEEDNRRLCTEQENWTRQLTQSKNRLHSLFTQAGLTHITKKHLRTKANREISVALLPSRYQKEAERILKVLDLVEQNLKLIEEEIKEALKKNKAYAQTIMSMPGIGMITSLAIMSYMGNCKRFSSAKQAAYYVGLVPRVDISGDSAYYGRIVNRGCHSIRRVIVQAAWSLVRCQYGGKIKEFYQRLYPKKGAKKSIIATSRKMIEILYTMTKTENFSILCLKKY

SEQ ID NO: 461811 - protein, 369 aa, unidentified
MNSIVYVGMDVHKEQYTLCCYSYDTDKVEYKQTIPSDYKLVLKYMEQVRSRYEGEVSFVCGYEAGCLGYSLYQQLKDHAVDCKILAPSTMAVTNTHHVKTDKRDAANIARCLAFHTYREVYVPDNDDNDVKEYIRMRDDQKLYLKKVKQQILAFVLRQGKRFEGGKTYWTIAHLKWLKTLELSDLQREALDEYLLTYEYLTEKISRFDERIEELASVERYEEKVKHMSCLLGIKTHTALSMIVEVGDFERFEKAPKFASFLGLVPSEDSSDTRVNRYSITKAGNSHLRRLLVEAAQSYTRGNVGHKSVALRQRQQGNPPEVIAYADKANERLRRRFYKMTLNKGVNRNVAARARELACFIWGMMTEHVS

SEQ ID NO: 461812 - protein, 359 aa, unidentified
MRIIGCDLHARQQTLAMLETATGEVVKTTLKHEGNSVWEFYSSLPRPVRVGIEATGSMQWFVNLMEELGIDCLVGHPAEIRAAEPRKQKHDRRDADLLLSLLVEERFPKIWLPTKELLDLRALLRHRHQWVGLRVKIQNALQAIALANGLRRGSSLWTQAGQHAIASLPLSPHAAYRRNELQAMYVKFETEIEKLNQRVEQQARERLGARLLMTHPGVGPITALATEVFLGDPSRFAGSKELASYVGIIPGEHSSGKRQRLGGLSKQGNPLLRFLWSEAAIHAVRRDPELKQFYRRKLIQKGLGKARAAVARKLGIRMWIMLRDGIEYNEFCRRGQRQEKSGDACAGMPQRRYGAKVAG

SEQ ID NO: 461813 - protein, 314 aa, unidentified
MSSLSIVAGIDVSKTKLDVYIHPLGNYKIFNNTAQSFEEIIIFLKQHNVTKVGFEATGGYEKLCAHALLANGLQVYIIQAKWVRDYARSLGIIAKTDKIDSSLIARYVSNPDMRAAALSPNHANFLKELLCRREQLVEILKIQKIQKQQITNLAIVKQMDKLIDVLECQVKDLENGMIDALKKEPGLAQKYKLLISIPGIGRIVAISLICYLPELGTLSAKQIAKLAGLAPINWDSGKKQGKRFIQGGRVQIRKALYMSIISAKEFNSYIKSFFTRLTTQAKKPFKIAATAAMRKLLILANALVRDGRIFCEQY

SEQ ID NO: 461814 - protein, 376 aa, unidentified
MIFGVDSHRSSLSVAGVDELGRVQVAVSFGNRPSEHTRLARLVKRHGATLVGIEGSGKYGHALAQVLLEAGVEVVDVPPQATDRERVRIHGAGKSDERDAIAIARVAAREQDNLARLGGEPEYARELKLLVDYRRQLTAERTRIVNRLHADLVVLKPGYETKLRHVIEPSDVTKATRLLRADKTVHGQLARRRLASIRRIDNELATLARDLKQRVEATGTSLMSIRGVGPVVAAIILGEVRDVRRFADRARFARLNATAPIPASSGHTKRMRLNPGGNRQLNHALHIIALTQSRCDPRAREYIARKIAAGASHRDAIRSLKRRLSDVIYQLLRADQRAAETRLEHGDPITIACGAMRSQPLPKPRRARRRSLPKTS

SEQ ID NO: 461815 - protein, 345 aa, unidentified
MHKVSGLSWRSLGRGKGMFYLGIDVSKLKLDSTLLLDPATDKRKSKVVANTPDGVKALVAWCAKQGVPAEQIHVSMEATGPYHEQAATCLFDSGIMVSIVNPAQVHDFGKALAVRSKTDALDSLVLARYGAALKPAVWQPPPAHVRELRALLGQLEALTKDRARVANRQEKLQASGASSLVESSIENTLDFYAVEIQRLEKAIHDHIDRHPDLKQDSKLLETIPGVGVKVSRAMLTVMHTHRFRSAEALAAYLGLVPVQRQSGTSLKGRSRLSKAGRADLRALLYMAGIVASQHNPHIRLLYQRMVQAGKAKMAAIGACMRKLVHLCFGILKTRQPYRSDYALCA

SEQ ID NO: 461816 - protein, 328 aa, unidentified
MTDQYIGIDLHKAFFQACAVDSTGDRLWEGRFPRTAAGVEALTARCTRRTALAVEASTPTWHFADGIVQAVGNLRIVDPLKTRLKAGYAAKTDRLDARRLADALRRDSVVGIYYPPLAIRELRELCRARHALVQARTALINRLRAVLLRQGLADARRLAKTPDDGWLAELALPPRAAASVTMLRHVLATLRTEAARAEAEVRRATDADPIAIGLQQLRGIGPVLALTIRAEIGEIQRFPTGAHLASYAGLVPRVEMTGGRYRYGRITKRGSPWLRWALIEAAIHGPTRSDRIGRWGRSLAMKKGVLKARVALARVLCEEIHRLWSGIA

SEQ ID NO: 461817 - protein, 365 aa, unidentified
MKKRSTVTATSKRNFDQKLTIGLDLGDRSSWYCVLDEAGEVISEQKLGTTPKAMREVFATVPRSRIALETGMHSPWVSRLLSELGHEVIVAHARNVRLIGESRRKDDRFDAMTLARLARIDPQLLSPVKHRSAQAQADLTVIRARASLVRARTALVNAARGLTKSYGERLRGCNPRNLDKEKAQALSPELQAALGPLLQALESLSERITEYNQQIEAVAQQRYPQTALLKQIKGVGTLIALTYMLTLEDPHRFRKSRDAGCYVGLQPGRRNSGQSEPQMHISKEGDPYLRTLLVQGAHHILGPFGADSDLRRWGLKLAERGGKAGKKRAIVATARKLAVLLHRLWVSGEVYEPLRNTKRTMSAAA

SEQ ID NO: 461818 - protein, 405 aa, unidentified
MSHVIAFDVSMGKSSLVVYDHHQHCQYEGEMEHTQAAFHALHKRISALEEQDGRLPAIVFEATGVYSQPLESFLQEQGFPYSRLNPLEAKIQTAAMRRQKTDISDAHELAKSHFRNMRPDTYVQAEFYGQMRALARYGEDIEKEISQNTNRLHAFLQLSFPLLETVFTKSSVLFLNIVQLFPHPICLDGASSESLRDQILQATRKNLSQAQAEKKAVELLTAARNSYAAIGPEDVRCQHLTNFARRLLELRTQKKEIIQQMVALSKDTVEFQVLKSFPGIGDATAVQLIGELGDIQRFRNAKQINAYTGIDIRRHQSGKLQYKDRINKRGNKRLRKILYNMVMNMISLRAKTQNTIVDHYDQLKKQPNGKLHQVAVIACVNKFLKVAFHLIQHGLLYHYESGKAS

SEQ ID NO: 461819 - protein, 346 aa, unidentified
MKQIIRIGIDTSKHIFVLHGVDVAEQPVLRKKLSRKQVLEFFAKLPATVIGMEACGASQYWARELCKLGHEVKLMAPQLVKPYVARNKNDWRDAEALCEAMSRPSMRFVPVKSAEQQAALMLMGIRDGLIARRTQLGNTIRGLAAEFGLIAPKGVDKIEPLLARIAQDETLPALAPDLFTVLGREYARLQGELKQIEAKLMAWHRSDAVGRRLAQIPSVGPIIATTLVMKTPDPRAFRSGRHFAAWLGLTPKDHSTAGKTRLGKITRAGDEDLRRLLVIGATAVIQQARRGRGRHSHWLLALIKRKPPKLAAVALANKVARIAWKLMVTGESYDAARMNAEPALAA

SEQ ID NO: 461820 - protein, 373 aa, unidentified
MKTSITHVAMDTHKKQHQVAWVHPDSGEIQEFTVANTVREIERMVQKIGKQAVGEIHVCYEAGVCGFVLQRLLQKRGCVCQVIAPSLVPTKPGDRVKTDRRDAKKLLGLFAAGQLTQVHPPDATQEADRELTGCRECAEMDRKRARQRLHSLLVRHGYIYQDGSLWTGKHAAWLQALVFDQPRVRTVFEEYRSELEHCDQRLESLDKQLGQLATSERYREAVAALRCFRGIDTLTALTLLTEVYSFGRFSSPRALMAYLGVTPSEHSSGESRRTGGITKTGNRRVRRLLTESGWHYRHPPRVSKALKARRQDQPAWAIDLADRAALRLYKRYKHLTERGKPLPEAILAVVRELAGFLWAMLHRLQLPAVPASP

SEQ ID NO: 461821 - protein, 349 aa, unidentified
MGIIGGLDVHRAQITYDYIDSATGEIRRGRIEPALREDVREWLERFHRQEDVAFALEGTTGWLYVVEELHRAGIRPHLAEPADTAALRGRKRRAKTDAADAKLLRELLLTGRLPESWIPPAHVEQIRTLVRLRKALLDERRAWHQRLQAKLFHHGLPRLGELSPEDRREWFGRLQLPPASLQVVGVAIACIERITEQMVPIDAQLKWIAHHQPGCKALDRGIYGVGWLTAVSIWAELGDVRRFGSSRRAVRHTGLDITVHSSDGKRSPGHLSRQGPQILRWALYEAAMSAARPRSPDHSYYADVKAREGSGRALLSQARRIARRAHHILLGMGEEALAPAPALPLAEAA

SEQ ID NO: 461822 - protein, 396 aa, unidentified
MEGFITWVGIDAHKKTLVVAVLRPGKSEPEEFTVENNERSIRSLVRGLEKGARGEIRVCYEAGPCGYALQRRLNSDRIACDVIAPSLIPRKPGERIKTDRRDALKLAELYRAGVLTVVEPPTPEQESIRDLCRCRETVRADLGRCRHRLVKMLVRRGFIFDATSRLWSQRHRAWLRSLAFENEIDRVVFTEYSLAIEQAERRLRAMDSEMEKAAQLPLYREHVAWLRCFHGIDTTIAMIFIAEIHGIERFDSPRGLAAYLGLVPTLYASGDRSRRGGITKTGNGHIRRAIIQACWHYRYPSRGVGAKLRERREGQPERVLTIADEAQRRLTKRYRHLTDRGKNPNKAVIAVARELVGFFWAALRDNRNAASIPPPKKTSRTEVGQSRKARKEKRAA

SEQ ID NO: 461823 - protein, 331 aa, unidentified
MYVGIDYHKRYAVATSMDDKGQVVETVRLKNEPNDLIGFVDRLPEDSKIAIEATGNWYYFYELLEGKSPEIHLAHPLKTRAIAEARIKTDKIDSTILAHLLRTDLLPESYIPPREIRDIREVLRYRASLVSLRTALKNRIHAILSKNGIIVEYTDILGKRAKAQLKALEVRSCYRLGIDGYIKLTETLQQLIDEVTKTIEGIVENNPQAKLLTTIHGIGYYSGLLIVSEIGDITRFPNAKKLCSYAGLVPSVYSSGGKTRHGSITKLGSKWLRWIMIEQSQHFSKSCDRLERMYARIAYKHGKNTARVAVAREMLKIIYSMLVNNRPFVKE

SEQ ID NO: 461824 - protein, 350 aa, unidentified
MQKSITGERPMTIGLDLGDRRSHLCAVDARGEASSRLALPTTQRALQRTFAELAPSRVVVEVGTHSPWVSRLLTSLGHEVIVANAREVQSIGQSRCKNDAADAEQLARLGRADPQLLRPIRHRGEQAQRDRALLGVRDGLVRARTALINQARGLAKALGQRLPRCTTAAFARRMRDEGLQDLFPGLRTLVGTIAHLTVAIRAKDREIARLSEQRYPETELLRQVPGVGPITALAYVLSLEDPRRFAKSRSVGAYLGLCPGQRQSGERNPELRITKQGDVFLRRMLIQASHYILGPFGPDTDLRRFGTRLIARGGRLAKKKARVAVARKLAVLLHRLWRTAEVYEPLRLVD

SEQ ID NO: 461825 - protein, 311 aa, unidentified
MEHTCFVGIDVSKAHLDVHVRPTGDSFRVSHDDTGFATLLERVRPLSPTVVVLEATGGYEIPLAATLAGAGLPVAIVNPRQIRHFARATGQLAKTDLLDARVIALFAEAIRPAPRLIPDEQAQALGEVIARRRQLVEMLGAELNRRRLLRDRRLQHHLDAHIAWLEAALRRLDHDLTTLIRSTPMWREADDLLRSVPGIGPVTAGTLIADLPELGRLDRRRIAALVGLAPIARDSGTFRGRRMIFGGRGHIRRVLYMATLTAIKHNPAIRAFHQRLVAAGRPGKVALTAAMRKLLTILNAILRDHRSWQSA

SEQ ID NO: 461826 - protein, 376 aa, unidentified
MSKSIVEARRFVGLDVHAETIAVSVAEKDGEVRSLGVIPNRLSSIRKLMGKLGDASTWRACYEAGPTGYTLYWQLTRLGVECMVVAPTLVPMKAGDRVKTDRRDAERLARSFRAGELTPVWVPDAAHEALRDLVRAREAAKGDQLRARHRLGKFLLRHGRRPSERMKAWTERHLDWIRREVKFEQFAQQATLEDYLAEVDHLGQRIVRLEKAIDEAVDGAPETMKAVVSALQALRGVAKMTAVTIVAEVGQLSRFPKARQLMGYSGAVSSEDSSGERTRRGGITKTGNAHLRRVLVEAAWCQRYAPNLTRTLRARQEGLPAAVVEIAAKARHRLSARYRRLLARGKPRQQVVTAIARELLGFVWAIGVEVERKAVA

SEQ ID NO: 461827 - protein, 347 aa, unidentified
MSNHIENGQVRVLGIDLGKSVFQLHGVDARGKSVLKKRLKRDELLEYMAQLPPCLVGMEASSGAHHWARKFQGYGHDVRLMAPQYVKPYVKRHKNDSVDAEAICEAVQRPNMRFVGIKSVAQQEILSLHRIRSLAVKNRTALVNQIRGLLAEYGIVFPKSIKQARRAIVLILSDESSEMSANFRVILEDERDELAHLDERIGKYEREIEALAKAEPQCRLLMTIPGVGPITATALLASVGDVRAFKNGRELSAWIGLVPNQHSTGGKAWLTGISKRGNGYLRTLLIHGARAALRVCENKPDRRSQWAVSVSERRGANRAVVALANRMARSAWAMLVKQEAYGASAAV

SEQ ID NO: 461828 - protein, 416 aa, unidentified
MTFKVVRFICGGMDVHKNLIVATIGTTDRQTLITEYIQQSFSTFYSDLIRLKEWFISHDCYDVCMESTGKYWIPIYNVLETELNICLTHPKYVKAIKGKKTDKRDSKWICDLYKCDLVKHSFIPKKEIREMREIARYRCKLVYMRSSERNRYQNCLTVSNISLASVVSDPFGKTATNIMKELMQSEVIEDDKILKLIHKNCKDKDKILDSLQGYRIESDQRFKMDTVMNHIEYLDKQIQACEAELIKRAYPLRDYFQHITHIKGISALSAILIVSEIGTDMNQFESDKQLVNWAGLSPANNESANKKKSVRISKADQYLKPLLVQCALSSIKDKNSYFGIKYCRIKKRRGHKKAIIAIARMMLVCIYHMILTGEEFNPCDYESLTNPKPKKEPIMTVESALQFLKDSNFDFSSIQL

SEQ ID NO: 461829 - protein, 326 aa, unidentified
MGQKGEEVAKNPEGLYVGIDVAKAQLDIAVHSTGLRWRVVNDQEGIGTLVERLRDLAPALIVLEATGGLQAAVVAALGTAKLPVVVVNPRQVRDFAKASGRLAKTDAIDAEVLAHFAEAFKPDPRPLPDAQAQALEALLARRRQVVGMLVAEKNRLGTALPTVHEDIRAHIAWLEERLAKLDGELKDTIRQSPLWREQDDLLRSVPGVGQVLSITLLAELPELGNLNRREIASLVGVAPLNRDSGTLRGKRTIWGGRARLRAALYMATLVATRCNAAISSFYQRLLAAGKAKKVALTACMRKLLIIINAMMKHNRPWNPKFACQNP

SEQ ID NO: 461830 - protein, 368 aa, unidentified
MSLQAKSLFMAMELSNKNWKLVFGDGCRERQRSMASRSEPVLLREVAMAKDKLGLPPEASVVCCYEAGRDGFWIDRLLKKHGFRNHVMDPASIEVPRRSRTRKTDRLDAQKLLQLLLRAELWGQRKAFSSVCVPTEEQESALRMHRERERLVKERTGHRARLKSLFVLHGLEVGNPATVPIECVRDWEDKPLAGPWVEELKREQARLRLVEEQLKGIEKQQAAALTQAPTQALKKADKLCRLKSVGQQSGWVLSHECFAWRTFANRKHLGSFAGLTGTPFDSGETLREQGISKAGNRRVRTTMIELAWGWVRWQPGSALTHWFLDRYVRGGTSRSKRKGIVALARKLLVALWKYVELDVMPEGAVLKA

SEQ ID NO: 461831 - protein, 422 aa, unidentified
MERMIERCAGLDVHQATVVACVLINERGKRPGKQLRTFGTMTHELEELRDWLVAERVTHVGMESTGVYWRPVHAVLEEHVEVIVGNTRHIRNVPGRKTDVKDAEWIADLVCCGLIRTSFVPPKPLRELRELLRYRRKLTEAQAAERNRLQKLLETANIKLGSVATDVFGASGRAILRALIDNTASPAEMAELARGRLRRKRGELTHALNGRMDDTHRFLLSMQLRRVEDIEALIETLDQRIDEKLTPYRTEMALLTQIPGVDWVVAAVLISEIGTDMSVFVSVHHLAAWAGLCPGSHESAGKRRSTAARKGNVHLRTILVGAARPAARTKGSYFKDKYYRLKARRGAMRAGVAIAHKILVAAYHMLARRVDYRELGEAYLDQIDQTRTAANLKRRLERLGYVVSMLLKPPGPDTDPTVAATA

SEQ ID NO: 461832 - protein, 401 aa, unidentified
MKGRAGSGGPGRRALAGRQEVGPPPRTASFETVRDGARAAGQFETEVPTVSNPTRWIGVDLHRRRSQIAIIDEHGELTLSRRIVNDPETFKELLGDPDGTHVALEATYGWEWLADLLEEVGYDVHLAHPLRTRAIAAARVKTDAVDAPTLAHLLRTGLLPEAYIAPAELRDLRELLRHRAVLTRMRTAVKNRGHALLARQGIRPEHTDRFGKAGREFLAALELPAGARRRLDTLMSLIGDFDREITATTREIDARAKADDRVPVLCQIRGVGRYTAMLIIAEVGDVKRFPTARHLCAWAGLTPTVRSSDGKARLGHISHQGSPALRWALTEAAQKIPTGGGPLRATFERIAKRRGRNVAKVAVARQILTLCYYGLRDGEIRCLANQPDIDDHDNQDLAQAA

SEQ ID NO: 461833 - protein, 367 aa, unidentified
MNYKLKAAPTAVSKEQNSQKEPRANRIAIGVDGHLKSYQAARKIDNGAVGVAQTFGSKEALLLYLEKQREQSKEVVVLYEAGPLGYSLYRELKAKDIECLVCAPRSEEQKRKRRKNNAIDARSLTSELSNYLNGNEQALQLVRVPSEAQEQARVESRQHDALVQERKRIGAIGNALLLSQGYGSWSNWWRPKAFERLSRVVAGWILKQLQRWIKVLRELDQQIQQAKVELSQQWKGPRPKGMGAPSLAQLNAEVLDYNLYSSGRKIGCLAGMVPSEWSTGNSQRLGSITKVGVPAIRRILTEMVWRMILFQPEYKPVQKWREVLEGANRGLKKKAVVAIGRQLMVDIWRLQTGRISAQALGLIMIEG

SEQ ID NO: 461834 - protein, 347 aa, unidentified
MGVDTHKDVHVAAVITMIGGLIDTRSFPATTDGYALMLAWARSFGTLRRAGVECTGSYGAGLSRHLQSHGIEVVEVNQPDKAARRRHGKSDMVDAEAAARAVLSGRATSAAKTGDGAVEMLRLFKMAKNSAIKSRSQAINQLKAVIVTADGALRESLAGLSNTQLIRRCARLTETKHPGPAGAARHTLRLLARRIQNLSTEIDDLNKHIAAAVEECAPGILDVQGVGPDSAAALLIAGGDNPERLANEASYAALCGTSPVEASSGQTQRRRLNRGGDRQANAALYRIVLSRLRWDPRTKEYLQSRLSRGKTRREVIRCLKRYVARELFDFIRVTRPVATREEQQVTP

SEQ ID NO: 461835 - protein, 321 aa, unidentified
MARRREVVAVWVGVDVAKRMIDVARGPEGQLERVERAIGPLQAWARTLPAHARVVVEATGGLERLVTTVLQARGLAVSVVNPRQVRDFAKATGQLAKTDRLDARVLAHFGAALAPRVTAAKAIDAEGLRALIDRRRQLVETRTAEKTRRHTAPEAVLGSIDEHIAWLDHEIEQLDHAIEAAATACGALAEPLARLQAIPGVGRVVALTLVTHLPELGTLDRKRIAALAGLAPFARESGAQRGRRAIWGGRGDARAMLFLAAQSAARWNAPLRAFYERLVGRGKPKKAALAAVARKLLVAINAMIRDRRGWQPALIVQPSCC

SEQ ID NO: 461836 - protein, 340 aa, unidentified
MEEYDGRQFVGIDLHRRRSVIVRMTPDGQRIGPALRIDNDPFELAEQVALWGESPEVVLEATYGWYWAADVLAEAGATVHLAHPLGVKGFAYRRVKNDERDAADLADLLRMGRLPEAWIAPPQIRGMREAIRHRCKLVALRSGLKAQVHAVLAKQGVPVTVSDLFGVGGQHILDELELDAPFAARVTSLRRLIDAFTFEIDILTKRTSAHLKTHPGFQAIQAIRGVGPVLAAIFVAEIGDVTRFARPQQLCSWAGMTPKHRESDTKVHRGRITKQGNPLVRWAAVEAVQTQRSGPIGHTRVRIGERRGANIGKVAAARKLLTLVYYGLRDGHIRCLARPA

SEQ ID NO: 461837 - protein, 315 aa, unidentified
MSENEVEVFVGIDVSKRALDVQIEPPAESLHVDHDDAGIARLCARLSEVSPTLIVMEATGGMETRLAVELAARGLAVAVVNPRQVRDFAKATGQLAKTDRIDAGVLSAFARAIRPAVRPMKDKLTQELDDLVTRRRQLVQMRVQEALRLQGASKVQAKSLKAHIAWLDKRIANTETDLGKRLRSSDLWRVKDDLLLTIPGVGEITSRSVLSRCPELGSLNRQQIAKLVGVAPLNNDSGTHRGQRHIWGGRADVRSVLYMAAMSAMRCNDTIKAFATRLKKAGKPAKVVIVACMRKLLTIMNIIIKNSTPWNLKTA

SEQ ID NO: 461838 - protein, 433 aa, unidentified
MSSMLWKRGIRQAVPNHKTGMVVGIDVSKGKIDFGAYRPEGGTATLQVKQDRAGFEQLKGFIEGFQRSGYQVWVGFEPTGPYSSCLREWLLSSAYRTVQVNPYHVKRTKEVRDNSPHKSDQKDPGVIADLIWQGCYQELYQLGPVYAELRSASADWKSSNRERTAMRNAFQGLLEVWFPELTSFFQDRVCKTVRALVRNYCSAEALGRASLRKIKSLVRKASGGRVGPQKAQAIWRAAQDSIAPPQGQEMRHRHMCRLLDQLQYLEDYREQLRRRMEDLLTELPEAACLLSVAGLGTITVGCLLGQCGDLGRYPSYQQVEKFVGLNLYQVSSGKQQGDRHISKRGRSLAREALCQAAVGEMKKCGLYYGYRQRQQQKKQPSGKIRVAIARKLLELLYALARDRTMFDPGKFFTESKAGDGPVILQGAQRKVAA

SEQ ID NO: 461839 - protein, 417 aa, unidentified
MNTKSQKVKRVNRQTMVVSLDIGKGSHFGYFRAPNGKEESPFEVNNCRDGFHQFWKKLCRFKKAHRLSHVLVGFESTGPYAEPLLHFLRQKPLQLVQINPMHSKRVKELTGNSPNKTDRKDPRVIADVMMLGHSLTVVVPEGAAAELRRLTQARERAIKDRTAILNQLQHLVFVIFPEFLTVIKKVSSKTGLFLTGHCPTPDAILALGLDELSRDMRRVSRGRMDHQRARQLFQAAKSSVGVTEGRQSIVSEIGYLVDQIERINAFVDHLECRMRSYLEQIPYSPHLLSMRGIGLITVAGLIGEVGDFRQFSTLPEITKLAGLDLFEVSSGKHRGRHHISKRGRPLMRKLLYFGAINTVKSNGIMHVPYNRMIERGMPKIKALVAISRKLLAVMFALARDGSIYIEDYNTHRCQLAA

SEQ ID NO: 461840 - protein, 342 aa, unidentified
MTAIGIDTHKATLAACAIDDVGRPIAEATFGNDPRGHDTFIAWARAVAPEATIGIEGSSSFGAPLARSVQGAGLCVREVPPHLSRAERRRTRRPGKSDPGDALAIARVTARETNLPPIRLPDRSTELRLLLEAREDLVDEATRVRNRLQAHLLVLAPGYGGTVANLVAARHRTTVGRLLRGNHTLQAELARALLHRLTGLEREIEASTRRIGALVEGHPLLGLPGAGPITVARLIAEVGDVRRFRSADALAALAGVAPVPASSGQVQRMRLNRGGNRQLNRAFYVIALSQSRFHPPAKAYVARRMQADHKTWQEAIRALKRQLVRPVFRLLVEGADALRAAA

SEQ ID NO: 461841 - protein, 423 aa, unidentified
MDVVYPICCGVDVHKRFFVATLITTQGFQPKYEKRRFSTFNNAILSFKGWLLENNCYDVCMESTGKYWIPVYNLLEDSINVTIANPKWVKTVKGNKDDTKDSKWIGDLFRIGLVPGSFIPGKNIRILREYTRYRFKLVSAKSSEKNRYQNVFTVCNVALDAVVSDMFGKSASAITDYIINSDTFDPQHCVSLLHKSLKSKSAEVIESIEGFYMATPQKERAKMVKEHYDYLLAHIKKLDEMIAELTKPFEPAILLLSTIPGIKRDSAVTIISEIGTDMSQFGSSKRLCRWAGLTPGNNESAGKKKSVKITRAGVYLKPVLVEVAHAAVKSNASPYYRLKYERICKRRGKKRAIIAIARMILTAVFNMLSTGEVWNPVDLNQIDMPPELREKEVQVSLRRAAKLLVSHGIISSDSLLFPETASG

SEQ ID NO: 461842 - protein, 361 aa, unidentified
MPGTMTYVGFDVHARSIHAAAIDVMTGELSRVRFGPGVQTPVDWLTTLPGPVRACYEAGPTGYGLYRAAVAAGVGMQVIAPGLTPRGRADRVKTDRKDAELLARCLIAGSLTAVVVPSPQVEAAREVVRAHDACRRDLMNARHRVSKMLLRHGRVYPEPSTWTQKHRRWLAAQQFAEPMSAFTFADLVATVDGLTARKKMLAEQISVLATDPAWWPTVSRLRAFRGIDTLTALAIHLELGADWARFEKPTRVGSWLGLTPSRSQSGESDRHGAITKTGSMLARRLLVESAWQYVREPRIGVTLKNRQDGQPDHILQISNRSQQRLHHLYTSMRARGKHHNVTVVAVARELSCFLWAAATAP

SEQ ID NO: 461843 - protein, 443 aa, unidentified
MRGAEVRSVGIDLGSKGHRAVLCDEGGGEVGRIDLGRGRRGLQALQEQAGGGEVLYIIEAAQNFWQELVHPLAAAGERVYLVNPTKCADLRKFYRRYVKTDTTDAQAIARLAILDGKLRPAWVGTPEEESLKRLCRLSWKLTEEATNQKRRIAMLLEMVLPGIGEVWKNRTCASARLFYRRYLDPARARRLGRKRLAEMLRRRAWGKFSPKAEEKLWRVIENAPELRYRRDDLTLEIQNELDGLESLEERNQRLRERIDELYTEVDPNRRLESVPGLGPFLAAAITSVIGDISRWKNVSELVASTGLVPRRRESSGKAKENQPITQQGNPQFRCWLYVAAEIVRHYDPELQAFFLRLRKRGLHHKAAICAVATKLLRRIYAVLHNQTEYRVTEDEKIRNGEKSVRHSVLEVAKTLLQEIQDEAPLQSSGYPRSTQVTRPTGTA

SEQ ID NO: 461844 - protein, 429 aa, unidentified
MRTESTPGARGPVFRGVDTHADSHWLCVLDWRGRKVLSRQFPADAAGYEALAGAIAAAGEPACVAMEGTSSYGAGLTRHLASLGMPVREALSPARMQRRRPGQGKCDESDAERAARAAMSGSRLGTPKSQDGWVDGVRCMLAARSGAVKARTSAINTARSLLTTAPEGLRSRFRGMAGPRLMEELPSVRAEGALGAALGALADLWAAARDAALDMERAIEASLEENCPALLAMYGCGPVSAAKLAVAAGDNPGRLRSEASFAAICGACPIPASSGKTVRHRLNRGGDRQANSALHEIARQRVMRDPETAEYAERARARGKSDREVMRCLKRYVAREAYRALMRPHEVRRPEDASGLVAARRAARVSQVRAASILGTSEKYISMLERGQRELKPIRRAYEAWVEAGLPLDWDRQAFEAERKMDSKKHLAK

SEQ ID NO: 461845 - protein, 340 aa, unidentified
MSLYGGIDLHANNSVIVLLNEQDEVIYQKRLPNALPTILEQLAPYHTEVKGLVVESTYNWYWLVDGLMEADYRVHLANPAAMQQYSGLKYTDDHTDARWLAHLLRLGVLPEGYIYPKAERAVRDLLRKRAHLVRQHTANVLSVQNILARNTGVRFSGKRIQELTKQELTTLLAEETQVLAVTSSLMVLDCLRQQIKMLEQTVHKCLHHTPSYEQLLTVQGIGMILAQTITLETGAIKRFPSVGHYASYCRCVDSTKMSNGKRKGTGNVKNGNPYLAWAYMEAAQFAMRFQPEAQRFYQRKLAKSRNNTILARKAVAHKLSRACYYLMRDLVPYEATKAFG

SEQ ID NO: 461846 - protein, 353 aa, unidentified
MQCIAFDSHKHYTWALVEDEKGKVLREQRIDHARGALQGFLEEFEPGSPVAVETIGNWYWITDEIEAAGMVPQLVNARRAKLMSGSINKTDRLDARGLNRLQRSGTLPTVWIPPRELRDARELPRTRMVLVRQRTQLKNRIHANLAKYGLKANGVSDLFGVCGRKILANLLNEFPTQTRYATEALIEELDHLQTKIKGLEGRTAELFGGIEALNLIQTLPGVALILGVVILTEVGDIKRFPSASQLASYAGKTPRVHASGGHIRHGKTRPDVNHYLKWAYAEAANAVMIHRRRHPRRHVSRLYERVKRRGGHPKAIGAVGRHLAEATYWMLTKKEAYRDPATDRAEVESKREA

SEQ ID NO: 461847 - protein, 530 aa, unidentified
MSVKVSTSGRKRRNSNSRSKQHNTLSVQKPSGVIGPRVKRVGGEKFAIICIDPAKHRSEWMMADYFGNLLIERQTLEHQAAFFKLAIAQIHEAQKQHDIQDMIVVVERTGNYHLAPKRAFAKAGFETRVVHPFATKQYRMPADPGIKTDGTDLHAQHRAAVAGFGLCELELESPYRELQLRARHRRNLVEKAASLSCQIREHLHLAMPGFSTLFDQLLDNKSAMAIARRCASPAVALELGRAGLSQHLRENMVRSQPRTIDKVLAWASQPDCDSIQDGTLHHALWTDLEELYQHFQRRILLLERELAGDLVQTPYVRLLAIPGINVVSAAELAGEMGPITRYANANAITGRSGLYPSRYQSDQTDNDRGPIIRQANRRLRCALMRIADNLVCHCGYYRGLADVDQARRIDERAIRVKVAKKFSRLAFACVAGDEPMKHPAMRQPDSIMEKLREFHRVHQTPMDQVLADLKTTVGQLPYHTRNHEAEVVAEVLRQHAARRRGPVPIGTLLPAVLARLEIKTTQDNQHRDRS

SEQ ID NO: 461848 - protein, 359 aa, unidentified
MQTQNTKTAIDFTGQNIYVGIDTHYKTWMVSIYSDEFELKTFGQEPDVDRLENYLLKHYPNANLKLAYESGFCGFWIQRSFAKKGIHCNVAHAADVPGSNKELIRKTDKVDSRKIAKGLRNNELNCIFIPDEQLESDRQLLRSRTKIVRDTTSVKNRIKAFLKFKGINIPGDYKSNKWSKKFISWLQSIEHNSVSSKAAFSCYVDELIFLSEKQKQLNQTIESLAKRDTYSSDLHLLRTVPAIGLLSGMTILTELGDINRFQKQDHLYSYCGLTPDCHSSGNTERIGKVSRRGNIFIKTVLIECAWVAVRKDPALLLYYKQQLPKMDRNKAIIKVARKLLNRIRYVLKNKMEYQIGIVE

SEQ ID NO: 461849 - protein, 321 aa, unidentified
MTSQNEAVCFGIDISKHWLDIAEHPSARVTRIDNTAAAIRGWLRTLPKGHQRIACESTGTYHRTLVELLIGAGHQVFLIDGFKLSRYRDTVGLRAKTDRHDARLIARYLAHEGTDLRPFSLPAPAVTALRSLLRRRATVVRSLGRIRQSMEDLPGFGRDVRVALARLTALIKQFEQRIASLINESGWTEPYRRILKIEGVGALTAAGLCAAFHRAPFSGADAFIAFLGLDVSVRDSGKKTGRRALSKKGDSEMRRLLYNAAMAASRSTTWQPFYQRMLQRGFSRTQALVALARKLARVAFSLMKNAADYVPKQHENACGRT

SEQ ID NO: 461850 - protein, 400 aa, unidentified
MTAIWAGIDSGKRAHHCVVIDATGRTLLSRRVVNDESALLELIGAVLALAEGDPVVWATDLNSGGAALLIALLADREQHLLYIPGRIVHHAAATYRGDAKTDAKDARIIADQARMRTDLQPVRGADQISTDLRLLTARRTDLVYDRVRTINRLRAMLLEFFPALEAAFDYSKKAPLILVSGYQTPEAIRRIGATRLAAWLKKRGCRASAAIAHKALNAANAQHTALRTEAVGAQLVAQLAEKITVIDSDIAQVDAQICERFEQHPDAPILLSMPGFGVVLAATFIANTGGDLRAFETADRLASVAGLAPAPRDSGRISGNHHRPRRFNRRLMRTCYLAALSSLKNSPASRAFYERKRAEGKSHKQALIALARRRINTLWAMLRDRTTYKEPLSAALAPAA

SEQ ID NO: 461851 - protein, 383 aa, unidentified
MERKIKPKVFAIDVGESRLVATKMEINNNTVKEADTREFKYNEEGLKELIKFLEGYEEGIMEATGVYFYHVYNVLRDKGLKVNVINPVQTVEVLGKKTDKNDSIRLAIAYAAGTVKGSYIPTGEMQELREMTRHREGLVERKTQVKNEIRKVLETAGYKLPSFEKKTKEIVRKLATDEKLTDEEIKEYSKLLGRKLTRIEAFILKQLLDLLNIIEEQIKEVENEIMKFLPEEAVELTKIPGIGPISAATIYAELGDVSRFESSKQAASYAGVSPRTKQSGKTEFHNGLIKGNKHLSRVLFLVARSAKNTVQFNGFYQALLKRTGNSKKATLALANKICRIVYHVLKDGEYKGETKKTRYRGGGGEGPQVDPNQVVPSALQAIA

SEQ ID NO: 461852 - protein, 424 aa, unidentified
MKPKPDIEFAAFAGIDWADAKHDICLQTAGNEEREWAVVPHRPAAIDAWASTLRQRFQGRPVAVCLELAKGPLVYALQKHDFLVLFPVHPATLAKYREAFTPSHAKADPTDAELALELLLRYRAKLKPLTPPSGPMRMLLRLVEQRRRLVGDQNRIGSRLADALKQYFPDVLSWFPEKDTLLFCDFLTRWPTLKQLQRARRATLLSFFHEHHVRSQSRIDERLLAIKSAIPLTDDLVVIRPNQLLVLTLVEQLRVTLRAIESFDAEIATVSQTLPDHDLFRALPGAGATLAPRLLVAFGEQRERYQSAAEIQRYAGIAPVTESSGKKCWVHWRLQCPTFLRQTFVEWAGATIPRSFWAAAYYRQQRDKGCSHQAAVRALAFKWIRILYCCWKTRTPYDESTYLNALKRRGSPLLNSIAATAKNT

SEQ ID NO: 461853 - protein, 343 aa, unidentified
MQVNTIGVDLAKNVFQVHGVDSTGKVVISRQLRRKQVIDFFSKIPPCLVGMEACGTAHHWAREVSKLGHTVRLMPPSYVKGYVKRSKNDAADAAAICEAVTRPSMRFVPIKSTEQQALLMLHRTRDLLIRQRTQLINALRAHLAEFGLVAETGREGLAQLVEIVTDESNREALPSAMKQALQAIIDQLAGLELQIGSLDRAIHAHHRANDISCRLETVPGIGVIGATAIASTVTDPSNFKSGRDFAAWIGLVPRQHSTGGKERLGGISKQGDRYLRRLLVNGATAVVRNARQHPQKHPWIIRLLAKKPAKLVAVAVANKMARIAWAIMAKGGHYRAPELAAAA

SEQ ID NO: 461854 - protein, 309 aa, unidentified
MKIHPGFVGIDISKHHLDVFDSTRATACRIANQPAAIAALLDSLEGRPALVLFEATGSYDRALRHALGAADMPFARVNPARARDFARAAGYLAKTDTIDARMLAAMAQALSLEADARADPLREQLARLHQRRDQLVACRKQERMRQKEESDDPLRSLETHLAFLDEAIAAFDDAIAALIKAHDELRDSCSLMLSAPGIGKVHAATLLALMPELGARSSKTVAALAGLAPFNADSGLARGKRQIRGGRRRVREALYMAAVAATRTKSRFAEQYRALRQAGKAPKLALIAVARKILVTLNAILRDRKPFYP

SEQ ID NO: 461855 - protein, 338 aa, unidentified
MEQQREYVGIDLHRRRSVIVRITESGEVLETVRVDNDPLSVVHAVMHEDPNPEVALEATYGWYWAADLLQAEGATVHLVHPLGLHWDSRRVKNDERDATELAKRLSRGDLPEAWIAPPQLRELRELVRYRAKLTALRTSAKAQVHAVMAKEGVLPAYGRMFGPAGQRLLDEMPVEGVYRDRVESLRHLLEIYECELLLVESHLSRRLKHHQGYSAIQAIHGVGPIMAAIFVAEIGDASRFPSARHLCSWAGITPSHRESDVKVHRGHITRQGNNLVRWAAIEAVARYHGGAPIEPTFQRVAKRRGTMIARVAAARKLLSLVYYGLRDGEIRCLKREAS

SEQ ID NO: 461856 - protein, 415 aa, unidentified
MDVIHDRCGGIDISKADVKVCIRVPGPGRRRRKEVRTFSTMTNDLLAMRDWLLAEQITVVGMEATGAYWKPVFYLLEHDMECWLLNARHMKAVPGRKTDVKDAEWIAELVEHGLVRASFVPPEPIRHLRDLTRYRTEIVRERTREVQRLEKFLEDAGIKLSVVVSDLTGKSARAMLEALIAGQRDPAVLAELALGGMRGKRPALTEALTGRFTTHHAFLTRAMLDRIDGCVAMEERLSKQIDKAVRPFRRQLDLIATIPGASTRAAEVILAEIGTDPTRFPTAGDLASWAGMCPGNNQSGATAKPGRTRHGDPWLKAVLGQVAVAASRTKGTYLAARYRRIAARRGKKRALVAVGHSVLTAVWIMLARDIAYHDLGAEHFVERLGAHGRARHTRRLIDQLNQLGYHVILQPTPTA

SEQ ID NO: 461857 - protein, 484 aa, unidentified
MSKPKKHSKQLSEKKTVAGKGKRGLKRKGMCLEDRPILEANAAGIDIGAREIFVAVPPDRDEHPVRVFPTFTEDLEQMAQWLVSCGITTVAMESTGVYWIPLYDVLEKHGVRACLVDARGMKNVPGRRTDWHECQWLQFLHSVGLLRAAFRPEGAVCAVRSMMRHRTELVAMTSQHVQHMHKALTQMNVQIQHVISDLTGVTGLAIVDAIIAGQRDPMVLAKLRDPHIKADEETIRKSLVGNWQPEHLFTLKQSRQSYQHYREQIAACDEQIEKLLVAFQPRVNPEEKPLPPDRKKKQSGRRKKNVNPKTGFDLRTESYKLFGVDLTQIPGLMAIVLALFSEVGRDMSRWPTASHFISWLALCPDNDISGGRVLWRGMRRVQNRAGHLFRLAAHSLHHDQTPMGDYLRRMKSKLGPAGATTATAHKIAIIFYTMIKKQVEYDATIWAERDAEREKRFEAKLRRQAQQRGYKLVPIEENPARVSA

SEQ ID NO: 461858 - protein, 400 aa, unidentified
MQTTTELEYAPLLDAQAPSASPDTSMGASIAPPHTLLASIELAKARWVITALATGSSKMSRHEVTGGDGAGLLELLRRLRNKAEQRLGTKVSIVTIQEAGIDGFWIHRMLEVNDIESYVVDATSIAVARRFRRVKTDTIDGEGLVRTLAAWKRGEPRVCSMVVVPTLAEEDRRRLTRERKTLIAERIRFTNRVKGLLFAHGIRGFNATRSDRYIRLAELRCADGLPLPPRVMTEVTRALERLELVQKQLFAICKERDACVRDCVEAAPARTLETLKGIGPEIASTLWLEGLYRHFDNRRDVAAYAGLAPSPYQSGDMARDQGISKSGNPRLRSTMVELTWLWLRHQPQSKLSLWFQSRVRSEAGRIRKIMICALARKLLIALWRFTTTGEVPEGAVLKSA

SEQ ID NO: 461859 - protein, 395 aa, unidentified
MYFLGIDIGKRTHVASLMCEEGKVILKGFSFPNTTEGADSLIERLSKYSETPADFIVGMEATGHYWLSIFSYLHESDFLIHVVNPLQTDGWRKGTEIRKRKNDIIDSVLIADLMCYGSFVETVLSDENVFSLKQLSRYRTYLVGTASDFKRKIIAVLDQVFPEYASIFSKQGIFGKASKELLLEFSSPIELEEISAETLAQYLAELSRNRIKPEKADQLKQAASNSFGVKFAQEAFTFQLRSMIEQLKFIESQVKENEKEIKRIMSNLDSVILTIPGIGPINGATILGEIGDIRKFSNPKKLVAYAGIDASVSQSGQYEATHNVMSKRGSPYLRKALFSAALVASQCDPVFRAFYQKKISEGKHHLTALDAVSRKLCYVIHAILTKNEPYKIVSD

SEQ ID NO: 461860 - protein, 410 aa, unidentified
MEVVNPRCCGLDVHKKTVVACLLGPGEGGAPRKEVRTFGTTAEELAELAAWLRAAGCPIAAMESTGVYWQPIWNALEDDFALLLVNAKHVKAVPGRKTDVKDSEWLAELLRHGLLKGSAVPGREQRELRELTRYRAALVQERAAAVNRLQKTLEGANLKLASVASDVTGVSARAMLERLVAGEADPAALAELARGRLRAKLPELRRALAGSFRPHHRFLVAEILGHIDELDERLGRLDAEVAERQRPFEAARARLDAVPGIGRRAAEVILAELGPDVRHFPSAAHCASWAGLCPGNRESAGKRYSGRTRKGNPHLRATLVECALAAARKRDSYPAAQYRRLARRLGRKKAAVAVAHTLLVTVYHLLASGAEYRDLGPDHFDRLDRAALERRHVRGLERLGYDVALTKRVA

SEQ ID NO: 461861 - protein, 405 aa, unidentified
MTDIEQHESVQVFVGVDVGKGTHHAVALDRAGKRLLDSALPNDETKLRALIGRLKEHGPILLVVDQPATVGALPVAVARAEGVLVAYLPGLAMRRIADLHAGEAKTDARDAYIIAEAARSLPHTLRSLKLADSQVAELTMLCGFDEDLAGQITQVSNRIRGLLTQIHPALERVLGPRLDHPAILDLLERYPSPAQLAAVSPKQLANRLVKLAPRVGKTWAAQIAQALTEQTVVVLGPQAASIVLPRLAQQLAALRIQRDEVAKEVERLVLAHPLHPVLTSMPGVGVRTAARLLIDVASRAFASAAHLAAYAGLAPVTRRSGSSIRGELPSRRGNKQLKRAMFLSAFAALRDPVSKDYYARKISQGKRHNQALIALARRRCDVLFAMLRDGTFYCPPQPKISLTTT

SEQ ID NO: 461862 - protein, 323 aa, unidentified
MSQPNPLCVGIDVSKTTLDIATANNEFAQFTAGNDTDGFELIIAELRKHSVALVLMEATGGLEAAVACSLQAEGFDIAVINPRQARNFSRAMGYLAKTDRIDAKVLSQMAEVINRHPERERFIKAIPDAERQILAAMVVRRRQLITMLVAERNRLHPAHPQNRKSINTIIKALEDELSRIDEAMNNHIKTHFKELAARLSSIKGVGAMTVTTLLSEVPELGSLSRREISALIGVAPVNRDSGTMRGRRTIFGGRAGVRTALYMAALVATRFNPVIKDFYTRLITAGKVRKVALVACMRKLLTILNAMIRKNEEWSDSYHKFSL

SEQ ID NO: 461863 - protein, 274 aa, unidentified
MAILYVGIDLAKNVFAVHGVDESGKPALLRPSVSRARLRELIAGLPPCTVAMEACTGAHHWARLFAVHGHTVRLIAPKFVTPYRMSGARGKTDAADAAAICEAVQRPNMRFVPGKSEQQQSQLMVHRARQGYVQARTACINRIRGLLAEFGHVLALKADTVRRQAAGLLEELPGWGNTVIGDLLSELHRLDERITQYDRHIAQIAREDERARHLMQLPGIGTTTATAIVAMIGNGHEFKCGRQFAAWLGLTPGQYSSGGKTRLGVSVVSSPSVN

SEQ ID NO: 461864 - protein, 379 aa, unidentified
MSRTPRIPEPSHLPTSSPDIASAQVVEEAVLGVDTHKDVHVAAVISGLGVLLGTRSFPTTASGYRQLLDRAGGFGTIRRAGVECTGSYGAALARHLSANHIEVIEVNQPDKASRRRRGKTDTVDAEAAARAVLSGRARATAKAGDGPVEMLRIFKLAKTSAIKSRTQAINQLKAVLVSADPQLRESLSGLRNPTLIRRCAQLDTSPPHDAPTVAAYTLALLARRILELTTEIDDLNQQITAILTRHAPTLLQRNGVGPDTAAALLIAAGDNPERLHSEASFAALCGVSPVEASSGKTNRRRLNRGGDRRANSALHTIVLSRLRWDRPTRAYPTRAYLARRLTEGKTRREAIRCLKRYVARELYRLIAPPTEPQRQTPAA

SEQ ID NO: 461865 - protein, 397 aa, unidentified
MTATLPTTSIGNTAATLYLAFELGWGEWKLAFASVAGDNPRLRSINGRDTQALLREIAKAKERFGLPDNAQVISCYEAGRDGFWLHRYLTSQGITNNVVDSSSIEVKRHGRRCKTDRVDAGKLLSMLIRWHHGEKKVWSVVQVPSVTDEDRRQLHRDLLELKAERTQHTNRMKGLLAGCGLAVPKVDQDFAEVLEELRQWDDQPVPAELQQRLLREHQRWLQVDRQIKDLENERARKLRTLDDEPVRKVRKLLGLRGIGVNSAWLYVMEFFGWRRIKNRKQLGALAGLTPTPYNSGDSVHEQGISKAGNRRLRTMAVEIAWCWLHYQPDSALSQWFKKRFGSGNSRQRRIGIVAVARKLLVALWRYLEEDLVPAGAELVPDNKKKVGRKLAGAGVGV

SEQ ID NO: 461866 - protein, 347 aa, unidentified
MVTLGADPHKQSHSLVAVDDTGRQLGAHTVPATSAGHLDVLRWAQCWPERRWAVEDCRHVTRGLERDLLNAGEVVVRVPPHVAAEGRRSVRERGKSDAIDALAVARAALREPNLPKAQLEQHAREVRLLLDHREDLVGERTRIQNRLQWLLHELEPGFQVANGALSRRPAIRRVEGLLEGRPGIVAELARELTARTAQLSTRIGELEQQLAGMMPALSPSLLELAGCGILTAAKLVGETADVRRFRSRAAFAMHNGTAPIPASSGNQQRHRLNRGGNRQINAAIHRIAVSQIRRSGRSRDYFQGRLAAGNTKREAYRALRRRLSDEVFKLMLADQRTHASSAQSAAA

SEQ ID NO: 461867 - protein, 333 aa, unidentified
MTGNTSTSSPPPTAFVGIDVSRDAWDVHLLDDGRAWTSSTTAAALQKLIQRLAPLAGRSFIVLESTGGLERSLAAALMDAGHRVAIVNPRQVRDFAKGMGLLAKTDRIDARVLALFGDKVRPRLAVKTSDQQAELEALVLRRRQLVEIRTAEANRRKQTSSSRARQSIDKLLKLIAKQIDELETAIARLIHSDDDWKHKADLVDSAPGVGPTTAATLVAELPELGQLNRQEIAALVGLAPFNNDSGQRQGSRAIRGGRASLRTTLYMAACAAVRANTRNSIIKELFVRLRQRGKAFKVAIVACMRKLLVILNTLVKTNTPWRDHSPAAAMVTV

SEQ ID NO: 461868 - protein, 438 aa, unidentified
MSNKVIFNLDDLFISVGIDVGADFSWMSIALPNQQFVGKPYKILHNKMSSLTTAVSKIKEAEELYSLESRIFLESTGIYHYPLFCYLRDKGFNVSVINPIITKNSTNINIRKVHNDRFDSKKAALVGLKPDLKVSLMPSDLALNCRNLCREYYDLMDNRSAYVNKLQGELRMAFPQYLGIFSKVTVNTSLTLLETYTSPAAFIEADRQEIIDAIKSTARFGLTYALNKYNAIIQAANEANEFGYIIDSNIKRIRLYIGFIRKYDEEIKGILGSMHELVDANEATDFVRQIHLIETFKGAGFLSAVSLMGEIGDFSAFSKPKQLFAYFGLDPAVKQSGKFEGTKTQMSKRGSAIARRVVHTLALQSIGTSRTGEAKNPVLRDYYLKKCESKPKLVAMGAVSHKVCNMIFAILRDNKPFEIITPQEHIKKHNAAKCDIAA

SEQ ID NO: 461869 - protein, 351 aa, unidentified
MKRPALFVGIDVGSETFTASIGKFEEERGWQIVAKATSFENNYDAFIQFVYWLNNNQALAKDCIVCMESTGVYGEALAYCLVSNDYKLVIEAPLKVKRAFDPEGHKSDPVDSRQIAEYAYRFFDQLRYWRPKDVVIEQLKTLLTVREQLVEQRTAHKNANQAIKRKVVRTSLAEDVHKKAIKELKEHIKAVEKEIKRLIDDDPSSRELQRLIESVPGIGSILATFLVVTMYSAPEPYNPKALAAYIGICPYENSSGTSRNKRPTSRHYGPSPMRRLIHLAAMSVRQHSPVFKRYFLRKLAEGKHKQLILNNIANKLLKIVCAIARTRTPYIPGYRSIHPELLTVKQPLTVS

SEQ ID NO: 461870 - protein, 342 aa, unidentified
MKQLYLGIDWGKKFSHLFGFDQDGVVVIQDRVVTLDMEAWRRVLRSLQAFSIHSVFEIGAHYDWLYDLLKEHCVEVAVIDPAQFAIICRSQRKTDKIDAQKLAEGLRRGDLPLVNVPDKQTRADRRLVAFTHGHSQQATRVKGKIRSLLLAHQIECPFTNVTGIGAIKWLNEHAVPKLDTQAQMFLRLLLAQIELLQQQRKELDKQVAERAKSYAQAEIIDSIPGLGSLGILALLSCIAGIGRFERPEQLSSYFGVCGSVFQSGNTLVLGRLTRRGNVHVRWLLSQALQHLHRKDPRARKRYLKLARKKPRGVARAAQVRWLTQIIWRLLTENQPYRIKPAA

SEQ ID NO: 461871 - protein, 318 aa, unidentified
MDVIGIDISKADFHAYLIQGSRNAARSFPNGPSGYRQLWRWLRNRGTTEVHACMEATGSYWMGLATALFENGLRVSVVNPSRTAMFARSQLLRTKTDKVDAQMIAEFCQTQQPKPWTPPSPQSLELRGLLSYRQQLVRQRIGLKQIANEVHVGAGLQALHTSHLKSVDDAIDALEAQILAILKANPELEAQVARLTSIKGFGLISAVALVAKLPIDRLRDGKAAAAYVGLSPRERQSGTSVRGKPRICKTGDAELRRDLYMPAIVAMRYNPTLSAFAARLKERGKPSKVIIVAVMRKLVVLAYQLLKDPAGPKIAVPA

SEQ ID NO: 461872 - protein, 338 aa, unidentified
MGNVVRIGLDIAKSVFQVHGVDAQGKTVLRKTLSRSEVLPFFAQLPGCLIGIEACAGSHHWARELTKLGHDARLMAAQFVTPYRTGGKNDANDAQAICEAVGRPHMRFVPVKSEEAQAVLAVHRARALTVSERTALVNQVRGLLGEFGIVVGKGIAQARRLLAEIGAGGRQLPVLARETIGELHDRLRALDERVLAYDRKISALAKASEPARRLMAIEGVGPVTATAIVASVGNARTFHSGRQFAAWLGLTPRQNSSGGKTKLGSISKRGDVTLRTLLIHGTRSVLRLTPGKTDRKSRWAEALRARACDNVAAVALAAKNARIIWAMLARGTEYQVAA

SEQ ID NO: 461873 - protein, 370 aa, unidentified
MGNASTLWVGLDVHKDSITVAYASEDRHVEPVLLGSIGTRQCDIDALVRKLQSKAPQLVFVYEAGPCGYWLYRYLTRKGLTCFVIAPSLIPRRPGDRVKTDKRDAITLARLGRSGDLTPIYVPEVGDEAIRDLARAREDALKDLNAARFRLKALLLRNDIRYTGRANWTAEHLRWLARLVFPSPAQQIVFQEYVRTVSERTELLQRLEAELLTQAQTWRFFPVVQALQALRGVQFTVAIITLAELGDLRRFDHPRELMGYLGLTPSEYTSSDRRRQGGITKTGNSHARRALIEAAKAYRHRAKVSEQIRARQQHLPKAICDIAWRAQVRLCGRYRKLLARGKHPNTVAAAIARELAGFMWAITRAQLAHT

SEQ ID NO: 461874 - protein, 394 aa, unidentified
MTTVRTDDCSTSAAVLYMAFELAESKWKLGFTTGLGQRPREREIEARSCISVEQEIQAAKERFGLPAETTVVACYEAGRDGFWLHRYLLSLGVKNSIVDSSSIEVNRRKRRAKTDRLDLKKLLKMLVRWHQGEKDVWRVVNVPTPAEEDARQLHRELETLRAEQTAHSNRIKGLLAACGVTLPTVDRHFPKHLKGVRLWDGSAVPADLQRRLLREFERMQAVNRQIRELEKERARRARQDDADVGVAQTRELLGLKGIGINSAWQYTREIFAWRKIRNRRELGALVGLTGSPYCSGQLDHEQGISKAGNRRVRAMAIEIAWSWLHFQPQSALSGWYERRFAHEGKRLRRIGIVALARKLLVALWKYLETRVPPEGAELSDWKTKIYDNTPSLQE

SEQ ID NO: 461875 - protein, 387 aa, unidentified
MPAATSVSERPAAIRVDLGAIFVSMELSRSKWLITSLSPGGEEKMSKHVVAGGDLAGLLDLFAALQAKAQARTGHSYRTIVLQEAGLDGFWIHRALEKEGIESHVVDPASITTSRRKKRAKTDRIDGEALVRTLLAYKRGEPRVCSMVRPPSPEEEDRRRLVRERKALITERVRHSNRIKGLLFAQGISKYEPLRRDRRARLAALRTGDGRELPAHLKAQISRELDRLELLLEQLKAVEAERDALLAQEQVHANAPAGMLLKLKGIGPEFAAILWSEGLFRHYDNRRQLAAYAGLAPTPWQSGQIDREQGVSKAGNPRLRVALIQLSWLWLQHQSQSALARWFEARVARNGGRLRKSTIVALARKLLVALWKYVNAGVAIEGAVLAS

SEQ ID NO: 461876 - protein, 341 aa, unidentified
MDKELYFGVDVSKKTLDLAYYDGETIDWKNAHIQVSNDDAGFKKIGSWVAKVGKDFDTFLFCMEYTGLYNQNFRLWLESKEYIYGMVEPRKMHRFEPDLDDDQRSLDRIKTDELDAFRIAIYCEQNHKKILRNPSKLPSPVYFKLKRLLAERKQNTKQSTLYKQQLHDICAYDTDLSVERKKLLLKNMQENQKAIDKEIDSYMNEDTSIRKNYNLLTSIPGIGRIIALETIVLTENFTAISNPRKYACYIGIAPFKKESGTSVRKRTTVSKKGFSEAKADLSIAVLSAIRNNPSIRDYWIRKRKEKCGGIVLNAVKFKLVLRMFAVIKRGTPYVETDAYKN

SEQ ID NO: 461877 - protein, 322 aa, unidentified
MHLFQLGIDVAKAKLDCALRLPEGKLRHKVVPNTPAGFAELLAWLDKQGAGTVHVCMEATGTYWEGVAEFLASSATITVSVINPAQIKAFGASQMVRTKTDKVDAKLIAQFCHERQPVAWLPPTSAEQALRALVLRLEALQTMRTQEANRLEVARQAVRDGIIAHLEWLDQQINQLTKAIRQHMDNDPSLRDKQRLLDSIPGLGERTIAVLLAFYANLARFDNARQAAAFAGLDPRQHDSGTSVHAKPRLSKVGHPFLRKVLYMPAMVALYKTAWGSRFRERLAAAGKPAMLIIGAMMRKLVHIAYGVLKSGKTFDPAIHGA

SEQ ID NO: 461878 - protein, 453 aa, unidentified
MKLKKNTKTNKKRIQKHLEQINLYAAGIDIGSHEHYVAVPDSLDENPVKNFSCFTSDLEAMADWLVKIGITTVAMESTGIYWIPAFEILESRGLEVLLVNAHHVKNVSGRKTDVKDCQWIQQLHTYGLLSGAFRPEDNYCVLRAYMRQREMLVTSIATHIQHMQKSLRQMNLLLDNVVTDITSLTGMKIIRDILSGERDATILAKHRDGRCKNSCEVIAQSLMGNYRQEHLFTLKQSVELYDFYHEKLQDCDIEIEDCLSQLEKQPPESPLSSKKRRKKNNKNAMNFNVTRYLHELCGTDLTEIDGLDEHSILKILSETGINMDKWETAKHFVSWMGLSPNNKISGGKILSSKTIKTKNRAKHVFKIAAFALSNSKSGLGAFYRRLRARLGAPKAINATARKVAVIFYNMIKFKTAYKTQTQEEYNEAHKKRIVKNLNQKAKQLGLELVPIAI

SEQ ID NO: 461879 - protein, 461 aa, unidentified
MAKKAKKVKTAKGAELRIVNPDAAGIDIADGIMQVCVPADRSKDNNRTFGAYTSDLHAISAWLRECGIKTVAMESTGVYWIPLFCRLQEDGLDVVLTNARDVKNITERKTDESDAEWLMLLHQYGLLKASFQPHNDAKRMRTLTRHRDTLSREASSIVLRMQKAMQQMNIKLTLVLSDITGKSGIRIIEAILAGERDPKRLADLADIQCKTPKEEIAKALEGNWEEDLMFVLRQNYDTFKHYCTQLGECDAELEKLMENYRAEVAKVEGTSYSPAKKRRDYKKTRHTVGFDVERKAYEMWGVNVFEIPGISHLTALELMSELGHDFTRKFPSSKQFCCWCNISPNTKISGGKRISSHVPHRRNNVGLIFRSIASSLANAKNQLGNFYRRIRSRAGGKAAVIATAHKVAEIFFAMVANQTTYNPEKVGIDEKVLLEKRITRYKRELERITGTHIEIGNACVP

SEQ ID NO: 461880 - protein, 299 aa, unidentified
MNEELFARLSRRYLALDIHKHYSVVAGVNFEGQVILEPVRIEHADLEEWLGKHIQPTDYVAIESTTNAWHIYDLLEPLAEKVLVANPIKVKQIASARVKTDIRDTLILARMLAANMIPAIWVPPVHVRNLRYLLSQRRHLTGMHTQTVNRLHSVAHRHHLSHPKGKRFNEKNTKWQRGDELTDSEKFQLELDMNTREHLEEQAGKITKKLARMSHQKPWAESMMYLMQLPGFGVITGMTVLGAIGEITRFETPRHLVSYSGLVPGLDQSGVKLRGKKITKEGRKDLRCLHLAAGTGGPW

SEQ ID NO: 461881 - protein, 471 aa, unidentified
MVMTREPEEILDEPHEQIMQRVCAIDVAKDSGKVCVRLPAESGSGRRVSKVWDVPARTKAVIELGDHLACQGIQKVTVESTSDYWRIWFYLLEARGLDVQLVNARDVKNVPGRPKTDKLDSVWLAKLTEKGLLRPSFVPPKQIRVLRDYTRLRVDLTAERTRHWQRLEKLLEDALIKISAVASRIDLRSVRDMVEALIAGQRSPRFLAGLARGRMKLKHADLVEALTGQFDEHHAELARMLLDQIDALTAQIDTLTARIDTLLAAILDGRNPDPDHPDPGPADPGSATANGPGAIAQPTPGQRSAVPSTADLVDILDEIPGVGPHIAQVIIAEIGLDMSRFPTAGHLVSWAKLCPRTIQSGAKSTAGKTGKGNRYLRAVLGDAAAGAGKTNTFLGERYRRIIKRRGKLKALVAVARSILVIIWQLLSHPGLRYHDLGADFHTRRIDTERRTRNHVRQLEALGYTVTLTAAA

SEQ ID NO: 461882 - protein, 340 aa, unidentified
MGDITTIGLDLAKNVFQVHAVDQAGNVVVRKRIRRGQVLAFFSGIPTCLVGLEACATAHHWARELIALGHDARLMPPNYVKAYIKRNKHDVADAEAICEAVRRPSMRFVPLKTTEQQSALMMHRARDLLIRQRTMLVNALRGHLAEFGLIEAQGLHKVARLVTIVVDEVDERVPEMARQVLKVIVNQLKDIQTGIADLEKQVLVWHKNNPVSQRLATIPGIGPIIATAIAATIADPNTFRSGREFAAWLGLVPRQNSTGGKARLGGISKRGDSYLRRLLVNSAHTVLLCSKAAKNDPWLISLLSRKPRLVAAVALANKTARVAWAIMSRHDTYRHVAAAA

SEQ ID NO: 461883 - protein, 343 aa, unidentified
MDHFAGLDVSVKDTSICIVDDTGRITREVKVASEPGALLTVLMNASHRFKRIGLEAGPLSQWLFSALAEAGLPVICVETRHMRAVLKAQINKTDRNDARGIAQMMRVGLYRPVHVKTLRSQKLRMLLTHRKLLQSKAIAVENDLRATLRNFGLKVGMVGTARFEARIKELVENVADLVVLVEPLLVVRRVVREQIGVLHRRLLAIVRDDEVCRRLMTVPGVGPVVALTYRATVDVPARFRKSKSVGAVFGLTCSRDQSGERDRPGAISRCGDEMMRAMLYEAAQAMLLRSAKWSWLKAWAMQIARRRGMKRAIVALARRLAVILHRIWVDGTEFRWTREVAVA

SEQ ID NO: 461884 - protein, 408 aa, unidentified
MEVLHKRCAGLDVHQQTVVACARLAQGRQVRHEVATFETTTKGLTSMRQWLRQLRCTHAAMESTGVYWKPVWQVLEGSVELLLANAQEVRNVPGRKSDVSDATWLAELMAHGLIRGSFVPASTVQALRELSRTRTQLTRESSRHTQRIQKTLDAAGIRLTGVISNVLGATGRAIVEALIAGESDPETLLKLKRKGIRASDEQLRDALQGRLREHHRLLLRVHLEHVDAIAQTIRELEVRMGELLDPFRQQVELLKTMPGIQETAARIVLAEIGFDLGRFPTAAQLVAWAGLCPRNDQSAGRRRSTHLRHGNAWLRTVLIQAAWAASRKKDCYLRALYLRLRARRGARKAVVAVAASMLTSIYYMLCRGQPYAEQAPTHFDQRTRDRIARRLVRRLHDLGVEVEIKTAA

SEQ ID NO: 461885 - protein, 430 aa, unidentified
MHNKNYISVGIDVSSAFSFMTILAPDETVILKPFKITHNNKDSLERAVSEIKKAEELYSLESRTFLEFTGIYHFPLFCYLVDCGFNASIINPIITHSTKNGNIRKVKNDKIDSKGIAKLGLSKDIPVSQFPAKLVLELRSLTRKYYDLTDERSAHINKLKGDLHTVFPQYLDIFCDVTGKTSTMILRQYGTPDKILRGHKKTMIEKISKASRKGLAKASERYEKLCAAANAAKTFGCQIDSIYFNISLTLDLVEKLDSALDSILNRIRQLITFNKNEKFIRQIKLLNTIPGVGFLTAVTIMCEIGDFSAFRNPKQLFAYFGLDPEVNESGKFVGTQLHMSKRGSRIARRAIFAVALASIRTKRNGEGINPYLRKYYELKSGQKPKMVAIGAVMHKVCNIVFAVLRDEKAFELRSPEEHCKQYQRPALAAA

SEQ ID NO: 461886 - protein, 406 aa, unidentified
MYYVGIDVAKDKHYVCILDEDTQLACKPFWIYSDCLGLNELVKRLYDLSLTCDDFILAVESTGAFSENIYEYLTDLDFKVILLNSYQTAKYRDFSTLKKVKNDSIDAYVIAELIATGKYKQSHISSESYHTLKVLNRLKKSLDEKIKTIQREISTVMAIVNPEINRVFPNIFTKTAIAIIKEYPTAKDLQQTTPKKLVKVFRNIKGNNFNEIKAKILIDNAKDSIYLGRAKDARSLMITTNINILELIQQEKALLEHEIKILIDENQDDNFNNGVENLKTIPGVADKTISAVLGECGDLTRFESAKAFIGYLGLYPTQYQSGNSHTIGRLAKRGIPIAKHALYMSAVASVLHNTELKKIFRDKVSAGKSKKEALIIISKKIATMIYSMFKYNQPYNPNRVLVSYRK

SEQ ID NO: 461887 - protein, 377 aa, unidentified
MKRVKFVGLDVHAETIAVAVAEQDGELRSSGVIPNREDAVRKLVRKLGPVEELRFCYEAGPTGYALYWQLSKLGAPCVVVAPTLVPVKAGDRVKTDRRDALKLARNHRAGELTAVWVPDAEHEALRDLVRAREAAKKDQLRARHRLSKFLLRHGRRPPLEIKPWTVKYLDWVKRDVHFQPQAQEVTLLDYLHEVEHAAARIARLDAAIGEAVKLALPKMRAVIAALQALRGIAEISAVTVVAELGEVTRFRKARQLMAYGGIVASENSSGERTQRGGITKTGNAHLRRVVVEAAWAYRHRPSVGFTLRKRQEPLSEKIKELAWKAQHRLHARYAKLLARGKNKGVVVTAVGRELLGFLWAIAVQAETEHQEMLQRVA

SEQ ID NO: 461888 - protein, 363 aa, unidentified
MEYIAFDAHKHYTLASVARPDGRLVRERRLAHERGVLQQFLAHCEPGSPVALETVGNWYWIVDEIERAGCLPKLVHARKAKLMMGQINKTDTLDARGLNLRQRNGTLPTVWIPPGELRDQRELPRTRMALVRQRTQLKNRLHATLAKYALHDVEVSDLFGVRGRALLRQRCELLPPHTAYATRQLLEQVESLDRQVAGFEQRIKSVFNPTLAIQRLMTLPGVGLTLAVVIALEIGDVTRFPTAEKLASYAGCTCRVHATGGKLRYGRLRPDVNRYLKWAFIEAANAICLMRGRHPHRHVSRLYERIARRKGHPKAVGAVARHLAEATYWLLSKQEPYREPQSSAVSSTGDKRDFAMSSRKLEF

SEQ ID NO: 461889 - protein, 342 aa, unidentified
MKFYCGIDLSARDCHLCVIDEQMKVVRQQKLRNDLKQICSLLEPYQENLRIVVESTFNWYWLIDGLQAAGFEVVLAHTLGLYLITGAKVKTDRRDAYALAKLLLVGAIPAAYIYPVATRPVRDLLRRRLRLVQVRAGEYGSLRRLLLRQGVLSHKQQEIKTATEAELEQWLDHPLVRLHASQELRRIDLYSQQIAELENSILEIAETNESYELLRQLPGVGQTIALTILYEVGELTRFANVKVFSSYCRLVPGVAQSGQVTRRGRGSKQGNHYLKAAFSQAAVHAVRCYPQVRRCYERQLKRHQGPGRKLVCYNIIAHKLAQAAFHILKEQTEYRAELLFGR

SEQ ID NO: 461890 - protein, 370 aa, unidentified
MSHATPISWIAMDTDAEAIHVAIFRGQERNPSEEFQVSSDKRGVGRLKNKLAKETGQVKCVYEAGPCGYGLHRQLREAGFECEVIAPSLTPRKPGQQVKTNRLDARRLGVLYRGGQLTAVRVPDEEQEGLRDLLRARDDVRRDVMQRRQRLNGFLLRHGYHFAAGQNHWTQKHWAWLKALVLAERLQKVVDEYIVAVESSQQQLERFDKQIEEIAQEPAYAAKVARYSVLRGIRTLGAMTILAEGGDLRQYASAAGFMGSTGMVPRESSSGDRQRRGSITKAGNGYLRRILIEASWSYQKRAHGGAAIQKRRRNQPEWLLAIATKADQRLHQKFTKLQYRYNKKAVVAAVAVGRELAGFIWAIGQQIEKQ

SEQ ID NO: 461891 - protein, 358 aa, unidentified
MENSKGCFEGKDLYIGVDVHKKRWVVTIRTYDLELKTFSMSPDAEVLEKLLIDNYKDALIHIVYECCFSGFWIYDYFHQRGYDIIVTPTNRIYRDGSIVKTDKIDSRKLGFQHSRDLLRAVKVPTIKIREYRSIFRIYDKEKMREGQILRQIKCILEVKNHPMKWEKWNKAFVEKLKSVRFQEDIFNKKFEQLIREYEYVKEQIKDSEKRIKEIGEEKQLGRRIKRIEKINGIGIISAVRLVVFLFDMKGRFESGEKLVHYVGLTPGEHSSGEETIRSRTGLIGSRQLRAIIMQLAWVAVRKDGNLLNKFERVYKKSGKKQKAIVAVARKLMMKVYAITEKEEDYVINMPSNQKGIAA

SEQ ID NO: 461892 - protein, 451 aa, unidentified
MELIVERPGALDVHKESVTACVRVPGPDGKRVQQVEQFSTTVRGLLVLHDWLKARGVTQVAMEATGCYWKPIWAILEDDFDCLLVNARHVKQVPGRKTDVQDAAWLCQLLEAGLLKRSFVPPKPIRTLRNLTRYRKAQIAERQREANRLHKILEDTGIKLDCVATDILGKSGRLMLDALCHGTTDPVVLADLAKGRMRAKIPALQEALEGRFSSEHAIVVSAIFAHIDFLDEQINRLSDAVEDQIRPFAPAVDLLCTIPGVKQRTAEVIIAEIGTDMSVFPTAGHLVSWAGLCPGHDESAGKRRSGRTRKGSKWLRIALLESALAAANAKDSYLAAQYRRLKARRGHGRASIAVCHSILAAAWHMLQTGEVYRDAGGNYFTRLDPERQTRHLVRKLEALGHQVTPKRFPKPLDQRLFSHQTIRIYRLYREQPDALHCRVHGNRYNLTPCGA

SEQ ID NO: 461893 - protein, 348 aa, unidentified
MLADQLDYIVGVDPHRDSHALAVVHVVSGAVVFESTVIADSDGYGQALRLVDQHAPGRRAFAVEGTGSFGAGLTRFLTVRGERVLEVGRLRRERRPGGKTDALDAVRAARSVLTQQRPATPRAGGERQALQALVAAREGAVNAKRAGLCQLRDLLITTPEPLRSELRPLTRARLLQRLAATRPHSRHDAELRGSMLALRSIARRVLQLTAEERELAAEIETITRKLAPQLLEQPGVGPHAAAQLVLSWSHQGRISSEAAFARLAGAAPIPASSGQTIRYRLDRSGDRKLNRALHMILVTRKRSHPATIAYIQRRIQEGKTRREANRCLKRYLARSLYRLLEHGSPPAT

SEQ ID NO: 461894 - protein, 405 aa, unidentified
MNAVGIDVSKGKSTVTIRKPGDVVLMSPCDIHHTQSAINDLIIQIKSLKGETKVCMEHTGRYYESVATWLSDAGIFVSAVNSILIRDFGDDSLRTPKTDKADSKKIARYTLDRWAKLKQYGIMDKTRNQLKTMNRQFGFYMAQKTAMKNNLIALLDQTYPGANDFFDSPARNDGSQKWVDFIHTYWHVDCVRSKSLNAFTEHYQNWCKRKNYNFSAEKAAKIYQISSDLIAVFPKNDITKMLIWQAVALLNTASKTVESLRSKMNELASTLPEYPVVMDMNGVGATLGPQLIAEIGDVSRFTHREALTAFAGVDPGKNDSGKHIQNSVRTSKKGSPYLRKALFQIMDSLIKRSPVDDPVYAFMDKKRSEGKPYYVYMTAGANKFLRIYYGRVREYLSNLSNNETI

SEQ ID NO: 461895 - protein, 387 aa, unidentified
MQKLHDNSKASPAAFMQDSTLIAVIELSLSSWLVAGLIPGVSREPLKKLEPNPEDLLKLLHGWRDEAIKAGRLITRIAVAYETGRDSFWLARLLQERGIDAHVIHANSVTVSREHRRAKTDRLDTAMLKRGFLGWLRGERGHCTVAIVPTMEEEDAKRPHREREGLVHEQTRVVNRMKSALIQFGVRNFNPKLRKASVKLETVRTPEGKSLPPNTIAALRRDMERLRIIKEQIKAIEQARLQQFAQKPEALANRMIYLLVRIYGLGLETADLLVHELLSRTLRDRKAVARYAGLTGSPDESGSKRREKGLSRSGNARVRKIMIQLAWRMVKFQPDSALVQWFKQRTENAKRSRKPMIVALARKLIIALWRYANDGVIPAGFRLHSAA

SEQ ID NO: 461896 - protein, 401 aa, unidentified
MNCVGIDVSKGKSMIAVMRPLGELVIPPFEVGHTDVELCELSGVLGKLDGETRVVMEATGNYHLPVASFLYDSGFYVSVVNAILVHGYGNNSLRRAKTDKKDAIKLANYGLDHWLALPRYIPEDDVRLMLKTTYRQYQQCAKIQTMLKNNLISLLDTAFPDANRLFSSPARADGSEKWVDFVAAFPHCECVCGLSEKAFTAKYQKWCKKHGYNFSQDKALDIYAFACGHFSVMPRTDTSKLLVDQAVSQLRAASAALAALRNEMQSLAMSLPEYPVVMGMFGVGPALGPQLMAEIGDVRRFHSKKALVAFAGIDAPPYQSGQMEVRSRSISKRGSSALRRTLFLVMSVILQRSPADNPVYQFMDKKRAEGKPYRVYMMASANKFLRIYYATVKHYLDSLEA

SEQ ID NO: 461897 - protein, 321 aa, unidentified
MSGNTQKINMVGVDVAKAKLDIAFENQKVITIDNNEAAFKKLLKRLPETDNICFVMEASGGYEKAFTSFLLSHEIKVAVVNAKRVRDFANAMGAYAKNDRIDAQMIREYAESAHARDRLKLREPRTEAEQRIEALLKRRHQLVEQRGIEKQHLAATCDKESVRSVKRTIKYLDGEIDKIEAKIQKDIDNDDGLKKKMERLLGVKGIGKVSALALITQLPELGKLSNKEIAALVGVAPYSKDSGKKTGQRCIFGGRAIVRSTLYMAILSAVRFNKPIKAFYDRLIANGKRKKVALTACIRKLVVILNSITKKETEWDPDFSI

SEQ ID NO: 461898 - protein, 369 aa, unidentified
MGYITDIFVGIDVAKVRNAIAIADGERGGEVRFLGEVDASEEGMRRVVKRIAAKHSRVQFCYEAGPTGYGLHRLITSLGHSCIVVAPSLVPRRPGDQVKTNRRDAISLAKLLRAGELTAVWVPDEGHEAMRDLVRGRAAAVETLRVHRQQVSAFMLKHGRIFPRKKGWTMRYLRWLQEQQFDHPAHQIVLQEMVEAVRLSKERVDRLEQTIEEFVRNWSLAPMVRTLQALRGIDLIVAVTFVTEIGDVRRFESPRQLMGYLGLVPSERSTGATVRRGGITKAGNGRVRHMLVESAWTYRHPPRIGTKKLYLLQQVTPRVRDIAWKAQTRLTGRYRALSGRGKKTTVVCTAIARELVGFMWSVAREAQSN

SEQ ID NO: 461899 - protein, 398 aa, unidentified
MEVMHARCAGLDISKKDAKVCVRVAGAGRRKAVETVTTWSSLTSRILALREHLAAEQVTCVVMEATSDYWKPFYYLLEDLPGVEVVLVNARHVKNLPGRKTDVADATWLAQLGAHGLVRGSFVPPEPIRQLRDLTRTRTAITRERSREIQRLEKLLEDAGIKLSSVATDIVGVSGRAMIEALIAGERDAGRMADLAQRRMRIKIPQLTEALIGRFTEHHAFLARVHLDLIDQHTAVINQLTERIEVMMEPFRGFHDLICTIPGIAARTAKHLASWAGTTPGNNESAGKVKSSRTRPGNPYLQGALGASAMSIARTPGTYFNARYRRIATRRGPQKANVAIQHALLVAIWHMGVTGTVYDDPGSDYYTRLRPDRARQRAIHQLEAMGYRVTLDETSQAS

SEQ ID NO: 461900 - protein, 398 aa, unidentified
MTRKNTLKTLPIDTEYRVVGLDLAKSDVSVAAIPIDDNTPSLVDRMNYADLLEWAEKISPTLFAMEPCNGFSLLCLQLESLGHEVKVISGATVSMWINTHLSGQKTDLNDAIALARLAISDAELTPIRHKTITEIRIQTVQAVRQQLITQRTKSLVSFKGLAQQWGIPCSAGHRNLKKLREAVEAKIDLISKPVAESLLSLLDAVKSLDYQIGQLDKTLQELVMSNQQGRLIQTVLGVGTQISARIITVVGNVNRFESPRALVAYVGLAPRNIITGHKNAPKKKSSNAPDLSHKGQGKISRRGDKLLRSLVIQGAACLYMQYCKNQLPQCQLKRWLKKQIDSGKPYGKIIVSLAAKLIRIVWAVLRYGEEFNIQKAGMSRSTWGDMAPKSPISEEVPA

SEQ ID NO: 461901 - protein, 424 aa, unidentified
MAVVTIGVDPHKGSHTAVAINAAEQPLGQLRVRASAVQAERLLEWAQAWPERAWAVEGAGGTGHLLAQQLLAAGEQVLDVPPKLAARVRLLATGNINKNDPNDARSVAVAALRSANVRQARQDDHATVLKVWSKRYEDLGRVRTQVACRLHQVLCELVPGGVAREITAGQAGQILASITPAGAVDAARWELAAELTEDLRGVDIQIRETRKKAAAAVRASGTSLTGLFGVGSIIAAAVIGDVRVVSRFPDRDHFAAYNGTAPIEVSSGGRKIYRLSRRGNRRLNHAIHMAAVTQIRYRHSQGHAYFAKKLAEGKTRKEALRALKRQISDAIFACLQADARHAAAAPAKSPGGQPGNHSASRAASSHPDHRLFGQATPGPATHPTTPAADPAPASFPALLPSRASGRPGPGPGKARPRSGAPRRP

SEQ ID NO: 461902 - protein, 355 aa, unidentified
MSQEKYIGLDVHQATISAAVMDAGGKLLMECLLETKVATILEFIQGLRGTLSLTFEEGTSAGWLHDLLKPHVSRLVVCDPRKAALLKEGNKSDRIDARKLAELLRTNQLKPIYHGEHGIRTLKELGRSYLTVSKDITRTMNRIKSLYRSWAIPCPGTTVYAPRHRREWLAKIVQPGVRVRAEHLYEQLDSLQPIRLQARRELLLESNKHAAVKLLRQIPSIGPIRAALLVALLQTPHRFRTKRQLWAYSGFAVETHDSGEYRYVRGKVQRNRERSTVRGLNDNHNRDLKNLFKGAAISASTRPGPLQDFYAARIAKGIRPTMARLTLARKMAAITLTMWKKGVSFDPQHLSRQAV

SEQ ID NO: 461903 - protein, 316 aa, unidentified
MKPQVFIGLDVSKHQLDVAVRPQGRHFVTPNDDRGIKQLVKRLAAFKPQLIVLEASGGYEFLATAALAEAQLPVALVNPLAVRKFAGATGKLAKTDKIDAQVLAHFAEALRPEPRPLPDQDQQVLKAALQRRLQVVKMIGQEKNRLEKTFIPTLRQDIQAHLTWLSQRLEQLDRDLSNQIRQSPLWRDRDRLLRTIPGIGPVVSRAVIAQLPEAGTLPGKKAVALVGVAPYNRDSGRFRGKRMIRGGRSYLRRMLYMAAVVASRWNPVIRAFYQRLLAAGKPKKLALTACMRKLVLILNAMVKNNQPWNQFINQVP

SEQ ID NO: 461904 - protein, 351 aa, unidentified
MTNIAKQAVGIDVAQKELVVSLGRMSHDTGIEIYGYKTFANSIIGFKSLVSWVEKLSLDELNVRYVMEATGVYHESLAYYLSDQGNQVSIVLPNKISNYFRTLDIRTITDKTASQAICRFALERRLEDWQQPKKMYRMLKQLTRERDQLIVERTALKNQMHAELSEAFPNQSSVKRLFERIELINRHELEIKTELSRTVKEDAELSKKISLITTIPGVGKLTALIVLAETNGFELIKSKKQLIGYSGLDVKVKDSGTSVKGKPRISKRGNRHLRKAMHMPALAAIRNGGPQKDMFVRLVSGHGVKMKAAVAVQRKLLALIYTIFKTEKPYDKNYEKSIINKEIMVRAATIK

SEQ ID NO: 461905 - protein, 402 aa, unidentified
MRFVGIDVGAERHTIAIVDESGVVILKATAFTEDSAGYGRLLELLGTATDCLVAMEATGHYWRNLYAALVTAGFAVALINPLRTSRFAEEELQRTKTDAIDALGIARFAAQKRPTITQLPEAALQELRELVRLKGQVLQQLGDRVRQLHRAVDLVFPEFTRHVRTLDSELATAILERYSTAAALRTVSARKLARLCYDGSHHVGEARARALIVAARQSVGAHHGEPYQLQVRYACEDIDLLRRRLRALEKDIEQRLEQIEVGKLLTTIDGIGPQTAACIIAEVGDPARFHSSRALASYVGVVPRLHHSGKRRFSTSAKVPLGNARLRRALWMPALTAVQHNPWLRAYYYRLREAGKRPKVALIAVIRKLLSAVYSIAKHRRPFVLAPIFSPVAGGAVVPTAR

SEQ ID NO: 461906 - protein, 366 aa, unidentified
MEQAKRRFVGIDLAKKSMELCILCEGQAAVRSSYKTDASGRARLCANLEASDTVAIEACALAFVFARQLERDVGCRVLVLNPGKLAIIWQSTRKTDKEDARKLAQLIQRYPEDELPIVAVPDEREDTMRSLVSMKHYQVTLRTSMVNRLHALYVQAGMTFVKKSDLASNAARFRMAARLEGYLARFAAAIERELIVTEQEIAALNQELQTMVAEHELAPYVLSVPGVGPGVAAAFLAYVGDGKRFSSPAQVANYIGLVPRLDCSGETNRYGHITREGCRAVRGVILQATWSLIRCKEGGRLKEKFFLLAERRGKTRSAVALARRMVGLMWILVTRHEYYADASKEMLKSKFKRYGLKFEGWESNAA

SEQ ID NO: 461907 - protein, 320 aa, unidentified
MKYVGIDLHTNRFTCCYLSDNSKEKQTETFALDAEGLRCFYSTINKDTYVLVEATINTFSFISLFKNLVKEVIVANTYQLKSVGVPGKKTDKIDAYKLAEKLKAEVISGVQQIVPVTIPPKEIRDLRALFATYRALRKEIGQTKNRIHSLLKENLFPFTKEYIFGKKARIEIRKISSDYLLSFQINLLMDSLEHLEDAFDKLVVEINKAGASFMPEIEILTSMTGISVITAIAVIADVSDVSRFRNSKHFASYLRSAPRVESSNDKTIIKSTNKAGRKLSITLISQSLNHFRDDNEKLCRFYKKVKFYKKKRNNTDGFVS

SEQ ID NO: 461908 - protein, 345 aa, unidentified
MPSIIGGLDVHRKQITFDYLDTVTGEVSRGRVAPADREHFRIWLARRFPRPQEVALAVEGCTGWRYVVEELQRAGIEAHLAGPADTAAARGRKRHAKTDKTDARLARDLLAQGRLPECWIPPAHVLECRALLELYHDLRAEHTAWVQRVHAVLFHQGAPAFGDLSRADAPAQLAELARARLSPAGQAQIATYLRMLDGLEAELAAVRRRLLAAARQLRGARTLAESIYGVGPVTALALTCWLGGAGRFSPARKAVRFCGLDITVWSSDSKRPPGYLSRQGPPVLRWCAYEAGKTHARSAAPDHDYYAAVKDRQGGTRAALAEARKIVRRACHILAELGDDALTMA

SEQ ID NO: 461909 - protein, 367 aa, unidentified
MKKVSTVAAKPSKKISRQTLTVGLDLGDRNSWYCVLDESGQIQLEQRVRTNAKALREGFGEMPHSRIALEIGTHSPWISRLLSELGHEVIVANARKVRLIGESRKKDDRLDAQTLARLARIDPELLYPVKHRSAQAQADLMMIRARAGLVRARTGLVNTARGLAKSYGERLRGCNVRNMNPEKAESLGPELQGALEPLLSAIEELSERICEYNDRIEALAQASYPQVELLKQIKGVGTLIALTFLLTLEDPHRFGKSRDVGCYLGLQPGRRKSGQSEPQLHISKEGDPYLRTLLVQGAQHILGPFGIDCDLRRWGLKLAERGGRNGKKRAIVATARKLAVLLHHLWVSGEVYEPLHNSSQMTAAAAA

SEQ ID NO: 461910 - protein, 410 aa, unidentified
MEVKYRRCCGLDVHKDTVVACVRIASGGEVVSEVRTFQTTTASLIALSRWLAENGCTHVAMEATGVYWKPVWHILAGGDFQLVLANASHVKNVPGRKTDVNDATWLADLLAHGLIRASFVPDTQTQELRNLLRTRKQLVREKASHILRVQKTLEDANIKLDSVITDVMGMSGRAMIEALIAGESDPAKLARLANYRLKTSQEKLREALRGRVTNHHRFLLHLHLNQIDGLDASIAAIDQQVEAGIAPFRTAVDLVTSVPGVGSLGAQVIVSEIGTDMGRFPSDGHLISWAGICPRNDESAGKRRSNRLRKGAPWLKTTLVQCAWAAVRKKDSYLQAQFHRIKSRRGPKKAIMAVAASILTAIYHMLKDGTLYQDLGANHFQSRSKGQQTKRLVKRLADLGYEVALTPVTN

SEQ ID NO: 461911 - protein, 399 aa, unidentified
MNSVGIDISKGRSTIAVMRSFGEVVISPFEVRHTGSELSKLARQLKSLDGETRVVMEATGNCHASVAKLLHNAGLYVSVVNAKLVHDYGNSELRRVKTDRKDAVKLADYGLDRWLTLPRYITRLLLKNCYRQYRQYSKVQTVLKNNLISLLDTVCPNANRLFSSPIRGDGSEKWVDFVAEFWHCRCVSEKSERAFTSKYLRWCRKHGYNFREAKAHTIYAEASGHIDVMSKSETTKLLVEQAVAQLRATSTALAVLKHEMQSLASMLPEYPVVMDLFGVGPTLGPQLIAEIGDVRRLYSKKALVAYAGLDAPPNDSGDVTGRHKSMSKIGASSLRRTLFLVMSVYLQTAPLDEPVYQFMDRKRAEGKPYRVYMMASANKFLRIYYATVKAYLEPLERTA

SEQ ID NO: 461912 - protein, 344 aa, unidentified
MPSIVGGLDIHRKQITFDYLDLATGEVGCGQVAPADRAHLRAWLARFEHPGEVAFAVEACTGWRYVTGELQRAGMEAHLAEPADTAAARGRKRRAKTDRADARLQRDLLIQDRLPECWIPPEHVLECRALLELYHDLRAEHTAWVQRVHAVLFHQGAPVFHDLSRAGAPAELAELAREHLSLAGQCQIGACLRMCDALEAELTAVRRRVIAAARHLRGAKVLAESIYGVGPVTALALTCWLGGAGRFSSARKAVRFAGLDITVYSSDGKRSPGHLSRQGPPVMRWAVYEAGKTHARSVAPDHGYYAAVKDRKDGKRAALSEARKIIRRACHILSELGDDALAVV

SEQ ID NO: 461913 - protein, 310 aa, unidentified
MSEICFGVDVGKATLHVASHRSNKVMVFAHDAVGLRQLVQHLQGAALVVLEATGGWERPALRALQQAEIAVACINPKQARDFAKATGKLAKTDGVDACMLAQFAERLRPEVRPALSAVQMALKDQMARRTQLVGIRAAEKNRRAQARGDWKRSIEAHIRFLDKEIARFEKDMAATLRRDEALWARAKLLQSVPGVGPVTAMTLAACLPELGQLSHKQLAALVGVAPFNRDSGARSGPRSIRGGRAAVRRVMYMAALSAARCHPPMRAFYQRLIDAGKPVKVALTACIRKLLTWLNAIVRDGVVRLPQLHD

SEQ ID NO: 461914 - protein, 325 aa, unidentified
MQYVGIDVSKAKLDCLWLRDPEEKKVKTKVFANQQQGHRQLCEWLVKQTGACEQEVFITLEATGIYHEALAYHLHNQGFNVAVVNPARPKEFAKGLGNQHKNDKKDSFILALYGCRMQPSLWQPEPKEIRELKALIARLEALESDLQREENRLEKADFSPSSELVIESLHKMIEGLKQEKARLEKEINDHIDRHPYLKKDRVLLESIPGIGSVISRLMLAIIHSRDFTKASQLAAYLGLIPIHQESGVFRGRSRLSKTGSGKIRSKLYMAAVVATRWNSDIVAQQTRLLKNGKTKMEAICAAMRKLVHICFGVIKNQAEYQPQAV

SEQ ID NO: 461915 - protein, 534 aa, unidentified
MRTRKKVRGKKGRLSLKKARNSLQARLDRVGAEHFGILAVDSSKARFQVLLGNFCGTVLMEPLEVDNSGPALDRLVETVRLEMERHGLKDLVAGIERTGRFHHPIRTVLRRHWTVKMVHPFATKQLREPADPGNKTDATDLVAILRAILMGYGTDEQELSESGAAWRLVSREREALVRHRARVRVRIQDRVEALLPGYAALFTDLWKMPAALVLAQDYGSAAALREAGPDALLGHLRQAGLSMRRDTLGRILAWAATAAPADPSAPVLQRLLADERRLHAALESQIRAYERDLARFLADAPFVLLLSIPGIHVVSAASYGAELGPIEHYPDAHKITGRAGLYPSRYQSDETDRADGPLVRHRNARLRDALMEIAHNLVRCNPYFKGWASLRRSAGWAEKKLRVAVASTFARISYSMLAGRQLFDHPAVRGRDAILPKLTAFILDHGVPPDAARDLLRRAAQQIPPEARPAEAEALRPELTRRRQRHSIWTRGTGPQLLGEILPELLTWLGLPVAPEPERNPSPPTQEKSKRTPH

SEQ ID NO: 461916 - protein, 417 aa, unidentified
MDTLFARVAGLDVHLKTIQAAVRCRQESGKLLARVRSFGTMTRDLRALADYLEALGVTHVALEATGVLWKPVWNVLEGRFTLLLVNPRHLKRVPGRKTDVSDAQWLAQLLQCGLLRGSFVPPRAVRELRDLTRQRAQFSGERTRVVNRIHKVLEDANIKLGAVATDVLGQSGRAMLRALLHGEHDPAKLAELARGRLRSKIPQLQLALDGNCTEHHRYVLGRLLSHLSYLEHQADQFSARIAHRLSDLLPAAAAERLDRIPGVNRTTIENVIAEIGVDMAVFPDEHHLSSWCGMCPGNEESAGKRLRSRTRKGNRWLRRALTESAWAASHTKDSYFAAQYRRLAARRGKKRALVAVGHSLLVVIYFVLKQQVEYQDLGPDYFNRLEPERLRRYLVKRLQGLGFDVALSPHNHDDRAA

SEQ ID NO: 461917 - protein, 350 aa, unidentified
MLIIGCDYHPSFQQIACVDADTGELSEQRLAHREQAEQFYRELQQRNQAVRVGMESSGHSRWFERMLGELGFELWIGDPAEIRTKRVRKQKTDRQDAQLLLRLMIEDRFPRVWVPDAENRDLRQLLWHRHRLVQMRTRVMNQLHVVPLNEGLRRKKALWRPAGRKELESIALAPWASRRRQDLLELLDQLTPKIQELTRALEEEVEKRAVTRRLMTHPGVGPLTALAYELVIGTPERFQCGKQLASYVGLVPEEKSSGDRRRLGHISKQGNVLLRFLLVEAAQVTVRSHPQWRSKFFHLAMRRGRKIAKVAMARKLAVHLYWMWRQNLDYGQFEKLGSHAGEPGNLDGVQ

SEQ ID NO: 461918 - protein, 339 aa, unidentified
MKYTPVGVDIAKHLIQVHFIDEHTGEVIDKQLRRQDFLMFFCNREPCLIGMEACRGSQHWGRELTKLGHKVRLLQAHFVKAFVMGNKNDVMDARAIWMAVQQSGKDIAVKTEEQQSVLVLHRSRRQLVKFRTMQINSLHGTLLEFGKTIHKGRAAMERELPEALERMKERLPPYLITVLENQYNRLNELDSLIEDIEKKLTSVARQNETCKRLLDIPGVGPLIATAAVATMREASAFKSGREFAAYVGLVPKQTGSGGKIRLLEISKRGNTYLRALFIHSARAAALLPKEPGPWITELKKRRPTSVAIVAMANKLARTVWAIAAHGSKYDKNHVSIRSY

SEQ ID NO: 461919 - protein, 362 aa, unidentified
MRIIGCDLHARQQVLAMLDTVTGEVVHMTLKHEGDNVREFYSKLPRPVLVGIEATASMQWFLNLMEELGIECRVGHPAQIRACEPRKQKHDRRDAELILKLLAEDRFPAIWLPSKELQDLRALLRHRHQWVRMRTRVQNALQSIALANGLRRGTALWSHDGQSRIAALPLAPHTAYRRSELQAMYEKFEAEIEKLNQRVEEQACGRAGARLLMTHPGVGPITALATEVFLGDPARFADSKALASYVGMIPREYSSGPRQRLGGLSKQGNPLLRFLWGEAGAHAARKDPELQRFYRRKLVQKGLGKASVAVARKLGIRLWIMLRDQIEYNEFCRRGQKQQKSSDACAGMPETRYGAKSHRPVD

SEQ ID NO: 461920 - protein, 341 aa, unidentified
MIQSALIGIDLGKHNFHLHGQDKSGREVFRKKLSRAQMMQLFGNMPSCVVVMEACAGAHFVARQLAAMGHTAKLISPQFVKPFVKGNKNDFVDAEAICEAASRPSMRFVTPKTESQQTLSVLHRMRESLVHDRTKTANQMHGFLLEFGVSLPRGLTIMKRLTNVLAEHELPVRLTVLLQRLHDHFVYLDEQIRALDKELSSQLADDDLGSRLLSMPCVGPITASLLAVKMGDAKQYRCSRDFAASVGLVPRQYSTGGKANLLGINKRGDKHLRQLLVQCSRVYMQRLEHQKGALADWVRALLSRRHSNVVACALANKLARIAWAIATHHTQYEAGPDALNA

SEQ ID NO: 461921 - protein, 431 aa, unidentified
MQRTIGLDISRDTAEVAVLRLGISEPQRGRFPARPAHIRAFAEKLGPQDQVVLESCTNALAFQRILCQHAGRVVVSNPLKTRVIAEAKVKTDKVDAEVLARLLAADFLPAVWVPDPLTDQLRHLVFHRQGLVTQRTQGKNRIHAVLHRNLIAPEMTDLFGKAGRAFLATIELPTSERQLLEADLRTIDFLNREIAAADQSMAQAVQHDTEIQRLLSVPGISLTSAVGLRAAIGDVHRFKAPGNLVSYFGLNPSVYQSGLKAYTGHISRRGRSHARSVCVEVAHQLVKAPGPFHAFFQRLLRRKPYNVALTAAARKLVVLVWHMLTHEEDYRYAPPALTRDKRNRVQRLATGQLVGRGKQPTPDRSLDRQPARRAEVDYLRFLEDRFGPEGPAGVEHPNRVGSPPASPKQRPRELTRQRPQRIRKAPPKKGA

SEQ ID NO: 461922 - protein, 446 aa, unidentified
MPANKRRSPGPPPKVVHPNAAGIDVGSEAHVVAVPADRDPEPVRSFGVFTADLRALVAWLKQCAVTTVVLESTGVYWMSLCDFLEAQGFEVLVIDPRSLARNLKKKTDVSDAAWLQELHAFGLLKSCFRPDPEVRALRTLWRHRDHLVTEAAKLLQMMQKVLVQMNVYLHLAVADIAGVTGMRILRAIAQGQHDPQTLAALRDPNCKRTRAEIAKALEGTWDAAHLFELKQLLKAWDFYQNQLHACDREYEKAAGKMPDKTQGRPLPEPEKRPQKHRNSPTAFDSHALIFKLVGVRLTEVDGLGASTVLTILSETGPDLAAKFASDKHFAAWTTLAPRKHQSGKRTKFPAQTASRVAKAFRLAARALLHCKSVLGNFLRRLRARLGIGTAIRATACKLAKLFYRLITKGEAYRRDSTEAEEAKQRERQLQALERKARELGMQVIPV

SEQ ID NO: 461923 - protein, 350 aa, unidentified
MTTRRMTLPKLTIGLDLGDRFTQLCALDARGQIRATERVRTTPAALERHFTGLPHARIVLEVGTHSPWVSRLLERLGHEVLVANARQLRLIYGSDRKSDRVDAETLARLGRLDPALLKPIHHRGAEAQADLAQLRAREALVRTRTLLINHVRGAVKARGARLPASSAPAFATTAAAGVPRELRRALDPLLELIARLTQEIRGMERQLERLATERYPETARLRQPSGVGLLTALCYVLTLEDPGRFHHSRAVGPYLGLCPRRDQSGGRDAQLRITKRGDAMLRRLLVSGAQYILGPFGPDTDLRRWGLRLAARGGKNAKKRAVVAVARKLATLLHRLWVSGATYQPLRAAA

SEQ ID NO: 461924 - protein, 409 aa, unidentified
MRYYLGVDWADQTHAVWVVEERGTKVTLRTVPHTAEGLSEWGRELDEWRAQGIELWAAIERPEGRVVDFLLDHGVVVYPVNPKALDRARDRFRQSEAKSDPFDARVLADFLRTDHLHLRALQPSSDAAQELKLLTDDYQRQIRQQTRLVNQLTTTLKAYYPRGLEVAELTTALAREFLQAYPTPAALTALTERQWQRWARAHRLSEARTQELWAVLQRPQLPVPAHVVRAKGRLMQSLVAQLTLVVEVVGAYREAIEDFFARIPAAQWIRTLPIGDHGITAPTLWARLGDAPGRWESFRHLQAQAGTVPVTIRSGKQQVVRFRFACDKSLRYVIDHVAFLSLRWSEWARAYYDEQRARGHSYRQALRALSAKWLKIIFVMWERHIPYDEQYHLATMTRQQLRLRQKQIA

SEQ ID NO: 461925 - protein, 320 aa, unidentified
MKTSHSTIKLSNENYGGVDVGKTFLDAAIDGGTGLRRPNTPEGRAAIVAFFREHGVTRIGLEASGGYEIEIRSDLRGAGFDAILLQPAQVRAFAKVILQRAKTDRLDAALIARCVACLKSPERQEDQRLAPLAERLTYLEQIEEDVARLRTRRDRFRDPDVLARLNAEIKRLVAERKIALNELLALLRLHDDLAHRFDLIESIEGIGSRTALSLVIRMPELGSITREAAASLAGMAPVTRQSGRWIGQAHVEGGRKRVGRALFAAAQAACLRWNKSLVALYQRLRKAGKHHNVAIVACARKLIVYANTVLARGTPWSAQL

SEQ ID NO: 461926 - protein, 345 aa, unidentified
MQIKSIGIDLGKTTFHLIALGTRSQVVARKKFSRSQLLVYTANLPPSLMGMEAGVGSHFLGRALREQGHQVRLIPAQFVRPFVKSNKNDYRDAEAIAEAVERENMRFVPIKTEDQLDMQALHRVRDRLVARRTSVINQIRAFLLERGISFRKGPARLRRQMPEILENADEKLSARMRRLLDFLWQEWKGLQLQIESLNSDVEQIANSDPTCVRLQQIPGVGPLVSTAVVSAIGNGAAFKKGREFAAWLGLVPRQWSTGGKAKLLGISKRGNPYLRKMFIHGARAAMLRVKREGSSLGQWMNGLETRAARNVVIVATANKLARISWAVLATGNDYHPRHKALAFSN

SEQ ID NO: 461927 - protein, 359 aa, unidentified
MKIAANTSVETNVILGVDTHKDNHVGVALDGLGRHLGILSVPTTTAGYRKLLRWARGLGTIEQAGVEGTGSFGAGLARFLKAEGIQVREVIRPKRRDQYRCGKSDPIDAEAAARAVLAGTATGEPKGADGTVEMIRALRAVRRSAVKVRTQASNQLKGMLLTAPEELREELRALSTAKLVSRAARFRPGESPQSVEAATKYALRSVARRYQHLQEEIKELDEQLDRLVQQAAPELVRVDGVSTDTAAALLIAAGDNPQRLKSEAAFAHLCGVAPIPASSGKTIRHRLNIRGNRDANRALYVIAFGRMGRDERTRAYVAKRTAEGKSKREIIRCLKRYIARELYRILVSPLRTTPSISVP

SEQ ID NO: 461928 - protein, 355 aa, unidentified
MNSEKYIGLDVHQATISVAVLDSTGKLVMESILETKAATILEFFAGLRGTLSVTFEEGTWAAWLYDLLKPHVAKLVVCNPRKNALLKDGNKSDRIDAHKLAELLYLNKLSSVYHGQTGVRMLRELARSYLTIVKDLTRVMCRLKAVYRSWAIPCAGRDVYYTRHRAEWLGKIKEAGVRRRAERLYQQLDMLQYLRQQARRELLAESRKHAITVKLRQIPSLGPIRSALAVALIQTPHRFRTKRQLWAYSGLALETRTSAEYCYVKGGLRRSKKQISIRGLNKDHNHDLKGLFKGAATRASVLPGPFQDFYQRSLAKGIKPTMARLTLARKIAAITLTLWKKGENFDADKLKSQAA

SEQ ID NO: 461929 - protein, 325 aa, unidentified
MYNCIGIDVSKASINVHIPKSNQDLVLNNSLKGFKSLLSKLKKIYKKEITNIVFIFEPTGSYSEALRKYCSQKQIKCFIINPKQFSNYAKALGVEVKNDIEDARVLSKALTVAKDNQIKVPFYNEDVEHIRELMSFYKFTKKQTTGQKNHLESLMSKDGDKFSIKELKKSIKESQEKELRIIEQVQILIDSNDKYRIAYENITSIKGVGQIAGIVLLHLFLKYPEANQRQITSLAGLNPIYKQSGSSIQSGYKISKTGSVLYRSIIFMSVFTAVQYDKHFKAFYDRLKANGKHTTSAQIAVMRKIILTAHSLYKNNRKYDENFNS

SEQ ID NO: 461930 - protein, 459 aa, unidentified
MAESTKKSPVAAHFPVVHRRAAGVDIGSRFHVVAVPAECDPEPVRSFDSFTGSLHRLADWLGACGITTVAMESTGVYWIPAYEILEQRGFEVLLVNARFVKNVPGRKTDVNDAQWIQRLHEHGLLRGSFRPREELVALRAYLRQRERLSQYRAAHIQHMQKALMQMNVQLHHAVTDITGVTGMKILHAIIGGERDPGALAAFRDCRCKATPETLEAALTGNYRAEHVFALQQAVELYESYTAKIVACDQQIEVVLHEVNDAQEAPATPLPPKRTKGRSRSDPAFDVRSALYLLHGVDLTQIHGIGPFIALQLTAECGDDMSRWPTAKHFTSWLTLAPGSKISGGRVLSSKTRRSRNRAAYLFRLAARSVGRTNTALGAFYRRLGARVGKAKAITATARKLAVLFYGALGQGMNYVDPGANYYEENHRNRVLFNLKRRAKEMGYELVGNTSSTAAEGGVS

SEQ ID NO: 461931 - protein, 392 aa, unidentified
MIYAGVDIAKTDHVIGAVDETGAEVAGPMAFKNTEAGFERCIAWLESVAESEDDVFVGMEATGHYWMACFAYLVAAGYRVCVVNPMQVHAMRRLKGLCGVKNDRIDSALIAETLRQGDYDQTRLATDEVQALKRLTRYHQGLKQELATVKTQAVCVLDAYFPEYAGLFSDMFGTASLKVLAECPTPSEASRKRTSSIARLLSEGSHGRLGAERAAEIKSAAASSVGIRLGEDAASFQIKTMVTQIEFLNRTIAKVEREVASLLAKVDPDITTIPGISTTTGAQIVAEIGDVKRFGSAASIVKYAGLNSGVDESGMFSAEGVPITKHGSPYLRRSLWLAANRARQYDPRLKAFYDKKRREGKPHRVAVTAVARKLCHVVYAVMRDGEPYDPSK

SEQ ID NO: 461932 - protein, 356 aa, unidentified
MSENITADQGVTIGLDLGDKHTQCCSLDDSGEVEETFCVRTTAPALSKRFGSIVPCRIVLEVGTHSPWVSRLLSDLGHEVIVANPRRVRLISANDSKNDAVDSELLARLGRADPKLLSPITHRGQQAQKDLVLLRNRDGFVRSRTQLINQARGFAKSLGDRLPSSSAVAFPKRVRAAKKDQLFSGLETLLQVIDTLTVAIGDMDRKIERLSRERYPETMLLRQIKGVGPLTALCFLLTLEDPNRFKNSRSVGAYLGLRPKQRDSGEQQPQLRITKSGDEMLRRYLVTASHYVLGPFGPDTHLRRVGLRLAEHGGKAAKKRAIIAVARRLAVLLHRLWVTGEEYQPLGYGTAGSKAA

SEQ ID NO: 461933 - protein, 436 aa, unidentified
MRQKKNAFPVIHPNAAGIDISSKEHYVAVNPAITQQAIRSFGAFTDELEQMVGWLKDCKVDTVAMEATGIYWISLFLLLQDAGFEVVLVNARHVKNVSGKKTDISDAEWIRQLHSCGLLSASFQPDTFTRTLRTYMRHRKNLLDMSATHIRMMHKALEQMNIKLQHVIADITGKSGQAIIGAIINGCTDTDTLVGLLDHRIKATHEEVRRSLNGIWKPEHLFELQQSFELYHFYQQKIIDCDKRIEEQLLEKSNMTAAQKKHIKGNKSDLSFDAAGMLQQITGTDITALFGINNNTATELFSEVGFDMSKWPTAKHFTSWLNLAPNNKISGGKLLSSKIPKKKNRAGQVFKMAAYAIQRSKNWLSAFYHRIKARSGPAKAITATARKIATIFYKMIRYKETFKPIPLNHYQESLQTTQIKRLEKQAKKLGLQLKPI

SEQ ID NO: 461934 - protein, 405 aa, unidentified
MRYYLGVDWADQTHAVWVVDESGTKIAARAVSHTAEGLGEWGRELDEWRAQGIDLWAAIERPDGRVVDFLLDHGVVVYPVNPKALDRARDRFRQSGAKSDPFDARVLADFLRTDQAHLRALQPSSEAAQELKLLTEDCQRHIRQQTRLVNQLTATLKAYYPRALEVAEVTSALAREFLPAYPTPEALTALTERQWQRWARAHRLPEARAGELWAVLRQPHLPVPAHVVRAKARLMQALMEQLRPVVAAVAQYRKAIDDFFARMPAAQWARTLPIGKHGITAPTLWARLGDAPGRWESFRHLQAHAGTVPVTKRSGKQQRVVQFRFACDKALRSVVDQVAYLSLLSSAWARPYYDQQRARGHSHRQALRALGAKWLKIIFIMWQRQVPYDEQYHLATMTRQQLGRR

SEQ ID NO: 461935 - protein, 403 aa, unidentified
MNNVAGIDVSKGKSMVSVLRPFGEVVAKPFSIGHTGSELKELADYLKSLDGETRVVMEHTGRYYEPVARFLHDEGVFVSAVNSKLIKDYGNNTLRKVKTDKADSRKIARYGIDNWAELRQHTPMDTIRMQLKTLNRQQSLYTKTKTMMKNNLIALLDQTYPGVNALFDSPVREDGSQKWVDFATTFWHVDCVRNMSLTAFAERYRKWCKRHGYNFSQSKAVEVHAGAQDLIAMLPRDALTKTMVRQAIDALNAISASMERLKAEMQALAAQLPEYPVVMAMHGVGDSLGPQLMAELGDVTRFTHRNAITAFAGVDPGADQSGTHEAKSTRVSKSGAPELRRALFLVMDCLLKTQPQDDPVYRFMDKKRAEGKPYLVYMTAGANKFLRIYYGRVKEYLASLEGN

SEQ ID NO: 461936 - protein, 346 aa, unidentified
MNITTIGIDLAKNVFQVHGVDERAKAGLKKQLKRAQVLPFFANLPPCLIGMEACGSAHYWARKLNELGHTVKLMAPQFVKPYVKTNKNDAADAEAICEAVSRPSMRFVPVKTGEQQAVLSLHRAREGFVKARTAQANQIRGLLAEYGIVIPVGIDNIVKRLPDILEDGENNLPGVFRQLLQRLGEHLKELNRQVDELNEQIQLWHRENAASRKLADIPGIGPITASALVASIGDAKDFESGRQLAAWLGLVPRQHSTGGKQTLLGISKRGDCYLRTLLIHGARAVIRVSERKVEQADSWLTRIVDRRNKNIATVALANKNARIVWALLAHNREYQSDYVPVVATGA

SEQ ID NO: 461937 - protein, 435 aa, unidentified
MEAVFCAHAIHCSGTNGSNPLCSSGEMLWGRQRRNGTIIAAYNLMERLMPQPNDLSRSLVALDQNSTIIAVVEMSQSSWLVGGILPGIERQPRKKLEPSPERLLAVLHRWRDESVRAGRTIRRIAVAFEAGRDGFWLARWLEARGVEAHVIHPSSVAVSREHRRAKTDRLDTELLKRGFLGWLRGERGHCSMARVPTIAEEDAKRPNRERECLVKERTRLVNRMKSTLARLGIRNFKPTLRQAAERLATMHTPEGTPVPPNALAELQRDMTRLGFVVSQIWEIEKARQKRLEQQPETGPHAMVRLLARVVGIGIETADMLVNEVLSRPMRDRRAVARYAGLTGAPDESGGQRREQGLARAGNARVRRGMIQLAWRFLRFQKQSALALWYRARTADNRVGMRKTMIVALARKLIIALWRFVTTGEPLEGVVLRPAA

SEQ ID NO: 461938 - protein, 394 aa, unidentified
MLFLGIDIASKKHDCCIMGQNAEILAPVFTFENNAEGYELLLKNIRSHNHGCDFSKVKIGVESTGHYGSNLISFLQTKGFGVTIFNPLQVDLYRKAGTLRKTKTDKADAKFIAQMLIATQNENSAAMLIDPHIVELKALVRHRSRMKSMRTRLRISVSRLVTILFPELPEAVSTIHQASSYALLLELPSAKVIKDCHLTRLTKLLAVASKNRYGKDKAIEIKALAEKSIGSSSVAVGFELQQTIRLLNNLDEELATLDKQIKATMIAINSPILTIPGISYNLGSVILAEIGNIENFSNPSKLLAFAGLEPSTHQSGSYTATKTSMVKRGSTYLRWAILQAARLAAQHDQTFGAYALKKRQEGKHYYVVLSHVGKKMIRVIFHLLKNNQEFISVA

SEQ ID NO: 461939 - protein, 360 aa, unidentified
MSVGRSGGHEPLFAAFVGIDWADQKHVWSLQTADSQKRESGELEHAPEAVEVWVAQLCQRFAQGPIAVALEQSRGALVFMLSKYERLHLFPVPSTMAGNMREALYPSGAKDDPRDADLLLDLLLKHRDKLRRLSPDTEATRRVQNLVEERRKLVDEKTEQINRLTSHLKIYFPQMLDWFDRLDREAACALLERWPTLQELQKVPPVKLRTFFCKHHCRDQEVIERRIVGIRQAVPAIRDRAVIEAKSAVVQVIAQLIRILVQGIGGLDRKIEEETAAHPDFFIFDSLPGAGPALAPRLLSAFGSQRARYGSAREVQAYSGIAPVIERSGKKKWVHFRWAAPKFLRQSFHEWAGRSIAQSQ

SEQ ID NO: 461940 - protein, 473 aa, unidentified
MKEHKKTKAKTKSQATKALREHEPNAGGIDLGAEEIWVAVPAERDPNPVRRFEAFTQDLKAIVQWLIGCGVHSVAMEATGLYWIPLYQLLEDAGLKVCLVNARHVKNVPGRKSDVRDCPWLQYLHSVGLLLGWFRPAQAICATRSIYRYRQNLISMATEHVQHMQGALDQMNIKLHYVIDDLTGFTGQAIIEAILSGHRDPVQLAKLRDKRIQASEEKIVKSLQGDWRKEHLFVLAKAWAQYQEVQKQIQDCDRELLQYTQQLEACTTVVKPVKVMCLRPELVGCEPIAKLPTKKARRKTSKNQPQGPWHQELERFFGTDLTLIPGISVLSGLTLMTERGNDLRAFKTQHHFASWLCLCPDNETSASKVLRRRTRRSQNRVRQALRMAASSLHHDKSYLGDKYRRLRARLTPPKAVTAMAHQLARIIWTLITRKVPFDMSLFSEQEKLNEQRRLKRLAASARHMGYQLTPLTA

SEQ ID NO: 461941 - protein, 368 aa, unidentified
MAHDNTVFVGLDVHKDSIVAACSVGFGEITTLGNVGTLQRDVQRLCQRMQSKAPEVRFVYEAGPCGYVLQRQLQRAGFTCHVCAPSLIPRKAGDRVKTDRRDAEKLVRSLRAGDLSFVHVPDERDEAFRDLVRAWNGARLDLRQAKQRLKSFLLVHGVHYSGNADWKEPHRRWLARFSFAEPWSQMAFEEHRRSIEDRLAQCQRLEQLLRQEAPQWRLFPVVQALQALRGVQFIVAVGVIAEIGDLTRFDNPRKLMDWIGLVPSESSTGQRIRKGGITKAGNGLVRKLLVEAAWSYRYTAKVSPIIQRRHEGLPAEIIDRAWQAQLRLCRRFRRLQAKGKHRNTVVTAIARELVGFVWDIARRTQLAA

SEQ ID NO: 461942 - protein, 364 aa, unidentified
MKRKIYVGMDVHKETNRIANLTNNTKEIVKEQQIKHNEVQIKKFVNKLKSEWNEIHSCYEAGVTGYPLYRYLKSLGVNCILVAPGKIPRQSSDKIKTDKRDAIKLAKLLRSGELESIHVPSEEDEAVRDYLRSRDSLRLDLGRNRQRLMKFLLRKGITYSATKYWTVSHNKWLNNLQFNNEILQETFNDYYSRVRVQEENLKAMDKRIQEIAESEPYREKVGILRCFRGVDYLTAMFLLCEVCDFKRFKTAGSFMSFLGLVPGEYSSGSKRKQTGITKTGSPRLRRILTEAAWQHRFPGTGSKIVTARRSGQPALVVALAEKASLRLHKKFRNLQQRGKTPQVMITAVSRELSGFLWAAMNLVA

SEQ ID NO: 461943 - protein, 402 aa, unidentified
MYNAVGIDVSKGKSTVAVLQPAGVIIRKPFNVNHTSSELDELAKYIGSLEGETRVVLECTGRYHEPVVKTLSEAGLFVSAVNPHLIKNFGNNSIRKVKSDPADAKKIARYTLDNWIELRQYSSMDNTRTKLKTLNSQFSFFMKQKVAAKANLIALLDNTYPGVNKLFDSPVRDDGREKWVDYAYSFWHVDCVRKIGLKTFTERYQAFCKKHHYNFQPAKPAELFLASKDLIAVFPKEASYKLLIQQSIQQLNLASSHVEELRSKMNELASTLPEYATVMGMYGVGKTFGPQLIAEIGDISNFSHREALTAFAGVDPGVDQSGTHNSKSNKASKCGSNRLRKTLFQIMSTLLQTAPEDDKVYQFLVKKRAEGKPYYVYMTAGANKFLRIYYGKVKECIRNLEQ

SEQ ID NO: 461944 - protein, 344 aa, unidentified
MNQIIRIGMDTSKHIFQLHGVDAAEQVGLRRKLRRHQMLEFFAKLPPTVIGIEACGAAHYWARELRKLGHEVKLMAPQHVKAYVKRNKNDGRDAEGLCEAMSRPTMQFVPVKTEEQQAVLMLGGVRQQLIARRTQISNAIRGYAAEFGLIAVKGLDKIEALLARIGQDQTVPAMARELFALHGRDYARLQVEMKAIEAKLMAWHRANATSRRLAQIPGVGPIGATALVIKAPDPRLFRSGRHFAAWIGLTPKDHSTAGKTRLGKITRAGDEMLRSVLVAGATAVVKQAKHGRGSPWLLALLKRKSPKHAAVALANKIARIAWKLMVTGESYDGARMPGASALAA

SEQ ID NO: 461945 - protein, 315 aa, unidentified
MSEITVEKFVGVDVSKDTLDICIEPAGEVLHVVYDDKGITQVVKRLVGVAPTLIVMEATGGLEMRLASELAAKGLPVAVINPRQARDFAKATGQLAKTDLVDATVLAAFARAIRPAARPIKDADTRDLDDLVTRRRQLIEMRVQETLRLGTASKVQRKSLTVHIAWLDKRIADLDDALTKRLRTSDVWRTKDDLLRGIPGVGAVTSLTMLAKCPELGDLNRREIAALIGVAPLANDSGKHRGKRFVWGGRADVRAVLYMATVSAIRCNSAIKTFAARLKQDGKPAKVVIVACMRKLLTIMNAMIKNNAQWNPKAA

SEQ ID NO: 461946 - protein, 320 aa, unidentified
MANVVPSCTVGIDVSKDSLDLAIRPSGEHWSIDHDPQQFPALIEKLIQLGPARIVLEATGGLETLVVTNLAAAGLPVCVINPRQARDFAKATGQLAKTDQVDAHLLAHFGEALQPKLRELPSKQAQLFEALLTRRRQLIQMRTAEKNRLSMTGHPRRVSKDLEAHIAWLTKRISQCDDELKTALQSSPVWLANDRLLRSVPGIGEVVSRTLLAELPELGRLTDKQIAALVGLAPFACDSGGRHGKRHIRGGRSSVRSVLYMATLSAIRRNYRIRSFYERLLVAGKLKSVALTACMRKLLVILNAIIKQQKPWRDYTLLNA

SEQ ID NO: 461947 - protein, 365 aa, unidentified
MKERKTQAARYVGIDLGKRTYEVAIVGNRGKVTLSNGRTGASGRQALYKKLSPQDKVALEAGNLAFIMAKELERFVGCRVYVLNPSHLPMIYGSMKKTDKEDALKLAHILEDFREERLPVVAVPSDREMGRRKLLASYRREKGDRTRGINRLHGLFVAQGITDVKKKDLATAENRAQTTGRLEGLERGEAEHLLKCLVLCEERIAALDRQIEKESEGDGQIERLQTVPGVGPKVAFAFVAHVAAERFENGAQVANYLGLVPRVYISGDTVRYGRITKRGNGYVRGLLVQAAWALVRTKRMEGLKLRYEYMTKEKGKSKKKTIVCIARRLAVLMYTMMRDGTNYESRPFRAYKEEIEAIAQLALSA

SEQ ID NO: 461948 - protein, 371 aa, unidentified
MKDFSKYVGLDVHKETIAVAVAEGNGGEVRYVGEVANTPEAVEKLVRQLRKNGESLSFCYEAGGCGYGLHRQLTDLGWDCQVVAPSLIPKKAGDRVKTDRRDSMSLARLHRAGELTAVVVPDGLQEALRDLTRAREDMKHLQRQAKQRLLAFLLRHGKRYDGKSNWTQAHFRWLETVKFEQPVQQIVMQEYVDTVIACGKRVDSLEQQIEQAAQTSRVWPVIEALMALRGVSLLAATTVVAEIGDLQRFATAPQLMAYLGLVPSEYSSGGSARRGSITKTGNGHVRRVLVEAAWTYRFAARKTAVLQRRAERTPQMIQDIAWSAQKRLCQRYRQLQEKGKLKVQVCTAVARELVGFIWAIGHALPAVSATN

SEQ ID NO: 461949 - protein, 389 aa, unidentified
MSQSFDASKSLTTLEQDNTVIAVIEMSQSKWLVAAVVPGVKRQPLKKLQADEEALLKLLYRWRTEAGQTGREIKRVVVAYEAGRDGFWLARWLRTRGVEAYVIHPASIAVSREHRRAKTDRLDTELLMRAFLGWLRGEKRHCSMAAVPAAEEEDARRPNRERENLVTERTRIANQMKAILARFGIRSFKPTLRKAAEKLDGLRTAEGTPLLENTRAELSRHLARLRVVREQIRAIEQKRLHKLAAAPAEENGPHVMVRLIARVFGVGVETADMLVNEVFARHLRDRKAVARYAGLTGSPDESGKRRRERGLARAGNARVRRGMIQLAWCFIRFQKDSALAKWFDARTADGRGSTRKTMIVALARKLLIALWRLVTTGEVPEGVILRPAA

SEQ ID NO: 461950 - protein, 358 aa, unidentified
MAGKVTETAVVGGVDTHKDLHVAAVVDQNNKVLGTQFFSTTRQGYRQMLAWMTSFGALKRIGVECTGTYGSGLLRYLQNAGLDVLEVTAPDRMERRKRGKSDTIDAECAAHAAFSGIRTVTPKTRNGMIESLRVLKTCRKTAISARRVALQIIHSNIISAPDELREQLRNMTRMQLIRTLGSWRPDASEYRNVTNVYRISLKSLARRYLELHDEIADLDVMIAAIVDELAPELIKRNAIGYESASQLLITAGDNPQRLRSESGFAALCGVSPVPVSSGKTNRYRLNRGGDRAANSALHIIAIGRLRTDDKTKEYVARRVAEGHTKMEAMRCLKRYISREVYTLLRNQNRQINSIPITA

SEQ ID NO: 461951 - protein, 332 aa, unidentified
MGIDVSKPYFDAAILPVINHLKQSIVTARFDNTPAGIILFEKWLTTLQVPIDESTLLVIENTGIYHRLLWAFCTKKNIPIHIGNAAHIKWSFGIARGKNDKVDSIRLCNYAHKHNDELIASPALNPVLMQLKDLITSRSRLLSQINSIKTYIKELRTVSDKNVQKVLEQAHKAAIVGLAKSIKSVEVEIARIITENKAFKQNFDLLKTVPGIGNVTAVYMICCTNNFAGKISGKQLACYAGVVPFENTSGISVKGRSRVHKMANKELKTLLHMCSLTTIQKYNEFKIYYARKKEEGKNSMSILNAIRNKIVLRAVAVVNNQTPYVDKTKLMV

SEQ ID NO: 461952 - protein, 420 aa, unidentified
MGKIIQRCAGIDIGKRFLLCCVLTGAADEEPSSKTLRFDTTVPALERLRQWLREEHVTHVAMESTGSYWIPVFNLLEDHFSVVLANPEEVKNRKGHKTDRRDAKHLADLLRHEHIRPSYIPPKEIRQLRDLSRRRVQLTQDATRERNRVQKLLEQANVKIAAVLSDVFGVSGQHMILALLDGKATPEQIAKLARGQARHKVPQLIEALEGNRMSEHGRLVIRSCLRHLACVEEEIEHLDAEILTRMQTAPFQNAFNLLQSLPGIGQLSAAAILAEIGTDLTPFPTPEQLASWAGLCPGNRESAGIQKGRHTTHGNPYLRTVLVQCAWAATRKQGSVFETRFHHVAPRRGQKRAIVAIAHLMLTILYHMLKQGLPFRGVETACQQRRRLRRAHHHLKSLRRLGLAVQVIDTVDSSPPNPTP

SEQ ID NO: 461953 - protein, 465 aa, unidentified
MKSKTAKNKKQSKKVILNTVWEPVNLHAAGVDIGSREHWACVPAEATQQNVRKFGAFTADLEAMTAWFQECGVTSVAMEATGIYWLPLFQILERRGLQVILVNGRQTKNVAGRKSDVQDCQWIQRLHMYGLLQGSFRPEDAYCVLRTYLRYRDELVSARSTQCQHMQKALLQMNLQLPHVLSDVTGVSGLAIIDAILKGERDPVVLAALVHRSVRATTATLQAALKGDYREEHLFVLRLAYELYNTYEEKLKACDEQIVRETASLPAKVNPVLKPLPGRKPGRKPYLDKMAGVDMRPELYQKFGVDLTCIEGIGVQTGLVLLTEIGPNVGRFRTEKHLCSWLGLCPDNRISGGKVLSSRTRRVINRASDALRLAASTLERSQSALGAYARRMKARLGAAEGITATAHKLARIIYRLIKHGEAYVRQGMEDYEKKFQAGKLRTLQKNAKAFGFELVQKQPLPSGVS

SEQ ID NO: 461954 - protein, 388 aa, unidentified
MNVKKYIGMDVHQETISIAVMTGDGKLVMESIVETKASTILQFVQGLHGNLHVTFEEGTWAAWLYDLMKPHVTDLVACDPRKNALLKDGNKSDKIDARKLADLLRGGYLHSVYHGENGLRTLKELARSYLTISQDLTRVMNRVKALYRSWGVVCGGQQVYAPRHRAEGLNEIGESGVRRRAEFFYQQLDAVRALRQAVRRDLLAESRKHGATKLLRQIPYIGLIRAALLIALIQTPHRFRTKRQLWTYSGLAIETRDSAQYRYVAGQLQRSKKPQQLRGLNENYNHDMKAIFKSAAAMASRREGPFQDFYLKLLTNGMKPAMARLTLARKIAAITLILWKIRSSFRRGTTENTSSLSISGREAVPSLGIILGAGQSVLLETLGSRESI

SEQ ID NO: 461955 - protein, 425 aa, unidentified
MNVASMDEPRFAAYVAIDWGDSKHVWSLQPADSDRRERGEIEHSPEAVAAWAAVLSARFGGQPVALAVEQSRGPLVFMLGKYEQLHIYPIHPRAAAQFRAALFPSGAKDDPSDAELLLDLLVHHRARLRRLQPDTEQTRLVQHLVEGRRKLVNERTRQTNRLTAQLKLYFPQILDWFDAVDAPLVGALLKRWPTLEALQKARPDTVRSFLTAHNCRRQELIERRLDQIRLAIPAVRDKALIEAAKAMTKVLVELIATLREGIASFDCQIAQAVAVHPDFAIFDSFPGAGPALAPRLLAAFGSQRERYQSATDLQTFSGIAPVTERSGKSQWVHVRWACPRFLRQTFHEWAAHSIGFCDWARAYYQQQRGRGKDHHAAVRALAFKWIRIAFRCWKQAVPYDDARYMQNLRQRGSPLIAALAKPELP

SEQ ID NO: 461956 - protein, 470 aa, unidentified
MSQIKIKQKRKKKEAKVLQLPVIREDAAGIDIGATLIHVAVGPGRDEEPVRTFETFTRDLKAIAVWLRTAGVKTVAMESTGVYWIPLYELLESEGFKVLLVNAHHVKHVPGRKTDVSDAQWLQYLHSVGLLQGSFRPTEDICAIRSLGRHRESLVQASSQCIQMMQKALTQMNLQLHNVISDITGASGMRILQAILDGERDTEHLESLCDKGIKAKPEVIMGSLEGNYRSELLFILGQNLKRYKDLQSLIGDCEKEVGRLIDAAPAKVNLADKPLPPATKRGSKRSASAPPCLPDLREKQYRMLGVDLTQVPGINTQTVQDFIGEVGPDLSRFRSASAFSSWITVCPHNKISGGKKLHSKTRKSKSRAAKAFRLAAQSLAHSDEALGEFYRRMRGKFGPPKAITATAHKLARIVFHMVTTAEPYDASVFTRAQEKHRLHQENRLRANARKLGFQLIPIQLPSDNQGVVVP

SEQ ID NO: 461957 - protein, 391 aa, unidentified
MIFVGIDVAKDKHDCFILNSEGTVLADVFTIANNRIGFETLLSKIQSCSQGESKIKVGLEATGHYSYNLLGFLLDSGLATYVINPLHTNLYRKSLSLRRTKTDRIDARTIAMMLMSDVDLKSYSNTAYHNEELKSLTRYRFDKVKERAKLKSSVARLVNILFPELEKLVSSLHIAVAYALLSKYPGASYIASADTEELAEALYTASKGRYTKSKTEAIQSAAKASIGSRMPAKSMELKHTIALIRELDKEIAEIESAIDDITSQMDSPIFTIPGIGRRMGAMILAEVGDFSNFTSADKLLAYAGLSPSTYQSGQLQNCYAHMEKRGSRYLRYALFNAAKYVCHWCPTFSAYLEKKRTEGKHYNVAVSHAAKKLVRLIFAMQRSGKTYCTDC

SEQ ID NO: 461958 - protein, 433 aa, unidentified
MKVLYERVAGIDVHKDMIKVAIRSPGEEPWTRTTEIFEFRTFYGVLQEVGRLLRRRGVTHVVMEASGVYTEPVYYALAEQDFTEVLVVNPAHVKALKGHKTDAKDCGRMAELLECGLLRGSYIPPAEQKEVRDLTRYRMKTVQARTSEIQRLGKALESAGIKLGSVASSITGDSATAMIKALIDGERRGQVLADLAIGRMRTAGKLADLSMALSGRFTEHHALLCRLHQGRIAGFDAAVDDLDERIAGKVTRWPREAGLLGSVPGFGDVVTSAWLAEIGPAPHRWFPSHGKLASWVTLCPGNNISAGKRKHGRTGDAGTYIKPVLIQAAWSAIRTKGRLQARYNRLVRRFGGEKNPGAKKKAITAIAHTLLKIAYQVLKSGQPYTEPGADFYTRRESPEQRQAWLERQLQKLHPGRTITITIGPPEAALPPAG

SEQ ID NO: 461959 - protein, 368 aa, unidentified
MNKRTYVGLDVHARSVKGCAIDRETGEILRQSLAANDAGVAEWVSGLPGPVLVVYEAGPTGFGLARLLVGAGIECLVVAPSKLQRPPGDRVKTDARDAEHLARLALLGQITSVRVPGRADEAARDLVRAREDVRADLMRARNRVSKLLLRHGLVYSGGHAWTDAHHTWLHRQRFDDPALQAAYEACLEAAELTLDRRNRLDAKITALAATDRYAPVVHALMCLRGISVLTAFGLAVEIGDWTRFTGSTIGAYLGLVPSEHSSGASRSQGGITKTGNIHARRLLVEAAWHHRRPYTHASRDMRARWDAADEVSRVRGHQGNHRLHHRWDQFEARHKRRVIANVAVARELAGWCWSLAAQVQREQPWTDE

SEQ ID NO: 461960 - protein, 348 aa, unidentified
MLADELDFVIGVDTHRDEHALALVACPSGARVQERLIGADERGYAAALAFAVERAAGRRAWAIEGTGSYGKGLARYLTQRDERVHEVERPKRQGGRARAKSDRLDALRAARSLIAAEKPALPRAAGLRESLRVLLQVRTSAVAARRVALNQLRALLVTCPEPLRAELRSLTRARLLRRCRELEPERTDDPELRSTLQALRLLAARVESLTAETRELEQELRAEAEQIAPALLAERGIGPIGAAQALVSWSHKGRFRSEAAFARLAGAPPIPASSGKTVRHRLDRGGDRKLNNVLHQIVITRRKHDPRTIAYIERRRREGKSEREAIRSLKRYLARHLFRLLETTATPT

SEQ ID NO: 461961 - protein, 411 aa, unidentified
MQDKFQWYVGIDWATEKYDVCVLDASGREIAKRVIEHSGSGIAELLDWLTELAGRKPEAVAIAIETPRGAMVEGLVERNFAVFAINPKQLDRFRDRYTVAGAKDDSLDAFVLGDSLRTDQPCFHRVQLDDAQRIRLRELSRIEDDFQSQSNRLSNQLWEQLHRYYPQMLSLSSAANEAWMWDLLELAPQPSEVGSLKLTVVKRLLRSYRIRRLSAEQVLSILQRPALRLAPGAAEAAGEHALLLLPLLRSVHEQQQQVSRRIRRLLEQLSRPATEHSDAAILLSLPGVGQSVGATMLAEASQPLAERDYHALRCYAGIAPVTRKSGKRKVVLMRYGCNQRLRNALYYWSLASIQNDPWARAYYAELRARGHSHGTALRMLGDRWLAVLVAMLKTRTLYDPGRRLQPQAQAS

SEQ ID NO: 461962 - protein, 343 aa, unidentified
MQTITTIGLDIAKTVFQVHGVDAGGQVIVRRQLKRRYVVPFFQKLSPCLVGIEACASAHHWSRELQALGHTVRLMPPAYVKPYVKRQKNDATDAEAICEAVTRASMRFVPTKTPEQQSGLVLHRTRHLFIRQRTSVINAIRAHLAEFGIVAPVGRHGVEELLTVVADPSDKRVPDIARACLLALGDQLQSIKKQILEFDRLIRAWHRSNEMSMRLEAAPGVGPILATALVAAVADPKSFRSGRNFSAWIGMVPKQHSSGGKNRLGNISKQGDRYLRGLFVAGALSVIRYAKIHGTKHRPWLTSLLARRPTKVAAIALANKIARMVWAMMARGERYKEPVALAR

SEQ ID NO: 461963 - protein, 336 aa, unidentified
MEPTTIAVDLAKRVFQIHFVDPATGAIHSKVLKRAQLVPFFANRPASQVAMEACGSAHHWARVLARLGHDVKLIAAQFVRPFVKSNKNDAADAAAIWEAAQRPGMRFVAVKTEDQQAMLALHRIRQQLVRIRVMQINQLRGLLYEFGVVLPQGRRPSIEAAKGALASLADQLPAMLTDSMQDQLSRLRTLDEQIARIEQRILEWRRNDEACRRISEIPGVGVLTATAAVSVIGQAKTFRSGREFAAYLGLVPRQNGSGGKVKLGSISKRGDVYLRTLLIHGARSVISASKHLPERMRVMLTRRPTNVVAVALANKMARTIWALLAHGRTYQSAPAQ

SEQ ID NO: 461964 - protein, 355 aa, unidentified
MSEDKYIGLDVHQASVSVAVLDRRGKLTMECVLETKAGTIVDFIEGVRGSLAVTFEEGTCAAWLHDLLQPHVSRLVVCDPRKNALLQDGSKNDRIDARKLAELLRGNQLSPVYHGDHGVRTLKELARSYLTLTQDLTRVMTRIKALYRSWAIPCSGARVYAARHRSEWLAKLSQAGVGQRAKYLYQELDLLRPLHQQARCALVEESRRHPAVKRLRQIPSIGPIRAALLLALVQTPHRFRTKRQLWAYSGFGVETHDSGEYRYVGGKLQRNRERIRVRGLSHNYNRDLKNVFKSTAVSASTRPGPLRDFYLALLAKGIRPSMARLTLARKIAAITLTIWKKGVDFDAQQLVRQAA

SEQ ID NO: 461965 - protein, 341 aa, unidentified
MYYIGLDVHKKTISYCVKDASGQVHREGTIGATRNELDCWVRTLPQPRIMAMEATIFTGWIYDHLLPHAEQVKVAHPLMLRAIAAAKKKNDRIDAGKIADCLRCDFLPECHMASTEIRDRRRTLRYRHLLVRQMVQMKNRISGLLMETGVSHNKQRLHKVGYFGELLSNHQEVQENIRPLLRLSRETIVRCQRTEYALVSSLQRDPLLAERLKRLRTVPGVGPITALTWALEVGDVARFRSVKQAISYCGLCGEEKSSADKVLRTPLSKQRNKYIQRVLVEAAKLAPRQNHELALIHEREKQKGNRNRATLAVARKMVAYLLAVDRREREFVPAEGHGTAA

SEQ ID NO: 461966 - protein, 430 aa, unidentified
MKSNTQNAKIEAITEKTLVLGIDVGSETHYARAFDYRGIEYSKKPFKFSNTEAGFVTFKEWILDLKDRHEKEKVVPGMEPTGHYWFNLGKFLQDNEMKPVLVNPHHVKKSKELDDNNPTKNDRKDPKVIAGLVREGRYMIPYLPDGVYADLRTASNIRFQLQAELTRIQNRISRWFNIYFPEYKTVYGKPDAKSGMLILKAAPLPEDILTLGIDGVNQIWRDAKLRAVGKARAKTLIEAAGHSVGSKEGAVSARMEIRMLLEDYESRNMRLQEVMVLIEELVKGIPMAEKLLEIKGVGIRTVSGFLAEVGDISRFNNPKELQKLAGLALVENSSGKHKGETTISRRGRKRLRYLLFEAAMSLVAKNPEFRELHNYYTTRRLNPLKKMQSLMAIAAKLIRVFYAMLTKGVDYDPKKMVSDIKRPAVYLQAV

SEQ ID NO: 461967 - protein, 436 aa, unidentified
MDIVHPRVAGIDVHKKVIWVAVRLPGKAPGHREVTVRRFKTFWRSLQEMAAWLAELGVTDAAMESTGVYWWPVYHALAGAGIEVCVCNAAHMRNVPGRKTDLRDCQWIAELHEYGLLRASFIPAAEVAALRQRTRYRKKLIEQRSSELQRLSKVLEDGGVKIDSVASTLTTASARDMIEALIAGQRDPAVLAQLARGVMRKKIPELQMACDGRFTDSHAQMCRLHLDAYDHLAAKIAELDLLVAKAAEPFAAVITHLITIPGIGQRTAQVIVAETGADMARFAGPARLAAWAGLAPGDNESAGKRKKAAARQGDRHLRAAMVEAAWTVSRTATRPGARFRRLARRFGRGNEKKAAVAVAHTLTCIAWAVMRYDRDYAEAGADYYDHRDARNRDHLVRHYQQALARLGYQVTLTPPGDGHSPSAATTTPATPPGQAA

SEQ ID NO: 461968 - protein, 407 aa, unidentified
MDVLHPKCAGLDVHQQTVVACARTGAGKAVTYDVRTFGTTTAEVLALSDWLTAHGCTHVAMESSGVYWKPVWHVLEGHFELVLANARHIRNIPGRKSDVNDAPWIADLLAHGLIRGSFVPPEPIQELRDLTRTRQQLVREIAQHTLRIQKTLENANINLTAVLAAVLGSSGRAILRALARGERDPERLAELASDRVKASRAELVAALHGRVPPHHRFMLTLHLTQIEALEAAVREVEARLGDALAPFRAALDRLITMPGVSETVARVIVAEIGFDMTRFPSAGHLVSWAGLCPRLHESAGKRLSNRTRSSNPWLTTTLVQAAWAAARKKDSYCRAQFLRIKSRRGPKKAVLAVAASMLTAAYYMLKHGVDYRDLGADHFDRRDKAKLAKRLIARLHDLGLTVEVRAA

SEQ ID NO: 461969 - protein, 436 aa, unidentified
MPSLHYFFVGGKILNIVYPICCGVDVHKTFFVATLITTEGIQPTYQKRRFSTFNNQILAFKAWLLENNCRDVCMESTGKYWVPVYNLLEDSINVTIANPKWVKTVKGNKDDTKDSKWIGDLFRIGLVPGSFIPCKDIRILREYTRYRFKLVSCKSSEKNRYQNVFTVCNIALDAVVSDMFGKSATSITDYIVNSDTFESEHCVSLLQKSLKKKADQVVASIEGFQMTVSQKERAKMVKDHFDYLVGQIQKLDIAIDFLAKPFEPAIELLCTIPGIRRNSSITVLSEIGTDMSPFDSSKRLCRWAGLTPGNNESAGKKKSVRITRAGVYLKPTLVEIAHAAVKSKATPYYAVKYERIAKRRGKKRAIIAIARMILTAVFHMLSTGEVWNPVDLNQIDMPSELREKEVQKSLRRAMKLLIAHGLVSPDAIQILKTAPA

SEQ ID NO: 461970 - protein, 355 aa, unidentified
MKYYTSTTEFNCGIDLHARQMYVCVMDRQGKKLVHTNIKNNDFAFFLKLVEPYKHDLTVCCECMFGWYWLADACQAAGLTFVLAHALYVKAIHGGKNKNDRIDSEKLTHLLRSHLIPPAYVYPAAKRPLRALLRQRLYYVWHRAELLARIHSHQLAHNRPPIRQTRRTRDPWEAQLLAAEDHPLRQLALQNDLAMIKHYDQQIFQLEAELQRQAKQSAAREYALLQTVPGIGENLGMTILCEIGDIARFPTVKDFLSYCRLVKGTVASAGKIKGLRGAKLGNPYLRWAFGEAAVIAKRDHAVIGPLAQRLEARMNGNKFKANTVVAIKLARAAYFMLKSKTVFDPDRLVAALSRN

SEQ ID NO: 461971 - protein, 373 aa, unidentified
MHCTMKFVGLDVSKETIAVGVAEQGGGPARSLGKVPNTPEGVRKLVQRLGPPAKLLACYEAGPLGYGLHRLLTGMGVRCVVVAPALTPVRPGDQVKTDRRDAVRLAQLLRAGELTPVWVPGEEEEALRDLVRAREAAKRDLRRARQALNSFLLRHGVQPPQGTRRWSRMYLRWLDTLSFPHRATQVVFQELLHAVRELEARLERLEAEIHALATESRYAPLIQALQALRGVGEVVAATLVAEVGPFSRFRNPALLMAYAGLVPRERSSGAQVRRGGITKTGNAHLRFVLGEAAWAYRHRPAVKAGLRRRQQGADPEVLRIALQAQERLHRKYWRLLARGKPAGVAATAVARELLGFVWAIACHVEAQQAQQAA

SEQ ID NO: 461972 - protein, 379 aa, unidentified
MGDHSEAFIGIDTAKLRNAVAVAEAGRTGEVRYLGEVETSEAATRKLVAGLAAKYRKLTFCYEAGPTGYGLQRLIESLGHTCHVVAPSLIPKKAGDRVKTNRRDAEGLARLLRAGELTSVWIPDARHEAMRELTRARDAAKQDLTRKRQQVSSMLLRLGLHYPGTKTWGARHRTWLAHVKLDHPEQRFVLEEMLQAERQAGERVGRLEQAIRDALPDWSLEAIVPALMAMRGIDTIAAVTILAEIGDLSRFESPRQLMAYLGLVPSERSTGESVKRGGITKAGNGRARRVLVEAAWAYRHPPRVGVEKQILVSAAPKPAREIAWKAQVRLCKRFRTLSKGGKKSTVVATAIARELAAFIWAIARAVGAPGKGAKPALAA

SEQ ID NO: 461973 - protein, 394 aa, unidentified
MNSVGIDLHRKRSQIAALDERGGELFSRRIANDSDTFVALLGGLEGESKIALEATYGWEWLADLLEDHGYEPHLAHPLRTKAIASARVKTDAVDARTLAHLLRADLLPEAYVAPRELRDLLRQRVVLTQMRTALKNRVHALLARQGIQRAHADLFGSGGRRFLDELRLRPDPRARLETLLRLIADFDREIDALAHEIDRRAKHDPRVDVLRQIYGVGRYLGMLIVAEIGAIERFPSARHLCAWAGLTPTVRSSDARVRLGHISHQGSAALRWALVEAAQKACQGGGPLRQDFERIAKRRGRKIAKVAVARKLLTLCYYGLRDGEIHWMDDWSRSEPAQVAADDQTSNQPRPLTAPLTPARSFMDDFHASSISGGSAGRGVAAASASMRERDPRG

SEQ ID NO: 461974 - protein, 367 aa, unidentified
MAVYIGMDVHCKKTVYVVQENSGQVIAQGSVPTSVQGFRSVLDRLGTPGTKKGGLESGPQARWVSGVLSELGMRPVVVDAREVRAKARRINQKSDSRDAFEICDGIRRGIYTSIVYVPEPSIQRLRQVLSRRRHFVRLCTSQVNAAKYLLRAVGLSAEATSLKSNAAWQRLMKRPAVGSLRTYLAMHRDVWLVAQEKVSALEGELTAALEPFQQTVELLQTVPGVGLITSASYIAVLGTPGRFADSSRVVSYIGLAVSTYSSGEKERYGHITKRGSGELRMLLCEAAHHAANSRHPLNPYFRRTAARHGYKKAVVAVAQRLARILFQMWRKGQAFDVRQLNVVAESALRARRVYWRVRQPNEERIKA

SEQ ID NO: 461975 - protein, 378 aa, unidentified
MLLINLIGARTSEDSCRRLLRLAVRWNYHGFDVAQRQEAAMSLYAAIDLHSSNSVLAVMDDEGKALLQCRRPNDLPRLLSDLAPYREELVGVAVESTYNWYWLVDGLMDHGYAVRLVNTTAIPQYDGLKHGDDHSDALHLAQLMRLGLLPEGYIHPREQRATRDLLRRRFSLVRQAVRLMLSIQSSFSRSTGKQLSANALRRLTPSQLVDLFPDLSLRYGVLIQFKLWLTMQEQITALERWIRKDLARPDLLVRLQSVPGIGPILGMTILLESGAIERFASVGDYASYCRMVESVRLSNGKRKGHGNRKCGNRYLCWAFMEAANYAVRFDPLIRRWYERKRARKHRVVAIKAVAHKLARACYHMLHEGTTFDLTRAFG

SEQ ID NO: 461976 - protein, 416 aa, unidentified
MTNQGQWYAGVDWASDSHHVFLTDADGRKIAERVFKHGGDGLAEMAAWLVATSGAAEASQIQVAIEVPHGPVVETLIERAFRVHAINPKQMDRFRDRFTLAGAKDDSRDAQVMASALRTDPRCFRMLAVADPVVIELREWSRIAEDLGAELNRLTNRMREQLWRYFPAMLELENDLGAQWLLDLWEAVPTPDKAALIREATIARVLKRNRIRRFGAAHVLDVLRRPPVQVAAGTTEAASAHIATLIARIRLVNRQIKDAHQRLDSLTARLIPTGEAEPGQEKQHDVEILASLPGVGRIVLATLLAEAFDALQRRDYAALRSLTGVAPVTKRSGKSCTVVRRQACHDRLANAMYHWARVAVQHDPRSRAKYAALRSRGHSHGRALRSVADRLLNVACVMLKTGTTFNPSLAAQKASC

SEQ ID NO: 461977 - protein, 347 aa, unidentified
MDGEINKSCGLDIHKRFVIATTLSRSGEKQQHRFARDDDGILDLKNLVTSEKCDVVACESTSDFWVPIYEALIDHLPVIVGNARNMKAFTHKKTDKIDSEVIAQLALNKMVQPSRVFPKRHREFRSYVRLRLTLVRKRTDIKNEAHAILSSEMLHLGDVLTDIFGKNGRAILAGISSGKNIDQIIESLSPNVRKKSVQIREILDREISQSAAIRLHICLNLIKHLDEEIEVLEREIFNYAYQKHKREMKILMSVPGIGELGAATLIAEIGDFRDFPTGDKLASWLGIVPNVYQTADKYHNGRITKRGSKVARWILTQIAQAAARKKNSSLKEFFNRKKKTIGYAKEW

SEQ ID NO: 461978 - protein, 405 aa, unidentified
MDLIPICRCAVGMDIHLNLIEVCVITENPDGEPQVHRRRFGGFRRERLEMANWIAGFAPETVVMESTGIDWKSPYAYLERLGIRALVVNAQHVKKVPGRKTDVADAEWLAMLARAGLLRGSFIPPERLRNLRQLSRHHQRLTALLGAEKNRLVRVLGDAGIRLSAVVSDPHGVAARAMIDCLLDGGTPQQALRHAGRLKAPREELAAALEGELSAEHLFVARLLRRHLDALEADLGALERELITAMAPYQPAMDLLLTIPGIDTLAAAKLLVEIGDDMTAFGRAGCLAKWAGLCPGNDQSAGKRRSAKTPKGNRYVRALLCEIAWAATRTASQFKSRYQGLVIRRGAKRAIVAIAHQLLKIVYVLLARRVPYRDETVDDEALAVQRKAPRWIRQLKKFGHLPQTA

SEQ ID NO: 461979 - protein, 424 aa, unidentified
MSLEFVFCTRFYEISAVDITLHILRKECMIMILVGIDIGKNQHTFSIIDKNTGEILSNPSFFPNNREGFLFLIKKLNTYSKSDLLIGMEDTGHYHFALLKHFLDSRYTVALINPTTTDLTRKLQGGITKNDPLDSLTICDVIGSNQHNKPYRITKVNRFDLYEQKQLTRHHHNLKEELNTYKNRLQKCIDIVFPEFNSLFRSKYGIVYMNVLKTFSSAEKIANSDIRTIRKCFEYNKRGKRISLSAEQLKAAAKTSIGMPSVAEEIQIRHLVCQIEMIEEQLSEIDKKIEEFSLQNNSPILSIPGISHFSGTSILAELGDICNYTKAAQIIKFAGVAPYHYESSQFNAQHTAITKKGSRYLRKTLYQIIFPVIYHNEVFNVYYNKKLAEGKGHRCAQGHCVRKLLRIIYHLLSTGQIFDPALLR

SEQ ID NO: 461980 - protein, 369 aa, unidentified
MNTLYVGIDVSSKSNVIYLMLPNGDKHSNFSVANSHEGSTQLVKRILSALTSHSLDTVLIGLEATSVYGDNLVYFLREDATLAPFNRKIHVLNPKQVKKFHDAYNDLPKNDYVDSFVIADCLRFGRINKEVYMGDYRYKALQNLTRARFFAVQNLVKEKQRFMNVLFKKYSTMTQEKVFSDTFSTTALAVYDEFESAEALANMDLHELTDFIIEKGKNRFPDPDAVAKAIQKAARSSYRLPKTVNDSVNQVLSISITSMKALESQIKEFDKAIKAQMELLPNVLISIPGIGPVYSAGIMAEIGDINRFNSQAALAKYAGLAWKQHQSGGFESEVTRLIPSGNRFLKYYLCEAACVLIQVQTIDLLLWQH

SEQ ID NO: 461981 - protein, 319 aa, unidentified
MAQNDPVVAGIDVAKDKVDVCIRSLSLKRTFASTAEDRRELASWLRRNKVGKAVMEASGGYEREWAKALHDGKIEVRIVDPKRVRSFARSAGRLAKNDMIDAEMIAWFAETFAEARGQAHDVTREQLHQMVHARQGLKDMQSKLTSQGEHALAAAVQRSHAKISKTIAAELVKIEAEITALIEATPYFAELAEIIESVPGIGRTTSAALIADMPELGQANNKIVASLLGVAPYDDDSGRRRGERHIKGGRRRTRNIFYMASLGAATQHNPMLKAFYDRLVAKGKLKKVALTACMRKLISILNIMIERRQKWDAKRYAVS

SEQ ID NO: 461982 - protein, 347 aa, unidentified
MNNLNVVGVDLAKNIIQVSVVTRGMKELQNKALTRKKFSEFLARQKPSLVAFEACATAHYWSRIAQLHGHTAKIIPAKAVLPFRQGHKTDSNDALAVAEAACRPNIKAAPMKTVEQQGIQAIQRSRELLVHDRTALSNHIRGLLMEFGVVIPQGFAALHRRIPEVLEDAENELPDLYRPTLNLLYGRLITIKDDIDVLTEQITALVKQNIACDRLTKLEGVGPISSVLLYATLGTGEAFANGRQFSAYLGLTPKQYSSGGKTVLVGISRYVANKRLRAVLIQGARAYVHRLKDPKTPKDRWLWALIQRAGYGRAAVALANKNARTAWALLTQGEPYDRDHGESLAAA

SEQ ID NO: 461983 - protein, 428 aa, unidentified
MKYNTQNAKIASITEKTLIVGIDVGSETYFARAFDWRNYEFTKKPFEFSNSEAGFQTFKAWMEDLLEKNGKSVVIPGMEPTGHYWFALGKFLQDNGMRPVHVNPHHVKKSKELDDNNPNKNDRKDPKTIASLVNEGRFSYPYIPTGVYAEIRSLSNMRFQAQEELTRAKNRIARWFSIYFPEYKDVYRDLKAVSGRMVLETAPLPEDICKLGVEGVNRIWRDAKLRGAGMKRAKTLVSAAEHSVGSKEAPEAARIELKNLLKDMDVYASRVEELLGVIEEKLKEIPYIDKLMAIKGVGLVTVSGFIAEVGDIRRFDDPKQLQKLAGYAIVSNESGKHKGESRISYRGRKRLRYVLYEAALSLIGRNPEFKAIHEYYRTRKENPLKKMQSVVAIACKVIRIFYVILTKGVDYNPEKMMGDIRRPQIQAA

SEQ ID NO: 461984 - protein, 342 aa, unidentified
MAIVGAFDVHRRQVTFDVLDTETGQVRRGLVRPACRATLRRFLAGYAGVGEVEFTVEGCTGWRFIVEELERAGITTHLAEPAATADARGSKRRAKTDRTDARHLRQLLVEGRLPESWIPPEHVREVRARLALYHDLREEHTAWIQRIHATLFHQAVPIFDDALSSAAGRARLESGEGLSSAGVQVVAAALPVLDALDEELHTLHQQLAAFARRQPGCRALQTLYGVGTITSVAIWAFMGDTRRFSSSAQAVRHTGLDVTVYSSDGKRAPGHLARQGPPVLRWALYEAGCNASRTGSPDHDFYHDTKQRIDHKRAAISVARKIARRSHHILRNLGDQAWAPAT

SEQ ID NO: 461985 - protein, 408 aa, unidentified
MILVGIDWAEDHHDVGVMDEEGKMLAYERVAEGSKGVGRLHALIGDHADDPEQVAVGIETDRGLLVASLVAVGYQVYAINPKAVDRYRDRHSVSGAKSDRGDAKVLADMVRTDRHNHRRIAGDSDLAEAIKITARAHQNLIWTRQRQINQLRSALREFYPGALAAFGTELAHSDALAVLAKAPTPELGRHLSTSQIASVLRRGGRQRNIDKRAVAIRDALRAEQLTAPPLTVDAYGDTARALVAVITVLTARIADLESALADRFEQHPDAVILRSLAGLGIILGARVLGEFGDDPNRYEHAKARKNYAGTSPITRQSGNRKAVLARFIRNRRLTDALTWWAFSSLTASPGARAFYDRHRAAGDGHHQALRAVSNRWVGILHGCLRHRTEYDEATAWPADTKKEIDIAA

SEQ ID NO: 461986 - protein, 416 aa, unidentified
MIMTQTLEIAAGLDLHKKFIIATILTLAGGKMQERFERTHEGLLKLKDWILNNKVQALGCESTSDYAVQIYDMLNQYIPVIVGNARDIKAFTHKKTDKVDSEFIALLTLKGMIRPSRIMPKCIRDFRSLTRLRHRLVDQRTTTKNYIHSILDSELFLLSDAFTDIFGKAGRIVLNGITNGFTVDEILQCIPKNVKGKEVQLRKIMEHTLSYYALKRMEANLLILYEYDKQIENLTQQALDYAYTHHPREMKILKSVPGIGEIAAITILAEIGDIKDFPTPEQFASWLGIVPRVYQSADKLHTGSITKRGSVHARWILIQVAHAAGRSRNNSLKSFFQRKEPVIGKGKAIVALARKIVVVIWHLLTNDEVYDDGIYKKSPQPKHISVKIPTNVTMEEILKIIREAAIIIKKPDPGVI

SEQ ID NO: 461987 - protein, 369 aa, unidentified
MPHVTSIGLDVHARSVAAAAFNPFSGEVVHRDFGTDAAEIAEWALGFEEPRACYESGPTGFHMARELRALGLDCAVAAVSKMQRPAADARRKNDRRDAEFIARMLATHNIVEVPLPDAAVEAARDLDRALDDATAEYRRARQRLNMFLIRLGHVWDERNADGARKGSWTRAHWRWISGIRLEGPQRDVLEYYVTAARCAESDRRQLEKKVLALARTDRWRPAVEALSCIKGIDTLTAFRLAAEAGSFTRFRTAPAFASWCGLVPSERSSGETERRGGITKTGNRLARTALVESAWHYLTCTPRPKAPAPGADVPAAIRARADACTARLCRRREALAAAGKSSCKANAAVARELACWVWEIGRRAEGTLS

SEQ ID NO: 461988 - protein, 440 aa, unidentified
MKSVQLQQKRSLINGKIIIGIDPAKTKHQAAIIDTHGVQLGKSFSFDVSLDGYTKILWQKLTQILPTYSRDTTVFAIETSCNLWLTLAFYLHHEGYRVLLVSPLTTYHSRPMVNHDFSRTDPKDAFLVASNARQGFFDLYEDFPPLGNAMHRLTITYCKLRKELAQNRARLRASLEQLFPEFLEIVEPDTQTALYLLKRYLFPCDFLDIDLASEANAILAISRKQFGPQTLLQLQKAARHSIGVLKSQEEAIAERLSVKCWLTLIESLSAQMQTVFTALADYAARLPEYTIVRSLKGISDLTAALFLGELRDIHRFTHYKQLEKKAGLNLRLNQSGKYVGARHISHIGSKRLSWLLYTMTEETARWVPEIRAKYLRRQLHRRNHRKSIVASIPQLLKLIMVLVKEHREYQIHPHSVIQMQALEKQYSQLKVQRKTTKQAA

SEQ ID NO: 461989 - protein, 332 aa, unidentified
MNMHPQGGVARPDQRLNAGIDVSKQHLDACWGTEDQRLDNDAPGWDVLIANFRATHVDLVVIEATGGYERGLVCALQGAGITVARVNPRQARDFAKSMGVLAKTDRVDARTLRDFADVLARHKDRHKYITPFIEAQREQLAALMARRRQLVDMRVAEGNRLEQAGTRAARSIRSVLKTLDKQIADIDRDADDHLDRHFKEQRTLLDSVKGVGPVTILTLTSALPELGHLGRRQIAKLVGVAPLADDSGSRKGPRRVWGGRGEVRSVVYMATTSAIRFNPAIKAFHSRLIAAGKPKKVAIVACMRKLLTILNAMLRDHALWNATKHLQTSKTA

SEQ ID NO: 461990 - protein, 335 aa, unidentified
MFYCGIDLSSKTTALCVLNEQDKVVSEREVATDLERIARQLQTFRGVLCLVEAAPMAEWCKRGLEARGIECRIIDTRRAQKLFESRKKTDQRDARTLARMARVQWYNEVHAKSEAARLMRTRLGVRKAIVKTLVSVQNEVRGYLRAHGERVSAPKGPRFAEQIREQMAEQPQLLALVEGLLRLWEATWRELLAEDKALKQVARERPEVQRLMGVPGVGEIVALTFVATIDTPKRFTNASQVGDYVGLAPGIYQSGEVERRGRITREGDSMLRALLVEAANSVLYHYRGAWAWKTWTQRLSERRGPAKARVALARRLAGLLWKLWNEETAFRLKPA

SEQ ID NO: 461991 - protein, 426 aa, unidentified
MAAPRPNSKEPTLAWKAGSDWDALSSPVTHSKGAEKDGTGMKKNSKNETTKSKRETKKVAELAAPRLTEREANTLVIGIDLGDRTSSYCVRTLGQQIVKEATVAMTATAILEAFQGLRRQRVVIETGTHSRWVAQLLELMGHEVIVANARKLKLISENNQKSDKVDARLLSQLGCMNVEWLHPVYQRSQDAHCDLLLARAREALVETRTALINHVRGSVKSFGSRLVKCGSERFVGVARVTLPDALRPAMSGVLATLEEINEQIYHYDCQIEHLCHTKYKEAAKCWMQVNGVGPVTTLTYVLTIEDKDRFEQSRDVGPYLGLVPNKRQSGQRDPQLGISKAGDEMLRKLLVNCAHHILGVNGQDSDLRRWGLELVRAVERKGKKGARKLAAAAVARKLAVLLHRLWVTGAEYEPLRNRGAQQTPAA

SEQ ID NO: 461992 - protein, 341 aa, unidentified
MQAPRHIGIDLHRDKFTCCVRLENGRNYLTDWKLEDLPAFVKKLRPSDEIAVEVTGNTRLFRDAVAPHVKRVVAVDPNQFKVISHSVKKTDPNDARNLALYLAKDLLPEVRMKDKTRAQLASLTQTRDTLVKLRTALKNKINNILSAHGHNLEKEALSSEKKLNEILVVRFDPMVKLELEVMIEEIRSLNQRIAKLEKAIADEGSKLEGHKNLISIKGIGPLSGSILLSVIGDINDFADEGKLAAYFGIVPRVSKSNETEHTGRITKRGSKLGRTALVQCALIAQRYSPYLKRYYEKIKARRGTGKAIIALARKLLGIIYRTLKNKWVFEDFPNFVLAEAA

SEQ ID NO: 461993 - protein, 347 aa, unidentified
MRFYTTTHKHSCGIDLHAKNMYVCILDREGKVLLHRNLRTDPELFLRAIAPFREDLVVGVECMFTWYWLADLCAREQIHFVLGHALYMKAIHGGKAKNDRIDAYKIATILRGGMFPYSYVYPSEWRSTRDLLRRRLRLVRHRGQLMSHVQNTHYQYNLPTPQKRIAYRANREGVAKQFTDACASKSIEVDLELIGHYDEIITDLELYLTRKAKVHDQDLFHLLRSFPGIGKVLSMTILYEIHDIARFERVQNFASYSRLVKCEKSSAGKKYGTSGAKIGNVHLKWAFSEAAILFLRGNPRGQKYLKKIENKHGKRKALSILAHRLGRTVYYMLKKKRTFSMDAFLTA

SEQ ID NO: 461994 - protein, 346 aa, unidentified
MSSSNVHIYGIDLGKNWFHIVAMDRQGHILWRKKFNRSQRKTFVVNTPPTIVAVEACPGSQYWGRLFNDAGFSVKIIPAQFVKPYLKSNKNDFNDAAAIAEAGSRGTMRCVALKTHEQLALQATHRVRQRFIVERTATVNQMRALLLEYGITVPVGRKVFERNLPSILEDAENGLPDFIRALVFRLRERWQHIDVQIDEMSAQLQQASIASEKCQLISSVPGIGPIVATGLIAAVGSGTQFKRGRDMSAWLGLVPRQYSTGGRSNLGGISKRGNVYLRRQVIQGAKALKIHMKRDKSALGQWIAKLEATHHHHVVLIALANKIMRICWKILTSGQAYQPYPASAAK

SEQ ID NO: 461995 - protein, 331 aa, unidentified
MTITTVGIDLAKNVFAVHCVDQNGKTVLVKPKVSRAALPELIASLPPCVIGMEACSGAHYWARVFRQYGHEPRLMAAKFVSPYRMAGKSGKNDAADAQAICEAVRRPHMRFVPVKDESQQAMQCLHRTRQGFIEEKTATYNRLRGLISEFGVIAPQSTDALRHIVSEQKNSLPLQVQQCVDDLLEHINRIEDNIAEYDRILSRMAKTDHRSQRLMELKGIGPTTACALVASIGNAHDFKNGRQLAAWLGLTPSQYSSGGKSKLGRITKAGDSYLRTLLVQGARSVLIGAEKRTDSFSRWVCKLVERRGVLAGCCSHRRQKREAVLGIVALR

SEQ ID NO: 461996 - protein, 355 aa, unidentified
MVTGLKHQKEKRSMDHFAGLDVSVKQTSVCIVDDTGRIVREVKVASEPEALLQVLRNDAYHFKRIGLEAGPLSQWLFSALAEAGLPAICVETRHMRVVLQAQINKTDRNDARGIARMMRVGLYRPVHVKTLRSQKLRMLLTHRKLLQSKAIAIENDLRGTLRNFGLKVGMVGKLKFEARIKELVENLPDLAVLVEPLLVVRRVLRQQLAILHRRLLAIVRDDEVCRRLMTVPGVGPVVALTYRATVDVPARFRKPKSVGAVFGLTPSKYQSGEINRSGAISRCGDAMMRVMLYEAAQSMLLRSAKWSWLKAWAMKIARHRGMKKAIVALARRLAVIMHRIWVDGTEFRWTREVAA

SEQ ID NO: 461997 - protein, 426 aa, unidentified
MWDAQRRVLKIKSLKHGIIQDKRGNVMRAVFGIDVSKTSSEVAILVNGEKVHGYTILNDAFGFNRLLGDLKTVHNPEIIFEATGVYSRCLQAFLEECGYAYTRLNPLEAKKQLDSLRVRKTDKIDAEKLAKSQLVHNRKPTYVQEEVYQHLRDLSRFYQNMTEDLVRAKNRLHKVLQVTFPELENLLSTPTGEQYWNLVMAFPCKEFVLSLSQSDLYEIIRQSTSKRISEKRIAYLTDKLIKLAKQSFCAVKKTSPMLEEVRYYAQELLRLSERRQVVLNDMVALAQPLPEYDILRSIPGIAETTATSIIGKLGDIRRFHSANQINAFIGIDLRHYESGNFLAKEHITKRGNPYARKILFKCIHNIASASHTNPCHISDFYEKRKRQSQITSTKPHTIASIHRLIRTMYYLITHNKLYDYSLTQNR

SEQ ID NO: 461998 - protein, 340 aa, unidentified
MFVNYKVMQNFYFIGIDVSKKKLDICVMSNSKVLKEEQVSNHPQAIATVIAGIKEELSMSNDSLIICAEHTGQYTYPLICACKSVGSKLWLENASQIKYCSGVTRGKNDKVDARRIAVYAMRFFDKAKPYQRPTEELMRLKQLEAERSLYLTDLAKYKAQLSDQEGFMEDKIFKRKAKRLKEMIKSLEKTLKEIAQEMADVIYSSEELSRQMRLLKSVEGVGPVVAMNMIIATEAFTRFDNPRQFNCYVGVAPFAYTSGSSQHSRNRVSQRAVKYIKCLLHMAAVAIAHKKTGDLKTYFERKVAEGKNKMTVLNAVRAKLVARMFAVIRNNRVYQPILSV

SEQ ID NO: 461999 - protein, 343 aa, unidentified
MEGYAGKQFVGIDLHRRRSVIVRTSADGEVLEAVRIVNDVERLASVMARAGESPETVLEATYGWYWAVDALQAGGARVHLAHPLGVKMFEYRRVKNDVRDATDLADLLRMGRLPEAWIAPPATRELRELVRHRAKLVGLRSGCKAEVHAVLAKCGIQVLMSDLFGVDGTNLLDRLELPAPYAARIGSLRRLIDDLDFEIDHFAGLARGRLVREPGYTAVQQIPGIGPVLAAVFVAEIGDVTRFPAASKLTCWAGLTPKHHESDTHVHRGRITKQGSRLVRWAAIESVKKIPAHSPAGLLRERVADRRGRNIGSVAAARRQLEFVYYALRDGHVRALQHPTRAA

SEQ ID NO: 462000 - protein, 453 aa, unidentified
MKKDKNKEQKVVELDAFEQINHNAAGIDVGAKEFYVAVPKGRDTQSVRAFLTFTADIHHLADWLAQCGVKTVALESTGVDWIPLYEILEQRGFEVYLVNARHLKNVTGRKTDVLDCQWLQQLHTYGLLRASFRPSEQICAIRSLVRHRDMLVSYRSAHIQHMQKALTLMNVRLTNVLSDITGVTGMKIIRAILSGERNRKTLASYRDAKCAKTEEEIEKSLEGNYKLEHLFVLKQALELYDFYDQQIKQCDQELETLYNEFEEPAQPGTPAPEKRKRKRRKNQPNFDLSESLYRMTGGIDLTKIEGLDALTVQEILSETGTDVSKWPTVKHFCSWLCLAPNNKITGGKVKSSHTPHTQNRAANAFRIGAQSLMKSKSALGAYCRRIAALHDAPTAITATAHKLATIFYFMLKRREAYRPLAADYYEKEHREKVVRSLQRRAATLGFRLEPTVS

SEQ ID NO: 462001 - protein, 341 aa, unidentified
MKSLFVGIDFSKEKVAVAIISAERQAETSVRVFNEFKNSVSGYKQLVKWVDSNSNGIDPSMWLFCGENTGDYSKPLCNHLYGKGYDMWLENAKCIKDASGIRRLKSDRADAAMIAEYAMRNHDKAVVYEPLSEPLAQLREYYLYRQMLVRHKCSFEVRRVEKRLMMEKSAARTAIAQSGKHIVSELNKEIAKIDKKVASLIESSDELSEIYKIVTSVPGIGTQNAVCLMVYTDNFRKFNYEARRIACYYGIAPFGEDSGTSVHTDPHVHYMANRHIKAMLTQAALAAVRFNPIIAQYYQRLIERGKKMPVAMNNVKNKLLHIVTSMVKNKQVYNPEYRFAV

SEQ ID NO: 462002 - protein, 372 aa, unidentified
MDERIKFFIGLDTHKDSTSVAACEASRDPARFVGTIGPDVRVLLKLLAKAGDPAQVSVVYEAGPTGYGLYRELCQRGYRCEIVAPSLIPRRPGDRVKNDRRDCARLAELSRAGELKPIWVPDESHEAMRNLWRAREDAVGMRLKSRQQLKAFLLRQARRYPGKTSWTKSHERWIADQRFDHQADRIALAEYQLAVQSAEQRVQRLTIALTEATQGWRFEPVVAALRALRGIDTVSAIGLVSEIGDINRFTSARQLMGYLGLVPSEHSSGNSIHRGSITKTGNAHARRLLTEAAWNYRFPARLSRNLRDRSDSVPEAVRSHAWKAQVRLCGRFARLSSRGVQVNKICVAVARELAGFVWAIAHQALPATSSIH

SEQ ID NO: 462003 - protein, 461 aa, unidentified
MFMNARSPIPYQATVGIDWADQKHDVFVHAANGDSYRRKIDSRPEAIQEWLLELRTACAEGKIAVALEQRRGALFYQLCTHLNWIDLYPINPHSLASFRLTFFSSRAKDDPIDSQLLEELVRTHPDRLRPYLSESPTERKLDQYCRHRRSLLDLSTKTELKLISTLKQYFPLAVNLFAAVGMKSDIALNFLSRWQTLNDLHRAKTHTVRSFFYAHNSRSQSLIEKRLQQIDEAHNVTDDLALIEPLVLTSKCLVGQLRQSNQAIKEFDRKIKDLFKSHPDHFLFANLPGAGEQLAPRLLSLFGSNRLRWADATDIQKYSGVAPVIERSGKSIWVHRRLSRPKFICKPSMNLPSKAFNVLRGQINIIGVNARKVSLITVRSAPSPSNGYASFSPAGRPTSLTMNLSIFRPLQKRILPFPQLDGSPQTLVGCAPRWKFAWPQPPLTAPAPPTTPALLVATWFG

SEQ ID NO: 462004 - protein, 404 aa, unidentified
MLNAVGVDVSKGKSTISVLQPGGVVVRKPFDVTHSKDDLKELAKYVKSLDGETKVVMECTGRYHEPMLRSFLASDIFVCAVNPHLIKNYGNNSLRKVKSDPADSRKIARYALDNWAELRQYSTMDTTREQLKTLNAQMDFFTKQKAAQKTNLISILDMTYPGLNSLFSSPARPDGSEKWIDYAASFWHVDCVRSLSLKTFTERYQAFCVRHSYHFQPDKAQQIYNAAQELIACFPKEKAYKDMVQLCIRQLKTTITTVEQLRQEMTDLAKQLPEYDTVMSMAGVGKTLGPQLIAEIGDISRFTHREALTAYAGVDPGVDESGQRKYKSNGTSKVGPPRLRKTLFLVISCLIQTQPEDDKVYQFVNKKRAEGKPYHVYMTAGANKFLRIYYGKVKECLALQSNSS

SEQ ID NO: 462005 - protein, 342 aa, unidentified
MLYVGIDIAKNKHDVTALNVPGKTALKPLTFSNNKAGFKLLDLSIRQLNQDCLIALEDTGHYAFNLLNFLHEQGYKVYTYTPLLIKEFAKSLSLRKTKTDKKDAHGIALKLLSDPNREQFQHDNRQVELKILARHIHRLKKKQSDWKVQYTRCLDIIFPELDKIVGKHSEYTYQLLTCYPNPQKRLEAGFDKLIEIKRLTASKIQDILSVAPRSIGTTSPAREFEIIEIIKHYKRLIDKAETCVNDLMAEFNSVITTVTGIGGRLGAVILAEIRNIHAFDNPAQLQAFAGLDSSIYQSGQIDLAGRMVKRGSPHLQWALIQAAKACARFSPAFKAYLKTTLE

SEQ ID NO: 462006 - protein, 351 aa, unidentified
MTVTRTLTGSVSEPTLYVAFELGKKEWKLAMTSGFGVQPWVRTVASRDWPAVERAIAQGRARFGLAAGAPVVSCYEAGRDGFWIHRALVQRGISNRVVDSASIEVNRRARRAKTDRLDALKLVMMLVRVWHGEQRVWSEVRVPTIADEAARQVSRERTALTQERTSLTNQMGGWLATWGCALPSRRRDGWWTTVRDWAGATLPDAVQARAVTTAAPTSALRQLVQLKGVATTSASVLLDEGLVWRAFRNRRQIGGLLGFAPTPYTSGNSAREQGISRAGNNRLQAISIQLAWSWVRWQPDSALTQWYRAHFGTGKRARRIGIVAVARKLVIALWRYVTTGVVPAGAILKVA

SEQ ID NO: 462007 - protein, 323 aa, unidentified
MNTLDFLGIDIAKKTFYVALLRNDKLRHKKFENSPEGFKQLDSWLVKQGVIEIHACLEATGSYSEGLALHLHQAGHKVSLVNPARIKAFGQSELRRNKTDRADATLIARFCSMHRPAAWVPPPAEIRELQALVRHLDDLIGTRTQLANRFTDGPKVQSVLDSLQSLIEAVDAEIELTRKKIREHIDRHPGLKEDCELLETIPGIGAQTATTLLAEIEHLRHYKHARQAAAYAGLSPRLRESGTSGKRSRLSKTGNSRVRKALFMPAISAKQHNPVLRQFSERLARRGKPKMAIIGAVMRKLLHLAFGVLKTRKPFDPNLPVAA

SEQ ID NO: 462008 - protein, 340 aa, unidentified
MSEISIIGLDIAKHVFQVHGADALGRAVLRKKISRAKLLPFFASQPRCRVVLEACGGAHHWARELARLGHDVQLIAPAYVRPFVKRQKNDAADAEAICEAAQRPSMRFVPIKSEAQQAAAMVFRGRDLLVRQRTQISNALRGHMAEYGWVAPKGLAHLDKLATLLADPTAVPEGVRSVCTALLENLALLDRQIAALDKEIVRRSREDEIARRLMTIPGIGPITATAITALAPPPGTFAKGRDFAAWVGLTPRQHSTGGKQKLGAISKMGERTLRRLLIIGSSAVVLQASRRGAPRGSWLEQMLARKPRMLVTVALANKTARIVWALLMKNEDYRAPVVAA

SEQ ID NO: 462009 - protein, 370 aa, unidentified
MQQCSTIIGLDVHKDTITAAVLPSGAERVVETLKIQNTVSALETLVRRLAPRGPLAFVYEAGPCGYEVHRQVTALGQPCAVVAPALTPRRPGDRVKTDRRDAEKLARLYRAGELTTIRVPSRAEEAARDLVRAREDAVSDRLAARHRLTKFLLRQGRVYRETRHAWGVCHGLWLKRQRFEPAALQQTFEAYVRSLEETDARLASLDQALAALAQEEPYRTPVAALRCLKGIDTLSALTLVVEVQDFRRFATAAAFMSFTGLVPSEASSGPKTRRGSITKVGNAHLRRVLVEAAWCNRHGQVVSRELALRRRDAAPAVLAIARKAQARLHQRYWRLLHRGKLQPVAVTAVARELAGFVWAIAHQAPATTET

SEQ ID NO: 462010 - protein, 341 aa, unidentified
MEPLFVGLDVSKDETAISVRTQSGSVKSAYKKATDPDAIYRALMSELELIRCVVLETGRMATWLYNELSLRGLPIVCIDARQAHAVLSQMHNKTDKNDAAMLAELARTGFYKRIEVKSRVSQERRALLRAREVAIKSRLNVENTIRGLLASFGIRLPKYLKTYDQRVRTALEGQSDLMRIIMPLLRLRTEALRQAAALTKDMVRQAQMNETCRRLMTIPGIGAVSAVTYVATIDTPDRFAHSRSVGAYIGLTSRKYQSGDIDYNGRISRRGDQMLRAVLYEAANSLLCRVKSGLGQRLRDWAIALKKRTSHKKAVVALARKLAVIMHAIWKDGTEFEPRGA

SEQ ID NO: 462011 - protein, 343 aa, unidentified
MKLHVIGIDLGKTIFHLVGLDSTGKAVIRKKCSRKQLLAFTANLEVQLIGMESCSGSHFLGRALREQGHEVRLMPAQYVKPYVQTNKSDYLDAEAIAEAVQRPRMRFVPIKTEEQLDLQALHRVRERWVMRRTAVVNQIRSLLLERGLTLPKGRRYVDEQLPRILEDAELRLSGSFRVLLAQLKIELEQLTARIEEMDRVMQKTARENEACQRLTEIPGVGPVIATALIGAVGNASTFGKGRKLAAWMGIVPGEYTTGGKQKLLGISKRGHKYLRTLFIQGARSVLQQRHKQAPGLSRWIEQLLERTHQNVVIVALANKLVRMAWAVLCKNERYRAPVLAVTP

SEQ ID NO: 462012 - protein, 386 aa, unidentified
MKKVEKRGSLRIEHNPQGFARLNTFLEQIIGDAPKEQMACIIETTHGLLIAHLLEAGWPVYPVNPRTVDRRRGASGAKTDTIDAYLLAKTGRADLADLHRLTPDNDKITELKLLTRDQDGLIQMQTRLVNQLTACLKAYYPVALELFAKLQQKSTLQFLQAYSTPQEAMAASTEQIKGVLKQARYPNPAVGAATIFEQLHQPHLQADTVTTRAKARLMLALVSQLLPLIEQIAQYDKEIETLFLTHPDHEIFESLPRAGKHLAPRLLAEIGDDRSRYQDASSLQALGGTSPVLFQSGMYSKAHRRLGCIKPLRNALQQFAWQTTQSEPWAKAYYERKRAEGKSHTVAIRALANVWVRIIFALWTSHQCYQRATFEQARELHARRAA

SEQ ID NO: 462013 - protein, 362 aa, unidentified
MAKSTTIIAFDQHAATTVAAVLLPGQQKPAVHHLTSDLPTLLRFVQRVRRAGPVQCCYEAGPCGFELQRALAAHPYPCEIIAPSLIPRRPGDRIKTDRRDAVQLALLYRAGALTAIHIPTEQEEAARDLLRCREDIRADLLRARHRLSHFLLRHGRRFTATKRAWTKRHAEWLQAQRGPLPALEQTHRAYVRAVEEAVARLHSVDQELRDLLTLEPLRTRVERLRCFRGIDDLTALTIAAELGDPRRFPTAPSLMAFTGLIPSEHSSGAKQARGPITKTGNAHLRRVLVEAAWQYRHHAFLGPALTTRQRGAPTVAIDIAWRAQRRLHRRYRVLATRGKPKQLIVTAVARELTGFLWAALTP

SEQ ID NO: 462014 - protein, 250 aa, unidentified
MEHELHYIGIDTAKEKLDVDVLRPDGRHRTKKFANTTKGHDELVSWLKGHKIDHAHICIEATGTYMEPVAECLYDAGYIVSVINPALGKAFAQSEGLRNKTDTVDARMLAEFCRQKRPAAWEAPHPLERALRALVVRHQALTDMHTQELNRTETAREVQRPSIDAHLLWLEAELKRLEKQIKDLTDDDPDMKHRRKLLESIPGIGEKTSAVLLAYIGLKDRFAHARQFAAFAGLTPRRYESGSSVRGRAG

SEQ ID NO: 462015 - protein, 346 aa, unidentified
MAKVSMIGLDLAKNVFQVHGIDATGKVVVRRQLRRRQLEEFLAALPVGVVVGMEACSGAHHWGRVIEQLGHEARMMPAAYVKPYVKRNKNDGRDAEGICEAMTRPTMRFVAVKSLDSQAVAVLHRTRRLLVRQRTMSGNAFRSALAEFGLVAAAGLKGLRSLMELLADKASAIPDKARMPLRVLAGQWERLNADICKLETQIVSAAKSDAVARRLMAIPGLGPIGATAILAAVVDARVFETARDFAAWLGLTPRQFGTGGKQRSGGISKQGDRTLRTLLTVGAASYLRARGAKAPWVRDLLARRPFKVVAVAYAAKMARMIWAMLVTGECYRAPDKSRSVAAQAPA

SEQ ID NO: 462016 - protein, 482 aa, unidentified
MKPKSPLGTNKTNDHAMQGRWQEMNRRQRRETMRKIQSEDLSLEVIHRNAAGIDIGNESHYVAVPPSRDSQPVRCYGCTTGELKAMADWLKQCGIQTVAMQSTGVYWVAVYDILEQVGLEVYLVNARDTKNLPGRKSDVQESQWLMKLHTYGLLRNSFRPVQEIRTMRTYWRQRNDLVQSAGRHIQRIQKTLTQMNIQLANVLSDVSGVTGQAIIKAILEGERDPHKLAAFRDSRVKASEGQIARSLEGNWQPDLLFVLKQEQDGYEFCQKQMAECDQQLKQYLQNREDRSQGAALPEEQRKARRQKKKGNKPQFDLRAELFRLTGTDLTRIDSIDVMTATTIISEAGYDMSKWETENHFVSWLRLCPDNRISGGKIIGKGRLPTNNRATVALRMAASTLRLSDTYLGAQFRRLRTKLGAPCAIKAMAAKLARLLYRMLRYGMKYLDRGAAFYDAEHRRLQIKHLKWKAANLGLQIVEAPAT

SEQ ID NO: 462017 - protein, 343 aa, unidentified
MPQPILAVGVDPAKRLHRAVAVLFPDQVILDVALPNACDAVANLDDRLTELANQHGAELVYGLEDHRRYGRLFCQVLTERGRELRVVNPLWTSRQRAFYGQDKDDAIDGRSIAAVVLRRHHDLPLATDFGEVAQAVREAERSLQDLDKARTRLINRLHLQLSDTYTATYEGFFGKLRSPLALRFFRQFPLPQDLVGHNVEMLASLLLDLAGGKVGPHKGANRLIAMRSKAQTILESSATMRARPRSLALQLKAELIRQLCDELLANHDRVTRLNRMLRQQLLPATGQTITTITGISTTLAAAIIGETGSITRFRSPAAFAVYNGTAPARASSGGRDRHRPRHD

SEQ ID NO: 462018 - protein, 389 aa, unidentified
MEAQTVSTLPPVAADHDPVRCLLAIELSKKSWIVAINTPLSEKISRYTLEGCDWKGLLELIERVRTRVAREVGRPVEMISCYEAGYDGFWLHRLLERQGVRSHVVDPASVQVDRRARRAKTDHIDAARLLRSLMAYLRGEPKVWSVLRVPSVAEEDDRRLHRERDRLIAERGQHVNRIKGLCAIHGIYDYEPVRRDRMRRLEQLRTGDDCELPPRLKAEIARELQRLELILGMLKGIEAERDAIALAENVSAHTNAKKIQNLVKLKAIGAEIATVLTGEVFYRPFNNRHQVASYVGLTPSPFQSGSKCRDQGISKAGNPKARSTMIELAWLWLRHQPDSPLSIWFRERVGNLKGRIRRITIVAVARKLLIALWRYLETGVVPTGAVLNG

SEQ ID NO: 462019 - protein, 360 aa, unidentified
MAHFAGLDVSIDETAVCVVDDQGMVLLQCSVATEPEAIAEALAPFAATLRRAGHEAGSLSPWLHPQLKALGVPVVCLETRQVRAAMSAQRNKTDATDALGLAHLMRTGWFRQAYVKTDGAYRLKLLLTHRRNLKRKFLDLENAIRHSLKSFGVRLNKVGRGGFEQAVREACAGDAFTAELMECMLTARAALWRQYLKLHKLAVGLVARDELCRRFMAIPGVGPVTALTFSTAIDDPSRFRRSRDVAAYFGLTSKRWQSGASIDVQGRISKAGDPDVRRALYEAASAMLTRYKGKTALKSWGQKIAKRCHKKAVVAVARKLAVIMHAMWRDGTAYADRPHAAGRPDDAPTAKERKLLGVLA

SEQ ID NO: 462020 - protein, 315 aa, unidentified
MLYDGIKGRIKTRNIQNNRHSVENIIRWLRLQHCGPEDVHVVMEATCVYHERLATELHDAGFRVSLANPHRSREFARGMGIMTKTDKVDAYMLACYAFLKKPHRWEPPAPEIRYLGALLRRRDVLLGDALREENRLEKYLSTDTPADIISSCRRMAQLLREEVSNIERQIKAHIKACPALRRDYTLLTSIKSVGPLLGMHMLVVLRSHNFTSAEQAAAFLGVVPIEKRSGTSVRSRPRMSKIGPPQLRAKLYMSALCGKIYNKRMRNIYDEMCLRGKPKMVAIGALMRKLVHWCYGVLKTGTVFNDESLKQVLST

SEQ ID NO: 462021 - protein, 484 aa, unidentified
MAKRKKSTFERLTKGPLNRKQRRELGRRLVSDDPGLKIIHPNAGGIDVGNESHFAAVPADRDAQPVQEFGSWTADLHRMGKWLQSCRIDTVAVQATGVYWIPLYDILTEHGIRVVLVNAQHTKNVPGRKSDVQESQWLMKLHTYGLLRDSFRLAENMEGVRTIWRLRDRHVKEAGRAVQHMQKALTKMNIQLANVISDISGVSGRAIIEAILKGERDPYRLADLKHERIQASREEVARSLEGNWRKDVLFELQQAVDSYQFAHRQMQECDGKLETYLAMLPTRVIDIAGQPNLQPTAVARKTKKAKKPKGNAPAMDLAAELKRISGVDLTSIDGIDVMGAQTILSELGTDLSAFATENQFASWLGLTPSKDISGGKVIGRSRRKVQNRVAMSLRMSASTLLNSKSYLGARYRHLRKHLPTAAAAVKAMAHYLALLVYRMLTKGQAWVDRGAAKFEQKRIDWELSSLQSKALANGFKLVPIAEAQ

SEQ ID NO: 462022 - protein, 374 aa, unidentified
MDQDSTIIAVVELSQSSWLVAGVLPGIERQPRKKLEPNAEGLLGLLHRWRDEAIRAGKEITRIAVAFEAGRDGFWLARWLEARGVEAHVIHPSSVAVSREHRRAKTDMLDTELLKRGFLGWLRGERGHCSMVRVPTIAEEDAKRPNRERECLVAERTRIVNRMKATLARLGIRSFKPTLRKAADRLATLHTPEGMPLPPNVLAELQRDMARLGFVVSQIREIEEARQKRLEQEPETGPHAMVRQLARVVGVGIETADMLVHEVLSRPMRDRKAVARYAGLTGSPDESGAKRREQGLARAGNARVRRGMIQLAWRFLLFQKESALALWYRARTADSRIGTRKTMIVALARKLIIALWRFVTTGETLEGVVLRPAG

SEQ ID NO: 462023 - protein, 440 aa, unidentified
MRLMYQRCAALDVHKKTVTVCTRWTQANGQVKSEVQTFGTTTPELLEMMDWLSEWEVTTVAIESTGEYWKPVFNLLEGNFEVILVNSKHVKQVPGRKTDVKDAEWLAELLSYGLLKASYIPPKPQRDLRDLTRHRVKLVQERARIVNRVQKVLEHANIKLASVASDVMGVSGRQMMAALVEGETDPAVMAELAKGRLRNKMALLEKALTGVVRPHHRFMLAQHLSHIDFLDEQIERVSNEIGQRVEGMSHRQGSDDSGPSGNESYLANDLLTWKESIDLLDTAPGVDKRAAEIVLAETGINMTQFPSANHLTAWAGLAPGNNQSGSKRRRAKTREGNRNLRQIMVQIAWAASRKKGSYAQALYRRLAGRRGKKRAIIAVARTLLESFWYMLSRNEPYKELSGDYFSNRRKEVRVNVLTKQLEKLGYAVQLEPVTLQLEPA

SEQ ID NO: 462024 - protein, 483 aa, unidentified
MGTIPLRRLRYSSPAPVTLIITEKVEGNKMARRKQRRKRLAVTDLPEQLQHVNLNAAGIDVGSDRHVVAVPLGRDEVSVREFEAFTIDLHALADWLTKCGVTSVAMESTGVYWIPLFELLEQRGFEVKSVDARQVKNVSGRKSDVLDCQWLQQLHTYGLLAGAFRPPDQVCVLRGYMRQREMLVQASSMHIQHMQKALQQMNLLLHNVVSDITGVTGMKIIKAIITGERDPKILARHRDQRCHSSAATIAKSLLGNYREEHLFALTQAVSLYETYQAKIVECETAIASYLKQQPNRTDDEPPPQDKSVRNRDRLRGGVDVRSQLYKMTGVDLFNLPGLAADTLLTLGGEVGFDMAPWRSEKHFTSWLALCPGTKKSNGKVLSRKTKRSANRAAAAFRLAAASLSRSQTALGAFYRRIRVRVGPAEAITATARKLAVLYYSLLKHGSAYVEIGQTAYEQKYQQRRLNSIQKQALAMGYHLIPAA

SEQ ID NO: 462025 - protein, 356 aa, unidentified
MSYDVKYIGMDVHKEAIVIAVQNESGKLVMESVIETKASSILQFLHGLRGELHVTWEEGTWAAWLYDLLQPHVQHIVVCNPRRNALLKEGNKSDKVDAGKLADLLRTGMLRPVYHGENGLRTLRELGRSYQTISKDLTRVMNRLKALYRGWGIPCAGTQVYAARAREKWLSKIPHTGVRRRAELLYQQLDGLQALRRNVRPELLAESRKHKAAKLLRQIPCIGPIRAARLIGLMQTPHRFRSKRQLWTYSGLGIETHDSAQYCFVRGQVQRSKKPQQVRGLNRNHNHEMKEIFKSAATRASCGRGPFHDFYTGLLAKGMKPEMARLTLARKIAAITLTLWKKEERFDVEQLKTQAA

SEQ ID NO: 462026 - protein, 370 aa, unidentified
MLDTTTFIGLDVHARSIKAVSLDVMTGEVRAATFGYDAGAVAEWVRSVDPKARCVYESGVTGFDLQKRLSGLGVDCVVGAVSKMIKPSADRRRKNDRNDAEFLARMLSVGNVVEVWVPDDECEAARDLTRALEDARDDLSRSKQRLSKFLLRHGLVFDERTPTGRRKGNWTRAHWSWIESIRFAERADNDVLAYYVDAVRRAAEEKARLEGLVEAEARKPRWRKRVDSLRCLKGVDTASAADLVFEAGEFSRFRNARSFAAWVGLTPSEHSSGESDRRGAITKAGNKHLRKTLVEAAWHYLTCSGRPKDLARGQAPDRGARRHAAKGVRRLVERREALLARGVHGNKANVATARELACWVWAVGLMAEEA

SEQ ID NO: 462027 - protein, 330 aa, unidentified
MSTVAGIDVSAKKLDVACLTGKDKPVFAQFEQSQTGHRKLVAYLNKRGVEAVVMEATGIYYLDAAMALSRADVPVSVINPRSAHHFAEAMLQRSKTDRIDAGLLAEYARRMDLTLWQPPREDWLALRDISRRINQLTGMCTAEKNRLHALKAQRHTSRTLIEEVEAHIELMEGSIQRLTASALALIERDADLARYRSCLITTKGIADASAVTLIGELCLLPRDLRSAQISRHAGMDVRLTESGSSVDKPGRLSKAGNTYLRAALHMPALNLVRYDERAKAHYEALLGRGKKKMQALCAVQRKMLTGLWACMKIGEPFDSSKLFAIEPNNA

SEQ ID NO: 462028 - protein, 409 aa, unidentified
MDVMHARCAGLDVHKKTVVACVRIAVAGSVHYEVRTFATTTPGLQALATWLRAAGCTHAVLESTGVYWKPVWAVLAEDVTLVLAHAAAVRNLPGRKSDVQDARWLADVLAHGLVRASFVPPPEQQALRELTRTRKQLVREVTAHTQRIHKVLEGANVKLASVLSDVLGVSGCALIEGLAAGETDPERLADRVHPRVRGKRAAIVEVLVGGRLQPHHRLLLQQHLQVITSLEASIAALDTEIAARLDPFREAVDRLVTHPGVSETVAAVILAELGPDMTRFPTAGHARSWVGLCPRLDESAGKHRSRRIRKGSPWLKPVLIQSAWAAIRVPNSYHRALYGRLVRRSGKKQAIVAVAAALLTAIYYMLTTDQPYHELGPHHLTETDRHRMAQRLTKRLQHLGYDVTLHQAA

SEQ ID NO: 462029 - protein, 383 aa, unidentified
MDALHTTLRGQNKTVGGRLYMAFELGEKSWKLSLGDGQRAPSRCTVAAGDTTAVLTAIANARARCHLSADTPVYSCYEAGRDGFWLHRWLTEQGIANLVVDSASIEVNRRARRAKTDRLDSDKLLSMLMRYHTGERRVWAVARIPTPEQEDDRRLHRELERLRKERTAHTNRIRSLLVLHNLRVRYVGGRIWTHWWTRQREQLPPGLRAEIEREYERLTLLRQQIRRLEAQQDQQVRSGAHPGMALLAQLAGIGTGSAWTLVRELFGWRQFRNRRELAGCLGLTPTPYASGTSEVELGISKAGNRRCRWLMVELAWSWLRWQPDSQLSHWFNQRFAGTGKRLRRIGIVALARHLAIALWRYLEHGEIPDGAILKPRPLNIANT

SEQ ID NO: 462030 - protein, 315 aa, unidentified
MSEEKRFVGIDVSKRRLDVAVRHGEEKSFPNDPAGIRGLVAQVKALKPSGIVLEATGGLEMPLLSALAASGLPVAAVNPRQVRRFAQAAGILAKTDRIDAQVLARFAEAMKPESRPVPNETEQLLSAMITRRDQIVQMIVQEKQRMSSALKPLIPAIRRHLRRLKEDLKSLDKDLADQIRSSPAWREKENLLRSVPGIGSVVACSLVADLPELGTLDRKQISALVGVAPFAVDSGQRRGHRRIWGGRAHVRRKLYLATLVATRHNPVIRAFYRRLLAAGKRKKVALVASMRKLLVILNVMMRTHQAWNPNLASHA

SEQ ID NO: 462031 - protein, 317 aa, unidentified
MLQTSTNTAGIDTSKLKLDVAVHGRTECWQVANALPGWRSLVVNLIKAGVARVGIEASGGYERGVVEHLRAAGFVVLVLQPSQVKAYARVHLRRAKNDALDAVLIAACAATIDAPRIAPDPRLVKLAGYLTFLEQTEEDIARFKTRLEHVDEPGLRRIVTNDIARLKARRSAQILLIERQLRAHPDLGRRLDLVLSVPGIGKRTALALIIRMPELGRVSREEAAALAGLAPFDDDSGKHKGQRHIAGGRGRLRRSLYAAALPAAFRWNKALVELYARLIARGKAHNASLIACARKLLVYANTVVQRGTPWIESAVRV

SEQ ID NO: 462032 - protein, 369 aa, unidentified
MTECTWVGLDVHLDSITAAVLEGDAPQPEGVRLSGDLMEVRRLFRRLSLRAPVRSCYEASGAGFVLQRVLARDGFPCDVIAPSLIPRRPGDHRKTDRFDAIMLAKLYRSGHLTPVHIPSEEQEALRRLLRLRYSYLCYSTATKHRISSILRHHGLVYREGKSTWTKKHRQWLTRLREQLHGPIHTALAAELEHLEYLEMQREAFDAELLGYAQSPPYRLPVEALCCLRGVKVLTALTLLCEIDDIRRFRSPRALMAYFGLVPMEHSSGERERRGPITKAGNIHTRRLLVEAAWNNRHRSGADLILRRRRQGQPPEIVAIALKAQHRLYRKFHRLDQRKHRHVAITAVARELCGFVWAILKAAAPQGSMS

SEQ ID NO: 462033 - protein, 408 aa, unidentified
MDLTPLHKRVIALDVHQAKITACSIVEHDNGRVEVTKHDFGAFKRDRRALTKWALEIRPEVVVMESTGVYWKSPFAALEAVGIIAWVVNARHVKAVPGRKTDMADAQWLATLARAGLLRASFIPPLPMRQLRLVARQRQKLVGMCSAEKNRLHKVLVDAGIRINVLVSDVHGTSARAMVKALIAGKPMHEVLDCKGRLRASREELFEALSTEQFSAVHRFVAEEITQHIEQIEQRIARLDQYLLDGLRPWQPQLKLLQTIPGIDEQGAAMLLVEIGADMSAFGSAERLASWVGICPGNNESAGKRKTGRIRKGNAWVRRLLCEFAQAAARTRCALKAKFDALAIRKGHKKSIIALAHKMLRTVYAMLANGTHYQDKEVDYEALNVQRNAPRWIRMLKKHGFIPTPACA

SEQ ID NO: 462034 - protein, 429 aa, unidentified
MRTESTPGARGPVFCGVDTHADSHWLCVLDWRGRKVLSRQFPADAAGYEALAGAIAAAGEPACVAMEGTSSYGAGLTRHLASLGMPVREALSPARMQRRRPGQGKCDEADAERAARAAMSGSKLGTPKSQDGWVDGVRCMLAARSGAVKARTSAINTARSLLTTAPEGLRSRFRGMGGPRLMEELPSVRAEGALGAALGALADLWEAARDAALDMERAIEASLEENCPALLAMYGCGPVSAAKLAVAAGDNPGRLRSEASFAAICGACPIPASSGKTVRHRLNRGGDRQANSALHEIARQRVMRDPETAEYAERARGRGKSDREVMRCLKRYVAREAYRALMHPHEIRRPEDASELVAARRAAKVSQARAASILGTSEKYISMLERGQRELRPIRRAYEAWVEAGLPLDWDRRAFEAERKMDSKKHLAK

SEQ ID NO: 462035 - protein, 316 aa, unidentified
MEAPDIFIGIDVSKERLDIGTYPSGQCQSVTHDDASIQGLVGQWKELRPRLIVLEATGGFERRISRALVSAELRFTIVNPRHVRNFAKATGQLAKTDRMDALILARYAEAVRPAVRPLPDEATEELKALTARRRQIIEMMVAEKNRLGSAPKAVKKRINSHLRWLEAELAGANKDLDQAIRQSPIWKENEDLLQSAPAIGPTVSRTLIAELPELGKLDRKQIAALVGIAPINRDSGKFKGRRSIWGGRSTVRACLYMAALVASRHNPTIHAFYKRLRTAGKCPKVALVACMRKLLTILNAMIKHRTPWSELNRQSA

SEQ ID NO: 462036 - protein, 388 aa, unidentified
MHVYVGVDIAKELHYAAIMDSDGVVSKPFSFENNDKGFNLLLSHLAPYNKESILIGYESTAHYQENLAYFLKSLGYRTAEINPLQTTALRKANIRNTKTDSVDARLICLALMNHHIQGDQRDSVRLDDLYQLCKMRMDTMKKRTTCKIQFVAIMDRIFPELASFFDNNLHTNTIYRLIESFPLPSQIKKTRIDILTKLLHKASRGHFKKEKAQKLKDLADISVGIPSDIFAFQAQQLVHQIEFYTDQIQTIEERINTNPDVMSSPLMTIPGIGTFCVACILSAIKNINDFDAPCKILAYAGLDPVIRQSGKFTASHTRMSKRGNSLLRYALVWSAGNVVKNNHTFAEYYRHKTEDQGKSHYQALGHCAKKLVKSIYHMLKYNESFNLD

SEQ ID NO: 462037 - protein, 345 aa, unidentified
MEHYIGLDVSLKLTSICIVDRRGKVEREGVVASDPEAIATFIKLHAPHVVRIGLETGATSTWLWTELNKMGLPVICIDARHAKAALKMQINKSDRNDAVGIARIMQCGWYKEVCVKDLDSHATKALLVSRALLVKIKRDIENQIRGLLKNLGLVIGRAKMNMFAVRAAQLAEDRSGLFAAVDPLLKAREAVEQQILDLDRKVLRLARNNAQVRRFMTTPGIGPVTALCFLATIDDPARFKRSRSVGAYAGLTTRRYASGEIDWTGRISKCGDKMLRSYLYEAANVLLTRVAKWSALKAWGVRLAKRSGLRKAKVAVARKLAVILHRMWIEGTEFKWSSKDAAQPA

SEQ ID NO: 462038 - protein, 316 aa, unidentified
MIVGIDVSKLTFDASWVVDEKLMHRCFDYTDIGIDILLSLVPKDTHVVMEATGVYHSRLALRCFDAGLSVSVVNPVTIKRFGEMLFRRAKSDKADSELIRAYAIKHNPAFWTPSSESINDLKQALSWVDDLARERTMATNREEAVLHNAHPSKFVLGEIKDFRKYLKERTKKCDNFLRATVKKHFPELYDCLQTIPSVGEKTAIEMIVVTEGFSRFDSDKALAAYVGVSPTTYSSGTSVRGRGGISRASRGRTRQCLYMCSWTARRTNPACAAMYERMVKAGKPPKVISVALAHKLVRQIFAVGKSCTNYNPECAF

SEQ ID NO: 462039 - protein, 443 aa, unidentified
MTETVKGNPAEPEFAAFVGIDWADQKHCWKLAVAGTQATESGELKQTPEELSNWAAALHHRFSGRPVAVALEQSSGALIYQLSQYPHLWLYPVHPATAAHYRQAFYPSGSKSDPTDTGLLLELIVHHRDRLRPLAPETPETRLLRMLVEQRRQLVDEKTRWNNRLKAALKIYFPQVLDWVDIDTIIGCDLLERWPTLQQLQRAHPGTLRKFFHEHNCRAEALMTERIQAIYQATPAVQDTALLEGETASAGSCVAQIRTLLASIAKLDGQIKSRSSEHPEASLFAEVPGAGAALQPRLIVAFGTQRDRYANAGELQAYSGIAPVTESSGHSRWVHVRWACPTFLRQTFHEFAGCSISRSEWARVFYDTKIAAGKSHHEAVRALAYKWIRVLFRCWKDGRPYDEQTYLRALAKRNSPLKPSAGSPTKVVWKTVGGFNKLSIENS

SEQ ID NO: 462040 - protein, 381 aa, unidentified
MQMKARKQEETHLTIGLDLGDKTSHFCVIGKNGEVIEQGTVRTNPSRFEKHFEKYASSLIAMEVSTHSRWASQLLQSLGHEVVVANASKVQLITKNSRKNDRVDARTLARLVRADRQLLHPIQHRSNEAQEVLALLRARETLIAARTKMINCVRGLVKPTGERLPRCTARVFAKRMEASIPKALQSAVMRLLEQIQTITATIQEYDHSITALAGEKYPESRLLRQVPGVGPLTALAFMMTIGDKNRFERSRHVGTYLGLTPRQHQSGESDPGLGVSKEGDNYMRKLLVQCAHSVLNRAPDSDLKRWGLALMARGGKHGRKRAVIAMARKLAVLLHRLWVTGEVYERFRQEPTPPSLEAPAKKAAAKEKRISAVSTLQVAMA

SEQ ID NO: 462041 - protein, 358 aa, unidentified
MAGKVTETAVVGGVDTHKDLHVAAVVDQNNKVLGTQFFSTTRQGYRQMLAWMTSFGALKRIGVECTGTYGSGLLRYLQNAGLEVLEVTAPDRMERRKRGKSDTIDAECAAHAAFSGIRTVTPKTRNGMIESLRVLKTCRKTAISARRVALQTIHSNIISAPDELREQLRNMTRMQLIRTLGSWRPDASEYRNVTNVYRISLKSLARRYLELHDEIADLDVMIAAIVDELAPELIKRNAIGYESASQLLITAGDNPQRLRSESGFAALCGVSPVPVSSGKTNRYRLNRGGDRAANSALHIIAIGRLRTDDKTKEYVARRVAEGHTKMEAIRCLKRYISREVYTLLRNQNRQINSIPITA

SEQ ID NO: 462042 - protein, 391 aa, unidentified
MIFVGIDVAKDKHDCFILNSEGTVLADVFTIANNRIGFETLLSRIQSCSQGESKIKVGLEATGHYSYNLLGFLLDSGLATYVINPLHTNLYRKSLSLRRTKTDRIDARTIAMMLMSDVDLKSYSNTAYHNEELKSLTRYRFDKVKERAKLKSSVARLVNILFPELEKLVSSLHIAVVYALLSNYPGASYIANANTEELAEILCTASKGRYTKSKTAEIQVAAGVSIGSKMPAKSMELKHTIALIRELDKEISEVESAIDKITSQMDSPIFTIPGIGRHMGAMILAEVGDFSNFASADKLLAYAGLSPSTYQSGQLQNCYAHMEKRGSRYLRYALFNAAKYVCLWCPTFSAYLEKKRSEGKHYNVAISHAAKKLVRLIFAMQRSGKAFLADY

SEQ ID NO: 462043 - protein, 404 aa, unidentified
MAKYHIGVDVSKRRHKACIRNLFQDSYSEVFSFDVNHQGFEKLLVTLEKLSQNKEDFIIGVEATGNYGVTLVYFLLSHGYKVVEINPYRANQFRKAEGKKAKSDRIDARSLATIISLENHKPLSLPDPVLDNLRELTRFRADMVKDRTSLVNQLHETLTTIFPELATIFSRLDSPTCLSLLIAYPGPGYISRAGEAKVAESLRIASRGRVGQTLVKGLVKVAQNSVGVLQKQPSLAIRVFILGERIGTLTGAIERVEKEIADLFHKLPYKPEDFLVGDITSLAALISEIEDINRFPTLKQFLSHFGWCPQSFQTGNYNREHPRMSHAGNKHVRRLIWMLSIVSVRTVPRYRAYFQRRVAEGKSKMHIIVAVGRKLLSAFYAILKKGIPFDPNWEVNCQFALVRH

SEQ ID NO: 462044 - protein, 348 aa, unidentified
MAMLADSADAVIGVDTHTDTHTACLLDSAGRELATVTVEASPDGYAALLDWAVQQAPGPRLTWAVEGCRSHGAGLLRCLLAAGHHVVEAGRPERVGRRPGGKSDPADARLAAREALAATVHAQPRGDGDREALRILLVAREHANSTRTAAINLFKSLVLTAPDQLRESLRRLSTPRQIAACSVLRAHPSHSATERVLRQTLRSLAQRIRLLDKEIRANERQLRGLVSTMVPALLEEPGVGPVSAAHLIVAWSHRGRCRSEAAFAALAGVSPLEASSGRVKRHRLNRFGDRQLNRALHTIVNWRMLHGHETTQHYLTRRRTEQKSDAEIRRCLKRYTARHMFRLMETAE

SEQ ID NO: 462045 - protein, 476 aa, unidentified
MGKGSGMTRGDRRRNARRERLRAMLPRDGAVIGIDLGDEKQAIAVVDHDVRVLARKTVRVKAFRLGEALEWAVAQARGKGFTAVAVACEPTGARWLQVQRLCAERGLPLVCIQPLVSHIAREQQDYTTHKSDESDCVMIARLATELHCYIPEELDEAWAQLRHLGRRRAQLITSATASVQRVRDFLSVAWPVAPEACKHPFESVTWLAAMQVVTSRCGGQPEKLAATGLAEFTVLVRQAVAGWGGQRPAGPVCRAVFAALASTEGVVVSHRRGLLRRCADELGDLRRIRAQLRAVEAGMVAVLGELGLSRLADIPGLTAADAAAILAETGDPCRYDSSSSLARHAGLSPSGNASGAFEGQAHISRRGRPGLRLTVWRAIWPLLSCNSVMAAKYAAMIAAADAAAAQAAQAQSGTGSRQGSAAAAARARRAKARVACAAALLRWIYSIAGCDTGWDPDVASGAASRPHAPRYQPEAA

SEQ ID NO: 462046 - protein, 347 aa, unidentified
MLADRLDYVIGVDPHRDRHALAVVEVRSGGVLCETTVEADSAGYQAALLLADAHAPGRRSFAVEGAGSYGAGLTRFLSDHGETVFEVGRLPRERRSGGKTDALDAVRAARSVLAKSRPALPRAKGEREALRALMAARDGAVTAKTAALSQLRGLLVTAPEPLRAELRPLTRARLLAHLTASRPDRRQDPELRGTQLALKAVARRIRQLASEERELAREIEQLTRSLAPQLLAEPGIGALSAAQVVLSWSHPGRIHSEAAFARLAGSAPIPASSGQTIRYRLDRSGDRQLNRALHQIVVTRRRMHPPTIAYIERRTREGKTRREATRCLKRYLARNLYRLLEHPPITT

SEQ ID NO: 462047 - protein, 397 aa, unidentified
MYIVGIDIAKRKHEAAVIDGEGTVIIKPFSFTNNCSGYNRLLAMLAKAKLPLDEVSFAMEATGHYWLALFTRLQKEGFRVQVINPVQTNSIRSFYIRQAKTDPRDALLIAEVIRFGHFSESTLHPENIYELRELCRGRHAIVSMQADVKRKVVALLDQVFPEYETAFTNMFSDTSMAILQTCPTPKELSEMPLEELCHLIEVSSHKRFRMAKAQELQALARNSFGFAMAGDVFSTMIRLYVKHLDFLKQQVREMDRKIAEIMDTLDTPITTITGIGPTLGAYILSEIGDISRFSSAAKLAAYAGIDPTMRQSGEYNGVRNRMSKRGSPYLRHAIWLAASSAVLHDPALKLYFQKKRDEGKPYMASVGHACRKMVSIIYAVMRDNKAYTPCIPNEISA

SEQ ID NO: 462048 - protein, 370 aa, unidentified
MRQSTAFVGLDVHKDSISVALVTAEGDAVEIGQIVNNPTAVVKMVRRLAVKHSALAFAYEAGPCGYELYRQLKDIGHECLVAAPSLIPKRPGNRIKTDRRDAMALARLLRMGELTAVWVPDPHHEAVRDLVRCREDCKQIERRFRQRILAFLLRHGRHYDRSNWTQAHRRWLMSQQFDHAELQTTFTHYLHGIVESEERIIHLEREMAEALDSWSLAPLVRGLMAMRGIKLVTAMTLASELGDLSRFGRASELMSFVGLVASEHSSGLTRRQGGITKSGNRHVRRVIIESAWAYRHKPYLSAGLRARGKDASEAVRGIAWKAQKRLHKRYHRLTSVGKPAQVAVTAVAREEMGFIWAIGGQVMKEQHSLA

SEQ ID NO: 462049 - protein, 339 aa, unidentified
MNITTVGLDLAKNVFHVVCFNEHNKEVKKRMLRRNQMGQFFAQLPPCLVAMEACATSHYWGRKLTHMGHDVKLIPPQHVKPLVQGNKNDYNDARAIAEAVNRPRMSFVAIKTVEEHDIQAIHRIRSQCLRDRTALSNSTRGLLGEYGISFTKGLATLRRLIPEFLEDADNGLSFRFRNILARRYEQLVELDEHIAFYTKELKLLSQQDDGCQRLQTIPGYGPIIASAFRSTIGNGQSYACGRQAAASLGLVPRQHSSGGKNVLLGISKRGDKYLRKLLVHGARAVVLHAANRDDSLSRWIVRLQERRGWNKTVVAVANKMARIGWAVLRHNTRYEPNFA

SEQ ID NO: 462050 - protein, 355 aa, unidentified
MTVTIVEEARPVTCRTAITGGVDTHADTHVAAALDPVGGLLGVEEFPATAAGYARLLGWLGGFGTVALVGIEGTGSYGAGLARYVTAAGVRVVEVDRSDRQDRRRQGKSDPLDAVSAARAAQSGRARGAPKGRDGAVEAIRTLMVARRSAAGERTRTINQARALVLTGPDDLRARFARHKPAALITGLAALRPRPGDVAGHATRIALRELGRRAQFLDGQLERLDELIVPLVTARAPGLLAIYGAGPRTAALLLIAAGDHPGRLRSEAAWAHLCGAAPIPASSGKVTRHRLNPGGDRQANHALWRIVFTRLGSDPATRAYAERRTAEGKSKAEIIRCLKRYVAREVYRHLRPAAG

SEQ ID NO: 462051 - protein, 328 aa, unidentified
MLYLHIALGIDIAKDKFDVALLNNGSSKLAQFENNKTGFRKLTKWLKKHSGKKCTACMEATGRYGDELANYLYNQNHSVSVVNPARIKAYRQSRQQRNKTDREDAKIIAHFCATQQPRLWSPPPAHIQELQALTRRLEALKDDRTRELNRRVSGIKSKIVQKDIEKHIAFLDKQIVKLQQQINALIDQHPDLRRKKELLTSIKGIGDITAAAFLGEVTDIDQFESAQQLAAYAGLTPSQHQSGKSISKPGRMSKQGNPRLRKLFYMPVKSAKRFNPIVKRLVTRMEKAGKPYHTIRGAAMRKLIHLAYGVLKTGQPFDPNYVNLQIPS

SEQ ID NO: 462052 - protein, 405 aa, unidentified
MNAVGIDVSKGKSMVTILRPFGEIVSSPHEVRHTSDQIDDLIAKIRSLQGDTRIVLEYTGRYHEPIARWLTDAGLFVSAINPKLIKDFDNDSLRKVKTDKADSVKIARYTLDKWHKLKQYGFMDELRNQLKTMNRQFGYYTKLKTAMKNNLISLLDQTFPGANTFFDSPARSGGSQKWVDFVDTYWHVDRIRSMSLSAFTEHYQKWCKRKGYNFQPDKPEEIYDSIRNIIPVLPKDDVTKFIVRQAVTQVNTASAATEELRTRMNDIASQLPEYPVVLAMKGVGTSLGPQLMAEIGDVTRFEHKGALTAFAGVDPGKNDSGTYSQKSVRTSKRGSASLRKTLFQVMDCLIKTMPQDDPVYAFMNKKRSQGKPYYVYMTAGSNKFLRVYYGRVKEYLSGLSEMAEK

SEQ ID NO: 462053 - protein, 367 aa, unidentified
MIVNEVAKNVEKIISIDTAKNSFQVLVVNQKTGKKKNTKVQRSKFVEYILKQGPCLIFMESCSASQHWARLFESLGFTVKLIAAQHVKAFLRNRRVKNDERDAEAIYKCGIQPDTKFVRIKTVEEQTVALLHTLRKAAVSQRVELSNRIRGILAEFGIVVARGRGSFNSEIEALFNECEKIHDVNLRVAISSLFEDYHRLEQREKELSEKIEALNKDNELVKIALTCPGVGSLTASAIVAEVGDASQFRNGREMAAWNGVVPSQHSTGGRSTLGGITKTGNIYLRTLLAQCACAVIQKASRHLEQGKDTHLDRFALRLKLNGKPVKKLMIAVANKIIRILWAMLTQRKTFENKANEISDTSAELQLA

SEQ ID NO: 462054 - protein, 297 aa, unidentified
MAQSRTRYVGMDVHKASIAVAYGAQDYGAEGISLGTVGTRQCDIDTRIRPLQAKSQPLVFVYEAGPCGYWLYRSLTTTGHGCRGVAPSLIPKKSGARVKTDRRDALQVARLMRSGNLTPVYVPAVHDEAMRDLSRAREATRHDRKTATFRLKALLLRHDRRSTGRATWGPAHLRWLREVVGPTPAQHIVFPEEVRAVTAHPDRRQRLAQERHAQGTAWRRGPVVDAVPALRGVQLTVAVTPVAARGALTRFEPPRQRMHDRGLTPSESSRGERRRQGGLTKTGHTPARRALVEGAWA

SEQ ID NO: 462055 - protein, 436 aa, unidentified
MLEETQDQQEVIARIAALDIGKAELVCCARLPSPTGSGNRVQEVTTYPTMTRSLQVMADRLLELGVTRVVMEATSDYWKSPFYLLEAHGFDVWLVNAKDVKHLPGRPKTDRLDAVWLCKIAERQMIRPSFVPPKPIRRLRDLTRYRVALVADASAEKNRVEKLLEDAQIKLSVVASDIFGVSGRAMMNALISGQRDPKVLAQMARARMRTKIPQLEEAFHGYFTDHHAFLLSSMLTRIDQISANITALDTKIEAEIAPFAEAVERLDRIPGVGVIAARVIIAEIGVDMSRFPTPAHLASWARFAPGVKESAGRKKGNGATGHGNRYLASVLGEAANSAARTDTFLGERFRRIARRRGKKRATVAVGRSILTIAWQLLCDPDARFHDLGSDFYDTRLGTERAKRNHVHHLALTPDGGHGVMRLLDRPRSGLSIASRR

SEQ ID NO: 462056 - protein, 360 aa, unidentified
MLYLAIDQHRKQLTVNLRNEAGDVLLRRQVSTQWPRVREFLAEVQKQALPEEGFVVILEVCGFNDWLLKLLVEYGCRETILIQPEKQSKKKTDRRDANTLGEILWVNRQRLLAGKTVQGIRHVQPASEQDAADRQITALRKRLGQLRTRTINKVKHILRKHNLEQGCPTKGIDTIKAKKWLGELALAAIDRLEMDQLLAQWKLWDEQIKKVETEIVNRHAESKTAALLVTIPGAGAYGSLALASRIGPIERFPRPGSLPNYWGLTPGCRNSGDTTDRLGSITKQGSTMARFILGQLVLHVLRRDAWMKAWYGRIKRRRGSKIARVAVMRRLATIIWHMVKHQQPYVIGGPPQKKLTEQAA

SEQ ID NO: 462057 - protein, 349 aa, unidentified
MTQCKIISVDLAKDVYEVALANQACRIMERKRLNRAGFRKLLMTQPVSLVLFEACGSAHFWARFAQDAGHAVKIIPAQYVRPYRRRNKTDRADAEALLEAHRCEGIQPVPVRSVEQQQIQQLHRLREQWKKARVARINLLRGCLRELGIFLPVGAARATAGVRDAIDSEVLPAPLAATFCVVLDELAFYQSAIDNVERQIAVLTADSDAVRTLQSIQGVGLLTSTALVAAAGSPEHFASGRRMAAWLGLTPREYSSGNRRFIGRMSKQGDAYVRTLLIHGARSVLIHARSKHRAGRPLNRLEQWAVRTHGRVGHNKAAVALANKLARICWATWKHARTYDGNHISQRAA

SEQ ID NO: 462058 - protein, 356 aa, unidentified
MTSTKKYVGMDVHKESISIAVMNSVGKIVMECVLETKASMILQFINGLRGDVRVTFEEGTWAAWLYDLLKPHVSEVLVCNPRKNALLKDGSKSDRIDARKLAELLRGNHLKPVYHGEEGLRTLKELARSYLTISKDVTRVMNRLKALYRSWGIACAGAQVYAPRHRSEWLGRISEAGVRRRAEHCYQQLDVLRLLRQQVRRDLLLESKKHQAWKLLRLIPGIGPIRAALLIALIQTPHRFRTKRQLWTYSGLGLETHDSAQYRVVEGQLRSKKSVTLRGLNQDHNHDLKDIFKGAATRVSSSSSGPLHDFYEHLLAQGRKPTMARLTLARKIAAITLIVWKKEVHFDASYLTSQAA

SEQ ID NO: 462059 - protein, 371 aa, unidentified
MKKRSSSQKIQRRAVKTKRAQESVTIGMDLGDRTSRYCMLGSDGEILREGQVQTSKAGMMETFGSLGRARIAIEVGTHSPWVSRLLGSFGHEIIVANPRQVKLITESSRKDDRLDAQTLARLARIDPQLLRPIQHRSETAQTALTVIRVRAALISVRTSLVNTARGLAKAMGERLPKCDADQMGILRAECVPPKLRQLLEPLLKEVESLTEKIKDSDREIEQIARKDYPETALLQQVGGVGPLIALTFVLTIDDKNRFQRSRDVGCYVGLRPRRSDSGQRQPQLRITKEGDPYLRTMLVQGAHYILSRRGPDTDLKRWGLRPTERGGKRAKKKAVVAVARKLSIVLHRLWVTGEVYEPLRNLRDLRKKSAA

SEQ ID NO: 462060 - protein, 356 aa, unidentified
MNKRTKLDFSSQPIYIGLDVHKKSWSVSIFTQHGEYKSFSQTPKAETLINYLQRHFPGAQYHSVYEAGYCGFWIHDQLREKGIQNIVANPADIPTQDKERRNKRDRVDCRKLARGLRSGDIKGIYTPPRWKLEDRSLIRTRLSMGRKQGRCKNQIKSMLLFYGVEIPEQREMGHWSRRFIRWIEGIRMQRASGDVALQIHVEELCHLRQIIAKLNRAILSLSRTEEYKGWVSLLRTVPGISTLSAMIVLLELGEINRFPSLDHMCTYVGLIPDIRGSGEKEHVGGMTQRGHSYLRWLLVEASWVAVRKDPAMMEAFNEYCKRMKKSKAIIRVARKLLNRIRYVLKNKAEYVPCVIE

SEQ ID NO: 462061 - protein, 352 aa, unidentified
MTIIGVDFHPEFQQIASVDSDTGEFQEKRLSHREEAENFYRTLAGQKVRVGMEASGHARWFERLLSELQFELSIGDAAEIRTRRVRKQKTDRQDARLILQLLLEDRFPQIWVPSWENRDLRQLLWHRHRMVQARTRIMNQLQAVALNEGLRCKKRLWREHGRQQLESFRLAPWASRRRRDLLELLDRLNPTIAELTQAIEQEAEKCPPAKRLRSHPGVGALTALGFVLIIGEADRFHCGKQVASYLGLVPLEDSSGNRRRLGHITKQGSSILRFLLVEAAQVTVRSIPEWRSKYFHLAMRRGRKIAKVAMARKLAVGLYWMWRKGWNYEQLTKFGSHAGQPGHRHGVQSNTE

SEQ ID NO: 462062 - protein, 358 aa, unidentified
MSTYYIGADVHNNSTELAIEKRNKIVARYSVPTTIPAISNVLDSLQGTKYLAIEEGPMAGWLYRNLNKKVDKFIASDPRRNKLISADGDSDDRIDATKLASLLRGNYLRAVYHSEDDQRCQLKHWVALYHDRVRDAVRQINKIRARCRMHGVQIPRLVLRDSSRRSQWLTKIKHPALAKQLNMLWIGYDATAKQTRVAKQQLIELSKKYPIVHFWKELPGIGLIRATTLFAFMDIPWRFKQKNKLWKYCGVGLQRSASGTDKKGRPKPARLQLPWAVNRTLKNTVLGAALSAINQKSNVFRDYYERMVKDGVITSNARHAVARKLLTVMWGMWKSSSRFDENLLCIESSRTTASALSR

SEQ ID NO: 462063 - protein, 340 aa, unidentified
MKHSVVGMDIAKRVFQLHCVAADTGEIERIKLRRDEMLPFFAQRTSSLVAMEACGSSHWWARQLRALGHEVRLLAPKSVRPFVHSNKTDAADARAIWTAVQQPEARLVGVKSEQQQAILALHRVRAQLMKFRIMQTNALRGLLYEFGEVLPEGSVALAKSLPLALAALSERVPRMLIDTLHEQWARVQSINAEIATIERRLASALRESEACRQIAAIPGVGLLTATAAVAAIGEANSFASGREFAAWLGLVPRQTGTGGRVRQLGLSKRGDRYLRTLLMHGARAVIARGKHSPWVAGLLKRRPYSVVVAALANKLARTIWALLAKGRAFDPAVFNVSPQA

SEQ ID NO: 462064 - protein, 391 aa, unidentified
MSMYFAGIDISKYKHDCCIIAAADQSVVAKFTFKNNKEGFDQLFTTINSLSSPEDIRIGFESTSHYALNLELFLENASLTFMEVNPVLISEYKKSTTLRRTKTDSVDCESIARWLMTVEYKPHSKGFYHSYSLKSLTRLRDRLVRQRSLYLVKLTNVLDHTFPEFKPFFNERFSKTALYLLENYGSAENMSAMNETDYNEIRRISHGKFSPQQFLELKRLATNTVGINNSIFDVELESLLSLFKSLVKEINSLEGEIIRLINEVRPHFMTIPGIGPISAAVIYAEYGDISNFSSPAQMLAFAGIEPSVNDSGTESHGGKMVKHGSSPLRYVLLNCCLPLIRFDMTFATYYAKKRHEGKPHRVAITHVAKKLIRVIFALEKQNIDFNSQKSR

SEQ ID NO: 462065 - protein, 360 aa, unidentified
MTKIKELDFKGTTIFCGLDVHKVSWRVNIRDTELELKDFTQPADPNLLHKHLTRNYPGAKYKVGYEAGFCGFGIQRELSALGIECVLLNAADIPKGDKDRRQKNDKRDARSISQELSTKKDLRSLYVPSPAWEHARTLVRNRQQQISDSTRCKCRIWHFLYFSSLPIPDKAETGQYWSRKFIKKLEDMDCGGSAELKAALQLKIQDHLHKREMVLQSTRAIRKMYRQEAYWPLMQLILSIPGIGEINAAIILFELQDILRFKTFDNLCSYVGLVPDTDDSGETKKNKGLTHRRNTYLREALIESSWVLVKKDPAMLMKYKDYCKRMHKNKAIIKITRHLLARISYVLRKQTPYVSGLVAG

SEQ ID NO: 462066 - protein, 490 aa, unidentified
MITIRHRAKLSKGGEMAALQKADEKLNRQQRKDLVRRLWSSNPGLDVVHRNAAGIDVGNEEHYVAIAPTQDEVPVQRFNCFTAELIRMAVWLKGRGVQTVAMQSTGVYWIPLYDILEEHGIEVYLVNARDTKNLPGRKTDVQESQWLLKLHTYGLLRNSFRPASEIRVLRAYWRQRDQHVKTAGQCVQRIQKALTQMNLQLANVISDLSGKTGLQILRAVVNGERDPAKLADFRDPRIKASREDIIASLRGNWRTELLFQVKQELARYDFCQTQIAECDRELEQQLQSLPELRAGEEKSGTKETQRPPKKRKRRKDGNIPRFDLHHELQRISGVDLTRIDGIDVMTGQTVISEVGLDMSRWPSENHFASWLGLCPSNELSGGRILKKRTRKVVNRAATAFRMAASTLRTSQSYLGAKFRRLRSRLGPPKAITAMARTLAILFYRMLKFGQNYLDRGTEFYEQRQRDQQLQYLKTKAARLGFQVLPITDTP

SEQ ID NO: 462067 - protein, 418 aa, unidentified
MKIVHRICCGIDVHKRSVTATMASTDADLVTTYATRSFPTLGPGLSELRAWLAQNGCRDVCMESTGKYWIPVYNALEEGCEVVLTHPKYVRAIKGKKTDAKDSKWIADLFKHDLVRSSFIPPRDIRACRELSRYRFKLIGMRTAEKNRYQNSMTVSGIGLANVLSDPFGRTAQDIMAHILSPGAIDLEACAKMVRGRAKRNTGLILDSISGCEVPPDQAFKMREAGAHMGYLDAMIARTEAELAARLVPYEAHIRLLTSIPGIDELAAALVICEIGVDMGVFEDADHLCSWGGLAPASNESAGKKKPARVSRAGVYLKPLLVQCASAAVKSKEDPYFAAKYERIKRRRGHKRAIIAVARMMLVCIYHMLATGECFNPSDRDRPEAAEPRGPRMTEEAAIGFLAGLGYDVTILRKDATA

SEQ ID NO: 462068 - protein, 474 aa, unidentified
MAVERKVTTEAKANRKQRRERQRRIWTDNPGLEVVHPDAAGIDVGNSEHYVAIAPDKSADPVRRFGCFTADLRELARFLKEHGIATVVMQSTGVYWIPLYDVLEEAGFEVYLVNARDTKNLPGRKSDVQESQWLLKLHTYGLLRNSFRPTSEIRVLRTYWRQRAEHIHTATECVQRMQKALTQMNLQLANVIADIMGLTGQKILRAILAGERDADKLAKLRDGRIQASHEEIVSSLTGNWREELLFALKQELERYDFCQRQIRECDQEIEKHLGTLPSSPQEPGESLLPPRKRKKAGGNSPEFDLAGELARITGVDFTRIDGISVLTAQTIISEVGLDMERWKTEGHFASFLGLCPCNAVSGGKVLRRGTRKVVNRAATALRIAAFALKNSDSYLGAQYRRFRGKLGAPKAITAMAHKLAVLFYRMLRFGQEYVDRGQQFYEDKYRQQQVSLLNKKAAQLGFSIVPAANSQVPA

SEQ ID NO: 462069 - protein, 436 aa, unidentified
MEEVTDEPLYRDRVCGIDIGKAGLVATIRVPAEKDPARRAAETRSFGTTKREVLALADWLRCWQVPAVVMEATGDYWKGPLYRLEAEGFECVLADAKQVRHLPGRPKRDPADSRWLAACFERGAVTPCFVATEEFRVIRLHTRYRRDLTEERTREKQRAEKLLESAAIKVSSVLTDLHGVTGRDIMNHLIAGDRDPKVLAQLARTAARRKISQLEEALEGAEFFTPAHAALLTVMLARIDRLNADIDQLTEVIERLLAPHEEQLQQAESMPGWARRAAQDSLAETGPDMTRFPTGAHLASWAGRTPLDHQSGKRQGRSKAKKGNRYLGAVTGETAVAAGRTQTREGARYRRLARRRGKPKAQVAVGNTQLKVYHKLLSNPGMRYADLGPDYYERQRGIRRQIAHHVGKLGDLGFEVTLVRLPSPDPEPGGTHNPAA

SEQ ID NO: 462070 - protein, 377 aa, unidentified
MPSENTILLAIELSASAWLVAYRLPKAEKCRLQRIAGCDTPALLALISGLRSRVTAELGSADVACCFEAGRDGVWLHRVLTAQGVAAYVLEPTSVLVNRRARRAKTDRLDAEGMVRVLASWLSGDRKICSMLRVPTPEQEDAKRRHREREHLVHDRVRIENRIEALLFTQGIRKRPSLRSWSRDLDALRTGDGRVLPPLLRAELDRLRRRLELVLELIRELEAEREATLSAAAADRSNRQIAALQQIRGIGANFAAVLVHEVFYRGFENRRQLASYVGIAPTPHKSGTMDRDRGISRAGNPRARATLIQLAWLWLRYQPGSELAAWFRARVGALQGRTRRIAIVAIARKLLIALWRYVETGLIPAGITLRAELQASV

SEQ ID NO: 462071 - protein, 342 aa, unidentified
MQTNIGLDIHKKFIYAVVLDSSGDLLLEKKVRNDPYELDKFLKGIDKDSKIALESCSCWEYIYDYLADKGFTNLVLANPSRVRLIATSRKKTDAHDARVLADLLRTNMLPTSYAPSTVIREQRQITRHRASLGRLKGVVKNKIHAILIRNGINQEFSDVFGQEVTRYLMSLDLSVVVRYQMDQYLELIRHYDIQIRKTEARIEEYVEYTPQVKLLMSIPGVSFYSGLSITGEIGDIRRFSSARKLTCFAGLNPSVSQSGDRCYTGHIAKQGDSHLRWMLNQCANIAIMHDSTLAKIYQRIKKRRGHNIAITAVARKMLCFIYTILTHNIKYQALQIHKAKAS

SEQ ID NO: 462072 - protein, 309 aa, unidentified
MQTITTIGLDIAKSVFQVHGVDAGGQVVVRRQLKRRSVLAFFQKLPPCVVGIEACASSHHWSRELQALGHSVRLMPPAYVKPYVKRQKKDMADAEAICEAVARANMRFVPTKTPEQQSCLMLHRTRHLFIRQQPAVINSIRAHLAEFGIVAPVGRKGVAELLLIVADPSDKRVSEVARTCLAALGNQLLGLKQQILEFDRMILAWHRSNQTSKRLHYIPGVGPMLATALVASVADPSTFRSGPNFSAWIGLVPKQHSSGGKDRLGSISKQGDRYLRSLFVAGALAVIRYAKIHGTGHRPWLTALMPLAR

SEQ ID NO: 462073 - protein, 357 aa, unidentified
MKYIGCDFHPSFQVIAMLDKETGELVERRLLHTEEARVFYEGLQGPVLVGIEASGNTHWFESLLARCQHELWIGDAAAIARQEGRKQKHDRRAAALILKLMLENRFPKIWVPSVAERDLRQLLIHRQHLVRMRSRIKNQLQHIALNQGWQKKRKLWSEAGLQLLRSLVLEPWTGQRRDTLLEMLQELEDKIRPLDQAVEKEAYACAAARRLATHPGVGPVISLATVLTMGDVKRFADSRSWVSYLGLNPSEQSSGQRRRLGGISKQGNPFLRYLLVEGAASAVKGDKSLARMYARLKAKKHHGVAKVAVARKLAVRLYWMARTEKSYPEVVRTQGSQSYPVAEVKAVRLNRPPASHP

SEQ ID NO: 462074 - protein, 468 aa, unidentified
MPSKKSPKKRELDQLACVFPNAAGLDIGSAEIVAAVPPDRDAEPVQVFQTFTPDLHALVAWLLECGIDTVVMESTGVFWIPIYELLEAAGITPYLVNARHVKTVPGRKTDWNDAQWLQKLHALGLLAASFRPDAEIRTLRTLVRYRAELIERRAPHINHMIQALKHMNIQLNLVLTDITGKSGLAILRAIVAGERDPQQLACFRESGCKHSEAEIAKALTGTWDDAQLFILEQALEIFDYYTAKITGCDDKLEQQYQALESRAEKEAALPDLPPAKKDSRSKNALSFNARAQIARVVGVDLVAVMGLSAVTVQTIISEIGTDMELFPTVKHFCSWLGLAPHNDKSGGKVLRSRTMKVRNRANQAFRQAAQSVAQSDSSFGAYYRAMRARLGPKQAIVATAHKIARTVYHLLKTREPYQEESAAEYDRKRRERELKHLARRAQKLGYTLTVAQATAPESSPEPGGEGRF

SEQ ID NO: 462075 - protein, 362 aa, unidentified
MKSICRNGCPQRNDQYAYLTSNSKEMVKDQQIKHNEVQIKKFVNKLKSEGNEIHCCYEAGVTGYPLYRYLNSLGVNCTLIAPGKIPRQSSDKIKTDKRDAIKLARLLRSGDLESIHIPSEEEEAVRDYLRSRDSLRLDLGRNRQRLMKFLLRKGNVCSATKYWTVSHYKWLNNLHFENEILQETFNDYYSRVKVQEKNLKAMDRKIRGVAESEPFRERVGFLRCFRGVDYLTAMFLLCEVCDFKRFKTAGSFMSFLGLVPGEYFSGSKRKQTGITKIGSPRLRRILTEAAWQHRYPGVGSKAVTARRVGQPALVVALAEKASLRLHKKFRNMQQRGKTPQVMITAVSRELSGFLWAAMNLVA

SEQ ID NO: 462076 - protein, 397 aa, unidentified
MIAVGIDVSKSKSTVAILNGDGSIRAKPFDVHHVADELQALVDYIKRTSEPPTILMEPTSHYHYPLLKAFTEAELPVCLINPYQMKKYGDTELRKAKTDKRDSLRIAQYALEKSYSLIPYTPQDQKYEDLRFLSRQYSQRISTLTVAKVQLLSLLDETMPGITTILPLKSRDPDNCVLLRFIKRFKSFDVIRKMGKTRFLDSYQVLVKKTKDRFAGSKGLAIYELVLNSVTTRGENPLSAMTQDQCVDLVSTSQKAADEINLQMRIIAETMPEYKVLRSMAGVWDRLGPIILGEIGDIRRFHSGKALNAYAGNDAPPYQSGQFESRNRHISKRGNPALRKACFEVMQALKLTKPQDDPVYLFLLKKEQEGKPYNVAKMAAVNKFLRIYYAHAMELYK

SEQ ID NO: 462077 - protein, 394 aa, unidentified
MAPTEMRWTPPAYRLRSSAPKSSGWNPWSPHGIDVPNWGCVNNHTRDRGTTMNITTYGLDLAKQVFQVHWLDVHSGEIHSKSLRRTQVSAFFARAPRGVVAMEACGSAHHWGRLLSSFGHEVKLIAAQFVRPFVKTNKTDAADAQAIWEAVQRPDMRFVSVKSEQQQAVLSLHRLRAQWVSIRTQQANQIRGLLYEFGIVVALGWRSVLKAVPQLTDEVPTLLRTELLEQLEALRTATARIDALEKQLASWQRAESECQRLIAIPGVGPLTATAVVASVADARQFRSARQFAAYLGLVPRQSGTGGRVKLLGISKRGDPYLRTLLILGARSVLRSQSRRGCSGDPWLAELLGRRPNNVVVVALANKMARTIWALLAHQRTFDAHWHRGVTQAAA

SEQ ID NO: 462078 - protein, 427 aa, unidentified
MPHRIAGIDVHKKMLAVVVADIEVDGDYQFERQKVGTSPADLRQLADWLVEHEVEEVVMESTAQYWRPVWETLEQYWRPRRRAREGAPCLSGTLHLAQAQSNRGPGGRKRDFPDAERLVKRFVAQELTLSFVPDAEQRLWRTVMRRKYQITRNRVQLHNRLEALLEEAHVKVSSIVSDLLGVSARRMLQALADGETDPTVLAALAAPRLRATPAQLCDAFEACRSLHLVYRRLLKLTLEELRVIEDHLGQLDQQMADLLAEHHDAVRRLAEVPGLGVDSAQQIIAEVGATAATFPSPKHLASWMGACPGTEESAGKNYSHRCPKGNRQMRRVLNQAANAAVKAKGTIFAIVYRRIVPRLGHAQAIGAITHRLCRLIWKILHQGVRYEERGPVVTEEAKKVRARKMIRELRSLGYRVELLAAPSSSPA

SEQ ID NO: 462079 - protein, 354 aa, unidentified
MIIIGCDYHPSFEQIAFVDTETGELQERRLEHCEEAEKFYRDLAAQGLKVRVGMEASGHARWFERLLAELQFELWIGDAFEISAKRVRKQKTDRQDAQLILRLMLKDDFPQIWVPSWENRDLRQLLWHRHRMVQARTRMMNQLQAVALNEGLRCKKKLWRDAGRGQLEAFRLAPWASQRRGDLLELLDRLNPTIGKLTQAIDLEVEKCPAARRLKTHPGVGSLTALAFVLIIGKADRFQCGKQIASYLGLVPLEKSSGNQRRLGHITKQGNSLLRFLLVEAAQVTVRSLPEWRSKYCHMALRRGRKIAKVAMARKLAVRLYWMLRKEWDYEQLRKFGSHAGKPGYRDGVKQNIE

SEQ ID NO: 462080 - protein, 349 aa, unidentified
MEEISTIGIDIAKSVFQVHAIDHGGNVVVRRQLRRQQMLKFFAQVPPCIIGIEACGTAHYWARELSALGHDVRLMPPAYVKPYVKRQKNDAADAEAICEAVMRPTMRFVPVKSVEQQSAAMLHRSRALLIKQRTMLLHSIRAHLAELGISIGVGIAQMARVVRELAQGERSDLPELARFVLEALAKLVCDLAQRLEAIEKKLISWHYKNDLSNRLETIPGVGFVTASALSSIVPDPQAFKSGRHFAAWLGLVPRQNSSGGKARLGHISKQGNPYIRQLLVLGATSVLRYIRRDGGSGTGWIGGLLRRRPPKVAAVALANKMARIAWSIMTRGGEYEEINDLRAVQPVNS

SEQ ID NO: 462081 - protein, 401 aa, unidentified
MKYVCGIDIGSQSCSGCVTRPDKRVMVKPITFANTKEGWKVMEEKLAQLDAAPSQIVIGMEATSRYHENLYHELEQRGYQMRLLHPGQTHHYHQQQGLRAKTDRLDAMTIARVILSGEARVGYIPGEQVGTYRELVRLHTQLSEEAARYQNQIQILVVVLFPEFSQIFADPCGQGALAVLKAYPDARAVAQAGVEAVYQVLRAVPAAHFGRPTAKKLVAAAQVSSSSGRAVSGRASSLRILCDQLEHTQANLTRLEEELEQLITTDPSTKGLQQMPELGLKTVAVLRAELGEVDRFACTDQAVAYAGMDIQIKESGKFKGKAKLSKRGSGLLRQILYLAAIRSIHLEGSAFGAYYHHLVERRLKKMSAVMAVMRKMVAVTTHLMKTGEDYDPSKIWVGSTS

SEQ ID NO: 462082 - protein, 347 aa, unidentified
MRFYTKFHPYYCGIDLHARLLYVCILNEWGEKVLHQKIKADPKQLLRLLKPYIGQVVVGVECMHCWYWVSDFCRELKVDFILGHALYMKAIHGGKAKNDKIDSYKIACLMRGGNFPLAYNYPSEYRTTRDLLRRRTHFMRHGASLKAHVVNTDSQYNLPSQSLNLKNVSAREGLRHHYDDPVIQRMITFEMNILDCYVKELKHVESFIEKEARDDFPVLRNIIRTFPGIGQILALTIFYEIGDIGRFASVQKFASYSRLVKCKAESAGKIYGTSGNKIGNGYLKWAFSEAAVLYLRGNDKAKRYLKRLQKRMSKGKALSALAHKIGRCIYFMLKNKQVFDEDKFLKG

SEQ ID NO: 462083 - protein, 321 aa, unidentified
MIDSSTVVGVDVSKATLDVAFGLDGGVEHFANDAKGHRALTRALAKRAPSRIIMEATGGYEHRALRCLTDHNLPAIRVNPRQVRDFARATGMLAKTDAIDARVLVRFGAAVEPEHRPLPSLEQEKLARLQARRAQLVALRTAELNRLEQTTEAFITRTIKAVIKALDQQIKLIEAESAQTIAEHAELERTYTILTSVPGVGPVTAAVLMGHMPELGTLSRQAVAALAGLAPFNQDSGTQRGQRHIRGGRAPVRTALYMATLSAARCNHVIAEDFARLSAAGKPHKVAMAACMRKLLTILNALVRDNVIWGEKKSKNTPSVP

SEQ ID NO: 462084 - protein, 427 aa, unidentified
MPYNLAGIDVHKRMLHVVVSDVEVDGEYEFTRRIFGSSPQGLRSLAAWLMEHQVEEVVMESTAQYWKPVWGALERCWKPICQKREGALATSGTLHLAQALSNRGRRGRKKDFRDAERLVKRLVANELILSFVPDAQQRLWRTVMRTKYQLTRNRVQLRNRLEALLEEAHIKLSSLVSDLLGVSARRMLKAIAEGETDPAALAALAHERLRAKPEQIRDVLGVCQELHPVYRRLIQMALDESASIDKRIDQLEQEMADLLRLHEDQVQRLAEVPGLGVDSAQQIIAEAGATAATFPSEKHLASWVGACPGDEESAQVNYSRRSPQGNHHMRRILNQAANAAVKHKGSIFEILYRRHVPRLGHKHTIGIIAHKLCRLIWKILHLGVRYEERGPEVSKTSKQKRTQKMIRELRRLGYRIELTTSQPAMSA

SEQ ID NO: 462085 - protein, 339 aa, unidentified
MKLYAAFDLHSSNSYLSVIDEEGKRKLEKKLANEPEQILRELAPHRKRIAGIAVESTYNWYWLVDLLMAKGYEVRLANPSAIQKYKGLKHADDRHDAGWLAEMLRLGILPEGYIYPRKERAVRDLLRKRGHLVRLRTSLIISLQHIITRNCGLMVSVNDVKRLKEDRISPLLEDNEDVLMAGAVSKETIDYMTRQIRGIEKTVEGKMELTAPYRQLLSMPGVGKILALTIRLETGPISRFQKVGNYVSYCRKVSSTWVSNGKAKGKGNEKNGNRYLAWAYSEAAELARRFDDQARAYYQRKAQRSNRMVAHQALAHKLARAAYYIMRDDVPFMAEKLFA

SEQ ID NO: 462086 - protein, 343 aa, unidentified
MPHYVGLDVSQKTTSICVVDERGRRLWRGVCVTDPGAISACVLKHAGVDAKVGVETGAMTPWLVHGLRSTGLDVECLDARRVKAALQMRLNKTDENDAEGLAQIMRMGWYRPVHVKSLNAHRARALLGARAQLVGMTTRLSNMMRGVLKTFGLLPGAGRGLRFDQRVEALIDGAPDIALIVRPLLATWRQLREQIAVFDKAVQQQVRTDPICRLLMTVPGIGALSSLMYVSTIEDPDRFSRSRAVGAHLGLTPRRYQSGETDRSGHISRCGDGLARTLMYEAAIVIRHRVKRSLHLKDWAEAIERRSGPGKARVALARKLSVILHSVWRSGEPFRWVPNAPAA

SEQ ID NO: 462087 - protein, 431 aa, unidentified
MNYNQNKKLAQITSQTLIIGVDIAKFKHVARAQDFRGMEFGSPCYFENTKEGFSHFLKWISELKREQAMDKVIVGMEPTGHYWFNLAHILKENEIKFVAVNPLHVKKSKELDDNSPTKNDVKDARVIAQLVKDGRYAEPTIPQGVYAELRVAKKIRDLLTDDLQTVQGQVHNWIDRYFPEFLTVFKKWEGKAALQFLRLNALPHEMIKFSDQELLIHLRKAVTRSVGLSKIKELKQAASKSIGLRQGSDMAKLELKTLLDKYELIQLKFEELDAKIDILLEEIPGVPQMLAIKGVGRDSVAGFFAEVGDLSDYTHPRQIIKLAGLSLKENTSGKHKGKTTITKRGRKKLRALLFRVCMILVAQNSAFKALHAYYTQRPDNPLKKMQSLIALCNKLIRIFFSIGKKQFDFSEEKMLKDIPHLSASKKVEMAA

SEQ ID NO: 462088 - protein, 343 aa, unidentified
MEELKVIGLDLAKNVFQVHGINSRGRKLCGGKLKRGEVLAYFANLPPVLVGMEACGGAHDWARRIGALGHTIKLMAPQHVKPFVQGHKTDARDAAAIAEAAQRESVPSVTVRSLDSQQMQALHRVRELWMKQRIALGNQIRGLLGEFGEAMPLGLKGLKQAVAQWQAQAGNELAVLKQLIEQLMTALREQESRLSEIEGRIREQHRHNAASRLLETIPGIGLLGSTAVVASFGQCETFSSSRKFANCLGLTPREHSSGGKQVLLGISKRGNGYVRKLLIHGARAVLKCRLNRPEHADDWEVKLAKRRGYNIAAVALAAKNARRAWAMLRSGEVFRQDLAPASA

SEQ ID NO: 462089 - protein, 347 aa, unidentified
MVVARSRSALHRARMVEGTKGSHHKEGSTKMHKHNMICAGIDTGKRKLDVALAGCLLRLQADNNADGHAALSVWLRNHRVKRVGIEASGGYEQAVVTKLRRDGFVVIVFQPAQVRAYAKFHLQRAKNDKIDAALIAVCTAATQKIHAPPDPRLAPLAEHLTLLEQLTEDIAHVKTRRETCRDQRIRRHWDGEIARLKKLLSCELKTLIAAIRQYRDLAARLDLIASVGGIGPKTAVSILVRMPEIGRLSREQAAALAGLAPYDDDSGDQVGARHIDGGRQRLRKSLYAAALAAAFHWNPQLNVIYRRLIAAGKPHKVALVACARKLLIYANSVVERGTPWTEQPAQI

SEQ ID NO: 462090 - protein, 347 aa, unidentified
MGDIPLYAGLDMHGETTTCMIKDEKGNPFRVLKVETTKEGMRKLFEKINRKQVTAVFEASRNWQYYSRLLRPHCRSLVMAHPLKLRAIASARIKTDAIDSDILCDLLRSNLIPESYMPQEDIVELRELLRYRATLSSHRARLKAQVKNILSREGKKCEIDAVAGKRARLWLKHLDLAPLNRRELDFAIERYDRICEEIKSLDVTIEREQYKYPEIDLMKSIPGISTFSALMIISEIADISRFDKPSKLAAYAGLVPSTYQSSNTAYHGKITKQGNRWLRWITTQCVHAGIKSHKSHKLKTFCLKLERKKGKQKAVVATARKMLTTIWYLLNKNEYYAYRDSTIKNGL

SEQ ID NO: 462091 - protein, 356 aa, unidentified
MSSEVKYIGMDVHKEAIVIAVRDTRGHVVMESIVETKASSILQFIRGLQGERHVTWEEGTWAAWLYDLLKPHVHRVLVCNPRRNALLKEGSKNDKVDARKLADLLRTGMLRPVYHGEHGLRTLRELARTYQTLSQDLNRVMNRLKALYRGWGIACGGTQVYAPRYRDEWLGKIEHAGVRRRAELLYQQLDGLQALRRTLRSELLAESRKHKASKLLRQIPCIGPIRAARLVALMQTPHRFRSKRQLWTYSGLGIETHDSAQYRFVRGELQRAKKPQQIRGLNRNHNHEMKDIFKGAASRASCGVGPLRDFYVALLDKGMKPEMARLTLARKIAAIALTLWKKEERFNAEHLKTQAA

SEQ ID NO: 462092 - protein, 355 aa, unidentified
MDKLSSYVGLDVHKDTIAVAVAEEGKRGELREHGKIANTPAALTKLANKLARGGCALKFCYEAGPCGYGIQRQLSAAGHECAVVAPSLIPLKASDRIKTDRRDAINLAKLHRAGELTPVWIPDQAHEAVRDLVRARLAAVRSLRQARQQLSGFLLRHGHHYDRPAWTLLHRRWLADLRFEQPAHYLVLEDCIAVIEAATARRDRLEAHIKAALANWSLGPVVRALQALRGMALVAAATVVAELGDVTRFANPRQLMAYLGLVPSEHSSGSKRRQGGITKAGNGAARRMLIEAAWTYRFPARISRDLLLRQEGLARPICETAWKAQTRLCGRYRKLSRLGKPANVGSRHHLFKTAR

SEQ ID NO: 462093 - protein, 349 aa, unidentified
MLADELDYVVGVDTHRDRHALAVVAAPSGGVVAQRSVRASVRGYAEAVRFADEFAPGARVWAVEGAGHYGVGLVRYLSLHGETVLEGGRGPRNERRLRGKDDPLDAVRAARATLASERLALPRTGERREALRLLLIARRSAVEVRRRALVQLRSVIVTAPDPLRDQLRALPERRLLERCSRFRRSSSSPVDELAGKLVLRTLARRIEAATAEAEQLEREILGHVRVLAPRLLDEPGIGPIVAADLIVAWSHRGRVRSEAAFARLAGVAPVPASSGQTVRHRLSRGGDRQLNRAMHTIVLHRRQHDAATRAYVERRVAEGKSRREATRLLKRYLARHLFRLLQQTEPLMT

SEQ ID NO: 462094 - protein, 427 aa, unidentified
MSYKIAGMDVHKRMLAVVVSEVEVHGEYAFARRQFGTSPAQLHVLAAWLLEQAVEEVVMESTAQYWKPVWGALERYWQPGCRKREGARPTSGGLHLAQAQSNRGPRGRKDDFADAERLVKRRVANELRRSFVPDPEQRLWRTVMRTKYQLRCNQVQLHNRLEALLEEAQIKLSSLVSDLLGTSGRRMLQALAEGETDPAALVALADRRLRATREQLCDALGACRDLHPLYRMLVKSALEEWQRIETQIRQLEEKMAMLLRAHQDSVRRLAEVPGLGVDSAQQIMAEVGAQAAAFPSAGDLASWVGACPGKNQSAGVNASSRSPKGNRHMRRILNQAANAAAKLQGSIFALLYRRYVTRLGHNQTIGILAHRLCRLLWKILHQGVRYQERGPAVSQKSAQNRAKRMIRELQSLGYRIEFVSSPAGTPV

SEQ ID NO: 462095 - protein, 337 aa, unidentified
MEGYVGQQFVGIDLHRRRSVIVRTTAAGEVLERVRIVNDADRLASVLARAGETPEVVLEATYGWYWAVDALQALPNEPGVHLAHPLGVKAFEYRRVKNDERDAADLADLLRMGRLPEAWIAPPPTRELRELVRHRAKLVGLRSHCKAEIHAVLAKCGVQVLMSDQGRLPPPYAARVASLRRVMDTLDFEIDVFAGLIRGRLTTDPDLAPAYTAVRTIPGIGPVLGAVMIAEIGDVTRFASADKLTCWAGMTPKHHESDTHVRRGRITKQGSRLVRWAAIESVQILPKTSHVGAIRERVAARRGRPIAVVAAARRQLEYVYYALRDHHVRALHTPAAP

SEQ ID NO: 462096 - protein, 424 aa, unidentified
MKSASSTPITQPLNRLPEDPPNGVTGGLDWARDDHAVSVVDARGREVVRHSVEHSAAGLAELVDVLTRAKVREVAIERPDGPVVQALLDAALTVVVISPNQVKNLRGRYGSAGNKDDRFDAFVLADTLRTDRARLRLLTPDSEATVALRRACRARKDLVSHRVAVTNQLRAHLSNAFPGAVGLFADIDSPISLAFLARFDTQDRADWLSPKRLGAWLSSVGYCGRVDPAVLHARLAAAPCGATGEHGTAQAHITRALLAVLTTLVEQIKCLSTQIDEQLTLHPDAHIFTSLPRSGRVRAARLLAEIGDCRARFPTPEALSCLAGAAPSTRQSGKIRTVGFRWACDKQLRDAVTDFAADSRRANPWAADLYNRARARGHDHPHAVRVLARAWLHVIWKCWQDRVNYNPAEHGALQRLLQDQQLAA

SEQ ID NO: 462097 - protein, 405 aa, unidentified
MSELEKGLVFAGVDTHKDTHTLCLLDHAGRAIGTFRFAADAKGYDALAGKIGGPATCAGVGIEGTGSYGAGLTRRLLELGYCVYEVMVPGRARRKPGRPKSDPADAEVAARQVLARVNLSKPKDQSGWTEELRQLMIARDRLVQATSAMINAAKSLIVTAPEDLRRSLEGLSRKNLRSALSALDPAAGGIILALGSLGKAWDLQDREADAIEERMKRVLEANAPALLTIYGCGTVSAAALAVAGGGNPERLKSEAEFASLCGVAPLLASSGKTERHRLNRGGDRRANRALYQIAVTRMSYDQRTKDYVGKRKRDGKSKKEAIRCLKRYIAREVFRALRNPLEIKGPSWKDLRPARQALGITLVEAGKALNVGFQRVSYAETGRLMNVRFLEEYDAWLKSQTKRES

SEQ ID NO: 462098 - protein, 381 aa, unidentified
MGVFAALDVSQEETAICLVGAEGEILAEAKVPTCPDAIADWLAKRAADVERVGMETGPLAVWLWNALTKRRVPIICLDARHANAVLKMMPNKTDRHDARGLAQIVRTGWFKAARIKSHEAYVNRAMLTARDTLVGMRVKLENEIRGLLKTFGVMFGKRVGGFKRRATEIITGELAVAPELIPIFEALMHARSEILARIAALDGKIRAVAKQHGTVRLLMTAPGVGPITAMAVTAAFDDAERFNRSSSAGAYLGLTPRRYESGEISRNGRISKSGDRFARKCLYEAANAILSRKLGGPRLREWAQAIAGRTGPRKAKVALARKLAVTLHAMWRTNTTFREAAMACVERHRKRDPAQSPATTCNIRKVWVVQGSRSAPIETPE

SEQ ID NO: 462099 - protein, 350 aa, unidentified
MHSTTAPLASIGIDIGKEVFHIVGLETDGKIAFRRKIKRLALVESFKKMPPCVVGMEACLSAHFVSRVLRQLGHEPRIIPAIYVKPFVKGQKNDYNDAEAIAEASLRPNLRSVREKTQDQLDLQACHRVRSRLVSRRTATINQIRAFLIEQGIAVRTGATALRNSLPAILKNRQDEISPRMRGLIAGLYEDWICLDERIETITGEIEKIGEKEANCRRLMSVPGIGPLISTAVVAAIGTGEAFERGRDFGAWLGLVPRQYSTGGRSILGRISKRGSKYLRALFIQAANVILMRPHNWERFSFGTWLLNAAPRLHRNKLATALANKLARIAWSILRNGNTFDVTRHDAMAI

SEQ ID NO: 462100 - protein, 325 aa, unidentified
MQTQTHYTGIDISKSFFDVALLQADCYTYHKFSNNRDGFKGLLKILPSDSRVVMEASGPYYLRLACFLHDQGITVSVINPLVIRRFSQMRMSRAKTDKKDAKMIAEYGIMEQPVLWQKPEQHIITLQQTEALLSRLQAEHTALSNQLESFDSSGMLTKQLRMEISRELLHKSGLIKKLNGQMEEIAQAHYSDMLANLESIPGMGKKTAMMLTVLSGGFTRFDDYRKLSSYIGICPRIFESGTSIKGKARICKMGMSRIRATLYVCTWSACRCNKACKELYERLLAKGKAKKLALIAVANKLLKQAFAIAKQQIKYNENYSNTTCF

SEQ ID NO: 462101 - protein, 427 aa, unidentified
MPYRIAGIDVHKKMLAVAVADVEVEAEWRFERRQFGTSPSQLRALAEWLAEWEVEEVVMESTAQYWRPVWETLERQWQPTRRTRTQAGPTAGALHLAQAQSNHGPRGRKKDFPDAERLVKRLVAQELTLSFVPDVTQRLWRTVTRRKYQLTCNRVQLRNRLECLLEEAHIKVSSLVSDLLGLSGRRMLRAVASGETDPATVAALGSPRLHATPDQLRDALGACIDLDPVYRRLLAMTLDELEVIDAHSRQLDEELARLLRIHQDAVERLAAMPGLGVDSAQQIIAEVGPTARTFATGKRLASWVGACPGHDESAGVNHSHRSPNGNRQMRRLLNQAANAAVKTKGSIFELMYRRLVVRLGHAQAIGAVAHRLCRLVWKILHDGVAYEERGPAVTKQRAHRRAAKMIRELRNLGYRVEPVSSPASALA

SEQ ID NO: 462102 - protein, 377 aa, unidentified
MNEFNVYVGLDVHKATIAVAVARPGRCEPEYYGNIANNDAALRKLLKQLSSNGETLSFCYEAGPCGYGLYRDLTALGHGCAVVAPSLIPRKAGERLKTDRRDALALARLHRAGELTAVWVPGVEQEAIRDLTRAREDMKSLELKSRQRLGAYLLRHGRIYAGKSRWTPAHFRWLETVKFDSPVQQIVLQEYIDTVKAMQKRVADLEAQMHEALSGWSLGSVAQALMALRGVSLITAMTVLAELGDITRFDSPSELMAYLGLVPSEHSSGGSRRQGRITRTGNGHVRRVLVEAGWNYRFPARKTRDIEKRAEKAPAAVQAIAWQAQKRLCGRYRALMEAGKIKQQATTAVARELAGFIWAIACEVAGKAHGSKALAVA

SEQ ID NO: 462103 - protein, 348 aa, unidentified
MRGAVHGQGYHDRSRAKSVFQAHGVDEAGVVVIRKRVSRAKLLEFFASLQPCLVGIEACPAAHHWGRELQALGHTVKLMPPSYVKAYLKRSKNDANDAAAICEAVTRPSMRFVPIKTKEQQAALMLHRARQLPVRQRTMLSNAIRGHLSELGIVSAKGRKGTGALLEIIGDAKDGRVPPVARGILDVLARQYSAIGAEIGSIDRSIVAWHRSCEASRRLEEIPGIGPIVATALVAEIGDWRAFGSGRNLAAWIGLVPKQQSTGGKDKLGRITKQGNRYLRWLLVAGAMAVIRYAQKHGTLKRPWLGRLMERRPTKLAAVALANKMARIAWAIIVHGDRYRETKPLLAA

SEQ ID NO: 462104 - protein, 316 aa, unidentified
MNNNVEIIVGIDISKNNLDIQIQEDGQYFTCANDFIGIDKLVEKMNEIHPSLIVLEATGGYEKGVISALVEAQLPVAMVTPLWVRYFARSTGTLAKTDKIDARMLVRYGRANHPPVVMVRSELQERLSVLMTRRSQVSLALITERNHLSTTGYSDVKDLIRESIQNLEQQIKQLEGMIAELIDQSPALKNNEKLICSVPGAGKITAAILLADLPELGTLDHKKIAALVGVAPFNRDSGYYRGKRRIKGGRQSVRKVLFMAAITATKWNPVIKEFYERLLARGKVKKVAIIACMHKLLTIMNAIVRSQTSWRSVNEP

SEQ ID NO: 462105 - protein, 424 aa, unidentified
MKVTYQTCCGVDVHKSFLVATIVKTTGGIEPSYQKKRFSTFNNSILEFKQWLLDNDCHDVCMESTGKYWVPVFNLLEDDINVVIANPKWVKAVKGNKDDTKDSKWIGDLFRLGLVKGSYIPCKKVRILREYTRYRYKLVSCRSSEKNRYQNALTVCNVALDSVVSDIFGKSSTSIIDYLLEQSGSSINHEEIASKLLRSLKSKEDAVIESVEGYQMTDAQKYRMRLVRAHMDYITAEINDVDKMIENMISSNTDFENAVQFLCTIPGVKRDSAITIISEIGTDMSQFSSSKRLCCWAGLTPGSNESAGKKKSVRITRAGVYLKPALVQCAHAAVKSDKSPYYKKKYESLVKRRGKKRAIIAIARMILTAIYQMLSTGEQWNPSDLYKIDMPVALVEKQKAKAIKQARKLLQREGLLPPDEPLAS

SEQ ID NO: 462106 - protein, 408 aa, unidentified
MNKLFVGIDVSSKNNVAYLMKPDGSKHSSFSVQNNLGGAKLLSERIVSALGSMQLERVVIGLEATSIYGDSLVYALREDGRLGRFQRKIHVLNPKQVRKFKEAYSDLPKNDWVDAFVIADHLRFGRIAREVYMDDYRYKALQTLTRARFEVIQNLTREKQRFANYLFLKCSGMAQDKDIANSSSTTIALMERFETVDDLANSDLEELTAFVTETGRGRFADPAATAKAVRAAAKGSYRLPKTVNDTVNQAMSVSIASMRALKEQVKVLDKAIEQQFEIIPNTLTSIPGIGKVYSAGIIAEIGDIHRFDSQASVAKFAGLVWHKNQSGEFEAEHSRMIKSGNRYLRYYLLEAANSVRRCDSEFRRYYDLKFKEVNKYQHKRALALTARKLVRLVFRLLKDNRLYIPPES

SEQ ID NO: 462107 - protein, 370 aa, unidentified
MKKNVNVKADYIIVGCDLHEESMLVKYAADKSEPKTKSYAYKRVRRQAMIEDLKKLSARHGGAEVVFAYEASGLGYVLHDELVAAGIDCRVIAPSKVDRSPHYRRRKTDEVDAARMFELLRGHLLAGNKLPACHVPNKQERDDREVTRARHDVQQKVAMVKAQLTCLLKRYGIEEPDDVGRRWTKCYRAWLKGLPESKLDLGAGKVLLSYLRQIELMEEELAYWNKEVETLGQSDSHKAPVEAMMAHKGVGMVTATTFLTEVGDLNRFKKGRHVAAYLGLVPSSHESGEVDDRKGHITKQGPSQVRAVLNQAAWSFIRTEPWARAKYDRIAQRNPKKKKIAVVAVMHDLAIWLWRTGLAAKRAAAATAGS

SEQ ID NO: 462108 - protein, 505 aa, unidentified
MSAVTRPRANRKAASATLRKCVASASPAMRGLRTRGATGRAGAKMAPAVSAPAPIAPVKRRKEPARSGALSRAEGGPVARIAANVAVLPPSGTRPDGTPTRSKTQTHGVQGRTAMRIVALDLGTKKTTYCEVAQGQVVQRATVSRVSSLESLLGPDQPAARVAIEACREAWYVHDVLIKWGNQVCLVDTTRSRQLGVGAHGRKTDRLDAEALARALERGGIPAAHVLSPSRRELRNVLGVRRCLVETRTSMVNTIRGLAREKGCAVPSCRTTGFVGKARAAFARHPELQRLTDPLLVALETIDIQLAEVEEHLAGCCEQEPVVARLTTVPGVGSIVAAAFVSVVDDAGRFRSAHELESYLGLVPSEDSSGGKRRLGAITKEGNAYLRALLVQAAWVILKWGPKDDPLRLWGSQVAARRSKRIGAVALARRLVGVLWALWRDGTVYDAPHLARQGSRGHRGAIQSAERKIEALQAARKKDSVLIPRNSTAKQPKPPTRIAQLARAS

SEQ ID NO: 462109 - protein, 344 aa, unidentified
MRITVVGIDLGKNVCSLAGLDGSGQVVVRRRVRRENVLKLVSQLKPDIVAMEACGGAHHLGRLLRDDGFEVRLMSPEYVRPYVKAQKNDDRDAEAIAEAATRPTMRFVELKSAEQLDVQVLHRARDRLVAERTALINQLRAVLMERGIVIPQGWHKLSHALAAILESDEAALSARVRALITDMRSEWGELDRRIHAFDNEFAGRAREDEDARRLATIPGIGVLNATALVAAIGKGQSFARGRDLAAWLGLVPRQQTTGGKPRLKGITKRGNVYLRKLLIHGARAAMTPLSGTHTALGKWLRGLRARAHVNIVVVALANKLARIAWAVLRTGHSFEARGSLTTTL

SEQ ID NO: 462110 - protein, 344 aa, unidentified
MHIASIGIDLGKTTFHLVALGERNKILLRRKFSRSQLLAYTANLPSSLIGLEACAGSHFLGTVLREQGHQVRLIPAQFVKPYRKTNKNDFIDAEAIAEAVTKQNMRFVQIKSQEQLDIQAMHRVRDRLVQRRTALINEIRGFLLDRGLTFAARPIHLRKNLPSVIEDAEQNLSSCLRWLLDRMWQEWKQMEVDIKAITEAIERVGNENALCRRLRQIPGFGPLVSTATVAAIGNGAAFRRGRDFAAWLGVVPRQYSTGGKQKLFGISKRGNTYLRRMLIHGARAVLLRVQYDTGGFGQWVHRLAQRAPHNKVVVAIANKLARIAWAVLSSGRDYQHQRLQSAAA

SEQ ID NO: 462111 - protein, 356 aa, unidentified
MEQITRGQAVRVGVDLAKRVIQVHAVDAGERVLTGRALSRENFMPWCARLPAGCMVAMEASSSAHHWARKLIALGLDARIISAQLVSPYRREGASGKNDANDAAAICEAASRARMHFIPVKSVEQQSMLCVHRLREGLKEDRTACINRIRGLLAEFGVVLAQGSRELQAALSDVLEDASNELGTLARLTLQRAQAQWHELDAHLAWCDERIAAHGHDNPAVKTAATLLGIGPVTASAVVATVGDFKQFKSGAQFGAWIGLTPRQHSSGGKSQLGGITKRGDTYLRTLLIQGAKSAVMTAHRRQDRISAWALALRERSGWQKAVIALANKNARILWAVMTHGEAFDPNHLSTKPIAG

SEQ ID NO: 462112 - protein, 355 aa, unidentified
MNSVRYVGLDVHRDTISAAVLNESGRMIQQSILATRAAAILDFIGGMRGTLYVTFEEGTHSAWLYDLLVRRVARLVVCNPRMNSLLKSGNKSDAIDARKLAELLRADMLSPVYHGEKSAMEVQHLARSYALLTEDTTRVMARIKAIFRGQAISCAGQKLYGHKHRNEYLEQLGACALRRRAELLYEELEAVRQLRRQAKREMIVECRKYPETKLLTSVPFLGPVRAAVLIGRVQTPHRFRTKRQFWAYCGLALEMRDSGEYRVVDGQVERRKKPAQIRGLNWNHNHELKNLFKAAATTASFSNGVFREFYLGLLKKNMQPEMARLTLARKIAAITLKIWKKGEAFDAELMKLQAA

SEQ ID NO: 462113 - protein, 410 aa, unidentified
MYCGIDWAESHHDVALVNQDGQLLAKRRISDDLAGYRLLLDLLAEHGDSPETPIPVAIETAGGLLVAVLRTGKRKIYAVNPLAAARYRDRHGVSRKKSDPGDALVLANILRTDMHAHRPLPDDSDLARAITVLARAQQDAVWSRQQIANQVRSLLREYYPVALDAFSSKQGGLTRPEARAVLALAPTPSAAARLTLPQLRAALKRAGRSRGIDAEADRLKTALRAEQAHQPALVEEAMGQQLLALLTQLDASCKAVDDLTEAVESLFRQHPDAEILLSFPGLGVQLGARVLAEIGDDRARFADARALKAYAGSAPITRASGKKRFVGRRYIKNNRLTNAGHQWAFAALTASPGAAAHYRRRRDHGDWHAQAQRHLFNRMIGQLYHCLQTRQLFDEQHAFTSSPAGLAMAA

SEQ ID NO: 462114 - protein, 412 aa, unidentified
MKVVHEVCCGIDVHARMLVACLLLANGEKEIRTFSTMTDDLLRLRDWLVAADCTHVAIESTGVYWKPVFNILEDALTVILINPEHTHALRGRKTDVKDAEWLADLLRHGLLKASFIPPPEIRELRELTRYRESLVRERSAVANRVQKVIESGNIKLGQVASDALGASGRAMLWALVRGETDPVKLAALAQRQLKEKVPQLRRALQGRLTVNQRFVLGELLQRWEQLEQADRRVTKEIDKYLQERPKLARAREILDSIPGIGPRAAEVIMAEIGVQMEAVFESDAHLASWAGICPGNKATGGKRLSGRTRKGNTYLRSALVQAAWGTTMKKNCYLSSQYFRLVKRLGRKKALVAVAHSLLVIIYHVLQRDQTYTELGGDYFDRNHVEQQRDYYIRRLQMLGLKVNVEELLQAA

SEQ ID NO: 462115 - protein, 355 aa, unidentified
MERYIGMDVHAASCTLAVISEKGRKLKDFPVETNGQALVEAIRMIPGHKHLVMEEGLQSAWLYETLSPHVDELVVAGITTSRGPKSDKRDAYGLAEKLRVGNLDKHVFKAPRQFTQLREISRTHMTLVGDVVRAQARIKSVYRSRGVLVTGVDVYSSRRRNEWLKQLPSTTQLRATRLYDHLDFLLEQKKQAGADLLREGKKHPIVKILETAPGFGPIRAARLVPIVITPHRFRTKRQFWSYCGLGIVTRSSSDWVQTAEGAWIKSRVPQTRGLSRQHNHFLKSIFKGAATTIVTQRNKDPIHARYERLLDGGTKPTLAKLSLARMIAATVLRMWKNEEEYDPGRAGLLAITHKG

SEQ ID NO: 462116 - protein, 377 aa, unidentified
MTATPHPASLSVSEPTLYVAFELSATQWQLAMTSGFGVAPWLRTVPRGDRAGVTRALAQGKARLGLPASAAVVSCYEAGRDGFWIHRALTQLGIANRVVDSASIDVNRRARRAKTDRLDALKLVMMLVRVCCGERGVWCEVRVPSVTDEAARHRSRERCTLIQERTRVINQMRGWLATLGAGLPARRGPAWWTAVRDWADAPLPAEVQARLARADARWALLDAQVRTLDAAHAAETTAAAPDSARGRLVTLKGVATTSVAVLLEEGLVWRAFRNRRQLGGILGFAPTPFRSGDVAREQGISRAGNGRLQSISVQLAWQWVRWQPASPITRWFETHYARGSGRLRRIGIVAVARRLLIALWRYATTGEVPPGARLKTA

SEQ ID NO: 462117 - protein, 436 aa, unidentified
MTLIKYGYELDTAFIDWLFLIRLHSLKPTVLSLYINHRRVGFIMILVGIDVASTKHDIIITNHLGEVFNTHFTIENSRAGYKKLLNEISLAKEFFKDSNVRIGLESTGHYSRNILHFLILERYDVMFINPLLTNMDRKASSVRKTKTDVIDAKAICMFLIRNQNDFKPYTLSSYHIDELKILVRQRKSLKIQLNKTSNQLKAYIDQAFPEYHKVFKNTLSNASLTLLESYASLSELKRVRTNTLSELLKKSSKGRHSLTKAELIKSLVKDSIGIDSESLSLSIKQSVQTIRSIELQVDQINDLLEHHITESKTTLLTIPGIGVQTGAIILAEIGDINRFKTDDALLAFAGLDPFVYQSGKYEGNFKISKRGSSILRWAIFQAAKITVMHDPVFNAYYLKKKSQGKHYLTIIGHVTKKLLRVIRSILKNNSIYTVSH

SEQ ID NO: 462118 - protein, 337 aa, unidentified
MNVTLIGIDLAKTVFQVCGVNRSGNPAFNHQMRRNRLIEKLLQYPEATIAMEACSGSNYWGRELKKLGFEVLLIPPQHVKPFVKGNKNDRNDAFAITEAARRPRMRFVEPRSLEQTDILVLHKLINRKVQARTALINQIRGFLNEYGVIVAPGKERLLKALPELLEDAENPLTCAAREALQSLLEEWREANRQIQMHEAKLKQTAKQLEPARRLMGVKGVAEKTATAVVAYAGDGKAFKSGRHFAANLGLVPNEHSSGGKQKLGSITRRGNNYLRRLLVQGAWSVIRYTDKATDRLSRWAAGVIERRGKHKAVIAVANKLARILWAMLYHQTEYRAA

SEQ ID NO: 462119 - protein, 409 aa, unidentified
MHVIHARCAGIDLGKDTLVAAVRLQDAGGVQRECRTYQTTSRQLLELSSWLVSLSVTDIVMEATGSYWKSVWHVLEGQFELMLVNPALVKNLPGRKSDVNDATWLADLLAHGLVRGSFVPPAEIDGLRELTRTRRQLGREIAQHTQRIQKILDVGNFKITGTITDLMGLSGRAIVKAIAGGETDPEHLADLANRRIKAPRARLVEVLHGQMTDQRRLLLDMHLNLIEAIEASIEKLDRDIEKVVDPFRPTVERLLEVPGLSTVNVPALLAEIGVDMSKFRTHRHIVSWATLCPRLHESAGKILSRRTRKGSVWVKSLLIQAAWAASRTKNSYFRAQFLRLRGKLGPKKAIVAVAASILTAVYYIIRDAKPFRDLGINYFDNRDRTKAANRHVYRLKQLGYNVQLTEAEA

SEQ ID NO: 462120 - protein, 409 aa, unidentified
MDVVITRCAGLDVHQATVVATVRVPDDQGGRRVVTDTFGTMTADLLALRDWLHAYGVTHVALESTGVYWKPVYYMLEDAFTLLLINMQELKRVPGRKTDVKDSEWLAQLLECGLLRPSFVPPPPIRELRDLTRYRVQQVRDRSQEVNRLCKVLEDAGLKLTTVITDVMGKSGRAMLQALVDGTTDPAVLAELARGKLRKKLPELRRALQGRFRPHHAFLIEQIFAKIDFLDEALERLTTAIDQRLVPFEPMLTALDTIPGVDRIGAISIVAETGGDMTRFLTAGHLCSWGAMCPGQNESAGKRRSGKTRKGNRYLRGTLIQAGLGAMRKNGSALQARYHRVARHRGHKKAVVAVWHQILEIAFYIMRDGVTYDELGADYFNRRHAEKAVRRHVRQLEALGFHVTIEKAA

SEQ ID NO: 462121 - protein, 351 aa, unidentified
MAGSKRLVIGGVDTHCATHHAAVIDRNGRLIADAEFSATPVGYASMLTWMRSKGKLGQVGVEGTGAYGAGLARYLHQQGIEVLEVPRPDRRLRRQRGKSDPIDAEAAARTVLAGKASGAPKLADGPIEAIRMLRVARNGAVKARTAALNTLRSMVITAPEPLRTQLRSLSSAQLVTACARLRPDPTNLLDPAQSAKQALRSIAQRARHLDTETRSLRKQLDDLIQTAAPATAAIFGLGPDTVSALLVTIGDNPDRLRSEAAFAHLCGVAPIPASSGKTHRHRLHRGGDRASNSALHIATVVRLRYDPRSRAYADRRTTEGLSMPEIIRCQKRYLAREIFHSLRADYAQLST

SEQ ID NO: 462122 - protein, 313 aa, unidentified
MLQEMVFVGVDVSKLRFDLHIHPSNISMAIENTPTRIKGLVERLSKLGPAIIGVEATGGYERRLADALHDAGMTVYILPPARVRAFANALVQNAKTDQMDAAMIAAYLAAAHHRLKPYRPDPERAKLSALAAHRRRLIAERGGLASQLDTIVEPLVRAMIEARLETIRIEVVALDKAMTALVKASSTLKAQYARLCQVSGVGPVLAIAVLADMPELGTISSKAAAALLGVAPYARQSGRMNRAGRCAGGRKHLRDIAYMGALSAIKAKDPILEPFYRRLREAGKPFKLAMIATIRKLITILNAIAKTDPAFAK

SEQ ID NO: 462123 - protein, 391 aa, unidentified
MELEQYLGPLNKEIESEASKSDKGSIGLIKRKMKRQEVLKESLGIDVSKDSLSYCLGTLNGDLSKTFIQGTDVVNDPSGFKKLDIWLRKHHVQSDCLSIVMESTGVYHEGIAGYLFQKGYKVSILQSGRVKRYAQSLDQRSKTDALDSRMLSMLGCERQLTAWEPPSDHLQKLRSLSRERSCLVKERSLELNRAHALNHGVYKDIQTEKRYQQRMELLQVQIGEIEFEMQSVIRADEALSEKMGYMVSIPGVSFISAATVLAETLGFSTISSAKQLTSYAGYDVVLRESGNYKGKTHISKKGNKHIRAVLHMPSMTAVRLNPSLKPFYERLKPRKDKPLIALIAVQRKLLVLMFSLYKKNEYYDPKYEIKKRQKLKALAAQDSSNINITTS

SEQ ID NO: 462124 - protein, 392 aa, unidentified
MIYVGIDVSKLKHDCFIVDSSGEVLEDVFEFSNTRAGFNLFLSKLKRHSKSLSNERIRVGLEATGHYSTCLESFIRKTGLCPVILNPLSTNMYRKATTLRKTKTDKSDAKLIARMLLTDVKGPTPMKSYHITELKSLCRHRFRLIGYQSKLKISIRRILDMVFPELRSSVWSVHQKSCYQLLLEYPGAHSLASAHLTHLTNLITTGSRGKYGKSKAIELRELARNSIGIESAALSTELQQTILLVLSVREQLAVSEKQIKSIVRSLETPLLTIPGISFILSGIILSEITDINLFSDPAKLLAFAGLEPSMFQSGKYNADNTPMVKRGSTYLRWALLNASRLVVMRDNTFSEYYWKKRDEGKHHNVALSHTARKLVRVIFHILKTGKTFVPQS

SEQ ID NO: 462125 - protein, 345 aa, unidentified
MKIVGCDLHTRYQQIAMLDQETGELIERRLEHASGAARAFYAALAAPVRVGVEATGYTRWFERMLAELGHELWIGDAAQIRAAMVRKQKTDERDAAHLLELLLSERFPRIWRPTLEERDLRQLVWHRQKLVWMRNAAGNQLHALAMGEGVCRKKKLFSKQGRVELESLPLGPWASHRRQELLTMLDQLETSLKALDQAVAKQAEQNPAAVLLMTHPGVGPVTSLALVLTLGPVERFAHSKQVVSYLGLNPREHSSGGRQRLGSISKQGNPMMRSLLVEAGHSAARLDRELRQDYQRLKLRRGSGVAKVAIARKLAVRMYWMLRGQTSYAQRVRMQDSPWATLVQN

SEQ ID NO: 462126 - protein, 347 aa, unidentified
MYYIGLDVHKKTISYCVKDAAGCVHGEGKIGSTRRELDAWIMTLPQPRMIAMEATIFSGWIYDYLLPHGEKVKVVHPLMLRAIAAAKRKNNKIDASKIADCLRCDFLPECHMASTEIRDRRRLLRYRRLVIRQAVQMKSRVSGLLMETGVSYNKLRLHRMGYFEQLLKSSDEIPDSIRPLLRMCREHIDRAIQLDRVLLKSLEQDPLLIDRLERLRTIPGVGPITALTWALEVGDTSRFRSIKQAVSYCGLCGDEKSSADKVMRTPISKQRNKHIQQVLVEAARLAPRYSQELALLYERERQRGHGGRATLAVARKMVGHMLAVDRRKTAFVPAGEFMQIAAVQKPF

SEQ ID NO: 462127 - protein, 406 aa, unidentified
MQVLFVGVDWAEDHHDVCVMAEDGAVLAKRRVPDSVAGIGELHALIAEHADDEESVVIGIEVDRGLLVGSLVSAGYEVFAINPMASARYRDRHAVSGAKSDPGDAKVLADLVRTDRHNHRPVAGDSHLAEGVKLLARAHQNAIWGRQRQVNALRSALREYYPGALEAFGTDLASTDALAILEIAPTPELGRGLSRSKIAAALRRGGRQRNIEKRAEEIQVVLRAEQLEAPVLIANAHGLVTRSAVTLIGTFNDQITELEAGLAEHFEQHPDAKVVLSLPGLGTVLGARVLGEFGDDRTRFSNPKSRKNYAGTSPITKASGHSRVVLARCARNRRLGDACDQWAFCALKPSPGARRYYDELRARGKTHHQALRQLGNRLVGILHVCLERGVLYDEIIAWPTESEIAA

SEQ ID NO: 462128 - protein, 381 aa, unidentified
MSKSSTVYVGLDVHKDSIDIATADAGRDGEVRHVGSIGGDVAALDKALRRLISRGRRLHVVYEAGPCGFVIWRHLRAQGIHCEVVAPSSIPKRSGDRIKTDRRDAMLLARLARSGDLVAVRVPDTADEAVRDLVRAREDAVRECRNARHRLKALLLRSGIRYAGKSAWTAAHLRWLATLKMAHAAQQVGFQEYLHAITESTARIARLEQALRDALADWSLRPLVQALQALRGVQLIAAMTLVAELQDFLRFDSPRTLMAYVGLVPGEHSSGAKRRQGSITKAGNSTARRMLVEVAWHYQHSARISPIIAVRQDQLPKAVTDIAWTAQLRLHGKFKRLMARRVMKTKAVVAVARELSGFVWAIGREVQTSGWPGVKTPTAAN

SEQ ID NO: 462129 - protein, 362 aa, unidentified
MKFYGVDLHSNNIQVSILDQDNLSLNARITLNSPAFQDFLSDLTRDDYVAVEASTNTFWFYAQVKDRVNQCLVINPFEFKLICHSAVKTDKRDSSKLAKLLRYSILQKDPSILPCVYVPDQKIIQLRSLFTSYEIVKKQKNMTKNRIHSLLKQNAIILDTKDIFKSSFREKILGSKVDEVALFQIQFFFHQLDETESQLKKLKTKILEQGKHFLNEIRLLTSIKGFSVITSLALISDIADINRFSNEKKLCSYLRTAPRIDSSNNKDKIGHVNKNSRTLTLNFLTQSILHFRSGSKKLDAFYTKKRKGKSAGKVRIAVMRKMIVIVFHILKKNELYFYTDKQNHQAKLLHYAHFLKHFSESA

SEQ ID NO: 462130 - protein, 320 aa, unidentified
MSFILGIDVAKAKLDLALRRPDGRFRSKVVHNTPDGFQALSSWLTRQGVDQLHVCMEATGTYWEAVAEYLADAGFTVSVVNPAQIKAYAGASAVRTKTDKVDARLIAAFCAAQHPEPWQAPPAALRELRALVARRESLVAMRTQELNRLSVAREPVRPDIQAHLSYLNKAIAEIEAAIRQKIDDDPDLKAQRELLDTIPGLGEKTIPTLLSYYGGPQRFTRAKAAAAFAGLDPRQHESGSSVRGKTRLSKFGHAALRKALYMPAMVTTTRTAWGRRFRDRLAAAGKPPMVILGAMMRKLVHVAFGVLKSGQPFDPSLHGA

SEQ ID NO: 462131 - protein, 313 aa, unidentified
MYYIAVDVSKKVLSVYDGKKDLTFANSTKLGSLKNYLKRHYRAFAEIAFLFEATSSYSDSLIEFCARCKIKAFIMNPKASHHFAKSLSIRSKTDKIDARMIYQYQKLIDPKMLAVPKINREAKRLFGYLKSYQLAIKQRVALSNHICHIQDKNLARLLKKELQNVKKVEEEILSRMTGYILEHPQLKKDYERLLTIPGIGKKSAPALLTLFITYQGTNRGQITALCGLDPIKRQSGTSVLGKSKISKHGNSMFRKVLYMPMLSAIRNNARIALFYRRLLENHKVKKAAVMAAMRKMILIAHAIYQNKTEYVLR

SEQ ID NO: 462132 - protein, 427 aa, unidentified
MSGFETGGREPAFAAFVGIDWADQKHVWCLQGGDSTKRESGELEHTPEAVEAWVAQLCQRFGNRPIAVALEQSRGALVFMLTKYEPLHLFPVPSTMSASMRKALYPSGSKDDPRDADVLLDLLLQHRNKLRRLSPDTEATRRIQNLVEERRKLVDEKTEHTNRLTSHLKIYFPQMLSWFEHLDTELVCALLERWPTLEELQKVPPAKLRTFFGKHHCRNQELIEWRILAIRQSIPAIRDRAVIEAKSAAVKVIVQLIRILLEGIADLDERIEEAAAAHPDFFIFKSLPGAGAALAPRLLAAFGSQRERYRNAGEIQTYSGIAPVTEKSGKKQWIHFRWACPKFLRQSFHEWAGHSIGYSVWARAYYQQQRGKGLDHHGAVRALAFKWIRIVFRCWKERVVYEESKYLAVLARRGSPLVAVVARVEAL

SEQ ID NO: 462133 - protein, 316 aa, unidentified
MNTSSPFVGIDVAKDELVIALGPSRDLVAVPNDESGIRHVLEHLQAACPELIVLEATGGYETAAVAALAAAGLPVVVANPRQVRAFAKAMGILAKTDNIDAHVLALFAERVRPPIRPLPDEALRMLDALLTRRRQLIEMLVAERNRLAHALPPVEKSLKQHIRWLERRLADVDSDMDQAIQQSPVWRAKEDLLRSVPGVGPVVSRTLLADLPELGALNRKQIAALVGVAPLAKDSGTLHGKRMVWGGRAPVRAVLYMGALIASRHNPVIRDFYQRLVAAGKPKKVALTACMRKLLVILNTMVRNNTRWGERYALSA

SEQ ID NO: 462134 - protein, 393 aa, unidentified
MYLVGIDIGKLKHSFCLLEKETGEILVEPVFFENSRDGFNALLSSFKHLPQKDILIGMEDTGHYNLALLKFLLDRNYQVALINPVATDLTRKMQGGISKNDKLDTLTICDVLSSNQRVKSYRISKYSSFDLYEQKLLTREHHNLKEEENQLSNRLQKCIYVVFPEFNSLFKSKCGIVYMNILKEFGSADAIAHADIRTIRKCFDTGRGKNIALTAQELKEAARNSIGFPSSSETTQIKHLVARIELIKEQIAEIDKKIEEFSIQNNSPILSIPGISHFSGTSILAELGDIHNYSKPSQIIKFAGVAPLTYESSQFTAQHTAITKKGCKYLRKTLYQIITPVIQYNPVFRKFYLLKIAQGKGHRCAQGHCVRKLMRVIYHLLSTGTQFDPALLR

SEQ ID NO: 462135 - protein, 317 aa, unidentified
MQRGKTSTKDAGIDVGKQWLDAAVHGCIETVRRGNDAAGIAELIAWLKGQGVNRVGLEASGGYEHALRQALAKAGLEVVVHQPIEVRLFARLKRLRAKNDRIDAKLIAAATAQVDAVKAAADPRLQDLAERLTAYEFVTQRLAETKGFMEHVRAKDLARRIRAQIKSLTDLKASLAADLLTRIKACPDLKARYDLLLSLPGVGSIVAIGLVVRMPELGQMQHGQAAALLGVAPYDRDSGQFRGQRFIAGGRRRPRRLVYIAALSAKRCDPTFKAVADRMLAKGKAKKVVIVAVMRRLIEAANIVLARAAPWNKTLPA

SEQ ID NO: 462136 - protein, 419 aa, unidentified
MDVVVERCAGLDVHRDNVVATVRVPGAGRRRWDQHTRTFRATLGGLAELGEWLAGFEVTRVGMEATGVYWKTVFQALETRVECWLLNAQHMRNVPGRKTDVKDSEWICQLVAHGLVRPSFVPPPEIRRLRDLTRLRKAQSNERTRTIQRLEKVLQDAGIKLTSVASQTYSKSARAMLEALLGGVTDPDQLAELAKARMRSKIPQLREALANRFDVAHHGILVAQLLAHIDSLDMAIQTLDERIALMLEDHQAVVGRLCTIPGVATRSAQVMIAECGLDMARFPTVGHFASWAGMCPGHHESAGRRRSGRTRPGPRWLTEALTESAKAASRTKGTYLAAHHAQIRGRRGEAKTIGATRHDILVAYFHIVRDEVEFRELGPDWQRKRYSPERRAQRLQRQIEALGYQVTLQPADEKTAPTA

SEQ ID NO: 462137 - protein, 404 aa, unidentified
MIFVGVDWAEAHHDICVLDTAGEVLARKRIPDTLVGVRELHELLSEHADEPEQVVVGIEKDRGLIVTSMLGSGYRVFAVNPLSVARYRERHVTSGSKNDALDAKVLAELVRTDRQNHREAVSDSEAADATKVLARAHQSAIWSCQREVNALRNALKDYYPGALLAFGNSLAERDAVAILSVAPTPSLGAQLSQSKIISALKRAGRQRNLEKRAKEIQDALREEQLHERPKVERAYGVITKSHVAMIRAFNTEIEELEKSLTAGFSEHPDAKIILSLPGLGMILGARVLGEFGEAPNRYHDAKSRRNYAGTSPVTRSSGKSLVVLSRHARNRRLSDAADRWAFCSLKQSPGARAYYDKLRARNKTHHQALRQLANRWVGILHACLDYQVVYDEALAWKSREALTA

SEQ ID NO: 462138 - protein, 314 aa, unidentified
MTSNAEFVGVDVSKDNLDVASWTSNEYKRFQNDPTGIRELIDWLKILQAELIVLEATGGLELPFVAELAFEKMPVAVVNPRRIREFARSIGQLAKTDKLDARVIAHFGAATHPEARKLPTNDEEKLTALITRRRQIIEMLTAEKNRLHSARFSMKERIETHLSWLESELRDLDNEITKFIHQSPIWKEKDKLLRSVPGVGPVTSATILAMLPELGTLNRKKIAALVGVAPVNKDSGRRQKKRRVYGGRANVRSVLYMAALSASKHNPRIKAFYDHLIRLEKEKKVALTACMRKLLVILNAIIRVNQNFTLTPDF

SEQ ID NO: 462139 - protein, 448 aa, unidentified
MKRKARNKKRLQDHLKQVNLYAAGIDIGSTSHFVAVPPSLDDRPIREYSCFTADLEHMADWLKKIGISTIAMESTGVYWIPAFEVLEERGFEVFLVNPRHLKNVPGRKTDVLDCQWLQQLHSFGLLRGAFRPSSKICAFRTYMRQRAMLVQSAATHIQHMQKALRQMNLLLDNVVSDITGKTGMTIIRSILSGQQNPEILARHRDGNCKNSEEIIAKSLKGHYKKEHLFSLRQAVELYDFYQRQISDCNQTIATTLDAIEGPENLDDLPPQKRSTRRKDKALPFDARENLYNITGTDITKIDGVKEITALKIISEIGTDMSAWPTVKNFASWLGLSPGNKISGGKILSSKTKTSANRAAMAFRMAAYSLTKSKSALGAFYRRKRSQLGAPKAITATAHKIARLVYSMLKYGTEYVDQGQNYYEEKYRERIVKNLHKKAKSLGFKMVPQ

SEQ ID NO: 462140 - protein, 459 aa, unidentified
MKKTGALQKAPKSDWKALEIVHRDAAGIDIGSHEHWVAISPEKDEQPVRSFECFTADVERMADWLIGRGVRSVAMQSTGVYWMPVFEILQQRGMEVYLVNARHTKNLPGRKSDIAECQWLLKLHTFGLLNNSFQPSDAVRAMRTLWRHRSGLIVQASSAVQRMQKALIEMNIQLSNVLSDLSGVSGMAILAAMLSGERSAEKLAALADPQVKASQAVIAKSLQGNWRPELLFVLQQEMDIYRGCQERMRACDQQLQEQLRHMESKVDVQAQPLGPRRRGKRARGNAPQSFDLRSELYRLTGVDWTQVDGFDVQIVQTVVSEVGLDLQEFPSEKHFANWLGLCPANETSGGKVLQRRTPKVVNRAKVAFRQGANALLRSQSYLGAQYRRLRTRLGAPKAMTAMARKLACLFYRLMTQGTAYVDKGAQYYETRHREQQVRMLIKKAQQLGLQVIAAQAQAQ

SEQ ID NO: 462141 - protein, 391 aa, unidentified
MSEQVNNNNAGADKTIIVGFDVHKDSIVACAFDPSSGEVVLEQQLKNQPVAVVKIIKRIRARFGEPRCCYEASSCGFVLYRQLRDLGVECDVIAPSSIPRRSGDRIKTDRRDAEKLATMYAGRLLRSVTVPDPELESTRALLRCRGALVEEMTRTKHRTTQFLQTRGLVYREGTNWSLKFWLWLNTVELDRIDQSVLDTYLHLIRYLEAQIASIETDLKEEAKKDRFSNPVAVLGAFRGIALLSALTLVCELGDIRRFAHPRQLMSYLGVVPSEHSSANSTKRGSITKSGNTHARKVLISAAWKYALRPAAGSVLKRRQDGVSAEVIAISWKAQKRLYKRFHALAVRKPRSVAAVAVARELAGFLWEAMQTPTLEGTIPSVNTPVKRNLAA

SEQ ID NO: 462142 - protein, 409 aa, unidentified
MLVDGGVVMSPVVAVAVDVGKRSAALSVTDAGRCRLYGPAEFTMTASGLREVTARAARVVPAGAVVRVGVEAAGHYHLPLAVPSAWPAGWQVVELNPAHVSEQRRVAGRRRVKTDAIDLEAITELLLAGRGVPAGARDAVLVELAAWAAHRTRRSAARAAVKNQLLGQLDRCFPGLTLVLPDVLGTRVGRLVAAEFPDPARLAALGASRFVRFAAVRGLRVRQEMAGRLVAAARDALTTTQAGAARQVLAADLALLTALDTQITAAEAELARLLPASPFASLTSVPGWGVVRAASYGAALGDPGRWPSPRQVYRAAGLSPAQYESAGRRRDGSISREGSVTLRRALIDLGVGLWRCDPPARAYAATLRARGKHGGIIACALAHRAGRIAFALVRDQAAYDPSRWETTRP

SEQ ID NO: 462143 - protein, 311 aa, unidentified
MNNTIGIDISKDTLDAHRLADGQHKQFLNGKTGHAQLVKWIGKQSDPLIIFEATGACHRQLERVLGTHIIPFVKVNPKQARRFAQACGKLAKTDRVDCEMLAKMGAALQLVPKPFTTENLYDLKELLSARRALIKDRTAAKARKATVINALIKQQLEKRLRQIKNDIAKIDALMLDVAREDQYMSERLDILFSIPGIGVITALMILVDMPEIGALNNKQVASLAGLAPMSQSSGKWMGKARIQGGRPNLRNAIFMPALVAIRHNADLKTKYDQLVTAGKEKKVAITAVMRKLLVLANALLRDNRKWAEKAA

SEQ ID NO: 462144 - protein, 411 aa, unidentified
MHEKQKHLYVGVDLHKQNHVAVIINCWQEKLGEIKFENKPSAFATFLVDIDKLMEEGLTPVFGLEDVGGYGRLLAQFLTDHGQVVKEVNPALSYAERKSHMTTQKSDSWDAECVARILVNKLDHLPDAKPNDLYWSIQQLVTRRNALVKAQSALKNQLHIQLSYHYPSYKKFFSEVDGKTALAFWERYPSPSCLDGVSVKQLTTFLLEVSNNTCSIKKANEILKLVNEDGNTTKEHQETRDFLVRSIVRDISFKKQEMSKVERKLKELMNLLDFQLETMPGIDLVTASAFIAEIGDVRRFPNANKLARFAGIAPVYFGSGGKGKEQKSKQGNRTLHTLFYNLAVQQVQVAKRSKRPRNPVFHAYYQRKLKEGKTKGQALVCIMRRLVNIIYGMMKNKTAYESPIIKEKVVV

SEQ ID NO: 462145 - protein, 407 aa, unidentified
MIHPKMSYVYVGIDSHKEVHTAVFINCFFEKLGETTFRNFPSAFNTFFERAQAYCTEGVTLMFGLEDCATFGRCLTIFLKSKNQNIKHVNALLVARERQTRNIVEKSDSVDAECAARVLLSKFGELPEADPDDKFWVLRSLVARRLLLVRNRSATKNYLHSLLIHQYPNYQDYFVSIDGVTSLAFLLRYPSPGTLKDTTVEELAAFLEISSNKRFGKEKAKQILDSLIDTSVQFQAIRDSVVQSAVRQIEFYTNEIDQLEESMAAFLVKFDCTLTSMVGIDTVTAAQILSCIGDIKKFPTSAKLARYAGVAPVNYGSGKKDLQFANQRGNRELNSVFFWLAVRVSMPVAGNHILNSFFYDLYQRKLSEGKTKRQALKCVERRLVNIIWAMLMNNEEYVNPPTYVLKT

SEQ ID NO: 462146 - protein, 357 aa, unidentified
MRFYTEHHQFYCGIDLHARQMYVCVLDEAGEIVLHRNMPAGPAELSRAIEPYVGHDLVIAVECVFTWYWIGDFCAERNIPFVLAHALYIKAIHGAKTKNDKIDSRKIAMLLRAGVLPQAYPYPAEMRSTRDLLRRREYFMHQHPELLGHVENTNTQYNLQPFAKRIVHRSTRSGITERFADPLVAASIEADMQLLEVYHQIILELEGQVLKKARVHDPVGLQFLRSIPGVGKVLVLVLVMLYEIHDITRLPSVGQFISYARLVKCPHESGGKRFGGKGNKIGNAHLKWAFSEAAVLFLRGNEAAQRYHEKLVSRYGKAKAMSIIAKKLGRVVYTMMKKRQPFDPKKFFSEAAHESAA

SEQ ID NO: 462147 - protein, 332 aa, unidentified
MHYLGLDISKHTIDTYSDICGHCKIDNTIQGIQGLLEHLQANGLGKENTHICCEATNVYYLLVATTLHQNGYKVSVVNPLAIKGYAKMQLKRIKTDKQDAKLIADFAKKEKPQCWQPNNQTGKAIQSLHRRTEQLNSLLVAEKNRQETADEYTNASVEKMIAALEEELENIREQIQAIIESDEQLKAKQKILATIPGVGKNTAQILLSVLVDLEKFRTSKHLISYLGLSPIIRDSGKYKGAQKVSKMGDKTLRKSLYMPARAACTRSKLWRGWFDEQVARGKHPKQVYVMMMCKILRYAYTCLKTNAPFDATMHQKADKAERSWKTVKGEAL

SEQ ID NO: 462148 - protein, 366 aa, unidentified
MEKRITFVGLDAHKETIRVAVLLPGASRPVEWQLVNEKAAVRRMLRKVERLASGEVRFCYEAGPCGYALQRWIQEAGLVCMVVAPSLIPRKPGDRIKTDRRDARKLAELYRAGLLTEVHAPTPADEAARDLCRAREDAQEDLMRCRHRLSKMLLRRGWTWNGTKRAWSQGHRLWLRSLHLEHPADQVVLEDYLLAIEQLEQRLPWLEQRIEELSQQPAYAEAVAALRCFRGIDTLTAMGLVTELHDFMRFTSPRGLMAFLGLVPSEHSSGESQRRGGITKAGNRHARRLLIEAAWHYRHRPNAASLKRRREGQPPHVVALADKAMLRLHRRFNRMLEKGKPRPKIVVAVARELAGFVWAALHPKAA

SEQ ID NO: 462149 - protein, 463 aa, unidentified
MNKVRSAENDTDPALEENGLAVLRRNVAGIDVGSTSHWVCAPTVDGTAREVEQFGATTPELEKLAQWLKQRKVESVAMERTGVYWIPLHEVLERHGLEVVLVNTRELAHVPGRKKSDRIDCKWIQRLHSCGLLRGSFRPAEQVCMLRTLVREKANLAAERADWVRRMQKSLDQMNVRVHRAVSDTEGTTGMAIIQAIVKGERDPMQLAKWRDPACRKSVEEIAEQLSGHWREDHLFSLEQSLKMHAAIEERIKAYQTEIQRRLAEMERADREGQQAPALKNKNKAKKIRQRREEPMRQALYRMSGVDLTAIDGVGVGVVEIVLTEYGSDLSCFPTEKQFVSHMTLAPKKPVSGGKPLKKKKRGSASSRVASALRSAALSLRHSQTALGAYFRHIQHRLGADVAAFATARKVATLIYRLLRWGHAYVDEGAEAYEQRYQAARINRLVSTAADLGYQLVAKPTNS

SEQ ID NO: 462150 - protein, 350 aa, unidentified
MAIVGGFDVHRKQITFDYVDNDGLVQWGQIRPATRKTLRSWLAKHCPEGAGEFALEGCTGWRYVSEELTAAGVGVHLGDPAEIAALRGPKKRAKTDRADARLLRTLLVESRFPESWIPPAHVAEIRALGRLYCALMEERRGWQQRIHAQLFHQGCPPVKALLSEPGREVLVAAELSAAGRQYVDTALRRIDELTAEIDPLRMQLVRFARRQSGCRVLQRHYGVGWLCAAIIWAEVGDPRRFSSSDQLVRFAGLDVTVYSSDGKRAPGHLSRQGSPERRWAAFEAAKCAARRGSPDYAYYHNLAAKHEGRNGKNPTLAVERKILRRCYHTLRELGDAVLAMPIAEAEEVAA

SEQ ID NO: 462151 - protein, 348 aa, unidentified
MRFYTEQHQHYCGIDLHARTLYLCILDAGGNVLLHKNLPCDRARFLEAIEPFREDMVVASECIFNWYWLADLCAEHSIAFVLGHALYMKAIHGGKAKNDRIDALKTASLLRGGLLPMAYVYPAKMRSTRDLLRRRTHFVRKRGQLMAHIQNTFHQYNLPRPPGRLVYKYQREPIPDAFDDPMIRKSMETDLALCDTYDELIRDLEKTVVRQARVHDPQTLLRLNTVPGIGEILSLTLLYEIHDIGRFESVQRFASYARLVKCEKSSAGKRIGTSGHKIGSVHLKWAFSEAAVSLIRHLPQSKRLHERLKRKYGKGKALSILAHKLGRTVYFMLKRNQAFDADRFLANA

SEQ ID NO: 462152 - protein, 431 aa, unidentified
MLKINPLSTLYVGIDVSSKSNYVCALDFYKNKYINSSFANNQPGAEELALKILECLKEHPDITTIVAALESTSVYSIHIANYLSSCEELMRFKPYVFVLNPKCTANYKKSYIGLGKSDPIDAFVIADYARAGNIESEPWRGSQFLALKRLTRHRLHLVECMTREKTYLVSNLYLKFSELQMLEGDDQPFCDIYGATSSSVLMEYLSPEEILASSEEDLIAFLAEKSRNRIKDISKTADLLKKAARDSYRLDKALYEPLNVSIASSFNCIETFKREIKVIDNAIEKEIKGLNPNAFIILQSIDGIGPVFAGGIIAEIGDITAFHSSDALAKYAGLTWKSNQSGDFDGEDTPMIKAGNRYLRYYLGEAANSMRKHNVEYGAYYRKKYNEVPKHQHKRALALTSRKFVRLVYGLLARNQLYSGVSLDTSIKDSN

SEQ ID NO: 462153 - protein, 422 aa, unidentified
MLSVGVDWSEDFHLVALGRPGEGVIDVSRVEHRPEAIGRLLTRIAELEPDPDEVRVVIETRHGLLVEALLDAGFVVLPVNPDLIARRRGPARKKDDTEDARIACLLGLDRFASLKPLVPHSDLAEELRSLARDDERAARDQRRLLNRLRMDLVRTFPSALDIAGEDLGAPTMLRLLERWPTAQELANASRDELVGLARGNHHGWPERLAERISSALSQTQFVARPALVRAKADSIRLAATQLLLIGQQRKVWERRMGELLLGAPRHGRDHQPRTEELGEKFPDGEIYLSFPGLGDRLAARVAGEIGDHPEQFSSPNSLQCYAGKAPVTRRSGKSEFVVAHRLACNRHLRDAVQQWAFCSLNESGWAREFYQGKRAAGKSHNAALRALGNRWLEVLWHCVKNHTPYSEAVHVANRNRALGRAA

SEQ ID NO: 462154 - protein, 317 aa, unidentified
MDKPPAATCFVGIDVSKGHVDVHVRPDGTAFSCTTDPDGLANLITRLAPLQPQLVAMEASGGYEAVIAAALTEAGLPVAIVNPRQVRKFAGAIGRLAKTDAIDAGVIAHFADAIRPAPKPMPDALMLRLRELLARRRQLVVMVNAEKQRLGKAADKFAQRSFKTILRSLEAERARIDRAIDTLIQQSPLFCAKQDLLKSVPGIGDIVARTLIVELPELGSVDRHQIAALAGVAPMNRDSGRYRGKRRIQGGRVEVRAPLFMACLTAIRHNPPLRSFYRRLRDAGKPARLAIVAVMRKLLTTLNAIIRDNTAWTHVHI

SEQ ID NO: 462155 - protein, 370 aa, unidentified
MPSMPRPAQPDQDATATGEVVLGVDTHKDVHVAAVITALGALVASRSFPTTAAGYRKLLIWARTLGTLRRAGVECTGSYGAALARQLRAAGIEVVEVNQPDKATRRRRGKSDPIDAQAAAQAVLSGRATATAKTGDGPVEMLRMFRLAKGSAIKSRTQAINQLKAVLVAADPAVRESLSGLSTPILIHHCAQLQLQAALPSEPAAAAAYTLRLLARRILALTAEIHDLKQQITQAVNRRTPKLLARPGVGPDCAAALLIAAGDNPHRLASEASYAALCGASPVEASSGKTQRLRLNRGGDRQANAALYRVTLSRLRWDQRTRDYLARRIGEGKTRREAIRCLKRYIAREIYQIITESNPDPTSAAAAAAA

SEQ ID NO: 462156 - protein, 448 aa, unidentified
MKQEPEEIPDTEHELVLERVCAIDVAKDSGKVCVRVSSRAGRRVSKVWDVPARSGAVAELAEHLLAEGIEKVTVESTSDYWRIWFYVLEAAGLSVQLVNARDVKNVPGRPKTDKLDAVWLAKLTEKGLLRPSFVPPAPVRELRDYTRLRIDLTRERSRYWQRLEKLLEDALIKVSAVASTLDTVSVRDMLEALIAGERDPRRLAGLARGRMKPKYGALVEALTGRFDDHHAELTRMMLDQIDALATQIGTLTTRVDELLTVMEPQARADEPDTPGGAGAVADGARESTTIERLDEIPGISPGLAQIILAEIGLDMSRFPTAAHLVSWAKLCPRTIQSGAIQRGGKTGRGNPYLKGALGEAAAAAAKTNTFLGERYRRIVKRRGKLKALVAVARSILVIIWNMLNDPTARYADLGADYHATRINTERRTRTYVTQLMAMGYRVTLEPAA

SEQ ID NO: 462157 - protein, 337 aa, unidentified
MEYFAGLDISMEETRVCVVDREGAVVHEEKTTSTPEAIAASLAKAPSCRRIVFETGRMAPMLYHGLVALGLPVVCIESRQAYQALKSLATHKTDRNDARGLAHLARTGFFKPVHVKSLPAHAVRALIIARKKLVGQRVMLENQIRGLAVVFGVRLPRALSPGFIKQALRASEGITGLSAAMEGLVAARAAVLSAVAAIDADIKKMAKASTICGRRMTIPGVGHLTALAFAAAVDDPGRFRRSRDLGAYLGLVPRRFQSGEVDYTGSISKCGDRRMRTLLYEVANVMLTRYRGALKLKDWALAIAKRSTMRKARIALARRLAIIMHAMLRHGTLFKAA

SEQ ID NO: 462158 - protein, 341 aa, unidentified
METTALGLDLAKNVFQLHGVDAEGHGTVKKAVRRQHLLATFAKMPPCLIGVEACASAHHWARKLQELGHTVRLMAPQFVKPYVKTNKNDAADAEAICEALRRPNMRFVPIKSSEQQAVLSLHRARQGFVKARTAQANQIRGLLAEFGHVIPQGISHVTKQLALIIHDEQSQLPGVFVDLLHRLGEHLKELDRHVGELEVQIQLWHRQCLASTKLASIPGVGAITASAMVASIGDARCFKDGRQLAAWLGLVPRQHSSGGKPTLLGISKRGDAYLRTLLIHGARSVIRVAQRKAGHTGSWLNKLLERRSVNVAAVALANKNARTIWALLAHDREFRADYAPA

SEQ ID NO: 462159 - protein, 443 aa, unidentified
METESSAGSRRRCIGLDVHREFAQVAIWQGGLVTQAGRFATTPEGVRAFADGLGPADEVALEATGNTWAIATLLASRAGRVVVSNPVKTRAIAEAKVKTDKVDAEILAQLLAADYLPAVWRPDPATAALRRQVLRRAHIVRQRTRLKNQVHAILHRNLIPRCPAADLFGHKGRRWLAQQELPADELAAATALLRQLDFHAEELRLIDTDLGQVALDRPEVLRLMTVPGIDATVALSIVAAVGDFTRFRTPEKLVAYLGLNPRVRQSGGQPASHGRITKAGSAHARGMLVEAAWSASKAPGPLRAFYQRVAARRGMQVAVVAAARKLTVLCWHLIISGEDYAYAQPSLVAHKRRKLELRAGSPAARGRKGKSSGYSLKAVRAAERDLSTQAETAYRTMIAAWQPTRPARTTARTKGHARSGVDVAATTGARLPRPSRGDAARQG

SEQ ID NO: 462160 - protein, 337 aa, unidentified
MKYSGIDLHSNNSLVTVTDETDRVVAEKRLPNELSTILAFLSPWRGELAGVVVESTYNWYWLVDGLQAAGYKVHLAHCTAIKKYDGLKHSGDEADARHLAHLLRLGILPTGTILPPAQRAVRDLARKRMQLVRSRTTHILAVENITARELGARISSNQVKRLTAEVIDQMPIAADVALAIKANLAVVTAVSAQIELLEKRLQESVKAGSDYGLVSSIPGIGRVLATTILLETGPIDRFASPGNFASYARCVDSQHTSNGKKKGEGNTKNGNKYLAWAFIEAAHFAMRYCAEAKRFYERKKAKTNNVIAIKALAHKLARACFHMLKERKPFDVTRCFT

SEQ ID NO: 462161 - protein, 427 aa, unidentified
MNSTQNEKLKQLSERSLVIGVDIASELHYARAFDWRGVELGKVFKFENSAEGFKDFYAWIERLKKQAEKDCIVVGAEPTGHYWFGLASYLKEQSIKLVLVNPFHVKRSKELDDNHPSKTDAKDPKTIAKLVIEGRYNEPYIPEGIYAELRIAMVCRMRIQKDLNSIKNRIQRWLKIYFPEHERVFGKFDATSSMLVLQVAPLPKDIERLGVEGINRIWRDNKLRAVGMKRAKSLYEAAQKSIGCTEGESCSRMEIQLLLQDYHTKTAHYQVVTETIDGLCRQIPEVAKLLEIKGVGLVTVAGFLSEVGDIKRFHSPKQIQKLAGLALRESSSGKHKGQTTISKRGRARLRAILFQAVMPLVAKNAEFAEIHNYYTTRTKNPLKKKQSLIALSCKLIRVFYAILTKGTDYDPKKLMTDIHRPVEYLAA

SEQ ID NO: 462162 - protein, 339 aa, unidentified
MELYAGLDLHSRNTYIGIMDNAFNRVFKKRVPNHLELILQTLDPFRDQIKGFVVESTYNWYWLVDGLMDAGYSSAHLANPSAIKQYEGLKHSDDQHDAFFLAQLLILGILPQGYIYPKKDRPVRDLARKRMFLVQHKTAHILSLQSLIARCCARKVRANDMRHLSVEELEIWLEEEHLVLSAQANLDSVNFLKQKIKQLEKAIIQKVKLNKAFKYLLTVPGIGNILAMTIMLEVGNINRFPKVGNFTSYCRCVPSRRLSDGKSKGQGNRKNGNRYLSWAFTEAVHLGRRYNERFRRYYNRKVAQANTSLATKALGNKLARICYYIMRDQVPFREELFCQ

SEQ ID NO: 462163 - protein, 520 aa, unidentified
MMKRRMLGVDLGIRAPSVAVIANEEGEVISGGIRFELDVKELARVEQEALRGAPEGTKLHVVMEKTFPTCQYVSAFFRAQGHETSFAKPDQVKQFRKCLSPKVKTDERDAHVMARLPYLDPRQLERVHVASPALQALKMQVSQRGSMVKQLVVLKNQLIAYANAVWPGVSKAFGDLDSAHARSFLREQTPKNLLELEPQEPVEFLKKRGQIQLGYAQRLADKLLVLARRAVELHQLLPEQEIELDRIHTIELLEMIETHEERIQAKERELSKALLRCDPEQYLTSLPGIAEKTAPTIFSYFGEPERFPNTRKAQGFVGFFPETDASGDKDRKGTRITKNGPALLKRDIFLVTDHFRRIDPQGARMYYDQMVYKGKHHNSALCVVANRMVIPRILVTLREQRPYEFRDFEGKPIDKKQARQLAAEWQVPAEVRQRLRNKKHQTNECREGVSPQVTSELKAPRNGTPSRQGDSNPDRFTVTRDQLAMAVFRSVDQLLSSGENLEDIRLQLRHEEIKFFQKRT

SEQ ID NO: 462164 - protein, 345 aa, unidentified
MEKPMRIGIDTSKHVFQLHGVDAAEKPVLRRQLRRADMLMFFEKLPPTSLALEACGASHHLARLLTSYGHEVKLIAPQLVKPYVKRGKNDAADAEAICEAMSRPTMRFVPIKTPQQQAALMLIGVRERLIQMRTQVANSIRGYAAEFGLIAAKGICRVKQLLDRIAMDRSLPALARTLFTTQGKIYRQLEEEIAETEAQLAEWHRADECARRLAGIPGVGPIGASLLTMKTPAPELFASARQFAAWIGLTPKDHSTGGKTRTGKITRAGDEALRSVLVAGATALLRHVRAGRGKNANPWLLDMLKRKPPKLVAVAVANKIARIAWKLMVSGERYRSRSTNQPVTA

SEQ ID NO: 462165 - protein, 365 aa, unidentified
MREQDKRSRIKIGLDLGDRRHRFCALNKEGHVLEEGTLGNTRECLSELSCRYGGALIVMEAGCHSPWISRYLEQLGCEVVVSNPRKTRAIYQHERKSDRRDALMLARIARMEPALLYPVRHGSEQAQQDLLRIKLRDSLVRARVGVINSLRFTLKSLGYTVANPSTERFHKVIEGQIPEPVGRVIAPSVRALEELSLQIKLLDREIIALARSKYADTAWLEQIPGVGPITALYFVLKIQDPARFDRVRDVGAFIGLCPRRNQSGENDPQLRISKRGDAYLRRLLVSAAQYILGPFGPPSALRQYGLALAAGGTPRAKKRAVVAVARKLAVLLLTLWKNKSAYQAFPGHNGEKLRTPDLERLRCIA

SEQ ID NO: 462166 - protein, 383 aa, unidentified
MARTAQDDITTPTLYLAFELGGSKWVLGFTTELARPPRRRTLPAGDAKALVKLIAEEIQSAKERFDLDPDAPVKSVYEAGRDGFWLDRALAVLGVENVVIEPASLMVDRRARRAKTDRLDLQELLRSLVRHHRGERVWRVVRVPSAEVEDLRHLSRRRERLVKERTQHVVRIKSLLNLEGLKLRGVALRGFEEELSTLRRVDGGPLGEQLLADVRDELARLRLAQAQIDAIGKLQAKLLKQAAPKNPVVERAQRLTQLKGIGAVSAFVLSGEFFAWREFRNRKQVGALAGLTDTPWKSDGIDKQQGISKAGNRRVRTLAVELSWGWLQHQPDSKLSRWYRDQTSSGKKRFKRVAIVAMARKLLVELWHFLDHGVVPQGAVLSS

SEQ ID NO: 462167 - protein, 350 aa, unidentified
MTMVGGLDVHRQQITFDYVDDDGLVHWGQIWPATRKTVRVWLAEHCPDGDGEFALEGCTGWRYVSEELAAAGVGVHLGDPAEVAALRGPKKRAKTDRADARLLRTLLVEGRFPESWIPPAHVVEIRTLGRLYCALMEERRGWQQRIHAQLFHQGCPPVRALLSEVGREALAVAQLSAAGRQYVDTALRRIDELTVEIDPLRAQLVGFARRQAGCRALQTQYGIGGLCAAIMWAEIGDARRFARSDQLVRFAGLDVTVYSSADKRSPGHLSRQGSPELRWAAFEAAKCAARRGSPDYAYYRRLAAKRDGHNGKNPTLAVERKILRRCYHMLRELGDAALAMPVAERQDVAA

SEQ ID NO: 462168 - protein, 397 aa, unidentified
MSMYFVGIDVSKDYSSAQGLDREGKKVFYVEFAMNAEGFSQFLKMLRVHCEDLSGVTVGMESTGCYHINLFAFLCSEGIVCIVINPLLISNFARLSLRKTKTDKKDALTIAQFLLAHRGKLSQVSYSQSSQDLKDLARERESLAVMIAGLKNDVRRLLQMTFPELEHQCKLFTETMLRFLMKFPSARTIRIAKPKEISKALIHAEGKRKRVLISAEELIGLAKVSVASDSVAKELILSEKIETLLYLEEKKGRITEALVEACQLMRLDELDIITSVDGISKITGSSFLAELGDIETFRSYKHVIAFAGLDPSIHQSGQYEGISRLSKRGNRHLRRVIFLMTLCAVRSQNVFREYFLKRKGEGLPAKKAILATAHKLLRVLFAMLTSKSYFRKEVVEV

SEQ ID NO: 462169 - protein, 342 aa, unidentified
MNATTYAIDIAKSVFQLHWVEPDSGVIKRRKLQRARLLEFFAQLQPTRIVMEACGGAHHWARELGKLGHQVELLPPHKVKEAVSGNKDDARDARAIWVTATQKDVRRVPVKTVEQQAELFVHRVRSHWVSQRTATINQLRSMLYEFGIVAPKGRKKGVSWVGEHRAQIEQQVPPMAVQLMDQQLQALRELDERIETNERTLQQAQRTDETARELLKVPGIGPLGASALKAELGDGSAWKNSREFACCRGLVPRHTGTGGKVRMGGISKRGDPYVRTLLIHGARNVVNAPNPPRWIAEMLLRRPSNVVAVAVAHKLARIAWSIVAHGQKFDPVRAFGPRQAPA

SEQ ID NO: 462170 - protein, 462 aa, unidentified
MKLLYRRCAGLDIHKDTVSACIRRRIAGSAKTAMEEAVFGTWTQDLVRLRQWLREHQVRQVAMESTGVYWIPVWNVLEQGGGKTPLQLTLVNPATVRALQGNKTDRMDAGRIAEYLQYGLLRGSFVPPKRIRQWRELTRMRVHIQQDRNRVINRIGRLLETVNIKLGSVASNIVGQSGRAILGMLAKGVDRPERLADAAVGRLRQKMPQLLVALEGRTDEHFRWTLGKLLDKLERLDEELADVDTRVNSEMAEHAELIDRLCTIPGVDRITAQVLIAELGTDMSQFPTAAHVASWAGLCPGNSESAGKRFSGKTRKGDRYLRRILVQSGWAAARTQNCFFAALFARVAVKHGAKKAVVAVAHRLLKVVYYLMAEGGVYRERGGDYFDRRNATRTAKKLTRRLERIGFAVTLQRRPLDPVAPAQVVAADVCSKCHSWRLGQCVHDKPRPKRSYNRREPTESMS

SEQ ID NO: 462171 - protein, 339 aa, unidentified
MTEITRVGLDLAKNVFEVHAVNAQEQVVVRRSLRRSQVLTWFAKQPPCLIGIEACGTANHWARELTTLGHTVRLIPPAYAKQYVRRNKNDAADAAAICEAVSRPSMRFVPIKTVEQQADSVTHKARQILIKQRTMAMNSLRSLMAEFGIVVPQGPQHIGKLLAILADPEDTTVAAVARTALNTMSELLSTLEMQIGILDKDIRARARTDVTARRLDTIPGFGPILSSAIAAIVTDPRHFDSGRDFAASLGLVPRQDGTGGKVKLGPISKRGNGYLRRLLVNGATAVLNGKNARNDPWRAKMLDGKPRKLAAVALANKMARIAWAVMTRQQDFRPRAVPA

SEQ ID NO: 462172 - protein, 313 aa, unidentified
MAMETSDFIIGIDVAKAELVVHFQSHGTQMSLSNTKPEIKRWLKQQPANTALCVEATNVYHLDVVEMAHEKGFKVYVVDGFQLSNYRKGIGGRSKTDASDAALLGRYLERESRELRPWAPPPAVYGKLQSLLRRRAALVTMRTALSQSWGNEQLLKAAFKSFTQQMDKLDLLVQKKLKELLKEAGLLEQVARCQAIEGIGFLTATALVMAFIRGEFKNSDAFIAFLGMDLRVSDSGQKTGLRRLTKRGCPEIRRLLHNASMSASRSAAWKETYEHYRNKGKATTEALVILSRKLARVAFALMKKKEEYVSRTA

SEQ ID NO: 462173 - protein, 369 aa, unidentified
MSDHSEAFVAFDTSKLRNAVAIAEAGRSGEVRFFGEIDNTAGATAKLVKKLAGKYERLGFCYEAGPTGYGLYRQLTGLGHECIVVAPSLIPKKAGDRVKTNRRDALDLAKLLRAGQLTAVWVPDARHEAMRDLTRARGAAVEDLRSKRQQVSAFLLRLGRPYAGKTNWTKMHMNWLASQKFEHAEQRIAFEEMLLAVRQAQERIARLEQAIRTAVADWSLAVVVEALIAMRGIDMITATALLAEIGDLSRFRTPRELMAYLGLVPSEHSTGDKVQRGSITKAGNRRARRLLVESAWAYRHPPRVGKDKQAKVAAAPRAVREIAWKAQHRLYARYRALIRKGKLKTVVVTAMARELAAFIWAINREIATA

SEQ ID NO: 462174 - protein, 363 aa, unidentified
MDTNIITNQKKSRVSFFGQTIYLGIDVHKKNWSVTVYLGGTFFQTFHQESKSLVLANYLHSHFPGAVYKACYEAGFCGFSVQRELSSLGIDCIVINPADVPQTNKGSLSKTDASDSKRLAIALSKGMLNPIHIPDRVTEADRQLIRYHKKIQVQLQGRRKSLKSIFHIAGVIIPVEHDKPYWTGNFVKWLRSLALAETSLNKTIQLIVDDVEVFRKRLLETNKLIRELSVSDRYSEVFTVLSSAPGIGIITAMTMLTEIGNIERFDTFARFNSFIGLCPSEFSSGEDTRKGGMTPRNHSAIRPLIIEAAWIAIRTDPVLALKFNELIVTRTKKRAIVVIARKLLSRIYCIWTKKQEYEKGILK

SEQ ID NO: 462175 - protein, 351 aa, unidentified
MVKAKQSRQEQGGAMAPIHPHAAAVDGGATLHVAAVGPGADAEPVRSFGTFTADLNRMADWLKQCGIRTVAMESTGVYWIPAYEILEQSGFEVVLVNARDTKHVPGRKTDVSDAQWLQRLHEYGLLRGSFRPQGEIAALRAYLRQRERLLDYAASHVQHMQKALTQMNLQLHHVVAEITGATGMRVIRAIVAGERDPAVLAGLRDVRCKSSDETIRQALVGNCREEHLFALAQAVELYDAYQAKVAACDVRIEAALTRLREVAAKPVGQLPPPRHTTRQPNAVAFDVRAALHAIVGVDLTQIHGLGPYLALKLVGECGTNLTAWPNAKHFTSWLALAPHNKVSGGYAHCLG

SEQ ID NO: 462176 - protein, 366 aa, unidentified
MKKISTVQVLGNEILQEQKQTIGVDLGDRWSFYCVLEEAGKIILEQKVATTPEAMKQTFAKIPRSLIALETGTHSPWASRLLTELGHEVLVAHAQKVELITKSNRKDDRHDARTLARLARIDPELLGPVRHRSAKAQIHLTVIRARAELVSARTALVNAARGLVKSYGQRLPKCGTQQVNRELAAGLSTELREVLEPLLQEIESLNERIKEYDERMEKIAQEVYPEVSLLKQVKGVGTQIALTYVLTIEDPYRFEKSREVGCFLGLKPGRRNSGNSEPQKKISKEGDRYLRTMMVQGAHYILGPFGEDSDLRRWGLKLAERGGKNAKKRAVVAVARKLAVLLHRLWVGGEVYEPLRNSQKAMQAVA

SEQ ID NO: 462177 - protein, 344 aa, unidentified
MPTIDYIGFDIHKKTISFCVKARDGTILEEGTIPALRNKLLAWAKARPRPWMGAMEATLFTGWIYDLLKPLAQALKVAHPPMLKAIAAAKKKNDKVDARMIADLLRCNLLPECYMAPVAIRDLRRMLRYRNLVVQQTTRMKNRIAGLLMETGTAYNKERLHGKAYFSELLGSLQEVPRSVVELLQLSRGQVEFFAAIQRRLLKGLREHPELSQRVMRLESIPSVGEILALSWALEVGEVDRLPSIAQAVSYCGLTSAQHSSAGKEQRGPISKQRNPHLQTILIEAAKLAPRYNPQLAAVHQRELQRGNRNRATLAVARKLVAYLMAVDKSGQPFQMRASDKEAA

SEQ ID NO: 462178 - protein, 339 aa, unidentified
MELYSGLDLHSRNTYIGILDTDFKRVFKKRISNNLDLILETLEPFKDQLKGLVVESTYNWYWLVDGLMDADYGSIHLANPSAIRQYEGLKHSDDKHDAFFLAQLLILGILPQGYIYPKKDRPVRDLARKRMFLVKHKTAHILSLQSLIARCSGQRISSNQLRTFTSEDLQQLLKEQHLVLSAQANLDSISFLKQQIHRLEKVIKNKLKLSQAFNGLLTVPGIGHILAMTIMLEVGDIGRFAKVGNFTSYCRCAPTQRLSDGKSKGSGNRKNGNRYLSWAFSEAAQMSRRYNQRFRRYHDRKAAQTNTIVAARALSNKLARVCYYIMRDQVVFNEELILH

SEQ ID NO: 462179 - protein, 353 aa, unidentified
MNYVGIDYHKKYSHVTAINHEGKVIRSNRLENKPEVFREFFKRMEGQSEAVLEASRTWGVMYDLLAELDGVELVKLAHPQKVRAIAEAKIKTDKIDSHILAQLLRADLIPAVYIPGKRACSYKEMLPQRVFLVRMRTRLKNRIHVLLDRLHIPFPSVTDIFGKRGTTYLRKLNLPGVDGEILREDLELLEVFNKLVKEAEQEIASLLGDDPQVKLLRTIPGLGPILAAVVAMEIDQIERFIGPSKLASYAGLVPSTYASGGRIFHGKLLPMSNKWLRWALVEAAWGSIRTSPYCRIFFENHKWRKGPHTAAIALARRLSEIIWHVLTEKRAYEERPPKWQKQVSISPAALTAT

SEQ ID NO: 462180 - protein, 442 aa, unidentified
MSELAVLDPRAAFVDVGSEKMHVSIGGGPPQVFGAVTSQLQALRDFLIEHQVRSVAMEATGVYWLPLYSVLEAAGLDVRMVDGRQTRHLPGRKSDMQDCQWGSTLHAHGLLRAGFVPPAHIRRLQDYLRLRGEHIAAAAGHVQHMQKALERMNIKLHDVISSLTGASGLAVVRAILAGERDPAALLALCDVRIRKVKAERVVEALRGDWADEHLFALGQAVQSWDHYQAQITDCDGRIAEVLARMPGGDGPAAGAEKPAKPRTRPGVNAPEIPNLRELLQRMCAGNDATTLPAHSEYTVLQLVAEVGTDLTRWPTEKHFASWLCLAPGSAQSGKRRTTVKRRRNRAGQIFCVMARALARSKYIALGGYYRRMAARRGGLVANKALAHKLAILFWRVMVKGMDYVEQGLAHYEAQVLQTRQRLLRKLAKQFGQQLVPIQGNPP

SEQ ID NO: 462181 - protein, 365 aa, unidentified
MTSKEYYIGLDVHKDSIQMAVFEETGENPIYERRLKNNTELLIKEVRRFSQKGKTEAAYEAGSLGYTIHRAMKEAGISCYVLPADKVAKKRTERIKTDKRDARLIGRELRSKSIKPISVPDEEDEATRDLLRCREDVSEDLRRVKQRLLKFLLRHGHNYHGGGNNWTKMHWQWMDRCPFEQEHERVVYEEYRSQIYSLEERLKRLEQQVEETAESPRYKASVSRLRAFKGINYVIALAMVCEIGDFHRFANAKAFMSYLGFVPSEHSSGGKRNQGGITKAGNGHLRRLLIEGAWHYARSARVGKRLEQRRQNSPASAIDVADRALHRLHKKYIRLVMKGKHANTAVTAVARELAGFIWAVQVSAA

SEQ ID NO: 462182 - protein, 402 aa, unidentified
MNAVGIDVSKGKSMVAIMRPFGEIVSTPFEIKHTSSDINSLVKLIKSIEGESRIVMEHTGRYYEVLAHQLSEANLFVSAINPKLIKDFDNDSLRKVKTDKADSVKIARYALDKWQNLKQYSVMDELRNQLKTMNRQFGFYMKHKTAMKNNLIGILDQTNPGVNTYFDSPARSDGSQKWVDFASTYWHVDCVRKMSINAFIDHYENWCKRKKYNFSKSKAEEIYGKAKELVPVLPKDDITKLIIKQAVDQLNSASITVESLRTLMNETASKLPEYPVVMAMKGVGTSLGPQLMAEIGDVSRFTHKGAITAFAGVDPGVNESGSYEQKSVPTSKRGSSDLRKTLFQVMDVLIKTHPQDDPVYQFLDKKRAQKKPYYVYMTAGANKFLRIYYGRVKEYLASLPES

SEQ ID NO: 462183 - protein, 433 aa, unidentified
MIPASIERCAGIDVGKRWLAVCLMVGPLEAEPRTEKRRFGTNVRDLEALRDWLAQEGVTHVVMESTGSYWKPVFNILEERFKVYLANPLQVKPRKGHKTDDKDGHWLAHLLRHAMVLPSFIPPREIRELRDLTRRRKKLLGTASSEKNRIQKVLEDANVKLGNVLSDMFGVSGQCMLDALLKGKASPVEIADLAQCKARKKIPALVAALEQHRMNHHHRRMIRHSVDHLEFLEKQIIDLDGEIADQIRAANLVTQWELLQTIPGVQAAAAANILAETGVDMKQFGDEGHISSWGGVCPGNNRTAGKNKSSHTNKGNPWLKGTLTECAQAAAQKKNCFLKDKAWRLITKHGGKRAPAIIAVAHNLLRLVFQVLTTGEPYQERSATPLEPAQKERMIRHHIRRLGKLGIAVRSAAALPALIAAVAKDGSSAAATP

SEQ ID NO: 462184 - protein, 332 aa, unidentified
MSVYVGIDVHRKRSQVAVINEGGEVLANRNVPNGAKPILSVIGGLPAGTPAAYEAAFGWGWLLELLEGYGFEPHMVHPLQCKAIASARLKNDKVDAATLAQLLRADLLPEAWIAPPAVRQLRAMLRHRAQLVRLRTLLRNRVHAVLADHGHGRPAGCWSGPGRAWLASLELPAVSREVIDDALALMDALQQPIDRLDQEVRQRAKAGPRVKVLTQLPGVGPFTALVLLAEIGDITRFGSARKLASWAGLTPTVRGSDRTVHHGHISKQGPAWARWVLCEAAQTARRHPDFAPGYEALARRRGRKIATTAVARKLITRAYHLLTDASAVGEPG

SEQ ID NO: 462185 - protein, 440 aa, unidentified
MNEPNAIELVACIGLDWADRRHVICLQATGCPEAESLQLEQKPDALHEWIAQQRVRFQGGKVGIAIEQTRGAVIHALMMYDFLELYPINPKALARFREAFRVSGAKDDPSDAELLMDMLRLHRNRLRAWLPDTVETRRLQILAEYRRKFVNNRIRHTNRITSLLKMYFPQALDWAGELGTMQSCDFLQKWPTLTAIQQTRPAQLRKFYLDHHSRNLALIEERLAQIRTARSLTDDPAIVETLSLAVQAEAAQLRPVIEWIPRYDHIIAQQFALHPEHELFESFPGAGPVYAPRLLIALGTDRSRWASAADLQSHSGIAPVTEQSGNSCWVHRRLACSNFIRQTFHEFAAQSIQWSSWARAYYDQMRDRGLRHPAAVRALAFKWIRIIYRCWKDRQPYQEEIHLKALRDKRSPLGRQTRLTDQLRCPCRPCQSRTALYTGR

SEQ ID NO: 462186 - protein, 375 aa, unidentified
MPTNNASRPVVYLAIELSASSWVVACRHPMNEKIKMHRMEAGDFEALLALISDQRRKAVAALGVDVIVASCFEAGRDGFWLHRLLLAHGVINHVVEPTSILVTRGARRAKTDRLDAQGLLRVLAATFTGDHDACRVVNVPSVAEEDAKRPHREREYLVQERVRIENRIAALLATQGVSKRPSLRSWEADLDSLQTGDGRSIPPLLKAELNRLRRRLVITLDMIREIETERQQALEMQNDDASQTIGALCKIRGIGDNFAAVLTREVFYRSFENRRQIASYLGLAPTPFQSGGMDRDRRINRAGNSRARKTLIQLSWLWLRYQPESGLAQWFRLRVGALQGRSRRIAIVAMARKLLIAIWRFATLGIVPEGAIVAA

SEQ ID NO: 462187 - protein, 359 aa, unidentified
MTAPVIDSQIEIFGGVDTHADTHTAAALNTAGAMLGCRQFPATAAGYTALRIWLTDLGCVIRVGIEGTSSYGAGLAASLRASGVTVIEVDRPDRSTRRRRGKSDPIDAEAAARAVLAGRATGTAKTRDGVVECLRVLRIARNSARDQRADCLRRLKSLLVTAPEALRAQLRGLTDTKLVTTCAALRPDRADVSNTITATKIAIRALARRHTELTNELADLDELIHPLITRANPALLDVHGVGPEVATQLLISAGDNPDRLRSEAAFAMLCGVAPLPASSGKTNRHRLNRGGDRQANNALWRIALCRMKTHRPTRDYVARRTAEGLSKPEIIRCLKRYIARDIYRLLVPPAAGMEHALTA

SEQ ID NO: 462188 - protein, 344 aa, unidentified
MDHYAGIDVSLECSSLCVVDASGQIVREAKVVSEPEALIGWFSSLGLGLARVGLEAGPLSQWLYAAMKQAGLAVELLETRHVSDAFKAMPVKSDRNDARKIAQLMRLGWFRPVHCKSIAAQEIRAMLTARKLVQSKLLDFENSLRGILRGFGLKVGNTTRTNFAGRIEELVKGHPNLQTIGQALLRARAVLLAEFNGFEKRVRAMSRLHEKAALLMSTPAVGPIVSLTFACAIDDPSRFTSSKRAGPHFGLTPKKYQSGETDYTGRISKHGDASVREALYEAAHIMLTKPIKGCSKLKSWAMRIARRAGTNKAKVALARKLAVIMLRMLKDNVPFNPAAKAATA

SEQ ID NO: 462189 - protein, 345 aa, unidentified
MDHVIRIGMDTSKHVFQLHGVNAAEEPVLRRKLRRKDMVAFFEKLAPTVIAIEACGASHHWSRLLQSFGHTVKLIAPQLVKPYVKRGKNDAADAEALCEAMSRPTMRFVPTKSTEQQASLMLVSVRDRLIRNRTQLANSIRGHAAEFGLTAATGKAHVVRLLDRIQADTSLPATALELFTSLASEYAQLAVQIDEIEAKLTAWHQADECSQRLDKIPGVGPVGASMLKMKTPAPELFRSGRQFAAWIGVTSRDHSTAGKVRTGGITRAGDEGLRSVLVLGATAVVQHARRTGKGSPWLLELIQRKPPKVVAVALANKIARIAWKMMLTGEAYNANPAAAVSAAAA

SEQ ID NO: 462190 - protein, 349 aa, unidentified
MSHNLNNAVAVIGIDIGKNSFHVVGLDSRGAIVLRQKWSRGQIEARLANMPPCLIGMEACVGAHHLSRKLGTLGHDARLMPAKYVRPYSKGQKNDFRDAEAIAEAVQRPTMKFVATKTAEQLDLQALHRVRERLVSQRTGIINQIRAFLLERGIAVRQGLRFLRVELPRLLATPPDVLSPRMVGVIEGLAEDWRRLDQRIEQLSGEITALAHQDAGCKRLVSVPGIGPIISSAMVAAIGTGDAFSKGRDFAAWLGLVPKQISTGDRTILGKISKRGNRYLRVLFVQAAWVVLIKPQSWERHGLKRWLDAAKQRLHRNVLAIALANKLARIAWGVLARGRAFEASKFQAA

SEQ ID NO: 462191 - protein, 337 aa, unidentified
MEHVGIDVHQKYSEICWLSEDGEVKLRRRLATTEASLRRFFGRLSPVRVVLESSCVTPWVSRLIGEMGHEVVVLNSRRVRLIAESTLKSDTIDAEILARLSRFDLELLRPVYQRSEAAQELRTRLRVRGSLVKARTALINAVRGSLRSQGYRMGSCATKSFVARWVELRLEAGVREVLEPLVETIDELTTRIEALEQEIKIASRSDELMLRLQDVPGVGPLVSLAYVGWMDRAERFERSRDVGACLGLRPRVRGSGGKVRRGPITREGDCEMRRLLVQAAHAALLSKKDSLLKVWAEALVERVGKPKAVVALARKLAVLLHRLWVTGERYRPFPRTA

SEQ ID NO: 462192 - protein, 408 aa, unidentified
MNPLFVGIDVSSRNNVAYLMKPDGSKHSSFSVQNNLGGAKLLAERIVSALRSMQLSDVVIGLEATSIYGDSLVYALRENGSLGQFRRKIHVLNPKQVRKFKDAYPDLPKNDFVDAFVIADHLRFGRIAREVYMDDYRYQALRTLTRARFDVIQNLTREKQRFANYLFLKCSGVAQAKDIQNTSATTIALMERFETVDDLANADLEELTSFITETGRGRFADPNATAKAVQAAAMASYRLPKTVNDTVNQAMAVSIASMRALEKQVKVLDKAIEQQFEIIPNTLTSIPGIGKVYSAGIIAEIGDVHRFDSQASVAKFAGLVWRKDQSGDFEAEHSRMIKSGNRYLRYYLLEAANSVRRCDSEFRRYYDLKYHEVNKYQHKRALALTARKLVRLVFRLLKDNRLYIPPEG

SEQ ID NO: 462193 - protein, 345 aa, unidentified
MPIVGGLDIHRKQITFDYLDTVTGQVQRGQISPADRAHLRAWLARFADCEDVMFAVEGCTGWRYVAEELAAAGVTAHLAEPADTAATRGRKRHAKTDKTDCRHLRMLLAEGRLPECWIPPGHILEGRALLETYHDLRAEHTAWVQRIHAVLFHHGAPALGEGTLRTEQGLAALRAAAADCLSPAGQLQVATALEVIEALEARMHAVRHQLLDAARQLTGAKVLAARLYGVGPVTALALTCWLAGAGRFSSSRQAVRFAGLDVTVSSSDRKGPPGRLSRQGPPVLRWAVYEAGKTHARSSAPDHGYYAQVKDRKNSKRAALSEARKILRQACHILAELGDDALATA

SEQ ID NO: 462194 - protein, 440 aa, unidentified
MKKYYLGCDVSKGYADFVVLDSDKNIIENNFQLDDTFNGHNQLYSILTDFYKEHPNSSILSAVESTGGYENNWFNTLSKLNEVLNINVVRLNPLGVSHSQKAKMNRAITDEISAYNIAEYLINHQNKIDPNTSSYYSSLRKQWVFVKLLVKQKVQLLNQLESIVYTANTEVLSYCKHSTPNWLLQLLKQYPTAKRLVRVKVSSLVKMPYVTRLKAENLIAKAKLSIASSDDKTTESVIKATVEQILHLDKTIYYHEKQMSDSCNLPEVKILESFKGIATYSAVGLILEIGAIERFSSSKNLASFFGLHPTLKSSGDGFAAVRMSKKGKSEPRLILFNVARTAINSNPIIKEIYEKHVNRGMPKMAAIGCVMHKILRIIYGMLKNKQNFDPEIDKRNQSRSLPKKKTVKISKVRRYQSYDKLAPISRRQNNKRKEEKMSQV

SEQ ID NO: 462195 - protein, 330 aa, unidentified
MGKAKPQVIDDDEQQRVFDRVAAVDVAKATGMVCVRLPRQDGSRYSKVWEVTATMGAVTELGRQLMKDRIEMVTLEATSDYWRIFYYVLEMCGLAVQLVSPSQAKNLKGRPKTDKLDSMWLARLTEWGMLRPCFVPPAPVRALRDYTRARTGLVRERTRCWQRLEKLLEGALIKLSSVGPDAAVLPAALRLAEIPGVSEQMAAAIIAETGLDMTRFPAAAHLVSWAGLCRVASQSGPRSRGGKKVPGVWRRGVPAKLGPAAGAGGHGPALLATGVLPVRQAGAVTGSRCRFEHADQIRSLPFRPPGSLILLDFKGERGGGGREEEREDEG

SEQ ID NO: 462196 - protein, 386 aa, unidentified
MPKSNDLSKSLVTLDQGSTLIAVIEMSQSNWLVGAMVPGLGRDPRKKLPADEAALFGLLQRWRGEAEKAGAGITRIAVAYEAGRDGFWLARWLRARSVEAYVIHPTSVAVSREHRRAKTDRLDLALLKRAFLGWLRGEEKHCSMAAIPSLAEEDAKRPNRERETLVGESTRLVNRMKGALARLGVRGFNPKLKKAPARLASLRTPEGVPLPANTLAELRRDMERLALVKQQIKAIEAARLARLQEAPDERTHAMVRLLGRVVGIGIETADTLVHEVLSRDLRDRRAVARYAGLTGAPDESGKRRREKGLARAGNARVRRIMVQLAWRFLLFQKDSALVQWYRARTEATGKSRKTFIVALARKLLIALWRLVTSGDTPEGLVLRPAA

SEQ ID NO: 462197 - protein, 343 aa, unidentified
MTAVMIGVDPHKATHTAVVIGPAEEPLGELRVRASAGQADKLVAWAADWPERIWAVEGAAGLGRLLAQQLVAAGERVLDVQPKLASRVRLLQSGDTNKNDPNDARSVAVAALRSKTARPVIAEDYPAVLKVWSKRHRDLARLRNQAACRLHAVLCDLVPGGHPKEISAAQAARILEQASPTGAVGQARAELAAEFLEDVRRLDAQLRDTRKKLAAAVKSSGTTLTEVFGVGPVIAGTIIGDIADVSRFPGRDHFASYNGTAPVEVSSGNRKTHRLSLRGNRRINHAIHMAAITQIRHKHSAGRAYYDKKIAEGKTHKEALRSLKRRVSDAIYARLLADARRAG

SEQ ID NO: 462198 - protein, 426 aa, unidentified
MQKAEKKALVYGNVLIVGVDIAKKNHYARIYNTMGIDVVKPFYFHNSREGFCRLLGKISEAKGKEKAERVIIGMEPTGHYWKPLAYFLKEAGYTVVIVNPYYVKNSKEMEDNSQDKNDRKDAGLIAQLVKEGKFLHCILPEGVYAELRTLYITRQQQHKKLNAALCQLKTIIDEYFPELMEVFKSLLGKAAQWVLRNCPFPKDILSLKLEELEGGLKQASNRRVGIKRAVALRQAAEKSIGVKEGLEGAKVKLQACLEEIEFYQSQIKKTEEAMGQHLEATGLASYLLSIPGVGVVTAAGFLGEIGDPTKYQHWRQIQKLAGYNLTAQKSGQKQKAKTTISKRGRPGLRNLLYQASLILVAKNKEFKALYHYFLRRPENPLTKKQALVAVALKLVRVMFTLITQKKEYDASKVLGKYREEQLKKIA

SEQ ID NO: 462199 - protein, 387 aa, unidentified
MSLYCGIDWSERYHDVAVVDETGALKAKRRVNDDPEGWRELLQLLADLGDSADQPIPVAIETTRGLLVSCLRATGRTVYAINPLAVAHYRKRHSVSRAKSDHADAMTLGNILRTDAVAHRPMPADTPLAQAIAVLARAQQDAVWNRTQLANQLRSLLREYFPAGIEAFNLKNVGLTSVEARAILAAAPTPGQAATLTTTDLAALLRQAGRQRNITTWAKRLHETFNHEQLRQLPEVEQALGHHATALLHQLDAACRAADDLADTVTKALDEHPDAKVILSFPGLGPLTGSRVLAEIGDDRTRFADARALKAYAGAAPITRESGKSRVIQHRKVKNQRLAATGYHWAFAASPLLAPEPTTTGAEPPATTTPQRCATCSTVCSANSATA

SEQ ID NO: 462200 - protein, 370 aa, unidentified
MKEYSEAFIGFDTAKKKHAVAIADVGREGEIRYLGEIDSSPLTIERMIRKLAGRYEKLHFCYEAGPTGYGLYRQVRGLGHHCTIVAPSLIPKKSGERVKTNRRDAVSLARLFRAGELTSVWVPDTVHEAVRDLVRARETASQDLRRKRQQLLSFLLRHGRIFSGRQHWSRAHLRWLAQQKFDHPAQQIVFQDAVDAIDDAAARLRRLDAQVAAIVPSWSMAPVVEAYQAMRGVSFAVAVTFVADIGDLRRFDNPRQLMAFLGLVPSERSTGERVRRAGLTLAGNKRARRVLIEGAWSYRYPARVSQTLQARLEGLPKAVREIAWKAQIRLCARYRRLNATGKKLPVVIAAIAREMAAFLWAIARHVAPAA

SEQ ID NO: 462201 - protein, 473 aa, unidentified
MNIKGKRRKNQVVNIFEQQEMIAKAEVIKNSLKAFTWHELETNGKFDKNDKLTFISDDMLILGCDIGSEIHYVRAIDTRGRELSKSAFAFSNTREGFEGAKDWAVQLAAVYNKKQIVLGLEPTGHYWFCLATWMVTNGISVVQVNPYAVKQTKEVEDNSQLKDDRKDPKLIANLVKDGNFGMPYLPEKVYADMRRLSMFRDQLNEDRIRNINRLHREMKIYFPEYKDAFGKTDGLFCLEVLRIAPFPEDLLKLGEDGIRQIWREAKLRGRGYSRAGEIIKYASESVGLKDGTEAGKTVARWFAEKIMELDKKLSETEGELMQKCRQIPHAEKILEISGIGENTLSGILAEMGDITRFDDVKEIQKLSGLNLVSCNSGKHNGQTKISHRGRKRLRYWLFQAAKSAVAHAEEFKEVHVYYTTRVDNPLKKMQSLIVIACKLLRVIYAILKKGVTYAPKKLLSDIKRPEKQTVQAA

SEQ ID NO: 462202 - protein, 344 aa, unidentified
MKALKSHVAGIDVHKEMLAITVLIGELDGEPKEYQFESSTFTDDLMALGLKLKEMGVTDVAMESSGIYWKPVFNVFNPLGLKVVVANAAHIKNVPGRKTDMNDSRWIAELHRFGLIRASFIPDGEFQRMRLLSRHRTNLTEDLARVKNRIQKVLEDGNIKLSIVVSDIFGVSGLKVLKQIAGGYTHPNILITEVTTKIKRMEEMKKALTNCLTTEHCFVINVLMKQYEELKNRIEEVENELCKKVEPYAHLVEELDKIPGIDAILAMGIIAEASANMSSFKDERAFAAWSAVASGNNESAGKKKRAKCRKGNPALRKMLIQAAQKATTARNRFIALNTTNSAFA

SEQ ID NO: 462203 - protein, 372 aa, unidentified
MTQHDATTQLPICDTAVATENPTATLQVVGGVDTHKDTNTAAVIDTAGRTLGIAQFPTTPAGYGSLLAWLRSFGTVALVGIEGTGAYGAGLASHLHLAGVAMVEIDRPERKTRRWQGKSDPIDAEAAARAALTGRRTGTPKLRNGQVEALRVLRVARRGAVGDRADAQRQIKTLIVTAPDSLRSQLRELSDRRLIEVCATRRPDRAAAANPAVATVIALRSLARRHQQLTDEIDELDSLIAPLVEAINPRLCALLGVGPDVAGQLLVTAGQNPERLRSEAAFAMLCGAAPLPASSGRTHRHRLNRGGDRQANAALYRIVLSRLRWDPRTQAYTERRTTEGLSKKEIIRCLKRYIAREIYTALTSTKQLEPAT

SEQ ID NO: 462204 - protein, 364 aa, unidentified
MLANRTSVGLDVHARSVVACGLDGQTGRLFERRLTPDHDEIIGWIRSLPGPVAVAYEAGPTGFGLARFLGAKGIDCQIAAPSKLQRPCGDRVKTDARDARHLARLLHLGEIVSINVPSVEREAARDLVRARDAVRGDLMRARHRLSKLLLRHGIVYYGGKPWTGSHDVWLRAQRRGALFATPGLGLAFDTAYDTVLATLARRDRLDAAITAMAAQSAFTPVVCRLGCLRGVATLTAFGLAVEIGDWHRLTGSSIGAYLGLVPTESSSGDSRSRGSITKTGNGHARRLLIEAAWHHRPPFRTERELRRRQDAASPAARDRGQRANRRLHARWAAFDARLKLPVVANTAIARELAGWCWSLAVLDD

SEQ ID NO: 462205 - protein, 370 aa, unidentified
MSEPTTLFVGLDVHKDSIAVAHAEAHRADPPHYVGSIGTRQVDIDKLVRRLHSKASNLVFAYEAGPCGYVLHRYLTAQGLDCQVVAPSLIPKRPGDKVKTDRRDAVEIARLLRSGDLTRVYVPSVEDEALRDLCRARDAALVMLKAAKLRLKSFLLRLGLHYTGRADWNEAHRRYLAKVACPTATQQIVFQESVHAVDEQVERLRRVEKELLDVIPKWRLYPIVEAFQALRGVQWTVATIVASELGDITRFDSPRQLAAFVGLIPSEYSSGENRRQGGITKTGNGRARRALIEAAWAYRHNPKISVQIQKRIESLPKPIQDIGWKAQLRLCKRFRRLSARGKHSNIAVTAVARELIAFMWAIAREVPINS

SEQ ID NO: 462206 - protein, 410 aa, unidentified
MEIILRCCAGLDVHKDGVEACVRRIEAGDRLEQEVRHWSTLTRDLQGLAQWLKAQGVTHVAMESTGVYWKPIFNILESEFEVLLVNPKALKHVPGRKTDVQDCQWIAQLLQYGLLKGSFIPPRGQRELRDLTRQRSQVIGEHSRISNRIQKVLEDANIKLGSVASEAIGVSGRLMLRAIITGENDPQQLAELAKGRLREKIPQLQQALYGKVTEHHRWLLALLWDELVAAETFIARLDQRIEQLTRPQQPVLEKLDAIPGIDRRVAEVVLAEVGTDMRPFPSDGHLASWAGLCPGNNESAGKRKSGKTTKGSRWLRQALVQAAWAASHKKDSYFQAHAQNLMRRRGKKRGLVAVAHSLLLVMYHMLKEGNEYCDLGRDFLDRIRSQHLIRYHVKRLEQLGLTVSLSAEAA

SEQ ID NO: 462207 - protein, 291 aa, unidentified
MEIRTIGIDLGKTVFHFVGVNARGEVVVRRKGSRTQLLRFTSNLRACLIGMEACGGSHFLGRALREQGHDARLMPAQYVKPYVKTNKNDYIDAEACAEAVTRPTMRFVPIKTDDQLDLQTLHRVRERWVVRRTAVINQIRGLLLERGITIRKGRNHIEQSLPGILEDADNKLSGALRVLLTQLRLEMQYLHGQIGETDKLIGRICGELEQCRRLVAIPGIGPITATATIAAIGNGAAFKKGRGFAAWLGVVPGEHSTGGKQKLTGTSRRGNKYLRKLFVQGAHTVLLQKTK

SEQ ID NO: 462208 - protein, 313 aa, unidentified
MATSIYVGIDVSKDRLDVAVLGEDRVWQVDNTPRGVAELVEWAQEIQPELNVVEATGGYHRGVAQALFEAGLAVAVVNPARVRQFARACGILSKTDKLDAQVLAVFGQRVQPRRYESKSEGEQELSALLVRRRQVEEMLKAEQNRLRTISKNLRGSVERMIACLKEEKKTMDAQIQEFMGNQEAWQEQTKILGSVPGVGMITTATLLAELPELGKMDRKKIAALVGVAPMNFDSGKKRGYRKTKGGRGGVRSVLYMSTLVATRYNPRIQAHYQQLLKRGKEKKVALTACMRKFLTILNAMMRDRQSFRYAAAP

SEQ ID NO: 462209 - protein, 412 aa, unidentified
METIHERVAGLDVHKDTVVACVRVPGGRGRRESHTHEFSTTTPGLMALRDWLVAHQVGLVGMEATGNYWKPVYYALEDASECWLLNARHLRNVPGRKTDLADAAWIAQLLEHGLVRPSFVPPPEIRELRDLTRYRKAQIEERAREAQRLDKVLQDAGIKLSSVASHLMGVSAQAMLRAMVAGERDPQILAELAKGKLRRKLPELAEALEGRFRGHHALLVGEILAKLDYLDEAIERLSEQIERVLGPFAPQAELLRTIPGVDRRMAEALIAEIGVDMSRFGSSARLASWAGVCPGQHESAGRQRHGTTRKGSKWLRMHLTQAAKAAARTKGTYLGAQYARLRGRRGGSRATIAVAHSILVAAFHILERGTPYEELGADWFIRRHSPERHARRLVHQLETLGFDVRLQERAAA

SEQ ID NO: 462210 - protein, 339 aa, unidentified
MHIVGCDFHPGWQQVAVLDTETGEIQEYKLENSSGEAERFYRRLSAPALVGLEASGNSQWFEDLLQTLGHAVWIGDAAQIRASYVRKQKTDRRDAAHILKLLLENRFPRLWRPDVQQRDLRQLLIHRYKLVVIRVRVKNGLHHLMLNRGIQLKRKLWSQAGQRVLRELPLEGWAAQRRQDLLQLLSSLDEQIKTLDEAVTLEAKRHSQAALLMTQPGVGPITALAFVLTLGDVGRFRRGKQVASYLGLIPSERSSSQRRRLGSISKQGNPFMRMLLVESVQAVNRLDEGFRKQYQHRCHRKAKGVAKVAAARRLAVRLYWMLRSNTPYPEIARIESSSR

SEQ ID NO: 462211 - protein, 338 aa, unidentified
MSKLFECIGVDVSKNTLDVAFFRGEIDWNQCHVRVSNNESGFKELKKWLRNKQVDKKRLRVCMEFTGLYTQVFRMWLESESITYYMVDPKRMHHFTPPLNIRGIRQIKTDKTDAFRIAIYCSFFHESLVPSKLPSPAYFKLKRLLAERRQYLKQSTLYKQQLHDISIYDSVSSRIRKQDELKSLKDKIKQTEVEMKAIIESDTLIKKNYKLLLSVVGVGFVVAVTTIVLTENFTSFTNPRKYACYIAIAPFPYESGTSVRGATRVSKQGFRQAKADLSICVLPAIRFDPEIQEYWHRKKAEGKHTGVVFNAIKFKLVLRMFAVVKRGKPYVNTKGYKR

SEQ ID NO: 462212 - protein, 399 aa, unidentified
MSGLKGNFDCIVGIDVSKDKFDACGITGEEAKIFQFSTSMDRKGFEKLKKHLSSFSVSSVLIGMESTASYHVNLFSYLVAAGYKVILINPLQISNYVKMELRKTKTDKKDAVVIARFLLANGDTLIQRATPSLISDLRDLSRQRESLVDEMTSLKIEIKQLLNITFPELEHMVGIFTKSILKLLQQYPSAIALRDADIDQLSQTLITDSYGHKREEFAKALIKAARFSIGTNSPAKEIIIKQKIRFFLHQEEALQEITDMLMEMARKLMEEDINIITSIKGIGDKTAANFLVEMGGDIHKFECSGKIIAMAGLDPAVYQSGKHEGKGRITKRGNRHLRRIIWLMTTSVIQYTDIFHAYYQKRRKEGLPYKKAVLATAHKLIRVIYAMLTQRKTFCPQPN

SEQ ID NO: 462213 - protein, 344 aa, unidentified
MDHFAGLDVSVKETSICIVDDAGKIVREVKVASEPEALLAVLKNPAYHFKRIGLEAGPLSQWLFSALADAGLPVICVETRHMQAVLKAQINKTDRNDARGIAQMMRAGLYRPVHVKTIRSQKLRMLLTHRKLLQSKAIAIENDLRGTLRNFGLKVGMVGKVKFEARIKELVENLPDLAALVEPMLIVRRTLREQIVILHRRLLAIVRDDEVCRRLMTTPGVGPVVALTYRATVDVPARFRKSKAVGAVFGLTCAKYQSGEVDRNGRISRCGDEMMRVMLYEAAQSMLHSKKWSWLKAWAMQVARRRGMKKAIVALARRLAVIMHRIWVDGTEFRWTRERATAAA

SEQ ID NO: 462214 - protein, 334 aa, unidentified
MDKVTTVGIDLAKRVFALHGVDAAGRVVLRRTVRREQLMEAMAGLTPCVVGMEAGSGAHEWARRFQALGHTPRLMAAKFVSPYRRKGKNDDNDAEAICEAVGRPNMRFVPIKSAEQQALLTLHRVRQGFIAERTALINRIRGLLAEFGVVLAQRSPVVRRHSLAAAENLPVLARRAIEDLCAHLRTLDERIAGYDAELRAQARTCEPAQRLMKIRGIGPLSALAIVATVGNARDFRSGRQFAAWLGLTPRQHSSGGKARLGHITKRGDAYLRTLLVLGARSVLQTAARHSDALSRWVLSVQGRRGYHRALVAIAAKNARIAWALLSRNQTLRIA

SEQ ID NO: 462215 - protein, 343 aa, unidentified
MQTVTTIGLDIAKSVFQVHGVDAAGQVLIRRQLKRRYVLAFFQKLPACLVGIEACASSHYWSRELQALGHSVRLMPPAYVKPYVKRQKNDMADAEAICEAVTRANMRFVPTKTPEQQSGLMLHRTRHLLIRQQTSVINAIRAHLAEFGITAPVGRTGIEELLRVVADPSDKRVPELVRTCLAALGSQLLGLKKQILQFDRMILAWHRSNQTSKRLNCIPGVGPLLATALTASVADAKSLRSGRNFSAWIGLVPKQHSSGGRERLGSISKQGDRYLRRLFVAGALAVIRYAKLHGTNHRPWLTALLARRPTKVAAIALANKLARMAWALMARGGRYNYPIALRP

SEQ ID NO: 462216 - protein, 425 aa, unidentified
MNSSTNQKINQVSENTLVIGIDIAKHKHYACAIDERGRVLQKSFPIAQSHAGFEAFYMRLLALKSTYEKQDIMVGFEPTGHYWMNLAAFLTNAGIPFVMVNPFHVNRSKELDDNLQTKNDQKDALVIARLMRDGRFSYPRLLEGVEAELRNGATLRSKLQEDLNALQNRIIRWLDRFFPEFTQVFKNFGKMAYAALEMTPLPSDIQGKTPEELLFLYRQVDGMKSPQLPKAKQLIEVAQSSIGLTEGLGMARLEIATLLSQYQLMQGQLDKLTAQLIELAKQMTDYEYLASVPGIGDVTIVELLSEVGSLTQYEHPRQLIKLAGLTLRENSSGQQKGQKRISKRGRRKLRALLFRVMMPLILHNEAFKQLHEYYTTRTTNPLRKKQSIIVLCGKLLKILHALCKKKAIFSQQQMMSDFACLQTAA

SEQ ID NO: 462217 - protein, 381 aa, unidentified
MNHSTTPQTEQNLFAHYYIGQDLHQDNVVVHVCRNEFSNGSIRSKTILSKKFSIVGPEAIAAYFKALEPYCFNQPHTAIVESTYNWYWMADGFESRGWNLRLADPSTVSRANIKYADDYTDAAYLVECLRTGSLRTTWVMPKDDRAIRDLARYRMTLVEDRARLKTIIVNMITNHLSIKLTSDKLIREIDKSVEAAIESPSEEVAQQVLATYFDHRLVRIKVGSLLNRIRFLATEIEQLDQELLSLLKPNLYSKSLQTIKGCGFVTSMIIALEIGEIERFNTHKDFVSYCRLAPTSKLSNGKSKGVGNAKNGNAYLSWAFTELANLVVRFNPEAKRYYDRLFNRSRLRVKAIRSVAAKMARAIFMMLKHGETFDLKRCFGC

SEQ ID NO: 462218 - protein, 338 aa, unidentified
MATTTTIGIDLGKSSFHAIGHDLSGKETFRKKLSRTKLLQMLSVHEPVNVAMESCGGSHWLARKCKSYGHTVKLIPAQYVKPYVKTNKNDFIDADAIAEASTRPSMRFTSPKPEEAQVASMVRKVRSSFMKERTACMNRIGAMLLEFGLSLPRGHSHLKKLFAWIELQNEVLPNSLVCELKTQVEYYQYLSEKIELQEKKLRLINKENIRYHLLQTIPGVGPLTAACCVANVANPKDFSNGRNFAAWIGLVPHQHSTGGKSRMLGISKRGNSDLRELFIHAARSILKKTETAEKHFGEWVVNLKRNKPFNVVVVALANKLARIAWSVMVTNKEFSLKI

SEQ ID NO: 462219 - protein, 343 aa, unidentified
MDEISMIGLDLAKNVFQVHGIDVSGKVVLQRQLRRGAVEKFFAKLAPCTVGMEACGSAHHWARVIGGYGHDVKLMPPAYVKPYVKRNKNDGRDAEAICEAVSRPTMRFVAVKSIEQQAMLSVHTTRALLVKQRTMVANALRAQLSELGIVAAQGHKGLYELMARLEAPSEEIPEMMRNALLMLVGQWQALDANERALEKQIVKATRCDREARRLMEAPSVGPIIASMVLAKVSDAKVFRSSRDFAAWVGLTGGDHGTGGKHRPGRISKQGDRVLRTLLINGANAYLRQQKRRGVSDPWLRELLARRPYKVAMVAFAAKTARIIWAMLAKGEAYRDRASASAAA

SEQ ID NO: 462220 - protein, 346 aa, unidentified
MQYVGIDWAYRHARWCAISEHGELVAEATTPADEDGLLRLIARLGPDVRACVEMMSGAVWVRDCLERAGWRVEVADARKLKGLAPLAAKTDRVDARLLATLAFRDLVPALWVPALSERALSERLKRRAHLIRLRSSAKNRSFGLLSQWGLRLSLQRLREPDAAELLESRGVPEVWRRSVFEAVALVDHLDRRLAPLERELLPLARADRRVQLLDSIPGVAAILGLTLAVEIGEVSRFATARKLVGYSGLTPSVRQSGESSRTGRLSKAGSATLRWAAVEAAQHAWRESNPWHRLYRDVKQRTGKTNAAKSAVARKVLIAAWHVLSREQPFKPHSPVSASSPQPLAA

SEQ ID NO: 462221 - protein, 408 aa, unidentified
MLKIVYPNCCGIDVHKTFVLAVIAITDEHGVTQYFRHRFSTFTKGLGELKQWLEYYSCTDVCMESTSKYWIPVYNVLEDSCSICFAHPKYVKAIRGKKTDKKDAKWIADLFKHDLVAGSFIPPLPIRELRDLVRYHFKLTNSCSSEANRLQNSLTVSNITLSSVLSDVLGVSGSRIIDAILEKPTDEIDLSALIHGRLKSKLSELELAIDGKITDEQAIKIRIIKSHYDALTLCKSDLEKAIIEVAEEFKAQQELIQTVPGCANQFTAIKIISEIGVDMWQFPTAGHLCSWAGLTPTNNESANKKKSVRISKAGHYLKPLLVQIANGIAKSEKYPEHRNKYLQLKKRRGHKKAIIAIARRLLTAIYHVLLKVEPYDSSYYSIEVVQPNRVMTINEAVSFAKSHGFVVS

SEQ ID NO: 462222 - protein, 336 aa, unidentified
MQIHSVGIDLGKTTFHLVALGAAGNVLVRKKFTQKQLLAYTANMQTSLIGMEACSGVHFLGRALHKQGHDVRLIPAQFVKPFVKSNKNDFIDAEAIAEAVERKNMRFVPIKTDDQLDLQAIHRVRDRLIARRTAVINQLRAFLLERGLVFARTPAKLKAAMADILENAESNLTSRMRNLIGGLWSEWKLVEQQIEELNDELERISAADAGCTRIRKIPGIGPVVATAIVAAIGNGAAFRKGREFAAWLGVVPRQYSTGGKAKLFGISKRGQEYLRRILIHGARAAVLHIKRDRAPIGAWLDALDARAHKNVVVVAMLARIAWAVLSSGNEYRPVAA

SEQ ID NO: 462223 - protein, 421 aa, unidentified
MRGIRGKRVKTVKEGTLIVTIDVGMTTNTGYCTTTDGRDIKPFKFGNTREGLDKLWSMVVSTRNRFNCIEVMVGYESTGPYAEPLVQYLMDKPATIVQVNPLHTKRIKELNDNSPRKTDDKDPRVIADVLRLGHALSVIVPEGDAAYLRRLNNARERHVGERTALLNQLQQLVFLIFPEFRTVFNDVTVKTARHLLKNYTTPATIAGLNKDDLGEEIRKRSMGKFGMKEAEALINLARDTVGIKEGAAGMVMDIRHILVQLQSVNGFIEEIETEMKKTLERIPSSARILSLHGLGVVTVGGLIGEVGDFLKFRTQSEIMKLAGLDLFEISSGKRKGQRHISKRGRSLLRKILYNAAVGTVRKNGIMCDYYERLIGRGMVRTSALIVVAKKLLRIIHAMLRDGRDYIHNYASPKRVVIKKAA

SEQ ID NO: 462224 - protein, 340 aa, unidentified
MSEITTIGLDLGKHVFQVHGVDAEGTTVLRRQLRRGQVLAFFSRLPRCVIGLEACATAHYWARELAALGHEVRLMPAQYVKAYIKRNKNDAADAEAICEAVQRPTMRFVPVKTAEQQASQLLHRGREQLVRQRTMLVNALRAHLAEFGIVAAQGLRNVGQLIAMVRDDDDRRLPDLARQVLQVLADQIEQIEAAITTLERQLLSWHKSNAVSQRLASIPGIGPIIATAIATTVADPNVFRSGREFAAWLGLVPRQNSTGGKTRLGGITKRGNRYLRRLLINGASANLLRSKATKADPWVIGLRRRRPPLVVAVALANKTARIAWAVMLRQKEYQPRAVAA

SEQ ID NO: 462225 - protein, 311 aa, unidentified
MASFLGIDVSSLSLDALVRPQGIKISVRNDPTGFEELVKSLRGLSIKRVLLEATGGYERDVMRFLQDANYKVIRVNPKRARWFADSLGIKAKTDAIDAAVLAHFAEVIPDKPTLKTSPERALLRELLQQRDRLVQQRDDDRRRLKQAQSAMVAIFLKTNLQHFASQIKLVEQAIKRQATVLNDERIAKLDEVKGIGMVTATKLVALLPELGHVESREIASLVGVAPFNHDSGKSVGKRFISGGRFEVRRALYMACLVAVKHNPTLKARYEALRGRGKLAKVALVACMRIFIVRLNAMLRSGTPWRDDLPQP

SEQ ID NO: 462226 - protein, 461 aa, unidentified
MKNTAARKRKQVPEGYLIIGVDPHKKKHAAVAITQDFTLRDRFKFDNTREGLEFLLRRVKAEMVKSNCRGVMFAIETGAHHWRNLAYFLDEKGIPLRLINQFTLKRRREGKDLNHRKNDYRDSEVAAQLLCTGEFNAARLSQGVYAELRAAYGSYRRLVKEKTRIVNLVKSLLDGLFPEFTQVFKNPCGQTAASVLCTCAVPQAIAGMTESEFAGTIKAACQGRVMMGKLRVLHHVAMTSIGIGAGAQSVSSEIAFLIEKFRLIEQQLRQLNEALTSLVHETKEGKYLLSIIGLSYVSVAGIIAELGSFSSYQNAKQLIKMAGSNPTESESGGKRHSHTPISKQGRPVLRHCAWTAVIPMLRFNPDFRDWAKKLRERPAGANPLSGREVMVAAVNKLLRLAFALVKNQALYQIPEPQPVEIAIWEASNTSGGQGNTAGSFGSSYEPTRQKTWCPALLAKPV

SEQ ID NO: 462227 - protein, 394 aa, unidentified
MPELFVGIDVAKDRSSAQGIDSNGIGRFSLTFTMDSEGFMQLWKAIAEQSKDLSEVRAAVESTACYHINLYSFLTAKGVSTVVINPLLISNFTKLSLRKTKTDKKDAMSIAQFLLANRDTISQLTMSQDLQDFRDIARERESVGNMLTAHKVEIKRLLQSTFPEFERIGNLSTRVLQDFILEFPSARLVKMAKPKAIQKILQRKWVGTKLTYTAEDLIQAAKQSVATISPAKELILQGKVRTLQHLQERHEELTKILTEYCKSSMLEDFEIVTSIDGINKGTATTFLAEIGCIGNYPSHKKLIAFAGIDPTVYQSGKFEGASRISKRGNRHLRRVIWLMTVNVIHHNNTFRTFFMKKRSEGQPFKKAIFATAHKLIRMLFAMLSQRTMFREACI

SEQ ID NO: 462228 - protein, 412 aa, unidentified
MKPFYRVAGIDVHKSMLAVVVGVADQPEKDWERRKFGTTVSELKHLAAWLQERGVQKVVMESTAMYWRTVWIALEPHFPLELAQAQSNRAPHGRKTDFGDTVRLVRRLWAGELRLSYVPDVEQRRWRMLCQAMQQVQEERTRVRNQIEVLLEEGQIKLSAVVSDLLGASGRLILKALVAGRQTAAEMAEMAFGRLRARSEELTAALEGTLDEICRGLLDQGLKRIEVLDGQQQEQRQWLGKMQREYASVLRRLGQVPGIDVLAGQKILAAAGPTAAAFSSSADLASWVGVCPGRNESAEHSAGEHCPKGYRPLRGLLAQAAWAAVRTKGSYFQELFRRWVPRMGVKKAIWAIAHRLVCIIWCILHRGDTYVERGALALDEAGRQRKKKRLLQGLRQLGYEVTLNLIPEGVGG

SEQ ID NO: 462229 - protein, 344 aa, unidentified
MNYYAALDVSLRSVHLCVIDDEGQLIAETKLSSEVTDIIAYLDALHLEISIVGLEAGTLAQYLTYGLLSADYQVVCMEARQVKAALSAMRNKTDKNDARGIAQLLRTGWYSKVHVKSMASHRVRALLSSRKAVLSKCIDLENEIRGLFKVFGIKLPPKLGHGSFDVAVRDIIETDATLSHALLPLLDARLVLYHCFRELDNRTRHMAHTDPVCQRLMSAPGVGFITALTYKAGVDDPYRFKHSRTVAAHFGLTPRRFQSGEIDIDGHISRCGDRDVRCTLYTAANALLTRSAKWSPLKAWGMKLAKTRGHRRAVIAVARKLAVILHRMWLDDVSFHWSTEAARS

SEQ ID NO: 462230 - protein, 344 aa, unidentified
MEYYAGIDVSLECSSVCVVDANGKIVRETKVASEPEVLIGWFGSLGFGPARIGLEAGLLSQWLYAAMNQAGLAVELLETRHVSDAFKAMPVKSDRNDARKIAQLMRLGWFRPVHCKSITAQEIRAMLTARKLVQSKLLDLENSLRGILRGFGLKVGKTTRTNFAGRIEELVKGHPKLQSIGQALLRVRAILVAEFNGFEKQVRATSRLHEKARLLMSTPAVGPIVSLTFACAIDDPSRFSSSKQVGPYLGLTPKKYQSGETDYTGRISKHGDASVREALYEAAHIMLTKPTKGCSGLKSWAMRIARRAGTNKAKVALARKLAVIMLRMLKDNVPFNPAAKAAAA

SEQ ID NO: 462231 - protein, 382 aa, unidentified
MTATTVQPQPAVVVGVDAHKDTHHGVILTTTGQRLADRQFEATSAGYRQLRDWVREFGAEAVFAVESTGSYGAGLTRYLLDAGHEVREVNTPHAHAKARRGKTDALDAEAAARKVLAGDAIASPKTSSGAVESIRMLTVARNSAVKARSVALVQLQSVLVTAPASLREQITVTGIRRQAAVCGKFRPDIARLSDPVQAAKLTLKTLAQRITELDTEIAALDSHLETLVADVAPTLVSRTGIGAGHAAQFLITAGQNVQRLHSEAAFARLCGAAPIPVSSGRTDRMRLHRGGDRQANRALHMVVVVRLRFDQRTIDYMRRRRAEGLSKKDVMRCLKRFIAREVYHDLRTDLAPLIEPLNAISRAIPDTTVESCGTLLCGGSKC

SEQ ID NO: 462232 - protein, 311 aa, unidentified
MKSYVGIDIAKGHVDIYDTATERHRQFENSRVGIKKCVEYVSSLNPQLIVLESTGGYEMDLVVALDESSLPVVVVNPRQVRDFGRASGRLAKTDKIDAILLARYAVVMNPPRRVLRDRQGLRMKALIARRRQLVEMRTAEINRREHIHDQLIARSIDAIIRIINREQQKVETELSRLIAEIPELQQRVEALLSVPGIGQTTAVMLVTEIPELGQLNRRQIAALAGVAPINRDSGTFRGKRMTGGGRREVRSRLYMSTIVACHHNPVLKLFYERLLQKGKTKMTALIAVMRKLITIINTMLAKKLTWKPKIA

SEQ ID NO: 462233 - protein, 420 aa, unidentified
MKQWKEITHYAGFDWARDHHAVVIVDSQGQMVADFEFDHSMEGWQSFGEKIAPWPDLAVAIETNQGAAVDQLLQRGYTVYPVNPVASESYRKRKAPSGTKTDHVDSWGLADALRVDGQGWKPLQPLDPLTQSLGLLCHDEVSLIEQRTQLVNQLQQALVEYYPAALQAFDDWTSPSTWDFIIAFPTPEALEKAGQRAWEKFLHTHKLWRPQTVGKRLAIFAQATQFKASAPIIRAKSQLALSLCKLLRTLAQQLAQYREQIETLFKEHPDHALFGSLPGAKKVLAPRLLAAVGADPTRYGKHQVLQSFAGTAPVSYQSGQIHKTQMRRACDKFMRHTVHLWADCFRKASAWGQTYYQTKRQQGMSHACALRCLGQRLLKILFRMLLDKKPYDAELHARNQQKHGSWVLKLIEKPVAKPSE

SEQ ID NO: 462234 - protein, 322 aa, unidentified
MLQTIIGIDVSKNTLDVVMLHPRGKWHKVIDNCAHGYQQLQNWFDQQKVDSVHACLEATGQYGEGVAEFLYHQGYQVSVVNPTRIKRYGESKLHRNKTDKADAALIAEFCSKEKPALWTPQPAFRKHLRWLVRYLADLASMYQQERNRFLSGVRDEFVLNALEAHMGYIRQQCDAVRQAIQQHIEATPELKKQQELLVSIIGIAELSAARLMAELGDIFAFENAPQLAAFAGLNPKGKSSGTSVFKKPRVSKEGRAFLRSILYMPAIVARRHNPIVRAFCDRLEERKLPKKAVTIAAMHKLIHIVYGVLKHQQPFDPFYLAS

SEQ ID NO: 462235 - protein, 376 aa, unidentified
MIAHTPAGLAEFEHQRQQLGVEPAECVIGIETAHTLVMDYLWGHHYTQVYVIPPNQVNRESRTRWPSGARPDPSAAYLLAEMLRQDKTRFPVWCPDSLLTRQMRSRVSLVMHLTHQIVQMSNRLRAVLWRYYPAALTVFSELTAQIELAFITSYPTPQAAAQLTYAEFPEFAAQHPYTQPRKLPASYARLQQPQPPADPSTVLTFQDEAVQLAQLLLPLVQAKQAQLRDLGKLFKQHPDAFIFDSLPGAGNLLAPGLLVKFGDDRQRFPSAASIQALAGTCPVTDGSGQRRVVRFRKACDHEFRTITQQWAKATLTVSPWAQAYWQAMRPHCRSNSAAYRRLANRWLAILWKLWQTHQTYDEDYHLQQRAARSKPR

SEQ ID NO: 462236 - protein, 343 aa, unidentified
MESIYYIGLDVHKKTIAYCIKTVSGKTVQQGVVSAERKALRQWLTQLPGPWMGAMEATIFTGWIYDFLKPHAVELKIAHPEMLKAITAAKKKNDRADAEKLADLLRVNLLPECTMMSEELRDLRRILRYRNLVVRTATQMKNKMSGLLMEVGATYDKRRLHGHKYFGELLERVEDVPDSVKDLLRLSRGSLELFSAIQKKLTQTLREQPLIRERVERLMSIAGVGAIMALTWVLEIGDPARFSSARDAISYCGLCSAQRESAGKEHRGPISKKRNKHLQTKLIEAAKLAPHWNPQLAALHEKELARGNRNRATLAVARKLVEYLLAVDRRGTPFVAEAPSRVA

SEQ ID NO: 462237 - protein, 364 aa, unidentified
MKIPQQVKQKLDFSGDSIYVGIDVHKKQWNVFIMSDYKEHKGFVQPPDPGALASYLRKNFPGATYYSTYEAGFSGFWIHEALKKEGINNIVVNPADVPTTDKEKKTKSDRVDSRKLCKKLRDKDLDPIFIPERVQLEDRELVRLRTKLVRDVRRCKGRIKSMLNLYGIDHSFKGWTKAFFKWLLELRLAYPNGTFTLHALVEELQSIEDLKKKVGRQIRSGIVKDEKYAKLIELLCRIPGIGLIGAITILTELGNMKRFRNCDHLCSYVGLVPTLHSSDETEYIGNLTPRGNTYVLPILIECTWAAVGKDPALMNAYHQLCKRMKGQDAIIRIARKLLRRIRHVLMYETPYELNTVSQCMQVNR

SEQ ID NO: 462238 - protein, 368 aa, unidentified
MKKSTSTTKDRFWVGMDDHAATIVVAVLRNEETVPAERFTVSNDEKGQKELIKRLQALKGEVRCVYEAGPCGYGLQRRLMKAGIQCDVAAPSLTPQRPGQRVKTDRRDALKLAEMLRSQMLTMVTIPDIEREALRDLVRAREDAGEDLLRARNRLSRLLLRHGQQYREGNRWTRAHWRWINAVRLEQRHTQEAFNNYITVVNSCNERVEALTKLLKTASEEYPQVIGRYSALRGVDWLTAVTLYSEFGDLRRFGSAPSFMSAVGLVPSEDSSGPRQRRGAITKTGNAHARRVLVEAAWHARRQPKVGQTLRKRRQNLPAEVVRIAEKADGRLHRKFTRMIYRNKRSTVAAVAVARELTGFLWAIAQIP

SEQ ID NO: 462239 - protein, 429 aa, unidentified
MNYNTQNAKIASITEKTLIVGIDVGSETHYARAFDWRNYEYSKKPFVFNNDEAGFTSFKAWMEDIAEKHGKETVIPGMEPTGHYWLNLGAYLQEQGMKPVHVNPHHVKKSKELDDNNPNKNDHKDPKTIAGLINEGRFSYPYIPTGIYAEIRNLSNLRIQTQEELTRIKNRIARWFSIYFPEIKDVYKNPDAVSGMMVIKKAPLPCDIKELGVDGVNQVWRDAKLKGAGLKRARALVSAAEHSIGSTEAPGSARMEIRNLLNDYEMYKNRMNDLMREIETKLSEIPYIDKLMEINGIGLKTVSCFIAEVGNIRRFDNPKQLQKLAGYAIVADSSGKHNGESHISHRGRKRLRYALYEAAISVIGKNKEFREIHDYYRTRKQNPLKKMQSVIAIACKLIRIFYTILTKGVDYDGQKMLSDIVRPENIMAA

SEQ ID NO: 462240 - protein, 348 aa, unidentified
MNKGITIGMDMGDKRNVICVLDRDGNVMARCNIANTAVAMRKHFKEYQGATVAIEAGTHSGWTSRLLEELGCEVLIGNPRKVRAIYRNDGKSDEQDAEILARMARFDRSLLHPIHHRGERAQMDLEVIKARDILVQSRTKLVNHVRGAVKAVGGRIGACSAESFSFRAEGELPAGLVPALLSVLEMIQALTDKIRIYDKMVREMSKSHYPEAERISQISGVGPLTSVAYVLTLEEPGRFAKSRQVGPYLGLTPRRDQSGDTDKQLRITKAGNDYLRRLLVGCAHYIMGPFGPDSDLRRYGERIAKRGGKNAKRRAIVAVARKLAVLMHSLWKSGQEYEPLRKRCAKAA

SEQ ID NO: 462241 - protein, 380 aa, unidentified
MVPLQHHRGTTMDHYAGIDVSLEYSSICVVDATGNIVREDKIASEPEVLIAWFGSLGYALTRIGLEAGPLSQWLYAAMKKAGLAVELLETRHVRDAFKAMPVKSDRNDARGIAQLMRLGWFRPVHCKSIGAQEIRAELTARKLVESKLRDIANSLRGILRGFGLKVGATTERSFPGRVRELVKGHPVLEAIAEALLSVHEVLLREFNGFQKRVQSAACSNVKAKLLMTTPGVGPVISLTYAAAVDDAARFKSSKKAGSHFGLTPKKYQSGETDRSGRISKIGDASVRAALYQAAHVILTKPVKGCPELKSWGMRLAKRAGQEKAKVALARKLAVIMHRMLADGIPFNPNAKAERMAATATKAASKVLALPASGTTVAEAV

SEQ ID NO: 462242 - protein, 329 aa, unidentified
MYNVGIDVGSKELVMVIRHKGKNQKARSFKNTHEGHAQIIKTLTSKKGEVGVCLEATGIYHFDLAVALSRSNTVEVMVVNPKASRHFAEALMTRSKTDQVDANILAQFAETMPFASWQVPDDKVLELRAFSRRLAALTKLKAQTKNQLHALESSVSVPEIILEETQATIEFLELQIHRLKEHALTLIGSEETLQRSLEITTSIKGVAETSAIQLLGELLILPKDMNNRQWVAFAGLDPRHYQSGTSVSKKPRISKAGNSYLRQALYMPALCAAHRDPHVNAYYQHLIEDQGLKKMQAVCAVMRKLLHAIHAMLKNESHFDSTRFFNMAA

SEQ ID NO: 462243 - protein, 340 aa, unidentified
MEKRYIGIDLHRNRFTCCIRLENERTYVTEWALEALARFVKKLRATDEVAVEITSNTRLFHEAVAPHVARVVVVDTNQFRVISQSVKKTDPHDARLLSLYLSKDLLPEVRMKDKDLAQLASLTQTRDTLVKQRSALKNKVNNILSARGLNLAKEALSSEKKLAEVLELPFDEIVRIELRVIVEQIRSLNKSIAELEKTIGEEGSKLEGHKGLSSIKGIGKITGAILLSVIGDVNDFADEGRLASYFGIVPRVSNSNETERSGRIHKRGTKLGRTALVQSALIAANYSKYLKRFYEQVKARRGAGKAIIALARKFLGIIYRTLKNQWVFEDFPNFVLAEES

SEQ ID NO: 462244 - protein, 410 aa, unidentified
MDVVYPRCCGIDIHKKTAVACVIVSETKGPPHKQIRTFGTMTDDLLALADWLATEGVTHVAMESTGVYWKAPFNLLEGQFEVLLANAQHIKAVPGRKTDVKDAEWIADLLRHGLLKASFVPDRPQRELRELTRYRTALVRERAAEANRLQKTLEGANIKLGDVATNVLGRSAREMLEGMVAGTADPATLAQFARGRMREKIPQLERALAGHFAAHQRFMVAQQLAHIDYLDDAIEHVSTEVAERLAPFVSTIERLDVIPGVGRRTAEILLSEIGTDMTRFPSAAHLASWAGMCPGHHESAGKQHDGKTRKGSPWLREALIEAASAAGKTKGTYLAAQYHRLLRRRGRNKAAVAVGHSILVIVWHLLEHDCPYVDLGSTYFDERDRTATEHRLVRRLEQLGYSVHLDRPAA

SEQ ID NO: 462245 - protein, 322 aa, unidentified
MINKNNTKQNTIWIGIDISKRELEIHTYESSLKLPKSISNTKSSISNLIKKLSKNELIHCVFEATGGYEKLLLSMLQNEGIKASRVTPSLPRNFAKAQGILSKTDAIDAKVLTDYGMKFTPRETAKIDPVIEEIQALQKYRRHLNDELHRERMQLEHTLPKNIQTMVKSRIKTLQKQVEKVTEMMIQLKVKSPEINEAVKLLTATKGVGDKSALSLLAAMPELGELTNNQASSLAGLAPFNRDSGKYRGRRMIYGGRKEIRQALYMAALSASRYNPILKEFYQRLQANGKPKKLALIAVMRKLLSHLNLLMKRHLQETEAAK

SEQ ID NO: 462246 - protein, 301 aa, unidentified
MKKLSTTTTTQIRNLSQPKSTQQKLTVGLDLGDRNSWYCVLDEAGQIQLEQRVRTTAKALREVFGALPRSRIALEIGTHSPWISRLLSALGHEVIVANARKVRRIGESRKKDDRLDARTLARLARIDPELLYPVKHRSAQAQADLTLIRARAGLVRARTGLVNTARGLAKSYGERLRSCHVRHLNPEKAEGLSPELQAALEPLLNAIESLSERIVEYNERIENLAQQSYPQVALLKQITGVGTLIALTFSLTLGDPHRFRKSRDVGCYLGLQPGRRNSGQSEPQLHISRVENPAPPGLMLD

SEQ ID NO: 462247 - protein, 340 aa, unidentified
MPTLTVGVDVSKKTLDAAAKLPEKEEPIDLGKFSNDSKGFAQLKKKVEEQAAQIGADIIFVVLEPTGGYEQLFARFAYNLGWRVSMPNPRHVRKWAEGMGVRAKTDLVDARNLARYGASKPLPDWRPLPDEISQLDRLLKRQDELKESLRQETNRLQSLNAQDIDNGPEIESLKRSIAWLKEELRKIDDDIEQLLKKHPDLKKQAKKLQSIPGVGPCNSLFFLVLMHRWNLLTDGQGTNKAITAYVGLDPVPCESGTSIRKRETISRMGDSRIRALLYLGAMSAVNGNNHLHEVYHRLLGNKKEKKVAIVAVARKILVLIWTIFRNDTTFDPGIVAPASN

SEQ ID NO: 462248 - protein, 413 aa, unidentified
MFFIGVDLSDKFFDSCITNSFRDVVSRNRFDFNDDGFYSFIHHIRERIINSQDCIIGLENPRSRLVDFLVTRGYTILPVNPGAIARYRESRSPSKAKSDQGDAQLIADYIREHRKALRAVKIPDKIPDEKVRELKLLLEDRDRTVKEKVRLSNQLTNTLKDYFPQALDAFGDTTSKSALEFLRRFDTFQQAKSLSCEDIEQFLDHCRCYNKKTRDRFRNAMKKAPSQIPQEIVRARSRLKNVLVGHLVALIQEIKDYEEQIQHVMGEIPYGGIFRSLPGADYVLGAKLLVLYDGKEFDSACEAGAFYGTAPYTARSGRSVHIRFRRGCNKFGRNAFHQLARSSLKKSKWAKKQFGKKREEGKGYHHALRCLSNLWVKVTFAMWRDKVPYDEGQHLASIASHFLSQTASAPNTK

SEQ ID NO: 462249 - protein, 376 aa, unidentified
MEMMQHRQLRYIGLDVHRATIAVAIAEEEGSPTSYGTIANDPDAVRKLMRQLGGKDVELRVAYEAGPTGYALHRQLTKLRIGCLVVAPSLIPVRPGDKVKTDRRDALKLARLLRSGDLTAVWVPDREHEALRNLVRARADAKVDELRAKHRLSKFLLRLGIQPPVGMRNWSQRYFQWLRKVELEHLADRVVFADYLAEVTAAGERIKRLEAALRQCAESSDQMALIRALQAFRGIGFLSAVSIVAEAGDLHRFRTAPQFMAYVGAVPSESSSGSKQHRGSITKTGNSVLRHVFGEAAHHARHAPRVGATLKQRQLEVPSPIVELAWRAQLRLHSRYRHLGGRIGAHKALTAVARELAGFVWAVSRVLDEQVPAAAA

SEQ ID NO: 462250 - protein, 483 aa, unidentified
MKKKNIYVNQSQELLRLFEEAGNGSKVMCVPMDYAKKDHVVMFCDGNGHILRKPFPVKNSPEGIEYLTEQVIRSCRHRQIDAKHVFFGGEDVGSFAENFIHTLRSGGWIVAGVNAHDAKEQRANLQASTDRLDLMGIASMLLNRRANCSPAQSGIYWNLRTVVRHRRKLVAMSTEVKNRVHTVVDRLFPGFLDDKKSGIPPFSQSSLYLMENRFSPRQIRRRKRENLIEILHRYGTGNPENAAAKLQGYAARVLHTPDEYISTLQLSLVHHVKHFRCLQDSIHQLEHELAVWLAQTQGVFLTTMRGIGIVLAGGVCAEIGNPYVQKPLNNLVSYSGTIPRVKQTGGPEGKTHAGKVAKRCNRILKDYVVQSANQLGLHGPEDLMADHKRREADGQHADFGIGRRYLRTAMHLMRTSQIYLPQRLRSNAEATPEERAGYYLMTWPALREKWNKADALEAAFEKDHPLGRWRNMVQELYGIKLKL

SEQ ID NO: 462251 - protein, 345 aa, unidentified
MDRFIGLDAHLSSCTFAVMGPTGRKLRTDVVDTSAKALKDFVLGVKGSRHLCLEEGTMSEWLYEVLLPHVQELVVMVPVKRRGPKSDAKDAFDLANKLRLNDIETSVFKGYGQFQRLRELSRVYDKIVGDVIRAQNRIKSMYRSRGVASPGRGVYSPEGRDAWLKRLPPASRFACRILYAEYDALVPIKEETQAELFKESRRHPISRKLETTPGLGPVRVAQSMAAVVTPHRFRTKRPFWSYCGLGIVMRSSSDYVKQDGRWLRVPVQTTRGLNPYCNRRLKRVFKGAATTVISLMPRSPLALHYQRLVSGDTKPNLAKLTLARKIAATFLAMWKHQEEYDPSRH

SEQ ID NO: 462252 - protein, 331 aa, unidentified
MTNAAHEIVADSRPVDYIGVDMAKARFEWGVHGVRSTQGATNDPAGFEVLLADLRQRRVGLIVIEATGGLEHALASRLLQLGLPVAVVNPRAAREFARSMGHLAKTDAIDALALAHYAHTLAHKANQAGVLLTPLPAHLELLQAMVLRRQQLMAMRTAETNRRGGAMRVLRQSIDAVLKTLNRQIDALDQDINTHLDQHFNELDQRFENIKGIGPNTCAAVVAFMPELGHVSGARAAKLAGLAPLNNDSGNSRGKRSTWGGRSIVRCALYMATLSAVRCNPVIKTFYLRLLAAGKPKKVALTACSHKLLRILNAMARNGQAWNPKLHVLTP

SEQ ID NO: 462253 - protein, 410 aa, unidentified
MEVVIGMDPHKRSATIEVLDTRERVLEQGRYLTDTAGYKAMLAAGRKWPQRRWAVEGANGIGKHLAQRLIADGERVVDVPAKLSARARVFSTGQGRKTDATDAHSIAVVALRTADLRVVHVDDEHVALRLLADRRDELGVRRTQTVNRIHRLMLELMPGGAKTFLSAPQARALLGTVRPRDAAGKVRRALASELIVELATADRKIKALDKELKVLVAASGSQLMTLQGIGPSTAARLTGDVGDIARFPTKGHFASWNGTAPIDASSGENNRHRLSRSGNRRLNRVLHIMAIVQLRNDTEGRRYYDRKKASGKSSMEALRCLKRRLSDVVYRQMVADADRQAATSEPSDDAVPGTRQEALVTGPGGHVGATADSSAAGSYPDAGPSDQSLPGPADPIVTTAPTTRKTPSLT

SEQ ID NO: 462254 - protein, 486 aa, unidentified
MNHRRLVGIDLGIASAHTVRVLDGEGNTVAKRKAWPTVESLAQVEAVGLAGCPAGTRLEVVVEPTGPAWLPIAVFFDARGHRVFRVSSAKAADLRRFLSRHTKTNGIDADTLARLPLFDPAGVQPLRLPGAERAALDRRVRACDRLVAAGAEHKVRIKDLVRQLLPMTPLTGDLGAADLAVLERWADPNALVKAGAKRIEAVIAKASNNHQGAERAEQWLDAARCAIELYGAHPAVAFADLAAEVATEVRLLRAIQAELAIHADERERCYRWVDPAGLARSLPGLAEVGGPALVAAMGDPARFRRGRQFRSFTGLVPKASETGDTDRKGQPMSKAGSSLLRTTMVRGADTARRQDPQLARIYYVQMVERGKGHLGALCVVAANLAERAWAVMDRGMPYVICDTDGKPVTPGEAKAIIAEHWTVTPDVRARRRSKKAGKAPKNVHGGRSTPGARGAGERGDLPHGQSLATGAAVVNGPNTSSAQRAS

SEQ ID NO: 462255 - protein, 349 aa, unidentified
MQDVADQSAAPTTIGADLCAIFVSLELSRSTWLATSLSPGRGEKMSKHSVSAGDIAALLARFSELRRKACARTGKSFPIVVIQEAGLDGFWIHRVLLSEGIESHVVDAASIATSRRRRRAKTDRIDGETLLRALLAHKRGEPRVCSMVRAPTPEDEDRRRICRERKVLIMERVQHVNRIKGLLFSQGASGYEPLRRDRRARLDALQTGDGRRLPQHLKAQVCRELDRLELLLEQIKAVEAERDALLDAEQTKASAPPPMLLGVRGVGPEFASVLWSEGLSRHFDNRRQVAAYAGLAPTPWQSGSVNREQGISQSGNSRLRTTMIQLAWLWLRHQPRSALTLWFKDRIGT

SEQ ID NO: 462256 - protein, 483 aa, unidentified
MKPKQLEKNKKANCRPTQNNWHEMNRKQRREMTRKIQSEDLSLEVVHPDAAGIDIGNEFHYVAVPPTRDSQPVRRFGCTTSELKEMAVWLKQCAIRTIALQSTGVYWIAVYDILEEAGFEVYLVNARETKNLPGRKSDVQESQWLMKLHTYGLLRNSFRPSQEIRTMRTYWRQRNDLVRAAGRHIQRMQKALTQMNIQLANVLSDVSGMTGQAIVKAILAGERDPYQLAALRNWRVKSSEEEIARSLEGNWQEDLLFLLQQEQDGYEFCQKQMAECDQRLQRYLQQQEDRRHGASLPQEKRKERLRKKKKGNAPQFALRAELFRMTGTDLTQIDGIDVTTTMTILSEAGWDMSKWKTEHHFVSWLRLCPDNRVSGDKIIGKGRLPTNNRVTNALRMAASTLRLSNTYLGAQFRRLRTKLGAPVAIKAMAAKLARLIYRMLRYGMQFIDRGAEFYDAQHRKLQINYLKRKAANLGFQIIEAPAA

SEQ ID NO: 462257 - protein, 413 aa, unidentified
MEIVYERCAAVDIHKDTAVTTVRLPEAQAQGGRRSETRTFPTKTPSLLELFDWLTACGITHVAIESTGVYWRPVHNILEGCFEVLLVNARHVKAVPGRKTDVKDSEWLAELLEHGLLRGSFIPPQPIRDLRDLTRYRKRLVQDRTHHINRLMKTLEMANIKLSSVATDILGKSGRRMIEALISGQQDGEVLADMALGVLKKKREDLKAALTGRIRPHHAFLLREQLRIIDELQERIAAFDKQIEECISPFPKAVARLVTIPGVAQRTAENIIAEIGTDMSQFPTPEQLCSWAAICPGNNESGGKRKSGRTRKGDPWLRTTLVEAAWAASHQKGSYLQTLYLRLKLRRGAKKAIVAVAHSMLQSIWYMLSLNIDYADLGSGHFDRLNLKRVIDHHVRRLRDLGFQVTLAEDVAA

SEQ ID NO: 462258 - protein, 345 aa, unidentified
MENITVIGLDLAKNVFQAHGANAQGRKIFSKKLKRAEVIAFFAAIPPCLVGMEACCGAHEWGRQLQKLGHKVKLMAPHYVKAFVQGSKTDARDAAAISEAAVRESIPAVPVRSRDSQQIQSIHRVREALSKQRTATINQLRGLLAEFGFVMPARVKIRREIVAWKTTSGQEFGYLNGLLDELLTQLQQLEESIGRIDKQLGQILHDNAACRLIESVPGIGPITATAIVGRVGNAENFKDSRKFACALGLTPREHSSGGKQVLLGISKRGDGYLRKLLVHGARAVLNAKLKKAENADDWVVKLAQRRGHNIAVCALAAKNARRVWAMLRTGEVFRSDYALANNANA

SEQ ID NO: 462259 - protein, 330 aa, unidentified
MLYGGLDAHKDFVQACWIDDENKVVREDRFDTTPNGLNRLIQAARGSRCVLESSTSCFQTFDALKDAGLQVRVAHPSRVKAIASAKIKTDKIDARTLAELERADLIPEAHIPSKETRDLRLLVRQRIFLTQQSTRLKNRVRSAFLKQGIKTPPNLFTKRAWNKTILQTTGNAKLAAEQMAAQLDFLHKQRSELNEKIQLAAESLDDAKLLKTIPGVGWFSALLLASEIDGVKRFADEEHLQSYAGLVPATRQSGNVSHSGHISKQGNSLMRWILVQDAWIAVRQSKKFRKAFIKVSRKHDPKIAIVAVARKMLRCTYFMLANKKAFDENA

SEQ ID NO: 462260 - protein, 427 aa, unidentified
MPYTIAGIDVHKRMLVVVVSDVEVHDEYQFERRQLSSNPAQLRLLAAWLIEQQVEEVVMESTAQYWKPVWGALERHWQPACQQREGARPTSGRLHLAQALSNRARRGRKNDFADAERLVKRLVANELTLSFVPAVEQRLWRTVMRTRYQLRCNQVQVQNRLEALLEEAHIKLSSLVSDLLGTSGRRMLKALANGETNPAALAALAHYTLRATPEQLCDALDACRDLHPLHRRLVKSALEDWERIETQITELEREMAALLAPYQDQVERLAEVPGLGVVSAQQIIAEVGATAATFPSAGDLASWVGACPGENESAGVNHSRRSPKGNRPMRRILNQAANAAVKLKGSISTLLYRRYVIRLGHNQTIGIIAHRLCRLVWKILHQGIRYEERGPAVSKKSKQNRAARMIRELRSLGYRIELTNSPAASPA

SEQ ID NO: 462261 - protein, 370 aa, unidentified
MSNISTSVLWIGMDVHKSSTTLAILSDGSDEPEVLKSASTVPAIRKIFRRLSQRGAPRACYESSGAGYVLQRGLDRSGFHCDVIASGLIPRRPGDRRKNDRLDAINLAKHYRAGNLTPVAIPDEDREAARQLVRSRLAVQPHITRLKHRIVRVMATHGYIFSGTKSNWTVKHRAWLRQLQRELPGVLRIVLSTHLAHLEYLEEQRANLDANLVSLSGCDPWRVPTAALRCFRGIDTLTAMTLVTEIGDIRRFRSARALMSYTGLVPGERASGDVCHRGPITKAGNAYLRRVLVEAAWHHRHKVGADQKLKNRRQGQNPLVVAIAHKAQCRLHRRFYKLSEKKGTYKAVTAVARELTGFIWAAMMTVAEEE

SEQ ID NO: 462262 - protein, 363 aa, unidentified
MAGPLDDEPKTEIRKFGTIVAELKLLRDWLISEGCSHAVMESTGPYWKPVFNILEDSVEVVLANAYDVQNRRGHKTDPNDSRWLAHLLRHGMIRASFIPDRAVRELRDLTRRRKQLVGEKAREHNRIQKILEDANIKLGDVLSDVLGLSGRLMINALLEGVMPAEEIAQLAQRKAKQKIPDLIAALRGNRLTDHHRFLLRHALRHLDFLEVEIEALNGEIRIRLSAEQFRKPHALLQTIPGIKADSSAAILAEVGPNMEQFPSDAHLASWAGLCPANHESAGVRKAAGTNRGNQWLRSVLTQCAWAASNQKNSTLRSFYCRLSPRCGRKRSLVALGHRLLRIIYYVLLRSQPFQEPYVRPTPS

SEQ ID NO: 462263 - protein, 338 aa, unidentified
MTVVMGLDQHRAQITAEWLDTETGEVSRARVTPADRAGVRRFLSRFAGQQLEVALEATTGWRFVVEEVRAIGAEAHLAEPAEASALKGNKKRAKTDRADARHLRELLMSGRLPESYIAPEHLLDLRARVRLRHSLVDQRGEWQQRIHAVLYHHGHPAKDGLLRSANRAWLQQVALPDAAREQVTVALAMIDALDAQEAPITAELRRYARRQPGCRALMGLYGVGELTAVAILAELGDPRRFNSSRQAVRYAGLDITVHQSDQRRAPGHLSRQGPPALRWALYEAAQAARRPGSPDRAYYDQAAQRLGGNRACLALARKLLKRSFHILRDLGDKALAPA

SEQ ID NO: 462264 - protein, 339 aa, unidentified
MKFPLSLKHYEVMKSIYVGIDVSKRTLDVCVKGAEQEQFFKIENKSNSIKKLFKELRKVDSCVVIAMENTGHYNHQLYKVLPNFNFTVYVVDPKHIKRSIGLVRGKNDKVDAKRIATFIERNNEDLNPWEPLSESVYSLKVLLTERKAEVARIRSLKQRIESLNQQKSVSSVPKLITRNKKEIQRIQKRVKEIEKMIREEIAKEISLKREIDRIKTVPGIGDITAWMIAAKTHGFKRLLDPRKLACFAGVVPFEQQSGSSLKTKPRVSKMADRSLKTVLQMAAMRSVRMNNELQSYYQRKVEEGKNKMSVLNAVKNKLIHIAMALVKHKTYYQNRLVLS

SEQ ID NO: 462265 - protein, 413 aa, unidentified
MLKIVYPICCGMDVHKSFFVACIATTNSEGVTSYISKRFSTFTGDLRRCASWLATHDCKDVCMESTGKYWIPIYNILESTCKIVLAHPKYVKSIRGKKTDKKDAKWIADLFKHDLVSGSFIPPADIRQLRDLVRYRWKLTNFTTGEKNRVQNCLTVSNIKLDDVFSDVFGKAATAITTRLLENPSEKITDVSGFRTKGMKATDEEVLAAVDGELCVEQAEKLRIIRSHMGSLDLCKANLESLILSVAEKYLPQINLVMSVPGIQSFAAIGIISEIGVDMSVFPTAKHLCSWAGLTPQNNESAGKKKTTRIGRAGAYIKPLLVQCALCAIRKKSNPEIRRRYENLKKRRGHKKAIIAIARMLLTAIYNILKKNEPYNPELYAHMNTPPKHRAVSVEEAIFILQRQGYLVTLSAT

SEQ ID NO: 462266 - protein, 398 aa, unidentified
MTESSDYESVQVFIGVDVGKDTHHAVAINRSGKRLFDKALPNDENKLRSLISDLKQHGQILLVVDQPATIGALPVAVARSEGVLVGYLPGLAMRRIADLHAGEAKTDVRDAAIIAEAARTLPHALRTLKLADEQIAELSMLCGFDDDLAAQTTQASSRIRGLLTQIHPAPERVLGPRLEHPAVLDLLQRYPSPEKLASLGEKKLAAQLCKLAPRLGKRLAADIAQALAEQTVVVPGTNAAAVVLPRLALQLITLRKQRDEVALEVEQRVLAHPLYPVLTSMPGVGVRTAARLLTEVACRAFASAAHLAAYAGLAPVTRRSGSSIRGEHPSRRGNKALKRALFLSAFAALRDPLSRAYYTRKMSQGKRHNQALIALARRRCDVLFAMMRDGTFYTPQGS

SEQ ID NO: 462267 - protein, 310 aa, unidentified
MDRITVGIDVSKDRLDVVVCPSGETFAVDRNANGVEKLATRLRELSPHIVALEATGGFETVVAAGLGAAGLPVAVVNPAQIRAFAKAIGQRAKTDPIDAKVIAHFAEATRLEPRPLPDEQTRLLADLVGRRRQIVAMIGAERQREQRVTASRLRKSIARLIKALEKELASMDADIDDAIKNSPAWRTKEELLTSVPSIGPVISRTLVAELPELGQLSHKQIAALVGLAPFTRQSGKWRGKSFIGGGRSAVRAALFMGAMVAKKYNPILKAFFDRLVAAGKPKMVALIAVARKLLTILNAIVRDGKPWQNA

SEQ ID NO: 462268 - protein, 351 aa, unidentified
MHYIGVDYHKKYSYVVVKDREGKVEQRGKVNNTKEEFRRLLKPYHSGKAVLEATRNWGLIYDWLEEILDDVALAHPLKVRAIAEARIKTDKISADILCDLLRSNLLPEAYIPNKETREAKNILRQRMFFVRVQTMVKNRIYTILDRHPEILSRAPDVSDLFGASGMEWLKQAVLPGQDNQLLASELELLEVLKQKISESNGIVKELARGDKRVKLLRSIPGLGPFFSVLVAKEIDDISRFRGEKKLCAYAGLVPSTYASGGKVFHGRITKTGNKWLRWAFIEAVLPAIRGDADLSAYYERLRIRKGANAAKVATARRLLTIVYRVLSQERLYERRNRRAIRRLAPAALVTS

SEQ ID NO: 462269 - protein, 376 aa, unidentified
MNRILKIGMDVHSTNYTLCVVEPKLEGDPDLLYEVQVEPDCWNILQIIEKLKQKYKEDQLFITCGYEAGCLGYTLYHELEDHGIKCVILAPSTIEMPGGKRIKTDKRDAYLIAKCLANGGYRAVYVPTSKDEDVRDYIRMRDDHRDLLKIVKQQIDAICLRNGHKYTKTRWTGNHLKWLKELELSSIDRETLNEYMLTYQYLFEKLERLDARIEEFASEEEYIEKVKKLRCYIGIKTYSALSLIVETGDFHRFAKGNIYSHYLGLTPGEHSSSENVNRTSITKAGNKHARTILVEAAQCICRAGIGRKSKALMARQKGNDLAVIAYADKANERLRRKYHKMIYRGHHRNIAVTAVARELACFVWGMMTDNIGMVEP

SEQ ID NO: 462270 - protein, 323 aa, unidentified
MVKNNNFFGIDISKDVFDVVKNGEKHNQFTNDLAGFKQFINFLDANSHCVMEATGVYHHALAMYLYQNKIDVSVVNPLVIKRFMQMHLRTIKTDKADAKQISLYAMQNKLTLWKPSESYISDSKDLFELASLYIKQRTMLKNRLHSFGCKRTQRVIITELNKAIRHLNKSIKKLEDQLEIIIKRYHQKMYTNLKSIPGLGPKTVLYMILITEGFEKFESSRKLSCYAGLSPTQRMSGSSIRGKSRISKQGNSKLRNLLFMCSFNACKYNKSCKALYDRLVAKGKSKKLALIAVENKLIKQAFSIAKSGLKYDENYRELIFTLS

SEQ ID NO: 462271 - protein, 436 aa, unidentified
MDIVHPRVAGIDVHKKVIWVAVRLPGKAPGHREVTVRRFKTFWRSLQEMAAWLAELGVTDAAMESTGVYWWPVYHALAGAGIEVCVCNAAHMRNVPGRKTDLRDCQWIAELHEYGLLRASFIPAAEVAALRQRTRYRKKLIGQRSSELQRLSKVLEDGGVKIDSVASTLTTASARDMIEALIAGQRDPAVLAQLARGVMRKKIPELQMACDGRFTDSHAQMCRLHLDAYDHLAAKIAELDLLVAKAAEPFAAVITHLITIPGIGQRTAQVIVAETGADMARFASPARLAAWAGLAPGDNESAGKRKKAAARQGDRHLRAAMVEAAWTVSRTATRPGARFRRLARRFGRGNEKKAAVAVAHTLTCIAWAVMRYDRDYAEAGADYYDHRDARNRDHLVRHYQQALARLGYQVTLTPPGDGHSPPGATTTPTTTPGQAA

SEQ ID NO: 462272 - protein, 423 aa, unidentified
MKLATEHRFTALVGIDWADRKHDFCLQAAGSEQRESGVLVHSPEAIARWATGLYSRFRGPIAVCLEIAKGPLVHALQRHDFLVLFPVNPATLAKYREAFVPSRAKDDPTDAEIALELLLRHRDKLQTLQPQSADMRTLATLVEQRRLLVGDKTRITNRLSSTLKEYFPQALDWFEDRDTVLFCDFLQRWPSLKHVKRARQATLQSFFSAHNLRRARLIDERIHSIRSASALTNDPAVIGPHQLLVQALVAQLRVTLQAIDDFDAAITELAERLPDYQLFAALPGAGSILAPRLLVAFGEQRERYRSAAELQNYAGVAPVLERSGNKCWVHWRLACPTFLRQTFVEWAGSTIPRSFWAGAYYQRQRAKGCSHQVALRALAYKWIRIVYRCWQTRTPYDESVYLNALKRRGSPLIAHLATTTQVT

SEQ ID NO: 462273 - protein, 409 aa, unidentified
MEILYPRCAGLDVHKQTVAVCILTPGPKAEPNKQIREFGTTTGELRRLRDWLNENGVTHAAMESTGVYWKPVFNILESACELILVNAQHIKQVPGRKTDKADCAWIASLLRHGLLRASFVPEPEVRELRELCRMRTTLVRECVQVGNRLRKVLEDANIKLDSVASDALGVSGRAMIRALIEGRAEPSELAELARGRLRAKLPELASALEGRVTEHHRFLLRELMRQLDFLEEQVAVFERQIEGVMPPFEWAAGLLMSLPGVDRTAACALIGEIGSDMSRFASSRHLASWAGLCPGNNESAGKRRSGKSHRGNRWIKSVMTEIAWAASHTKKSYCCAQYRRLAAHRGKKRALVAVANSLLQAAWYMLTHRQSYKELGPDYYDRLHRTQLERSLIRKLEKLGHKVILQPVA

SEQ ID NO: 462274 - protein, 342 aa, unidentified
MTVMIGIDPHKASHTAVAIDNTECVLDELRVRACSKQTDQLRAWAAPFPDRVWAIESAHGLGYLLAQQLVAAGETVVDVPAVLSTRTRLLGSGKAQKNDPNDARSVAIAALRTDGLQHVTGDDHPQVLKLLAKRHRDLARMKSQASCRLHALLMELTPGGMAKEMTVTRANDILDRVIVDSPTTQHRVEVAREFVADIALHEAQMKASLKRLRPAVAASATSLTDIRGVGVVVAALILGHVGDVSRFKSAAHFASYNGTAPIEASSGEKKRHRLNQRGNRQLNYALHVVAITQLRYPCEGREYYDRKRAEGKNTKEAIRALKRQLSNVIYRSLLADARRLEQ

SEQ ID NO: 462275 - protein, 344 aa, unidentified
MSIVGGLDIHRHQVTFDVLDTVSGQAWLGQVRPADREHLRAWLARFAGSGQVDLAMEGCTGWRYVAEEVRAAGFTAHVGDPAEIAARRGPKKRAKSDRADARLQRQLLAKGEFPECWVPPSAVLDWRQRLESYHDLRAQHTAWVQRIRAVLFHHGAPAISAGIGTAAGQAALAQACGQYLSDAGRGQVELALAQLDLADRQMLAARKVLTAAGRHVTGARVLADRLYGVGPVTGLAMTCWLGGAGRFTSSRQAVRFAGLDITVHSSAGKRSPGHLSRQGPPVLRWCLYEAAKVAARPGAPGHAYYAQVKDRIDGKRAALSQARRLARHGMHILDSLGDDAFTPC

SEQ ID NO: 462276 - protein, 324 aa, unidentified
MKSKSLELFIGIDICKDRLDVADDSESLPWSVANDDAGISSLVDRLNALQPALIVMEATGGLETLLYAALTTAGLPAVVMNPRQVRDFAKAMGTLAKTDALDAQVLARFGAAIQPEVRPMKDDITQELTAWVTRRRQLLAMLTAEKTRLQQAAKWIRKDIKAHTESLEKRLKTIEGHIAESIQKTPGWKEKDSLIRSVPGAGNVLSMNLLSSLTELGTLNRREIATLVGVAPLNRDSGNFRGKRMVWGGRAQVRAALYMAALSASRHNPVIKPFYQRLIAKGKKPKVALTACMRKLLVILNTMVKTQTAWNPNQFLPLDFNHGC

SEQ ID NO: 462277 - protein, 403 aa, unidentified
MKQIVIGVDPHKLSATIEVVDQHERVLGSGRFATDKAGYAAMLGYVAQWSSPTWAVEGSNGAGRSLAQRLVADGEHVVDVPAKLAARVRLLDTGHGRKTDAHDAHAVAAAAVRAKKLRVLSENPELESLRMIVDRRDELTRQRVQTVNRLQRLLAELIPGTSKKDITVLQAKAKIASVRPRDLVGKTQRRIAAEELADLVAVEKKIKTLTKDLKTIVEASGSSLTTLPGVGTIVAARVLAEVGDVTRFADRNRFASWTGTAPLEASSGEQVRHRLSRAGNRRMNHMLHIAATTQIRLDTAGRAYYRRKIAAGKTRMEAMRCLKRRISDAVFRQLLADARADANRPVGAGPGGHCGAPRESSAVDFHPLVDTSDQPLPGPAEPTLQPDPRRRKTAGSSALSPAS

SEQ ID NO: 462278 - protein, 346 aa, unidentified
MMIIGCDFHPSWQQVSWVDTETGETGEAKLVHATGEAERFYRGMPVPSLIGVEATGNSQWFVELVEDLGHALWIGDAAQIRASYVRQQKTDKRDAAHIRMLMEEGRFPKLWMPDREQRDQRQLVIHRHKLVQIRSRVKNELQHLSLNKGMQKRSKLWSMAGQVALRALPLKPWAACRREDLLGLLAMLEQQIGKLDAAVKAAAERNPEAQLLMTQPGVGPVTSLAFVLTLGDVSRFQRGKQVASYLGLIPREHSSGGRQKLGAISKQGNRLVRSLLVEAAQTAVRCDPGMKKEYLHRCHRKAKGVAKVAAARKLAVRLYWMLRTKTGYPEIVRIESSPRVALVGAS

SEQ ID NO: 462279 - protein, 403 aa, unidentified
MNAVGIDVSKGRCMVAIMRLFGEVVASPFEVNHTGSELSELANKLKSLNGETKVIMECTGVYYMPVAYALREAGLFVSTVHAKLIHDYGNNTIRKAKTDKADAIKIANYGLSNWLDLPEYIPEDDIRHMLKTFSRQYIKYTKLSTILKNNLISLLDRTFPGINELFTSPPRKSDGHLKWLDFAEYFWHCECICTLSQKAFTERYRKWCRREGYYFSANKAEDIYVESLGHWCVMPKNDTTKMLITQAINQLNSILETISLVANEMNHLAAALPEYSVVMDFRGVGVVLGPQLMAEIGDIYRYPKKSSLVRFAGLEPVNNQSGDFDGKRNISKQGSPQLRKTLFLVMDCLLKHAPVDDPVYQFLDRKRSEGKHYRSYMCAGSAKLLRIYYSRVKAFLDDYYAEE

SEQ ID NO: 462280 - protein, 345 aa, unidentified
MYNMLTGVDLAKKEIQVCVAKSNKIVRNMPMTPTAFSNWLATQKPMTVVFEACATSNYWYQCAREYGHDARLISAKLVSNIRQNQKTDKNDAEAVLQASQLSNVNFISGKSKEQQELQSLVRMHQLSVKHKVAYGNQLCSLLLEFNIKLSPTDAGLNSAIQSILEDAENGFSAIFREALHTAWHQYLKSIELVKHYEKSVARASRASEDCKNLMKIEGVGPTNAVNLYIALGCCELGVFKKARDAAACIGLTPIQHSSGGKVRLGSIGKNIRNSSLRANLVAGAMSAINQAVKRDSRTKKDEWIKGLVERRGKRCAAVALANKTVRTAFSLLRNGTDYKAELLSA

SEQ ID NO: 462281 - protein, 421 aa, unidentified
MSNSTLSKKLASVKPGTLFVGIDLALDRNVAVVLSEQAEQLIRFGFPNERDGYDYFYRRLAAIQEQQQAPAVLVGMEPTNYFWKLLAADMEHQQPDYGYRLVNPYTVKKRREGDQLDRSKDDNRDAFTIADLLRTGKYTETQLLHGGYAELRQYVTLYARLQRDVRRQKTLIRNVAGQLFPELPRVFKDLAGLTALAMLRNHAAAAVVRKMSQDAFIAGVRSDLPGQRVQVAKLRRAHVLVRRSVGLTEGVEALQLALRLHIEALEALEQQLEEVYKALVDAFLALPESAYLLSVHGLGIITAATILSEIGDPSHYTNARQLVKLAGTQPVPNTSGRKSRSKTPMSHKGRPRLRTALFFAVMRLVQIDQAFARDYLHLQTREENPLTKMQALGVLMNKLLRILWALMRQRSSYDPELQLAV

SEQ ID NO: 462282 - protein, 456 aa, unidentified
MPDYFFGIDASKGYSNFVMLDSLKHYVEDDFQLDDTFDGHQKLYSILSEFCVRHPKANIFSAVESTGGYENNWFDALVRFQTHLPIRTARLNPCGVYNNSKAELNRNITDKISAENVAKYMIEHPEKVQYRQQDPLAPLRKQWGFIKMLKKQKTQMLNQLESNPYTANPEILAYGKDHTPAWVLSLLQRYPTASKLAKAKKSSVALIPYVTPQKAKKLVETAKQSVASATDETTSQIIKAIVQQIRQLSKTIDAQTKAMADKCSIPEVELLKTFIGIGNDSAVGLILEIGSIERFKRAKHLASFFGLHPVYKKSGDGSWGFHMSKKGRTVPRQILYMVAMVAIQSNPLIREIYEKHTEKGMAKKAALGVCMHKIIRIIYGMLKHNQPFDPEIDKANRKKQNPQDEKKVGLDKSRRYQAYDVKAPISRRQAKKREERKQSQSVNNAKCGIKAPVPVL

SEQ ID NO: 462283 - protein, 344 aa, unidentified
MEEVTLVGIDLGKHVFHLHGQNKAGKAVFRKKVSRKQLVEFFAALHACTVVMEACAGAHHMARKLATFGHQVKLISPQFVRPFVKSNKNDFVDAEAICEAASRPSMRFVAPKTESQQTLSALHRVRDSLVRDRVRSTNQIHGFLLEFGISLPKGQAVIKRLPALLADQPLPPRLIAILERLHEHIKYLNQQLDEIEKDLNRQLSEDDLGQRLLTIPGVGPITASVLAAEMGDGKQYGSSRDFAASIGLVPRQYSTGGKSNLLGISKRGDKHIRWLLVQCARAFMRQLDKYSTPMADWVRSMLTRRHPNIVACALANKLARVAWALTTRNTRFEARSIAMPRPRA

SEQ ID NO: 462284 - protein, 428 aa, unidentified
MGAMSENEVLGQEPEFAALVGIDWADQKHAWCLQAAGTTQRESGEVEHTPEAVEAWVGQLCQRFGNRPIAVAVEQVKGALVFMLSKYEPLHLFPVPPAMSANLREALYPSGAKDDPRDADLLVDLLLQHRDKLRRLSPDSEATRRVQNLVEERRHLVEEKTAQSNRLTNHLKIYFPQMLEWFDRLDTELVCALLEQWPTLEELQKVPPARLRTFFRKQRCHYPELVERRLVGIRQAMPAIRDRAVIEAKSAVVKVSAQLIRSLIRGVADLDRKIEEAAAAHPDFFIFESLPGAGAVLAPRLLAAFGSQRDRYANAEEVQSYSGIAPVTERSGKRKWVHFRWACPKFLRQSFHEWAGHSIAHSQWARSYYQQQRERGKAHHAAVRGLAFKWIRIVFRCWKDGVAYDESRYLAALAKRNSPLAAVAGTIL

SEQ ID NO: 462285 - protein, 364 aa, unidentified
MDERIEFFVGLDAHKDSIAVSACEAGRESTRFVDTMGPDVNGLLKLLAKAGDPAQVSVVYEAGPTGYGLHRELCRRGYRSQIMAPSLIPRRAGDRVKNDRRDCLRLAELSRAGELKANWVAHEAHEAMRDLWRAREDAVGTRLKARPRLHAFLLRHGRRYPGKTNWTKSHERWIAEQRFEHEGDRIALAEYQLEYQLAAQAAEQRVHRLTTALTEAAKGWRFESAVAALRALRGIDTVCAIGLVTEIGDISRFGTARQLMAYLGLVPSGHSSGNSVRRGSITKTGNAHARRLLTEAAWSYRFPARMSQQPRQRSNICPNPYATMPGRPSSACAGASRPSSLPRTGALRSSIGSTTGKQRPGGMG

SEQ ID NO: 462286 - protein, 347 aa, unidentified
MSITLIGLDTAKAVFQVHAVDAAGQVVTRRKLRRNELIALFEKQAACTVVMEACGAAHHWARMLTGLGHEVKLIAPEAVRPFVKKGKKNDAADAAAICEAASRPGMRFVPIKSLEQQSVLALHSARSLLVKQQTMLANAIRGLATEFGLTVALGMGKLGELMALVDADQTVPEKARQVLNALFDQCRALDESTEAFEAEIVAHARHDDTARRLATIPGIGPITSSLIAATVADIGVFPSARHFAAWLGLVPRQYSTGGKTRLGRITKAGNWEIRRLLVLGATSMVHRAPGWNSAAGAWTRGVLERRPVRLVTVALANKMARIAWAVMTRKEVYHAKGRVAAAAEAMA

SEQ ID NO: 462287 - protein, 351 aa, unidentified
MKNHKYVALDVHKASVTMGVRDGAGKCVGHAVVQTKAETIKELIAGLSGTIHVTFEEGTQSAWLYDLLKGRVAECVVCDPRRNKLLESGSKSDHIDVDKLSELLYLGGLRSVYHGDHGTRALKELVHNYESLVKDQTRVKNRLKAIFRGRAISYQGAELYQLKERQQWVSKLNERGVRQRTEQLYEQLAALEPLVVAARQKMLRESRQQKASKNLQYISTLGEISVAELIGTVDTPYRFRSKRQFWTCCGLAVVRHTSSDYRFEQGELQRRRKSGPTRGLNQNYNRRLKKIFKTAALTGSHTGPFKPYYERLVQRGLSPELAQVTLARKIAAVTLNLWKKGERFDPKKLQS

SEQ ID NO: 462288 - protein, 341 aa, unidentified
MYYTGCDAHMRSCTLQHIDEDGALGLSMTVPTTSQGLDAYLDKLDAPTVMTFEASRSYWWLYQYFNQHPKVSRVVVVDPFRSRKIAEELSVQRGYGRAKNDRIDSEMLAEQTRLGLAPGIRVPTPEQLEMRTACRHRFELMHKKTISANMIHSTLSMHGYSIALKELIGNPESKQHLDEKLPDYIQHIITDFVTQIELFDKQISAVEKLLDKLLPESQPQIKLLMTAPGIGPVCSRIIYTEIFDIAYFKEPKYLISYSGLAPVAQESAGKKGKVKLNRHCNYYLKYAFLTAGHAARTHPRYRRKYEQDVKKHGKIQAKINLARRLAKAVYWMLNRQQPFKF

SEQ ID NO: 462289 - protein, 370 aa, unidentified
MKSIIYVGMDVHTTNFTLCCYRFGIEECFAFAQVDPDFKNIIHYLEKVKQNYGDDYKFLCGYEAGCLGYTLFHQLDSHGIDCVILAPTSMPFLKRPEVKTDKRDAMKIAKCLANGDYSAVYIPSDEDNSVKEYIRMRDDAKIALKRVKQQLLSFCVRNGKMFTDGSSYWTLKHLAWLKKLSFGDSLLQEAFQEILASYFHATEKVDRYDRRIEELAQMESYRERVKKLSCLIGVGTITALATVVETGDFRRFPTAQHYSAYLGLVPGENSSGKHIERTGITKAGNSHLRKLLIESAQSYGRGAVGAKSKRLLGRQAGNDPKVIAYADKANERLRRKFYRITFRKKRNIAVAAVARELACFIWGLMTDKIA

SEQ ID NO: 462290 - protein, 403 aa, unidentified
MTMRQRTWVGIDVGKTSHHACAIDETGKVVWNQKVSNEQRAIEQLVTRACKGAEQVRWAIDLTSPMALMLITVLLCAEQSVVYVPGRTVNTMTHAFRGEGKTDAKDARVIAETARLRNDLSNVVLPDELVVELTQLTGYRADLMADWVRGINRLRALLGSIFPGLEAAFDYSTRTPLILVSGLCTPAEIRAAGIDGMTAFLVDNHAWPTGIVKSAATAAALANEQPLALPGEAGTAALVKRLACRLLELDREIKDIDKTITARFRDHPYARIIESLPGFGPGLGAEFLVVTRGDLASFATAGRLASYAGLVPVPKDSGRITGNLRRPKRYNRRLRRVFYLAALSSLRADGPSRRFYDRKRAERLIHTQALLALARRLIDVLWALLRDDREFTPEKPITATAAA

SEQ ID NO: 462291 - protein, 322 aa, unidentified
MTNFVLGVDIAKRKFDVALLVDQKLRHKVFANNEEGFRELAGWLRKYGVGHAHVCMEASSTYGEELATSLHDVGHTVSIVNPARIKGFAQSELLRLKNDKVDAGVIARFCDKMHPEPWKPLPPEIRGLQALVRRVDALLVMRTQELNRMGTTHETVLHSVKEHISFLGEEIDALKKDIADLIKKDPNLKAKSDLLRSIPGIGEATIAAVLSELSLFENCDRVRKVVAYIGLAPREFTSGSSIKGRPRLSKVGSARMRKALYMPSLVSMQYNPVIIGFCQRLAKKEKNGKVIVCAVMRKLVHLIFGVLKSGRPFDPNFGLKTA

SEQ ID NO: 462292 - protein, 345 aa, unidentified
MPSMYYIGLDVHKKTISYCVKDGSGQVHAEGVIPATRLDLDRWRKALPQPWTAAMEATLFTGWIYDHLLPHAAALKVAHPLMLRAIAAAKKKNDRIDANKIADCLRCDFLPECYMASTEIRERRRTLRYRNLLVRQAVQMKNKIAVLLMEAGVSYNKQKLHKVGYFRELLATHPDIDEGLRSLLRLCREMLVRLGKTESALVRSLERDPLMRERIERLMTIPAVGPITALTWALEVGEVGRFSSIKKAISYCGLCGAEKRSADTIQRTPLSKQRNKHLQTILIEAAKMAPRNSPALAMIYDREKQKGNANRATLAVARKMVAYLVAVDRRQKGFLVVENENRSAA

SEQ ID NO: 462293 - protein, 405 aa, unidentified
MDEIQRGPYFAGIDWGGQHHQLCIVDGSGQRVAQARVSHDVAGLAELDRQMLKFAGRFPVAIERSEGLLVEHLQDRGHAVFPVSPRIAARARERYRVAPIKDDRFDAFVLADTLRHEHSHWRPQAIASPLLAEIKALTRDRERLLETQQATEHQLRMILEAYHPAPARLFSSVDRQITLAFVADYPTPAIASRVKTARMAGFLSRHHYTGRVPAQVLAERMRANLLTASPGTVTGKSFSAQAFAQLLSQLNTTLAEYDDAIAAAVAEHADSAIFASFPGIGPILTAVLLAEIGEDRNRYPSSDVLLAEAGLAPVTRSSGRSTSVRFRYAANRHLREAAMWWAFNSLKESPWAADAFRQARDQRGQRYHRALRGLSARWMRILWRCWTDGVPYDPARHASAAPPAA

SEQ ID NO: 462294 - protein, 667 aa, unidentified
MSHSRPQRARAAAHLATGPEAGAHATTPPANTPARPTAGNATAVAASVPIGVGIDTSRYGHYATFLRADLQPAAADLKLVESAAGYQQLRERLEAIAHKLGGHVHFHVRLDLAGRYADNLLAFLHTLGTQPAEATPLADATFTISCGDPQRNKNYRVAIFGHQKSDPVESAACARYALTEKPKPTPALTPQLRLLCQIASRLESQARQDTRLINQLHNLLARAFPELALVVNDLSAGWVLTLLDRYPTAAKLANARAASLDKIPYLPHEHIPILLRQARRSVGCLSGPAAEELVRDLVRQVKEARSRHHALEKLLVNAYHDLPFVNHLDTIKGFGEVTAAILTAKIVDRQRFAEPAKLVGHFGIYPVEAASGIDRDGNPRVPVRLIMSKRGNDLVRRYLWMAALSAAQHNPAVKPLYQRVRAKHPDQPSIAIGHVMRKLLHIALAVWKTGKPFNPEHYPWDKPAHLQPKAEVPAGSPTHAERPATPGADSAQAAGHKKPVRAPERSVVTAACATTTLPQAPAADNVPPAADGVARPAATTTPDRGRALTPTGDQAATPWIDFEHLKSQLPLERVLEHLGVLATLRGKANQRRGPCPVHAQNGQGKGRTFSVQLDRGVFHCFDPKCGIKGDVIDLWAAVKKLNLRDAAVDLVQTLHLEPAPRTEKRPG

SEQ ID NO: 462295 - protein, 346 aa, unidentified
MTTVDATRPVTGGVDTHLDVNVAAALDAIGGLLGVAEFPTTPAGHRRLAEFLASFGTLTRVGVEGTGSYGAGLSRYLRSSGVEVVEVDRPNRQSRRRTGKSDPVDAIEAARAALSGRAQGAGKSRDGNVEAIRALVVAKRSSRSTKIQTLNQIRHLGFTAPEELRSRLKGISRQHLGAEAAALRPRAGGDPVVFATKTALSLLGHRVLVLDAERERLNLLLGELVEKTAPQLLEIHGVGVDTAATLLVTAGDNPGRIRSEAAWAHLCGVAPIQASSGKVTRVRLDRGGDRQANSALWGVVITRLSSDPRTQAYMERRLKEGRSKPEIIRVLKRYVAREVYHRLPRT

SEQ ID NO: 462296 - protein, 352 aa, unidentified
MRTSQKTAGIITTIGIDLGKNTFHLVGFDQRGVIILQQKVSRGQLERRLANIPRCLIGMEACSGSHHIGRQLAAVGHDVRLIPAQYVKPFLKGHKNDYRDAEAIAEAVQRPTMHFVAIKTPEQMDLLALHRVRSRLVGQRTGVINQIRGFLIERGIIVRQGVMPLRKALPEILSSHTGVLSARMVSLITDLAQDWRRLDERIAAVSAEIEALAEQDNGCQRLMTVPGVGPIISSAVVAAIGNGAGFKQGRDFGAWLGLVPKQESTGDRTILGKISKRGNKYLRTLFVQAAHVVLVRRPRAAMRGLWPWIEQASKRLHRNMLAIALANKLARIAWAVLARGRAYQPRISADAA

SEQ ID NO: 462297 - protein, 360 aa, unidentified
MRTKVSEKTFTGQSFYAGIDCHKKSWKVTIMGTEYEHKTFSQNPDPELLVQYLQRNFPGGEYNAVYEAGFSGFGACRKFNQLGVNCKVVHPADVPTNHKEQQQKNDKVDSRKLARCLRDKDFSGIDIPSHKTETDRALVRQRFRIMKDLSRIKNRVKSLFFQFSIDIPERFTDSQSRSWSKVYIDWLKTVSVEWQNIREVLDSYIRHAEYLRNELLLVTKIIRKMTKEEYYQKNYVLLMSVPGIGFTTGMIILTQIDDVKRFPTLDHLCNYIGLVPSMHGSGEKMKMGKLINRGRKELKIMMIEASWKAVREDPALMVKFNELCKKMPKNKAIIRIARKLISRIRHVLVHQVKYESGILK

SEQ ID NO: 462298 - protein, 340 aa, unidentified
MELYAGLDLHSRNTFVGILDRELTRVFKKRVRNNLEVILATLQPFGDKIKGIVVESTFNWYWLVDGLMEAGYRCVHLANPAAIKQYEGLKHTDDQHDAFFLAQLLILGILPEGYIYPKKDRPVRDLARKRLFLVRHRTSHILSLKSLIERCCAEKVTTNDIKRNLTVLDLKQLLKEDHWVLSAQANLDSVRFLSEQITTLEKEVKKKVRLDNSFKQLLTVPGIGEILAMTIMLEVGDMGRFPKVGNFASYCRCVSSKRLSDGKSKGSGNRKNGNRYLSWAFVEATHMSCRYSERFRRYYNRKAAQVNTSLATKSLSNKLARICYYIIKDQVPFREDLFPV

SEQ ID NO: 462299 - protein, 441 aa, unidentified
MDLLYTHGAGLDVHKQSVVAHARITDAKGRVTRHTHTFGTMTADLLNLATWLLSLEITHVAMESSGEYWKPIYNILEGNFTLLVVNAAHIKNVPGRKTDVKDAEWIADLVCHGLVRGSFIPPQAQRDLRDMTRQRTNLVRDRATVVNRLQKVLEWANIKLAAVVSDVVGVSAREMLAAIVDGQSDVTLLADLARGRMREKRADLERALHGRVRDHHRFVIASHLEQIDFLDAQIASFDDQIVACVHEQAPPTAPAATDTPAATAPLSTGDTDDLSWEGAIEIWDSVPGIGRRLAEQLVAEIGPQMRGFPSAAHLASWAKVAPGNRESAGKRLSGKTGKGNRWLRTSLVQAAHSAVKVKSSALAAYYRRLAKRMSGKKAIMAVAHKILTIGYRLLSKRELYCEPDVSVRDAQRTEQLAAQMQRRLERLGYSVRIEPLTASAT

SEQ ID NO: 462300 - protein, 309 aa, unidentified
MVHPVYIGCDVSKAHLDLFDAATQKAVRIANTGTAIDEWLATLDGREAQVVLEATGRYDRLLCSALERWRRPYCRVNPARARDFARATGQLAKTDTIDARLLARMGETLSPPVTTPPDPARQQLESLHTRRDQLVAMRQQERARLHTADPSERDSIARHLGWLDTEIAAIEQQCQLLVRTNVTLNEQSTRLRSIPGIGQITAFTLMAHMPELGDSSPGGMAALAGFAPFNADSGIHRGQRHIRAGRKRVRDALYMAALVAYRLKSPFARMVQAMQAKGKPFKVMIIAIARKLLVIANAILRDKTTFEAA

SEQ ID NO: 462301 - protein, 394 aa, unidentified
MADGIRWVGLDVHAHESTIAMFDQSTGELSTARVVGRPHELLERLMEIPVPARMVYEAGPTGYGLARRARARGIEMAVCAPGRTERRPGDRIKTDKRDAIRLARLLAAGELAIVTVPSIERERLRDVVRCREDIRADLMRARHRLGKFLLRREVYWEGPGNAWSRRHRAWLASLRFADRASQLTMADYLHAHDVLLARRDRVESELEALAADSPCALALSRLRCLRGIDTLSALGLCAEVGDWARFDHPDQLSAYLGIVPSEHTTSTQRRQGSITKAGSTHARRLLIEAAYHYRRNPGVGEVLERRQRDQPPEVINIAWRAQRRLHARWRQLKDARKKPNGIVAVAIARELAGFCWELATWSPHPDRIPPASVLAGDALTQTRPVPPKQELVMT

SEQ ID NO: 462302 - protein, 318 aa, unidentified
MNTKINQSINVGVDTGKTQLDIHIRPLDLFFSVENNDKGIKKALKTIKSHSPERIVIEATGRLEMPFVLACAEAQLPIVRANPVHIKRFAGAIGRRAKNDRLDAELIAHYGEAIKPALTVIKQKNIRLMSDLVIRRNQLLSMQTMEKNRIQILPASLHPTIKPMLTTIKNQITQLEEKLVKLIEDSPEYRAKNTILQSVPGIGNIAAASIISNVPELGYITNKQAASLIGVAPITRESGRYKGKRVIQGGRAQVRTVLYMAMMSAMQCNPVFKATYARLLAAGKPKKVAIIACVRKMVVTLNSMLRDGAMWNESTAKN

SEQ ID NO: 462303 - protein, 400 aa, unidentified
MISVGIDVSKGKSTVCILKPYGEIVSKPFNITHTQKDLSELSSMLFRLNDEVKIVMEATGIYHLPVLTYLQEKGFFVSVINPYLMKSYRNESLRKAKTDKIDSRIIANYGIDHWFKIKEFQTSGEIYEELKLLGQQYRHYMKLHLLSLAELTHLLDLTMPGIKNLLASWNETNRKDKRSDFVERFWHYDVITSMSEQEFTEEYILWAKEKKYVPSQEKAKVIYTLAQESIPTLPSETSSIKMLVTEAVRVLKEVDATLGLILSRMQEIAKTLPEYSVVREMGGVGNTLAPKLIAEIGDVRRFRNGKALVAFAGIDPPPYESGQFVGCNRKISKRGSASLRKVGYETMRSLKMRSRPEDPVYRYVVKKESEGKSKKSAKIAGLNKFLRIYYARVTELYKNI

SEQ ID NO: 462304 - protein, 332 aa, unidentified
MVAIAPERQIVGIDVSQAWLDIALRPAGTYWRFANQAQGWTELMEQLKDIPTSLVVVESTGGMERGIVQALQQAGISVAVINPKRARDFAKASGRLAKTDRIDASVLAHFGQAMEPLPKPLSSEAQTALSDLVNRRQQVVEMLNNEQRRLHSVRNRTAKADIETHIEWLKQRVKGLDEEIDQLRKEDASWQQQFEWLTSVPGVGRVVATTLLAALPEMGQIPSKQLASLVGIAPFNCDSGKMRGKRRIVGGRALVRSALYMSALVAVQHNPVISAFYQRLLTAGKAKKVALIACAHKLLGILNALVKQQIPWKIPSPQTSPHWLLRGQVIDK

SEQ ID NO: 462305 - protein, 402 aa, unidentified
MNCVGIDVSKGKSMIAVMRPFGEVVVSPFEVRHTASELSELARLLKNLDGETRVVMESTGNYHAPVAWLLHGAGFYVSVVNAMLVHDYGNNSLRRGKTDKKDAVKLANYGLDHWLTLPRYVPEEDTRLMLKTCYRQYQQYSKVQTMLKNNLISLLDTTFPDANRLFTSPPRADGSEKWVDFVATFWHCECVCGLSKKAFTAKYQKWCRKHGYNFSQDKALDIYASACGRFGVMPKTNTAKLLVEQAISQLQTTSAALAALKQEMQSLAASLPEYPVVMEMFGVGPTLGPQLIAEIGDVRRFHSKKALVAFAGIDAPPYQSGQIDVRSRSISKRGSASLRRTLFLVMGVLLQCAPMDEPVYQFMNKKRSEGKPYRVYMMASANKFLRIYYASVKAYLDSLEHD

SEQ ID NO: 462306 - protein, 410 aa, unidentified
MGLFCGIDWATEHHDVAVVDDDGRVVARGRVSNDAAGFTRLLTLLAQAGDSAAHPIPVAIETDRGLWVAALRETGRVIYPINPLAASRYRTRHAVSGAKSDATDAVLLANIIRTDTDAHRPLPADTELAQAIRVLARAQQDAVWARQQIGNQIRDLLKDFYPSAIVAFAGLPEGGLARPDARTILAAAPTPAQAAKLTPARLRRLLIKAGRQRRLDSDIERLRAVFTDTYLHQPPVVEHAMGIQLSALLRQFDAACAAADELAEAAIAHFEQHPDAKIITSFPGLGMLAGARVLAEIGDDRARFADARGLKAFAGSAPITRASGKKTVVLHRHIKNRRLAAVGPIWALGSLRASPGARRHFDARRAAGDWNHQAQRHLFNKFLGQLHHCLQSGQLYSEHLAFPPPLPLAA

SEQ ID NO: 462307 - protein, 396 aa, unidentified
MEPRDHGMEHQADVHPQLRLIRPGVMVWTAPYGIECARMRLLISQTREPSVKQIIRIGMDTSKHFFQLHGVDAAERPVLRRKLRRNEVLAFFAKLPPTVIGMEACGAAHYWARELRRLGHEVKLMAPQHVKAYVKRNKNDGRDAEGLCEAMSRPTMHFVPVKTEEQQAALMLAGIRERLIARRTQLSNAIRGYAAEFGLTAAKGLDKIEPLLSRIAQDETVPALARDLFAIQGQDYAQLQVELKAIEARLRAWHRANTDSRRLAKIPGVGPIGATALVMKTPDPRAFPSGRHFAAWLGLTPKDHSTGGKTRLGKITRAGDERLRSVLVAGATAVIQQAKHGRGHPSPWLIALLKRKPPKLAAVALANKIARIAWKLMVTGESYDGARMPGASASAA

SEQ ID NO: 462308 - protein, 425 aa, unidentified
MNESTPFACTIGLDWADQKHDLWICPAGSSKSEHLRLDQTPEALHEWVAKLRARFDNQRVAIGIETSRGPVISGLLAYDFIVLFPVNPKALKDYRAAFSVSGAKDDRTDAMLLEEWVRLHRDKLKALEPDTELTRKLAGLAENRRRLVDERTRIVNQLHSALKTYYPLARSLLEGQMTKPMATEFLIRWPDLEALKKTSAQTLRAFFYKHNSRSAPLIEQRLQAVQQAKALTTDPAIVEPARVLVSALAGMLRPLHKALSHLDQQIQHAMDQHPDAALVRSWPGAGPALAPRLLVAFGTHRERFGSATEVAQFYGIAPVVQQSGNTKTVHMRHRCPKFGRQTFHENAACALKKEPWAKCFYENHKNRHDGKHHQACRALAYKLVRIYFRCWKDRKPYQPDQYLQALQKHGSPLHKSLADQPAKPL

SEQ ID NO: 462309 - protein, 417 aa, unidentified
MKGTTQKEQYRRCCGMDVHKETVVVCVLPADGEAGKALKKVYGTFRNDLGRMRGWLKQLKVTEIAMESTGVYWRPLWNVLEGHGFHLVLANPKQVKALHGRKSDKRDSQRIAEFLQDRRIDPSFVPPPEIRRLRDLLRYRVSLLEQRNQTHNKIRDLFETANLKLSSVASDLLGVTGQKIIEALIAGETSPDKLSWKVKGKLRKKEREVRQSLVGCFDEYHRYMLDLLWKQYQFLSRQIEQVEEKIRREMEPHRELIGLLDGVPGMDETVAWTLIAEMGTDMGVFPTTGHVASWAGMCPGTNESAGRQMNTKTRKGNRYLRRALLEAAWAATRKKNSYLRAFFYRLMYRKGWGKAIVALGHKLLVIAYEMIKTRTPYYELGADYYDQLNPEKTIQRLVQRLGRLGVEVAIAPKQANA

SEQ ID NO: 462310 - protein, 323 aa, unidentified
MDKDTTYFGIDISKDVFDVTDSNGHYNQFENNRKGFKKFLKQLDKFSHCVMEATGYYHYQLAYFLQEKMIKVSVENPLSVKRFIQMKLSKIKTDKSDSKLICEYAQYTKLKLWEGHSKQQQECLQITRTISTYTKQTTMIKNKIHGEEVLGTPSKLTLRSLNRILKFTKKEIANLEETLLDLVKQNHQDLLTRIRTIPGIGIKTGLMLIVLTDGFNRFNSASELCSYSGLTPIIRQSGTSVNGRARISKIGNKKLRNLLFMCSFNACKHNKACREIYERIVAKGKSKKLALMAVCNKLLKQAFAIAKSGLIYDESYRSVLVKQ

SEQ ID NO: 462311 - protein, 348 aa, unidentified
MTLTTIGFDVAKLVFQVHGVDENSRAALKRKLHRHEVVTFFEELPRCTVFLEACGASHYWARLLTALGHEVKLIAPEAVKPFAKKGKKNDAVDAAALCVAGSRPEIQFVPIKSVAQQAVLALHTARSLLVKQQTMLANAIRGLASEFGLVVPQGLHRLEELMVQVTAEASFPAVGRQALIVLHAQLQAAAERIVMLEEQIVVHARQNASARRLATIPGIGPITASLIAATVGYNITAFTSARHFAAWLGLVPRQHSTGGKPRLGRITKAGNTEIRRLLVLGATSMVRRAETWNSAAGIWLRGVLARRPVRLTTVALANKMARIAWALLTRNDVYRAQGRSKVAAGAAA

SEQ ID NO: 462312 - protein, 365 aa, unidentified
MPQPNDLSRSLAALDQDSTLIAVVEMSQTSWLIGAIVPGVERHPLKKIVPDENELLRLLYRWRDEAIKAGRRITRITVAYEAGRDGFWLARWLRARGVEAYVIHASSVAVSREHRRAKTDRLDTELLKRTFLGWLRGERDHCKMAAIPTLAEEDAKRPSREREALVRERTRLTNRMKSALARLGIRNFKPQLRKAAERLAAVRTPEGEPLPPHTLAELHRDIARLQLVKGQIEQIERARLERLRQPPTDAPHAMLVQLAQVYGLGIETADMLVHEVMVRDLRDRRAVARYGGLTGAPDESGARRREKGLARAGNARVRRGMLQLAWRFLRFQKQSALVKWFEARTADGRMATRKTMILALPPASC

SEQ ID NO: 462313 - protein, 407 aa, unidentified
MATSAILVGKDEGGSAVPDVRSNGCAETTRTWVALDVHKDSITAGILSAEGGPPEVVAFENSERALRRFARRLGDPQELAVCYEAGPCGYDLYRLLTSIGVACDIIAPSLTPVRPGDRVKTDRRDAVKLVRLYRAGELSFVCPPTPVQEGLRDLVRCRDDLRCARTAARHRIGKQLLRYGRIYREGRKTWTKQYGAWLRRQRLDDALAQAALEQMRCHLGALDAQLDAIDAQLDEVAQAEPWRAAVCALTCFRGISTLTALGLLAEVGDFHRFASARELMSFLGLTVSEYSSGQRRTRWSITKTGNRHARRLLVEAAWHYQHPPRLSVRIRAHEGVVAPEMLARAWQAQIRLHHRHRHLTGRGKPATVATIAVARELCGFLWATMTDQSLREDPPEQRRTSKEALVA

SEQ ID NO: 462314 - protein, 400 aa, unidentified
MSKHKSYLRFCGIDVAKNKHVLCIIDRDGQTVVRSRSFANDSAGYQQLLECLKSSGRTASLLVGMEATGHYWYSLHDFLTRNGYQVVVLNPIQTAMQAKKGIRKRKTDQIDAFHIAMLLKNGEYKAASVPGELGMTCRQLTRLRYRLVGQRAALKQLVWAKLHPVWPEFEGLFANAFCATGRKLLTITPTPADVLALGQTELAELIRKTSRGRYGPAQATKVWLAAANSAGMQRGLEGTRIAIHTLIQQIEAMTAIRETLEEDIRELAQRLPAYLFTLPGIDPLRAVSVFGETDPIKNFPSPAKMVAFAGLDLNVYKSGNYDAPHRHISKRGSPFLRHTFWAMAYQAVYREGDLRNYWLRKQAQGLEHKAAVTAAAIKVAQITWRILTDKRDYLPQGRQN

SEQ ID NO: 462315 - protein, 349 aa, unidentified
MLLSLGVDSHKDSLAACLVDQTGAQLAAATFPNTPDGHGDLLAWVGRSGQLTQAGVEGAANLGAGLARLLHDQGLDLREVPCALTVRERRRLRRPGQSEPTDALAIARITAREPDLPPARHAGQAEDLKVLSDDRDELVAQRTAEANRLHADLAIVCPGYARHCRALSSAHALHTVAQLLEQARTGSMRAQLAQRRILRLQQLDEQLAACGTQLTKLVTATRTRLVDMVGIGPLLAARILGEVGDVHRFPTRDRFASANGTAPIPVSSGRTDRYRLNRGGNRRLNRALYFAALTQASHDPRARAYLARKQAEGKTRREALRCLKRCLSECRLQGAAGWPETPAATRRVP

SEQ ID NO: 462316 - protein, 449 aa, unidentified
MHIRWGAAPRAPVQGTIRHRGGLAAKGSEGVVTEDVEWFAGIDWASQTHQVCLVDAGGKIVGEHGFAHGGAGLAELCSWLLTMTRAAPTAIAVAIEVPHGPIVEVLLERGFQVYAINPKQLDRFRDRFTVAGAKDDRRDAHVLGDSLRTDRHCFRRLSAENANVIELREWSRMSEDLQQERNRLANRVREQLWRYYPQALAISDDLAADWFLQLWAAAPTPATARRLRESTVEGILKRHRIRRITAAEVLASLRQKPLTVALGTAEAASAHIRTVAHRLRLVNRQIKQAHQRLDALSDRIAENEGDSDATGQKSEQRDVAILRSLPGVGRIVLATLLAEASEPLRRRDYHALRTLSGVAPVTRRSGKYCIVVRRQACHMRLRSAVYHWARVATQHDQRSRHRYAELRKRGHSHGRALRSVGDRLLAVACAMLTRRTPFDPDYPVKQMAA

SEQ ID NO: 462317 - protein, 323 aa, unidentified
MNKGIKYFGLDISHLVFDVTDSDGDYHQFKNNGSGFKKFAKLLNFDSHCVMEATGYYHYQLAYYLLENGIKVSVENPLSVKRFIQMKLSKIKTDKSDSKLICEYAQQVELKLWKGNSKDEMECLQITRALSVYTKQSTMLKNKLHGEAVLGEPSKAVVRSLNRSLKQLEKEMKNLEDKLLALVKQAHQDLLTRLKTIPGIGKKTAIMLVVLTGGFERFTSANELCSYAGLTPVIRQSGSSVKGRPRISKIGNQKLRNLLFMCSFTACQYNKACRDLYQRIVAKGKSKKLALIAVCNKLLKQAFAIAKSGLIFDKEYKSTLVKN

SEQ ID NO: 462318 - protein, 407 aa, unidentified
MPRDYIGVDWADTEHAIWVEDESGTQVAALTVPHTAAGLSEFGRWLYERQAQGIECWAAIERPEGRVVDFLLDHGVVVYPVNPKALDRARDRFRMSGTKSDPFDARVLATFLRTDHPHLRPLRPSSELAQELKLLTRDAQRLIRQQTRLLNQLTATLKEYYPRPLEVLGELTTPLARAFLTAYPSPDALAALSRAQWRRFARTHRLSEARTMALWTALQPPQLPVPAHVVRAKARLVRVLVDELSATVRAVEEYRQAVDDFFATLPAAEWARSLPGGKSGTTVPTLWAELGDAPDRWQSFAHVQAQAGAVPVTARSGKSQHVRFRFACNTHLRAATHTLAFLSLRQSEWARGYYKQYRARGHRHHEALRALGAKWLKIIFVMWMHHTPYDEQYHLANMARQHLRQAA

SEQ ID NO: 462319 - protein, 351 aa, unidentified
MSRKKVAAAAYSIGIDTGKNVLHVIGLDEKGAVVLREKVSRNRIAARLVNVPRCLIGIEAGMATHYMARELVALGHEVKQVPAAYAKPFRQGHKNDFRDAHAVAEAVQRPSTRCVPIKTDDQLDLQALHRVRSRLIGDRTAIINQLRGFLLEHGLPVRQGHRFLRQQLPQILATRTDLLSPRMVTIIGDLIGDWEYLDDRIAKVTGEIESLAHADASCGRLMTVPGIGPIIASAMVAAIGNGAAFAKGRDFAAWLGLVPKQMSTGDRTILGRITKRGNRYLRMLFIQGARSILLHPTSWAKHSFGPWLTATARRLHCNVLTVALANKLARIALTVLVQGRSYQTHIERAAA

SEQ ID NO: 462320 - protein, 377 aa, unidentified
MHSENIAAYVGLDVHKETLAVAIAAPERLGEVRYYGTINNEAQAVRRLFQKLQGLYGNILSCYEAGPCGFRLYHQLTAMNIKCQVIAPSRIPKSPTDRIKNDHRDAISLARLLRAGELTPVWIPDLTHEAMRDLIRARAAAKRDSRVARQRILSMLLRTDKHYAGKHWTGKHRTWLANQSFSQPSQQIAFQHYCQSLEQIEDRILQLDQEISRLLPEWSLCNLVCQLQALKGVGQLIAITLVAELGDFSRFSNPKQLMAFLGLVPGEYSSGNSIRPRGITKVGNSELKRLLYEAAWSYRTPAKVGAWLIYYRPDSVTQYSKDIAWKAQQRLCSRYRSLTAKGKKSQVAITAVARELTGFMWDIALAAQSSFSQQKQN

SEQ ID NO: 462321 - protein, 366 aa, unidentified
MALKAQSLFGYQISYDICISSELGKEATMGKYIGMDAHSSICVFSVVDKNGTEVNQAKIATNGQLLVEYIRSIEGPKKLVFEECELSTWLCETLRGEVDELIVCNPTRNLQYKKAKTDKLDAQNLALLLRGGYLSAVYHDGSKTEHLRALMSGYQDIVDTGVSVKNRYKSLFRKAGLPARGTKVYNDESLLEDLPRADQRFVGRSFYRLLETLEKEREQYIAAINKLGRTFPEIKLLKTIPGIGDIQAAKIVSQVISAQRFKDKHKFWSYCGLVRYRMESAGHIYGSRRGWGNRILKCVFKTAAQTVLRGENELRAYYDELRVKGTSDRSARNAVSRKLAAISLSVLKARHPYDETRIFPQLEQAR

SEQ ID NO: 462322 - protein, 342 aa, unidentified
MDTIGLDLHKRESQLCTLTEEGEIIERRIVTSRERFTAVLGNRPPARILLEASTESEWVARHLESLGHEVIVADPNFAPMYATRSRRVKTDRRDARTLAEALRLGAYRAIHRASAAQRHVRAQLAVRDALIRTRTRYVNVVRALTRRDGLRLPSGGPIHTEAKLAALPLPALLAAEVAPLRVLLGPLNDEIVAADARLTSVVAGDPVVTQLCTAPGIGPVTAVAFVATLDDVTRFKSAHQVEAYLGLTPCEYSSGEQQRRGRISKTGNARMRYLLVEAAWRLLRTKDPAAAALRAWAEGIAQRRGRSIAAVALARRLAGILYAMWRDGKDYRAPLAAAAAVA

SEQ ID NO: 462323 - protein, 437 aa, unidentified
MRGCRAVSYSGTKPGYLFYTPKPKEVIPIEKLFVGVDVAKNSLVAHAMDNNGDDVFHSFEVENNNPGCLKLIDFIAKHANDYEIDIIQLGMEATNVYWEHCYQLLQDSDKLNTNFKLVLYTLNPKVVKNFKKAYNDLPKTDSVDAWVIADRLRFGRVKNSSTPEEVYRPLRQITRFRFKLGESMRAEKNRALTLVFLKFSNYEDSPFGTFSDASMALLEEFTLEEIISTDIKELATFLFENSNNRLGGSCTIDDIIKTLKKAARNSYRLKPRMDQAISQTLAMTFDNIRFFERQLKRAKKVITRELKAIPQTLDTVDGIGPILTAGIISEIGDIDRFYNQASLASYAGLTWTRHQSGSFEAEETSLTKKGNKYLRYYLVEAANSLRVHNDDYRQYYYKKYNESKKHKHKRALVLTARKFVRLVFALLSKGEIYQPRR

SEQ ID NO: 462324 - protein, 374 aa, unidentified
MAEDFWVLRFRLMVKRGPGHGLKHQKEKRSMDHFAGLDVSVKETSICIVDDAGRIVKEVKVASEPEALLKVLGNPIHRFKRIGLEAGPLSQWLFSALAEAELPVVCVETRHMQAVLKAQINKTDRNDARGIAQMIRAGLYRPVHVKTLRSQKLRMLLTHRKLLQSKAIAIENDLRGTLRNFGLKVGMVGKVRFEARVQELVENQPDLAVLVEPLLIVRRALLEQIVILHRRLLAIVRDDEVCRRLMTTPGVGPVVALTYRATVDVPTRFRKSKSVGAVFGLTCSRYQSGEVDWSGKISRCGDEMMRTMLYEAAQSTMHSKKWSWLKAWAMQIARRRGMKKAIVALARRLAVIMHRIWVDGTEFRWTREQAAAAA

SEQ ID NO: 462325 - protein, 409 aa, unidentified
MLFVGDDWSEDHHDVEVQDETGRVLARARLPEGVAGIDRLHSMIAMHTDEDAVDFEVALGIETERGPWVQALVASGYRVYAINPLQVARYRESHHISGAKSDAVDAHILAEMVRTEGHRLRTVAGDSEQAAAIKIVARGHKNLIWERTRHSQRLRSLLREFYPGALTAFPDLTAAEALELLGKAPDPVSAARLTMTQISAALQHARRRKVSAKAAKIQAALRSPQLRQPDLVSAAYAAQVGAQVAILATLNAQAEAMEEQVKAHFSVHPDAEIYLSQPGLGEILGARVLAEFGDNPDRYRDARCRKNYAGTSPITRQSGKTKLVAARHVHNDRLLDALGQQAFAALTPSPGARAYYQQLRDRRVGHHAALRQLGNRLVGILHGCLKTHTRYDETTAWSHRGRHELTDAA

SEQ ID NO: 462326 - protein, 371 aa, unidentified
MKQQTKSSHITVGLDLGDRRHRFCALDERGEVVEQDSICNDRVSLRKLACRYHGALGVMEAGAHSPWISRFLEALGWRVVVSNPRKVRAIYQHERKSDQRDALMLARIGRMDLALLYPVRHGTAEAQQDLLRIKLRDSLVRARVAVINSVRFTLKSLGYTVRNPSSERFHKVVMEEVPESVREMITPSVQALAELTARIKMLELEINTLAQMKYPQSAQLQQIPGVGPITALYFVLKIEDPNRFAHVRDIGAYAGLCPRRDQSGESDPQLRISKRGDAYLRRLLVSAAHYILGPFGPQSALRAYGLMLAADGTARAKKRATVAVARKLAVLLLSLWKSQQPYQPFPGACLNGEQEDRRSGTIALHRMEATD

SEQ ID NO: 462327 - protein, 344 aa, unidentified
MDHFAGLDVSVKETSVCIVDDTGKIVREVKVASEPEALLAVLKNPAYRFKRIGLEAGPLSQWLYSALAEAELPVVCVETRHMQAVLKAQINKTDRNDARGIAQMMRVGLYRPVHVKTLRSQKLRMLLTHRQLLQSKAIAIENDLRGTLRNFGLKVGMVGKVKFEARIKELVENQPDLAELVEPLLIVRRVLREQLVILHRRLLAIVRDDEVCRRLMTTPGVGPVVALTYRATVDVPARFRKSKAVGAVFGLTCSKYQSGEIDRSGRISRCGDEMMRVMLYEAAQSMLRSKKWSWLKAWAMQIARRRGIKKAIVALARRLAVIMHRIWIDGTEFRWTREQVAAAA

SEQ ID NO: 462328 - protein, 365 aa, unidentified
MSESYVGLDVHSKTTEFVIEDASGTVMREGQVPTTEEGLRSLIETFGVPPGSRVALETGTMARYVVDQLRQLGLDPVVIDAHEVRLKAYRPRQKSDRRDAFEICEGLRRDLYRTIVHMPPKQIQRLREMLSLRRHFVRVQSSETIAAKHVLRAAGLGRLSRQLQTESGWQRLLVQFDGILRARLEAHHAVWRAAGEQVRKLEDSIFEQSHFFEEDFQRLQTVPGVGPIVALTAIAAFSDARRFPSAKHAASYAGLVPSTSQSGDRDWHGHITKQGSAELRSMLCEAAHHASRKSNPLNPHFARLCARRGYKMAVTAVAHRLCRMLYAMLRDKAELKIEKLGIEVGPFQRKVVTPYRLRRKVLLHG

SEQ ID NO: 462329 - protein, 401 aa, unidentified
MSSLVFVGIDVSQARLDIAVRPGAPFSIAHTESTLATLVEQLRALSPTLIVLEATDGMEIPLTSALATAGLPVVVVNPRQVRDFAKASGRLAKTDALDAQVLAQFAEVMRPQPRPLPDAEARALAALLTRRRQLVEMLTAEKNRLLSAASPIRTRLRTHSTWLERELQHTNTTLAEAIRQSPVWRDKDELLQRVPGVEPVLTSTLSASLPELGTLTHKQIAALVGVAPLNRDSGTLRGRRTVWGGRAQVRAVLYMGALVAARFNPVIQAFYQRLCRDGKAKKMALTACMRKLLVILNAMIKQRTPWHQAEVPLLYKSILMTPIPCDPIYGKWFLTPLFLHHSRTGICERGPAKSRRGSSTCVVNDSDLPRTQLYLQMQECLWMQPYGMPARHHRYILYPGG

SEQ ID NO: 462330 - protein, 318 aa, unidentified
MSDSVFVGIDVSSQTLEVASTAQAKTWQVSNDSTGIEALVTQLVALQPGLVVLEATGGYEFEAACALQAAGLAVAVVNPRMARDFARAMGALAKTDALDARMLAAFARVLHQHPERERFVKPLADAELQRLQALVLRRRQLVQMLTSERQRMRISHAAAKPSIERVIEFLQRELDDSNGDVAKHVQRHHAELAAALQSVPGIGAASVAVLLAELPELGKLDRRRVAALVGVAPLNRDSGQMRGQRAIWGGRADVRRTLYMATLVAVRHNPVLRTYYERLLAAGKRKKVALVAAMRKLLTMLNAIAKHGSPWNPEMHHA

SEQ ID NO: 462331 - protein, 355 aa, unidentified
MTDNHQKIIIGVDTHKDFHHVAVISALGESLTDRKFDATPDGYAALIAWVTGQGDVLRAGVEGTGSYGAGLTARLRSAGIEVIDVLAPDKQERRLRGKTDQIDAYSAARAVLSKRATTVPKIRDGEVEAIRILRTSRRLVVKQRTEIMNQLHSLLVSAPETLRAKFAGLKAKDLAKACARLRELAGDDVVTAATKDAAKSLGRRHVELSLEADRFEESIRALVTAYAPELLAVYGVGPDVAATLLTVAGENVDRIGTESALAHLAGTAPIPASSGKTNRHRLNRGGNRQGNAAFHRIVLVRMKRHPETRAYVEKTLARGKTKRDTMRLLKRYLAREIFPILIAVQERHATTQIAA

SEQ ID NO: 462332 - protein, 451 aa, unidentified
MCRDLEESARMAVSPFHMPRAQDISISEEGPMEDAREVVHGVACGLDVHAAVIVACLVCSGPNGGPRYEERSFGTGLAALKQLRDWLVASGCQMAGMEATGVYWMPVHGVLEGKVPLVVGNPQHMKGLRGHKTDHKDAKWIAMLVRHDLIRGSFVPPPEFRDARELTRHRRQLLQARTAIRNEVHRLLARQGITFGTVLSNVFGASGMAILEALAEGRSVVEELPKLVHRSVKVKVPMLSAALEAPLADIPRYLLMTHLQRLEAVEEDIQAIERKIAAHLEPYREKLDLLQTLPGVSLTSACIILAEIGVDMTCWPTAKHLSAWGGVAPGCRESGGKTHRAGTRKGNPYLCSVLVECAGAAVKKKVCHLGGKYRHLAAQTGSKKKALIAIARKLLVLVYKLLGQNCPYEEPKPQELTDEKRKKAVQRHLQELAKLGVQVDMLPINPKTQPA

SEQ ID NO: 462333 - protein, 370 aa, unidentified
MSQSSTLFVGMDVHKETIAVAYVAQEPGAEVTYFGTIGTRQCDIDTLIRKMQSKAQHLIFIYEAGPCGYWLYRYLQKKGYDCWVVAPSLIPKKAGERVKTDRRDAVQLARLARSGDLTLVYVPKVDDEAIRDLTRAREDVISDLKDAKFRLKAFLLRQDIRYAGRANWGPAHLRWLAEVVCPTPAQQIVFQEYVRTVTEHTERLGRLDQELREQVKTWRLHPVVDALQALRGVQFTVAITMVAEIGDLTRFEHPSELMKFLGLVPSEYSSGQRRQQGGMTKTGNTHARRVLVEGAWAYRYPAKVSRQLQLRLEHQPQMIQDISWKAQVRLCKRYQRLVAKGKHANVVTVAIARELVGFVWAIAKKVPITL

SEQ ID NO: 462334 - protein, 343 aa, unidentified
MDHFAGLDVSVKETSVCIVDDTGRIVREVKVASEPEALLQVLTNPAYRFKRIGLEAGPLSQWLFSVLTEASLPVTCVETRHMKAVLKAQINKTDRNDARGIAQMMRVGLYRPVHVKTLRSQKLRMLLTHRKLLQSKTIAIENDLRGTLRNFGLKVGMVGKVKFETRIKELIENVPDLAVLVEPLLIVRRVLREQIGILHRRLLAIVRDDDVCRRLMTTPGVGPVVALTYRATVDVPARFRNSKAVGAVFGLTPSQHQSGEIDRIGSISKCGDAMMRTMLFEAAQAMLMRSAKWSWLKAWAMKIARHRGMKKAIVALARRLAVIMHRIWVDGTEFRWTREVAAA

SEQ ID NO: 462335 - protein, 306 aa, unidentified
MKYIGIDVAKDTLEVFIPEKGNFEVTNNRKGFLKLIKNLQVGDIIGVESTSNYHHAIAKFLIQKGFEVKELNPILTKQFIKATIRKKKTDKTDAQIINRLLAQGEGHSMSEIQLGNSLKKLFRIKKKLIQTRTSLKIQLKSLETAVVSVTIAKKSFQKLITSFDKEITKIEAEIIKTKNKQTEILESIPGISAQLARGILSEIGDVKRFNNKRKLVAFAGYDPKLLQSGTCMYRTSKLIKRGSPYLRYALHIAAFANINRQNIFSNYYQKKREEGKHFIQAMVATARKILEIIFTLLWKEEKFQKV

SEQ ID NO: 462336 - protein, 384 aa, unidentified
MDKLAWIKPQEKVREKNHLFKSVNQKIKVMQVMLKQCVGIDISKANFHAFVCSMYNDQRLRFSEGMEFDNNKKGFNQLLKWVKKQLDKRVPVVYLMEATGVYYESLAYHLHKIKKTVHVVLPNTSKHYLASLNLKTKTDKVDAKALAQFGVERKHRAWEPPRAVYRSLKELTRYRTGLQDSKTVFMNQLSAFKSKEAGDDLVEAGLQYLIKQVGEQVKLTDQSIKKLVKQDEELKRNVKRLTSIKGIGFVSATVILAETAGFDQFKSIKQLVSFAGLDVIQRQSGSSVRGKSKISKKGNSHIRRALYFPGMVAVKHSTTFRKLYERHLDNKKEKMVALVAVQRKLLALSFTLWKNEATFIDNYQSIIAQKEVAPAWAEATQDSV

SEQ ID NO: 462337 - protein, 325 aa, unidentified
MDPDDKHGTAEKMSDNLSQTIGIDISKASLDCHAHPTGVERQFANTAKGHKALIAWLRQWPVERIAYEATGTYHRALEAALTNWPCVKLNPERARRFAQATGTLAKTDRIDAMLLARMAATLQPPVRPARSAQQAQMAELINARDGLVRDRTALKNREKNLTIAFLKRQCRQRLEQIDRHIETLDTEIANLIAADVLLARRHQILTSIAGVGRLTANQLIATMPELGSLENKQAASLAGLAPVARQSGQWKGKSFIRGGRANVRQALYMPALVAARYNPDLKAKYQQLLAAGKPAKIAITAVMRKLIVTANALLKADRCWAQSLA

SEQ ID NO: 462338 - protein, 332 aa, unidentified
MAEVKRFVGIDVSKAQLDVALGANEGTFSIANDEQGIRELLKRLIPGADLVILEATGGLEVPVAGALAAAGIAVAVVNPRQVREFARATGRLAKTDRLDAQVLARFGEAVKPPVRPLKDEQAQALEALVMRRSQLVAMLTAEKNRRANAARVIRRSIDEHIRWLEKRLSDFDDELSDLIRATPIWRERDELLRSVPGVGTVLSVTLLAHLPELGTLTRKQVAALAGLAPFNRDSGTLRGSRCIWGGRAQVRRVLYMATVAAIRANPAIKSFYTTLRQRGKHPKPALTACMRKLLVILNAVLRTNTPWQTPTPAASISTFSPLLGAVTQHGCC

SEQ ID NO: 462339 - protein, 314 aa, unidentified
MINNFLGIDVSKDRFDVFLSFISKKGKRETRKRSFKNDDHGFQGLLSFLQKHNVEQVKACMEATGCYSEALAEFLHNAGHFVSVVNPYCIKSYARSKLTRQKNDQTDAEIIADCCQRQEPTRWTPPSPELKKLKHLYRCSVALKDELILVNNHLEKKERLPKEVANAWEDLAMNIAQKIETIKNSVRELLKQHKELLENFQLLLTIPGIGEESAVAILAEVPDIEVFRNARQLAAYAGVIPRNITSGSSVYAKPRLSKSGSQPLRKALFFPAIVAKNHNPIIMSFCQRLKEKGKHNMAIVGSAMRKLLHIVLVF

SEQ ID NO: 462340 - protein, 450 aa, unidentified
MGNASGVSRGDRNRNARLARLRSLVPVTNAIVGIDLADAKQMVVVTDHDSKVLARKTFRCRAWDLGAALGWAAERAAAKGFSGVTVACEPTGHRWRVLGQLAADRSMPFVCVQPMLSSWARRSEDLTSDKTDEKDAVLIARLTAQLRCYVPEPVDETWGRLRHLGARREQVIVEMVSQIQQMRALLECVWPAALDTAKQPFRSKTWVAAMSAICERDGGDLDRTRRLGPARFEQAVRREILKRGGQKPSLRIARRLFAALTDPTGVIAHRPGALERVAFLLVDWHTAGDKLTDTEARMISVLGELKLTALATSIPGLSPVGAAAILAETGDPNRFASGRALVKHAGLAPREKLSGTFVGRTKLTGAGRPGLRLAAWRAVWGTQRGNTVYAARYRHLTSREQNKLTATQAQTVIAAAILRQLHAVITTGQAWDPDIATHGTGHRRQMPIAA

SEQ ID NO: 462341 - protein, 328 aa, unidentified
MTSSLGVDVSKAKLDVALLNDEGKYRCKVFANSGMGFAALHQWLQTHLPQGQELAALHVCMEATGSYHEPLALHLHDLGVRVSVVNPLRVKRFIELEGTRNKTDQGDSKSLARFCRMASPELWEAPAPGVRALQALVARLDALQEMRQCEANRLEVAHGVVQASLHEMLATLDKTIAQVKAQIRQTIDDDPHLRGRAQLLHSIPGLGDRTIPQLLAYIGRPERFKSVKALIAYASLSPAIRQSGTSLNKRGGTHAQGHRQLKHALYFPAMVAGRHNPAVAAFWQRLKAQNKPGKVIVVACMHKLLAIVYGVLKSRTPFDATRFCDANT

SEQ ID NO: 462342 - protein, 430 aa, unidentified
MNESVSEQPVNPKVAAFVGIDWADLKHDVVLRSVGDPTKSEHQIIKSEINALADWIAQMHERFEAKGKVLVCLEQSRGALIYQLMAYELFELYPINPSQLANYRKAFFSSGAKDDRPDADLLSELVMCHRDRLKPWKPDDQLTRELASLNEGRRNAVDRRTDLANEIKSQLKLYFPVALQLLENDITTALAADLLMQWPTLAELQKVSPAKLRKFFYGHHSRQEKKILERLALIKEAKPLTTDLAILRPNALRVKLLAQQLKSLLPFIAEYERRIAEIFGSHPDRFLFDNLPGAGPALAPRLLTAFGTDRDRFEVAGDLLNLSGIGPVRIASGKKTGKNASVHCRRACPKFLRQSFHEFGECSIRYSPWAQACYQAQRGRGKGHHAAVRAVTFKWIRILFACWKQRTPYDPQRYFQALQTRGSDYAQTTA

SEQ ID NO: 462343 - protein, 331 aa, unidentified
MQNTHSTENNTRYLGIDVAEGSCVAAIDGVKPRSFTRTGDGPAMLIGWSKRLLPGANILAVMEHTGVYSEQWAGLLLEHGMGSALVNSGRVKFFAKAMGLRHKTDKVDALAILEYAKHFKPVMREPKSDNERALAALTKDRATFVGMRAKMNTQKKSHQRQPGVPELLVVERSAVFAVLDEAIASYELRSQRLIQAEKKMRRAAEILKSIPGIGKVNIAEFCIHLTVIMDCNAKELTALTGLSPKHKESGKSVHGRSKIDKQGWGEMRKNLYMAANCAARHCPPFAQFKQHLIDKGKPPRLAVIAVARKMLVIAHSLLHKDELFDPNYQIA

SEQ ID NO: 462344 - protein, 388 aa, unidentified
MQGVVAQSEAPSAIRTDLCAIFLSLELSRSTWLITSLSPGAGEKMSKHSVSASDTAGLFNRFAELQQKARARTGRTFSIITIQEAGLDGFWIHRLLQGEGIESWVVDPASVLTSRRRRRAKTDKIDGETLVRTLLAYKRGEPRVCAMVKAPTPEEEDRRRICRERKTLTAERIRHANRIKGLLFAQGIGDYEPLRRNRREHLEVLATGDGRPLPEHLKAQISRELDRLELILAQLKAVGSERDAMLEPAEEGPPTPASLLTQIQGIGPEFAAVLWSEGLFRSFDNRRQVAAYAGLAPTPWQSGSVAHEQGVSKAGNPRLRTTMIQLAWLWLRHQPGSSLSIWFRERVERNGGRGKKIAIVAMARKLLVALWKYAVHGILIDGMKTKAA

SEQ ID NO: 462345 - protein, 370 aa, unidentified
MREDSVVYVGVEAAKAKHAIAIAEGGRSGEVRYVGEIEATPAAVERFGRKLERKDPRLPFCSEAGPTGSGLSRHIVALGHRCEVVAPSLVPRRPGDHVKTNRRDAITLARLLRAGELSGIWGPDAVHEAVRDLVRVRSAAGEDLRKKRQQWLSFLLRHGRVFTGRRSWGPAHTRWLAAQKFDHPALQIVVQDQVDAITEAWRRLERLEAQLAELVPTGSMAPVVSADQALRGVSVLVAVPFASEVGDGRRFDRPRQLRALMGLVPSERSTGDTVRRGGLTLAGHRRARRVRVEGAWSYRHPARVTEPMRVRLEGLPKGVREIAWKGQTRLCTRSRPMVGTGQKAPIVGAAIARERVAFLWAMGRPVAPAP

SEQ ID NO: 462346 - protein, 369 aa, unidentified
MDVHSTNYTLCAMEPVIGEEDRVFATIKVTPDYKNILMFIENLKMKLGLDNKYDIQCGYEAGCLGYSLYNQLTAAGVKCVILAPTTMLTQQGVRIKTDARDAHMIAQCLSYGGYHAVYIPTEEDDSVKEYLRMRNDHKLSLKKIKQQINAFCLRHGFQYPGTKWTQAHLKWIKKLEVKNMYRETLDEYIASYEEQESKIERFDTRIEEIAGQEKYREKVKRLGCFLGIKTHTALSLIVETGDFERFAKGNTYAAYLGLAPGENSSSDNINRTGITKAGNSHLRQLLIESAGGICKGAVGHKSKDLRARQNGNSAEVIAYADKANTRLRSRYYKFIRHGKKRNVAVAAIARELACFVWGMMTDHIEMKSA

SEQ ID NO: 462347 - protein, 459 aa, unidentified
MGTRILGIDLAVTAAHKAIVLDVTSNRFVSSVLSFSTDPAEIDRVLTIARAGAVEPVRLVTVLEATGTAWFSVGTYLDRQGVEVYRVNGQQVGELRRIYQRRAKSDRIDARVLAKLYLLCPERLHRLSFPTGLHLALQQAVREVLHATRSITVSKQRLLAFDQLGWLGRPDGLDPYDEAARWWREHWYNPWRVCEAGETALTQAWQAASPILPAETTWITLLMARARQVTTLYGAPDRLDYDRLQASVIREQARLSEAETLAHDLRLKVVRPLYRQLSPDRHLESLRGVGQDSAAVYIAFVYDILRFPSLREFRGWHGLVPFSRQSGESQARGLHITQAGPDPIKLTAFLNANVARLYDPEIAALYYDQMMNRGKHHLQAVCACATHLLDRVYVVLRDQRPFELRDVDGSPVTKAQARRICRERYQVPDQVRQRNNHRVRQERQERKAEQRYRRQHPRE

SEQ ID NO: 462348 - protein, 410 aa, unidentified
MIKENYIYVGIDLHKETHTAVMIDCYNQKLGEITFPNRPAAFPKLVTKVKKCNTDGKEVVYGLENAYGYGRALAVWLIDKGYLVKDVNTAISHRQAKHRGAMYRKSDSDDAKAIALATLNMLDKLPDACPNDAYWSLGQLVHRRDNIMKQRTRLVNQLHEQLCIVYPSYKQFFNDISRPTALYFWEHYPSRKYLKGKSVEDLRAELVPVSHNKCSTKTCEKILDAVASDKVKNNAYQDARDMVTLSIVSDLQHYDSQLTEVDKMLEQMYKMLGCTLTTIPGVNVITAVKILAEIGDIKRFSNANKLAQFAGIAPLHLSSSGKGKDVATKQGNRRLQATIYFLAIQMVQVSSKGTPRNSVVRAYYEKRKAEGKTSQQALICISRRLISVIYGMLKNGTEYRMPVVENAGEK

SEQ ID NO: 462349 - protein, 344 aa, unidentified
MEHFAGLDVSVNETSVCIVDETGKIVREVKVASEPGALLTVLNSGAHHFKRIGLEAGPLSQWLYSALGEANLPVICVETRHMRAVLQAQINKTDRNDARGIAQMMRAGLYRPVHVKTLRSQKLRMLLTHRKLLQSKAIAVENDLRGTLRNFGLKVGIVGKLRFETRIRELVENLPDLAILVEPLLLVRRVLREQSAVLHRRLLVIVRDDDVCRRLMTVPGVGPVVALTFRATLDVPARFRNSRAVGAALGLTPCKYQSGESDRTSGISRCGDEMMRVMLYEAAQVMLVRSTRWSWLKAWAMQIARRRGMKKAIVALARRLAVVLHRIWVDGTEFRWSRQEAAAA

SEQ ID NO: 462350 - protein, 420 aa, unidentified
MKAYNVDNFAVLIGIDWADKKHDICEHPTGTNKYHYTVIKHTPEALHEWAMDIKQRYPEQKIAIVCELKKGPLIYALAKYDHLTLFTVNPCAVAKYRQAFKPSGAKDDPSDAFVQVEILTLHMDKLSVIEPESAAMRTLSQLVEYRRSLVQDSVDLSNKITATLKNYYPQALEWFKEKDTYIFCDFIQKWPSLTAVKKARKQTLLDFFESHNSHYCTVNNARLDSIKNSMPLTLDEGVIVPNQMLVEVLIMQFKVLLKGIEKLDKAIKSAYKAQQDKKTFDSLPGAGPQLAPRLLVAFGSNRARYNDAAELQKYAGIAPVIERSGQKVWTHWRYSCPTFLRQTFVEWAGFSIRYSFWAKAYYEQQKAKGKPHNSIIRSLAFKWIRIVFRCWKTNTPYDESTYLAALKRRGSPLLKFAINS

SEQ ID NO: 462351 - protein, 355 aa, unidentified
MKYHTSTTQFNCGIDLHARQMYVCLMDRDGKKLVHTNVKNNDFAFFLKLVAPYRHDLTVCAECMFGWYWLADACQAADIRFVLAHALYLKAIHGGKNKNDRIDSEKLCHLLRSNLIPPAYVYPAAQRPLRALLRQRLLYVWNRGELLARIQSHQLAHNRPPLRQTRYNRDPWEEQLLAQEDNPVRRFALQNDMALIRHYDTQLAGLEKELLKLTKQTSSRDFTLLQTAPGIGDYLGLTILHEIGDIARFPTVKNFISYCRLVKGTVASAGKIKGLRGAKLGNPYLRWAFGEAAVIAKRDHAVLGPLAQRLEARMGGNKFKANTVLAIKLARAVYFMLKNKTVFDPGRLVAALSTN

SEQ ID NO: 462352 - protein, 380 aa, unidentified
MDNSTGTVRKNDQETNFIGMDLHLDNVVVVVAQNEIKDNTVRSKTVLSKKFKTVGQPNIDEHFKVLETYCQDKPHMAVVESTYNWYWLADEFEKRNWNLRLADPSTVSKAGFKYSDDYTDASYLAECVRNGSIRSTAIMPKDDRAVRDLARYRMTLVEDRGRLKTILVNMTTNHLSIKLNADKLLKEIDEAVEKAASASDEGAADEVLSHYYDNRQVRTKMRSLLRRIRFLTNEVEALDEELTELIKPNVYATSLQSIKGCGYVTSMLIGLEIGDIGRFRTHKDFVSYCRLAPTSKLSNGKSKGLGNAKNGNAYLSWALTELATFVVRYNPEAKRVYDRYFNRSRLRVKAIRSVAAKIARGIFMMLKNGEVFDMKRCFGG

SEQ ID NO: 462353 - protein, 351 aa, unidentified
MQSQMIATPKLFIGLDVHKKSWQAHLRTDISDHKGFSLPPDPEILANYVFKHFPDHQVQLSYEAGCCGFSAAREFLNLGWSVTVVNPADIPHMDKQLYQKTDKIDCRNLAKQLQLGQLKPIYIPTEDQEQLRSLLRQRNQLVKQHRKVKSNIKGLLLFHGIVIPPEFDNPNWSKNFQQWLFQIPWSHITGLQCLHSKLRIYKLLDQEILLTSNELRAYCRKVHTTDYYLLKSIPGIGGILSAAILAELGDIRRFNNERQFANCIGLVPGIHQSSETNNYMGVTPRCKALLRSYLIESAWIAIRLDPGIQAFYRKHVGKNPKSVIVKVAHKMCRRILSVIKSGKPYQLGFSA

SEQ ID NO: 462354 - protein, 391 aa, unidentified
MINIGIDVGKFKHCASAIDDKTGEILITPFFFNNDQKGFNLFYSKTKQYLHRKHAVGMEDTGHYLVNLTDFLLDKKFTVKFINPRSTCLRRKELGMSAKNDRKDSILIAEMLSEKKFWRSVTRTTQETDKLREITRLYHQLQEQQNEDMNRLQRALDIVFPEVNKLSWTRYSKVYMQFLASYPTAASIASEDIRNLRNALKTDGRGRQCKLTAEDIKEAAKCSVGEDNIAVALEVQSIIAIINTRKQQIENLENKIEEFSLKLNSPIISIPGISHITGMTIIAEIGDIHDFSDAAHLISYAGMEPLVHQSGKYDAAHMPISKHGSRYLRKALYQAVFTVCKYCPTFNAYYTKKRNQGKTHRCAQGHCVRKLLRVIYKLLANNTSFDENLVK

SEQ ID NO: 462355 - protein, 369 aa, unidentified
MKSILYVGMDVHKDNYVLCSYNFEKDEYFARIEAKPEARNIVQYINQLKLKHNYDEVVCGYEAGSLGYSLYHDLKELGVDCIILAPTTMAQKRKNGIKNDKRDAKNIASCLAFGTYSPVYVPTEEDNAVKEYIRMRDDTKLAFKKVKQQITSFCLRHGKRFIEGSSYWTLKHLKWLNDLQLDNMILQETLSEYLISYYQTQIKLETFDKRIEELSKDERYAEKVKKLSCMIGVKTHTALATIVEIGDFKRFIKAENFASYLGLVPGENSSGGTKRITGITKAGNSHIRRLLVEAAQCYTRGQIGHISKELAKRQSGNDPNVIAYANKGNERLRRKAYKIMFKSKRNIAVTAVARELACFIWGLMTDNIA

SEQ ID NO: 462356 - protein, 417 aa, unidentified
MPSSTALFVGTDVSQATNRSRFYDAAGVEIGGRYQSANDLPGAKALVAEAILRADTIGADEIRWALEATNLFWWHLATYLTTSPELIARKLKLYSFNPRVVAKFRESYPDLGKDDWADAMVIADRLRFGRLPAECYLDERYQPLQRLTRYRKHLVDTIVREKQVALGYVWLKLSGYELEEEGLTDTFGATSQAILERYLTPDEIVAAPFEELVSMIAAESRGKADADAVAKAVQQAAKRSYRLPGSMVEPVNLVLSTSLLTIRTLTAQLKPLNKAISAGLEAAPAQTIRSIPGLGPVFTAGIVAEVGDVTRFDNEEKLAKFAGLTWRRHQSGEFEGEDRSLTKTGNRYLRYYLVEAANSVRQHCPEFGSYYAIKYKEATRHKHKRGVVLTARKLVRVVDSMLRSGQIYRPPGARQAF

SEQ ID NO: 462357 - protein, 418 aa, unidentified
MTRTFGLDISKHFAEVVLLQPGSEPVRRFRFPAEPAAIRTFASRLGPGDRVALESCTNAVAFHRLLCQHAGEVVVSNPLKTRIIAEAKVKTDKVDAEILARLLAADFLPPVWVPDPRTETLRHLVFHRHGLVQQRTQAKNRIHAILHRNLITPKVTDLFGRRGRGFLGRVELPSAERTLLEADLRLIDFLDGEVTAAERDLARAAHQDAQILRLLTIPGIAFTSAVALVAAIGDVRRFRTPPHLVSYFGLNPSVYQTGQKAYTGHISRRGRSHARSVCVEVAHVLVKAPGPFQAFFTRLRRRKPYNVAITAVARKLIVLVWHMLTKQENYRYAPPARTREKLARVRHLATGQRARRGELPGPVPDPRRDAEAGVRAQGAYEDFILSRFGPHGPKGIEHPNRHETSTPEKKTGRGRKGA

SEQ ID NO: 462358 - protein, 380 aa, unidentified
MNTTTVGIDLAKSVFAICEGDSRGHGGRSSLLRGGEFLKWLRTLPAGTVVAMEACSSAHSWGRTMQALGLEPRLIAAEFVRPYRKNKRVKNDARDAEAVLTALHAPGMRFVTIKTEEQQQRLAWHRLREGWKVERTALLNRIRGLLTEFGIVVELGAEKIRRKLAELESDTAYPQSLQLMAQSVREQVGVLDQRLADCERQIARQSKSDPAVARLRSRPGIGPLTADAIIATVGDARQFKNGRQFAASLGITPRQHGSGGKTHLGAITRRGDSYLRNLLVQGARSVLLAALRLYKNRPDKLNRLQLWMVKLNERIGYHKAAVAIANKHARQVWAMITRGEAYNADAYIDWEAAHANVRPGDRQEASDYDLSTAALAAASV

SEQ ID NO: 462359 - protein, 400 aa, unidentified
MLSIGIDVSKGKSTVCGMKPGGEIVYTPFEIQHTREGMSELVSLLRGSGEEVRAVLESTGSYHCPVVTALLENGIFVSVVNSLRMKRFCSQSIRKVKTDRIDAMQIALYGLAYWQELQPTKLPEDTYRELQLLARQYYQMTSMLIKAKVDFNAICDQVLPGMQELMNDHAGRHKLSDFVLRYRHTTHILEMGETRFRKDYCKWAEKKGYRNCERMAALIFATAQNGIPVLPNAPSTQIVITEAIRVLHTVEASRDAILTQMQALAKTLPEYSLVREMPCIGDTLAPRLIAEIGDVRRFHSKRALIAYAGIDAPPYQSGKFCANNRHISKRGNRYLRKTGYEVMQSYVMHKPANDPIFTFIEKKRGEGKSGKLAMVAGLNKFLRVYYGKVTELYRSLPAIE

SEQ ID NO: 462360 - protein, 469 aa, unidentified
MSKHINKQNQTQRKKHYRKKQSDPFPVINTNAAGIDVGSTEHWVAVPKDRDEQPVRNFKCFTADLHAMADWLKECAIQTVVMESTGVYWIPLYQILENQGFEVKLVNARHVKNVPGRKTDVSDCQWLQRLHTYGLLSGSFRPEDSICVLRSFWRHRDTLIRYASSHVQHMQKALTEMNIQLHKVISDITGLTGMRIIRAILAGERDLVTLAHMRDPRIKSSAEDIAKALEGDYREEHLFALQQAVELYDVYKQKIETCDQQIENYLTQLDSKIDPESNPLPASTKSNKTPKGNAPHFDLRTHLYRISGVDFTQIDGLDAVSVQTILSELGLDPAAFPTEKHFCSWLGLCPNNRITGGRIKSSKTRKVVNRATSAFRMAAQSLTYSSSALGGYYRRMCARLGAPEAITATAHKLARIFYHLWKNGGIYQDPGPLYYEQKYKERVINNMIRKAKQLGFQINIEPLNELQVS

SEQ ID NO: 462361 - protein, 404 aa, unidentified
MYNAVGIDVSKGKSTIAVLQPGGTVIRKPFDVSHTSQSLIELAHYLGSLEGSTKIVMECTGRYHEPMLKALYEAGLFVSVVNPHLIKNFGNNSLRKVKSDPADARRIARYTLDNWAELRQYSGMDNTRTQLKTLNSQFSFFMKQKVAAKANLIALLDNTYPGVNKLFDSPPREDGSEKWVDYAYSFWHVDCVRRIGLKTFTERYKAFCKKHHYIFQQDKPEKLFNASKELVAVFPKEKTYKLLIQQSIQQLNLASGHVERLRQEMNALASTLPEYSTVMGIYGVGKTYGPQLIAEIGDVSRFTHREALTAFAGVDPGVDESGQHKSKSNRASKVGSARLRKTLFQIMTTLLQNAPEDDPVYRFLDKKRAQGKPYYVYMTAGANKFLRIYYGKVKECLRNLEQAE

SEQ ID NO: 462362 - protein, 400 aa, unidentified
MINFYFLFFIKFRHSKNELTITNNRPGFIQLLHELTAFSKHPQIIFEATGVYSRTLQSFLEDYGYDYVILNPLKAKKEMDMGLRHNKTDKTDAYHLALIQRLYHHPINQLQSQTYKQLNALSRFYDQLTADLVMAKNRLHQALQSTFPEIENLFSSAKGKNYWQIVVRYPHCDLVRREDKKQLINWLMSLKGIAFKHALRTADKLIELAYQAYPVVSCSSIEVEQVQYYAHRLLNLSDQRENLIARMVKLAKSLPNHDLENLESIPGFAQTTAVRVLAELGDLRRFSNSNKINAFIGIDPGRYQSGEMDSNLSITKHGNAVARKLLYRAIGQIDNAAKTNPCHIADYYESKKLSSQTKGFKKIAIASIHKLIRTIYALIINDQLYDYNVATHNQKDFSRN

SEQ ID NO: 462363 - protein, 319 aa, unidentified
MNSICLSTDSLPVLGLDVAKKSVQAELRRAGGKTVRFGFENNAKGFAQLARVLKEHNVPKVWAGLEATGPYSHALALWLHGAGHRLSLLNPRRVKQYARSAGKRNKTDLLDAAIIADFVCAHRPAPWQPPTLEVAQLRALVRRREELSLMLQAEKNRLEGVASNVSCSLRRIIATLSAERARLEKLITQQIRSHQQLSCDHQLLCSIKGIGSLTAAILLAEMARPGQVERARQAAAHAGLVPRREESGTSVRRNRGLGKEGNRYLRKALYMPALVAIKYSAPLRFPASRRRQAKNEHPLLPHAQTHPYRLRGAQTSKTL

SEQ ID NO: 462364 - protein, 315 aa, unidentified
MTNEKKWIGIDVSGAELAAGVYPSGETKMFSYDPEGIYALITFISPFKPELIILEATGGLEAGVAAELYNAGLPVCIVNPRQVRDFAKSLGILAKTDNIDAVVLGRYGEAVKPPVRPMPSEEERAIKELVARRRQLIEMLVQEKNRYSRASKKMGLGIRKHLKWLEGRIKDIDKDLSETVKKSSIWSKKENILKSVPGVGDILSATLIADLPELGTLGKKEIAALVGVAPFNCDSGKMHGRRRVWGGRSNVRRVLYMSVISGLRCNSVIRAFYDKLVAAGKKAKVALTACMRKLLVILNAMVKNNQVWKVELINA

SEQ ID NO: 462365 - protein, 349 aa, unidentified
MTLVGCDLHTRKQQVAVLDTETGAMYERQLSHAGDAVEQFYRALPGPVTVGIESTGYALWFHELMQRLGHTLLVGEAAKIRAMVVRKTKTDRRDALHLLDLLKHERFPLVWIPDPATRDLRALVTHRMRLVRMRTMVKNGLHAIAMNRRLTLGPSLWSQRGLAQLQGLALAPHTTQRRDESLQLLTWLTARIEALDDRVAAAAQADPGARLLLSHPGVGPLTALTTVVVLGPVARFPDSKHVVSYTGLAPAVHASADTCRLGQITKQGSPLLRFVLGQAGLIAAHAEVDLKRHYRTLLRRRGRPKAIVAIARKLLVRLYIMLRDQIDYEEFRRRGRTPRGQEVPPPALA

SEQ ID NO: 462366 - protein, 355 aa, unidentified
MNDSKFIGLDVHKTSISAAVLDHDGKLVMQSIFATHAAAILSFIHGVGGSLRVTFEEGTHSSWLYDLLRPQVSEVLVCNPRKNSLLKSGNKSDQIDARKLAELLRAGLVSPVYHGQTSTVTVKELGRTYTALTEDTTGVMSRLKALYRSQAIATEGKKLYTKRRREQWLKELTQAGRRYRAERMFEQLDALQGFRRQARRDLFVECRKHAATAILTSIPFLGPIRAALLIARVQTPFRFRGKRQFWAYCGLALETRSSADYRLVEGELHRAKKPVFIRGLNLNHNHDLKNIFKAAATTASACPGPFRDYYETLLGRGMKPEMARLTLARKIAAISLIVWKKGERFDPEQLKAQAA

SEQ ID NO: 462367 - protein, 324 aa, unidentified
MNFLGIDISKLTFNVAYLVEGRYIDNEFENNKKGFQKLLAWIKSIDKKVFICLEATGIYSFDLAQYLVQKKMKVMVVNPIITHAFSKVELTRNKTDKADAQLIARYCEHIVAKGSFEQKSYKPKGADYEALQRLITRCDQLEKSKTQEKNRLEASKNKDASQSIRRLIKAIESEITQIKNSICVLVKNNKDIKDQVDLLVSIQGVGEKTAWSILAYIGDITFFSNSKQVASYAGLTPKLIQSGTSIDKSSLSKLGHKRLRKSLYMPALVAIRFNPVLKLVYERLVYNGKPKKVAIVAVMRKLLTISYGVLKSGVAFDINYQSVT

SEQ ID NO: 462368 - protein, 349 aa, unidentified
MIIIGVDFHPEFQQIALVDTDTGELEERRLHHPQEAEEFYREVVNQGKTVRVGMEASGHGRWFERLLSELQIELWIGDAAEIRTKRVRKQKTDRQDAQLILKLMLKDDFPKIWVPSWENRDLRQLLWHRHRMVQARTRIMNQLQAVALNEGLRCKKRLWRTERPRLESFQLAPWASRRRHDLLELLDRLNPTIAELSQAVEQEVEKFPEAQRLATHPGVGPLTALAFVLIIGEAERFQCGKQVASYLGLVPLEDSSGNRRRLGHITKQGSSLLRFLLVEAAQAAVRWDPDWRRRFVHLAMRRDRRIAKIAMARKLAVSLYWMWRKGFDYPPTLQFGSHAGKPVYVHGVK

SEQ ID NO: 462369 - protein, 344 aa, unidentified
MKVVSLDVHAEASQLAVVDESGEVQFEMKVPTEPEALRAVVAGIRGPKRVVFEEGPLSAMVHDALKDLCEEVVSCDPAHNALIAQSEDASDERDARRLGQLAQLNAVRPVYVPPEPYRTLRSVLAHDHRIQETMTEIRNRIHALCRRQGIRCRGPAIDRRRERGAVLSQMANPALRWQMESLYRQLDALRIERIGGRRVVSRWTRKLPQIARLEGIPGVGPITARTLVGWIAGPERFKSRSALTSYGGLGLGQGRTNWKPVGRARASTRGNREIKRVLFLAAHAAAKSDSRLAERYAARLQAGWKPDKAIRDLARLILQIACVLWRKRLDYDDRRVSVPIAPAQ

SEQ ID NO: 462370 - protein, 314 aa, unidentified
MEQVKTSTAVAGIDAAKAKLDVAVYGLEETAAFANDAAGWRLLAAWLAERDVGRVGIEASGGYERGVVAHLRQRGVEVVIHQPAHIRAFARFKRIKAKNDKIDAAVIAAATAQTDLVRAAADPELVELGDRLTAYEQAAELVALVKTMLEHVALPDLTPQYEAKLKALKAWKASLAKDLVARIAKHPKLKIRFDLVRSLPGVGPIVAASLVLRMPELGAMARGQAASLLGVAPFDRDSGQARGQRHIFGGRARVRRMVYLAAAVAKRTDRAFKAFAERLAATGKKPKVILVAVMRKLIEAANLVLGRGTAWVPT

SEQ ID NO: 462371 - protein, 339 aa, unidentified
MEYRGIDVHVSYSQICILDEDGEVMETSRVRTSRPALTKFFARRDRMKIVLEAGGSSPWVSRLLEELGHEVIVCSPRRVRLIAESTLKNDKIDAEVLARLLRMDPAFLKPIRHRSEKAQLLRSKLLVRRSLVEARTKWINTVRGLLRGFGYRVSGKVSHTFAERVDRMKLPDELRQVIEPLLEQIELLSGEIERRNEDLEAMAQEIPAVNHLRQIPGVGPLTALFFVLSIDDPHRFRRSRDVAAFFGLRPSMRESGGTSRYGRITKEGDPEMRRLLVQAAHAMMLTRADCALKRWASEVEGRRGKSKRSVALARKLAVLMHHLWVTGENFEAFPQSLAA

SEQ ID NO: 462372 - protein, 343 aa, unidentified
MAKTPIAVLGIDLGKNSCSLAGLDAAGAVIMRRRMTREGTIKFVATLPACVVAMEACCGAHFLGRTFACQGHTVRLMSPEYVAPYVKAQKTDNRDAEAIAEAATRPTMRLVTLKSEAQLDLQVLHRARERLVAGRTRLTNQLRAMLLERGVILPKRRAPLIKRLDELMAGELPISQRARQLLLDLRDEWMDQDRRIKAYDDELMALTREDGAARRLATIPGIGVINATALLAAVGDASAFAKGRDLAAWLGLTPRQHSTGGKTKLLGISKRGNKYLRTQLIHGARAAIVHFAKKATPVGTWVRQLLTRAHPNVVVVALAAKLARIAWAVLRHGSNYDHRAATV

SEQ ID NO: 462373 - protein, 352 aa, unidentified
MRRPKHQVTSEEDLFVGIDLHKIRWHVTIRTVDLELFSASIPGNWESLQRILARYAGHQLQAVYEAGYFGFRLHDRLVEHGIPCLVTPPSLVPQEYGNRVKTDRRDSSKLAHLLAKGMLKRVWVPSEEELYHRQVIRRRRQLVRDRVRTQSRIKAELSFFGIRLEEPRGRWTQIYFETLKRIEFGNRWMQESFNRLLEQYEFLSGQIDKQTQLLRELSETALYRERVEILQSIPGIGVISAMEMLLELQDVSRFRRAEQLAAYVGLTPSQYSSADKVRMGRITGIGKNTLRAILVEASWKLITKDQVMREKYERIKIRSGAKRAIVAIAHTLLLRMRRMLLDGRAYALPLAA

SEQ ID NO: 462374 - protein, 360 aa, unidentified
MKNTLNHALRTTTTLTPSETQVRISQLKLGVDWHADQFRVVRMCDSLSPQPAQRFTPASFLAFVQKQLTLADQVFVVYEAGPGGFHLHRQLTALGVTAFVVHPQKLDPQHKGVVTDKTDARELTLNLDRYLRGNVRAMSVVRVPTPAEEQRRALCRQREQLRRERQRLAAQGRSLCLTQGIRLRGEWWKAPPTLPDWLEQRLAVWRQLIKAVEVLLETLTQQVEAFSPKERPKGLGPLTLGLLIAELCDWSRFKNRKQIGSYTGLCGGVSSSGQSHCDLSITKAGNARVRWALIELAWRMVLYQPQSKAVQRWRHLLLNPKAAARQKKRALVALARQLAVDLWRWQTGKVTPQQLGWVMV

SEQ ID NO: 462375 - protein, 335 aa, unidentified
MGIDLHRRRSVIVRMTTDGDPLECIRISNDAERLATVMARAGESPEVVLEATYGWYWAVDALRELGAQVHLAHPLGVKAFEYRRVKNDERDARDLADLLRMGRLPEAWIAPPATRELRELVRHRAKLVGMRSNCKAQIHAVLAKCGIQVSMTDLFGLAGTELLGRLELRKPYAARIASLQRIITALDFEIDAFAGQVRGRLARDPGFVAVQSIPGIGPILGAVFVAEVGDVHRFTRAEELTCWAGLTPKHHESDKHVHRGRITKQGSRLVRWAAIESVQILPKTSVVGRIRDRVGDRRGRNIGVVAAARRQLEFVFYALRDHRVRALQGSRPVAA

SEQ ID NO: 462376 - protein, 314 aa, unidentified
MTSMHDSVRLKTTVYAAIELSKKSWVVGIAHPDRDRPSIHRIAGGNLADLIGRLRKAAGEEKRRIVVCYEAGYDGFWLARSLAKVGIDCRVLDPASIQVNRRARRVKTDRIDSLALLRALIAIDRGERHVCAVVRVPTVEEEDARRSHRERQRLVRERTGHINRIKGLLFAQGIRGIEPKRRRTRIDFSKLTTAEGRPLAERLRRELEREYQRLELVQSQLRIVEKERDIADAQDPAVERKRELLCALQGVGGASAAILAREVFARPFASRRQLGSYLGLTPSAYDSGSTTRCQGISKAGNSWAQRVLIEVAWL

SEQ ID NO: 462377 - protein, 387 aa, unidentified
MQKPHDNSKASPAAFVQDNTLIAVIELSLSNWLVAGLIPGVSREPLKKLEPNPEDLLKLLHGWRDEAIKAGRPITRIAVAYETGRDSFWLARWLRERGIDAHVIHATSVTVSREHRRAKTDRLDTAMLKRGFLGWLRGERGHCTVAIVPTMEEEDAKRPHREREGLVHEQTRAVNRMKSALIQYGVRNFNPKLRKASVKLETVRTPEGKSLPPNTIAALRRDMERLKIIKEQIKAIEQARLQQFEQKPEALVNRMVYLLVRIYGLGLETADLLAHELLSRKLRDRKAVARYAGLTGSPDESGSKRREKGLSRSGNARVRKIMIQLAWRMVKFQPDSALVQWFKQRTENAKGSRKPMIVALARKLIIALWRYANDGVIPEGFRLHSAA

SEQ ID NO: 462378 - protein, 315 aa, unidentified
MTQTNITTAGIDTSKSKLDIAVYGRAERWQVPNTLPGWRLLVSNLAKTGVTRVGIEATGGYERGVVEHLRAAGFMVLVLQPMQVKAFGRVHLRHAKNDALDAILIAACAAAMGPPRIAPDPRLADLAGYLTFLEQIEEDIARFKTRLEHIDEPRLRSLVGSDIRRLKARRKAQIRTIAKLLRGHDDLASRLDLVLSIPGIGERTALALIIRMPELGQVSREEAAALAGLAPFDNDSGLRKGQRHIAGGRGRLRKSLFAAALPAAFRWNQALMALYARLIEKGKAHNAALIACASKLLIYANTVVQRGTPWVENAA

SEQ ID NO: 462379 - protein, 344 aa, unidentified
MSEVSMIGLDISKHVFHAHGVDGRGRAMFRKRISRGKLLDFFATQPSCTVALEACGGAHHWARQLAQLGHQVRLIPPAYVKPFVKRQKNDAIDAEAICEAAQRPSMRCVAVKSEEQQAAGMVFRTRDLLVRQRTQLMNAIRGHLTEYGWVAPKGPSHVAMLAGLIDEEEMANSLPGAARMMFRVMLDLLSGLSRKIADLDKEIARRAREDEVSRRLMTVPGIGPISATAIVALAPPAESFAKGRDFAAWLGLTPLQRSTGGKQKLGAISKMGERTLRRLLIIGSSAVVKQAGKRGAPRGSWLEQMLARKPRMLVTVALANKMARIVWALLVKQETYRAPVAARA

SEQ ID NO: 462380 - protein, 393 aa, unidentified
MFYIGIDIAKHNHEASIIDSDGSLLCESISFSNSQKGCEKLIALLERFSVDPDNCIVGMEATGHYWLSIYSYLFELGFDLKVINPIQSDAFRKIYIRQTKNDSKDSFVIAQVMRFGQFSSSSLSDENIMALRQLSRYRFCLVDDCSDLKRKVICLLDQVFPEYSSLFSDIFGVTSKELLLKYPTPEDMLSVSATKLSNFISKCSRGRYGRSKAEEIQSAAKSSFGIKFASNAFSFQIKQMIEQIKFIENHLKELEKEITELLIQTNQVITTIPGIGNVLGGVIIGEIGDISRFESAPKLVAYAGLDVRVSQSGQFTGTQMKISKRGSSYLRRAIWMAATVAAFSDPVLSEYYQSLRARGKHHLTAIGAVSRKLCNIIFAVLRDDKPYEPMPKR

SEQ ID NO: 462381 - protein, 404 aa, unidentified
MWYAGIDWANDHHDALVIDDQGHQVGSLRVDHNPQGMSRLNTFLEQIIGFESKEQMACIIETTHGLLIAHLLEAGWPVYPVNPRTVDRRRAASGAKTDTIDAYLLAKTGRADLADLHRLTPDSEKIAELKLLTRDQDALIQMQTRLVNQLTACLKAYYPVVLELFAKLQQKSTLLFLQTYPTPQAAMAASAEQIQEVLRRAKHPNPMIVAAKIFERLHQPHLQADTVTSRTKARLMLVLASQLSPLIEQIAQYDKEIDTLFLTHEDHEIFASLPRAGKRLAPRLLAEIGDDRNRYQDASSLQALGGTSPVLFQSGMYSKAHRRLGYIKPLRNALHQFAWQTTQSEPWAMQYYQRKRAEGKSHTVAVRALANVWVRIIFAMWFHHRCYEATTFEIAQQQHARRAA

SEQ ID NO: 462382 - protein, 348 aa, unidentified
MNSAVKSVVGVDIAKNVFQVYTVDKATGEVFNKQIKRAQFLQWFANRAPCLIGMEACGGSQHWARKLQEIGHEVKLMGGKMVKAFVCGNKNDAADARAIYVATQQREVKAVAVKSEDQQAILALHRIREGLVKMRTATINALRGLLAEYGEVFGKGRKAFDEGMKGALERLAQRLPAPLIDTLRDQWSEVGRLDERMANIEQSLREWLRQDPAAKAIADIPGAGLLTATAVVVTMGDAIAFRSGREFSAFVGLVPGQTGSGGKTRLLGISKRAPTYLRTLLIHGARAVLHRTKAPSPWLQQISARRRANVVIVALANKIARTIWAVLAHERKYDKAYVSSMPQVAAAM

SEQ ID NO: 462383 - protein, 336 aa, unidentified
MVNNRVLYVGVDVHEKESQLAVLEKDGSLVMEERIPTKELGKFLSSLPGEKHVAIESVGFIHPIYEKLSSMQDCTVTVANPSRLRLISESGTKNDRNDARVLGDLLRTNYLPVAHMRDEETREKLFVVNDRVTYGLRRGELRGTIRWLLKRRGIEVDIPPFSDEGRKKLRELRLQEIEIRLDELELVESTIRKLDAQILGIVSRDEKARLLDTLPGVAPYTALFLACVLDDIDRFPDSKHACAYLGLVPWLDESADVTHLGHITKKGDKWLRRNLVECARVAVRKDPHLNEFYTRLKHKRGDKKAIIAVARKLASYAYWMLKRNITYEELSPWKLT

SEQ ID NO: 462384 - protein, 339 aa, unidentified
MEYCGIDVHVSYSQICILDEDGEVMETSRVRTSRPALTKFFARRDRMKIVLEAGGSSPWVSRLLEELGHEVIVCSPRRVRLIAESTLKNDKIDAEVLARLLRMDPAFLKPIRHRSEKAQLLRSKLLVRRSLVEARTKWINTVRGLLRGFGYRVSGKVSHTFAERVDRMKLPDELRQVIEPLLEQIELLSGEIERRNEDLEAMAQEIPAVNHLRQIPGVGPLTALFFVLSIDDPHRFRRSRDVAAFFGLRPSMRESGGTSRYGRITKEGDPEMRRLLVQAAHAMMLTRADCALKRWASEVEGRRGKSKRSVALARKLAVLMHHLWVTGENFEAFPQSLAA

SEQ ID NO: 462385 - protein, 321 aa, unidentified
MTYVGIDVSKATFVVAYSSAKTSKTKTFKNTVKGIHEFVQTISAAEHHCVLEATGNYSALLVYLLSEAGITVSLENPLKIKNFARVMLTVTKTDEIDARLIALYGERMQPTPYKLRSDSILVLKQKRTVLRQLKKQLVATRNLKGSMEVLPHFDPECKKTIEKTIGFLERQIKAMEEKLASLAQGEYKKQMDLLTSIKGIGVTLATALIVATGGVTYFDNAKQLTRYLGLSPTYQQSGTSVNVKGHINRNGDSNLRSQLYVAAFSSLRSNTECKACFDRLRSNGKPGKVAVIAVANKLVRQAFAVVTHGKPYVDGFKSEKP

SEQ ID NO: 462386 - protein, 410 aa, unidentified
METVVERPAALDVHKEQVTACVRVPAGRGRREQHVAEFKTTVQGLLALRDWLKAYGATQVAMEASGVYWKPPWAILEDEFECLLVNARHVKQVPGRKTDVSDAAWLCQLLEAGLLKASFVPPKPIRTLRNLTRYRKAQIGERQREANRLHKILEDTGIKLDCVATNILGASGRAMLDALVAGTTDPAVLADLARGKLRQKLPALREALEGRFDAEHGIVVGAILAHIDFLDEQIDLLSEAIEEQIRPFAKAVELLCTIPGVQRRTAEVVIAEIGADMSVFPTAGHLASWAGLCPGNDESAGKRRSGRSRKGSRWLAIALTEAAQANTRSRDSYLSAQYRRLKPRRGHRKAIGAVRHSIIVAAWHMLTTGEVYRDAGGDYYTRLDPDKQTRRLVAQLQRLGHIVTLQEAAA

SEQ ID NO: 462387 - protein, 365 aa, unidentified
MNKCHSNTELSSHEGTHCQFNGGKAVIKLGIDVHQDFYVVVEQVGGSNPKPPQRFQKEAFLFWAARLKQKSGAQVYALYEACGFGFSLQRKLSALSIKCYVVCPQKLDEQNRRVKTDGLDAKALCLKLDRFVQGNRDALAIVRVPSEEEEQARAIHRQREQLVKARKQLEAQGRSLMVNHGLEPVQNWWKPRTFTALPMPQWMKELLANSQPILVALQQKIMALTVQLQSAASPEQPCGLGKMTSVVIDREIGDWNRFSNRRQIASYTGLCPGEYSSGNTRLRSCVTKHGNPRLRAALVELAWRLVRFQPNYHPVRKWRQILAKSALATGAARKKAIVAVARQLAVDLWRIKTGRLRAEELGLIN

SEQ ID NO: 462388 - protein, 335 aa, unidentified
MHYVGIDVSQATLDLALLDVEGQHLESAQCANEPKALIKMIGAWRKRHGLIVTECLVCLEPTGQFTNRILHALVKEQLPTWLAHAVDIQQSLGLQRGKTDQVDALRIAQYAFRFHDKVRLFTADHLRMSKLKQLLMKRRQLVESRMKLQVQLSTVNPHMEKDLRHTFDRMDRAQLRCIAGLIKKTEAMILEEIQKNPDIKRQYDLLISVPGIGMVLAANLIALTDAFTRFATARELVCHAGAAPFQHTSGSSVRGRTRTSRKANVHLKHLTHMAALVSIKRDPQIRAYYDRKRAEGKPGLCVINAIRAKVIHRAYAVLKRGSPFVMDSSAVSLVA

SEQ ID NO: 462389 - protein, 312 aa, unidentified
MNDKPPSVHAGLDIAKASLQLHLQSKSYDLPNTPAGHAQLLKRLAAIPGLHVICEATGGYERAVVAALHTASVPVSVINPARVRQFARASGELAKTDPIDAAVLCAFGVAFTPDATAPRTAVEIKMAALVIRRVQLLELRVAEAQRAASCADPELRQLFTPWLAQMEKQITKVEALIEVLLREQVPLAAQVQRLDDIMGVGRLTAVMVLATMPELGQLNRRQAAALAGLCPYNRDSGQWAGQRCISGGRAEVRRALYMAALSASRSNHLLKPFYDRLIAAGKPAKVALTAVMRKLIVLMNHLLKNPNFSLAK

SEQ ID NO: 462390 - protein, 321 aa, unidentified
MGSAPTEPIGVGIDIAKDAFEVALGDGETFSLANDSSGQDALLTRLQEVTIGLIVLEATGGYERAVACALQAAGLPVVVINPRQGRDFAKAMGYLAKTDRLDALVLARLAAVVMREPDRDKLVQPLPSEERQRLQALVTRRRQLQAMLIAERQRLPMSHPATQRGIKAMIQVLTKQLERIEDEMSGHIDRHHQDLAKLLSRVKGVGNITCCTVTAAVPELSRLNRREISALVGVAPMNRDSGTMRGRRMIHGGRPTVRATLYMAALVASRHNAVLKGFYQRLLASGKPKKVALVACMRKLLVILNAIAKSGQPWDASLHGA

SEQ ID NO: 462391 - protein, 356 aa, unidentified
MAMLADTIDGVIGVDTHRDTLTAAAVTAIGGLLADATASTDAAGYRQLLGFATSHLPGRRCWAIEGAGSFGAGLATFLLDQGEQVIEVPRRRRSTRRTAAKSDPLDAVHIARDALITQHPAIVRRRGDREALRVLLTTRRNAVTAWTQTVSQLKALIISAPEELRAELRGRGTKAQITYCAALRERPTRSLEHQMTARALHATARRCQLLRAEINQHQHDLHTLVVAITPWLLELPGVGPITATQILISWSHAGRWRSEASFAAQAGTSPIPASSGQTKRYRLNRRGDRQLNHALHTIAIVRMRDDPLTHAYVQRRTAQGKNPREIRRCLKRIIARQLYNLLKHYDRPAIQILHAT

SEQ ID NO: 462392 - protein, 379 aa, unidentified
MREVGQVHCTMKFVGLDVSKETIAVGVAEQGGGPARSLGKVPNTPEGVRKLVQRLGPPAKLLACYEAGPLGYGLHRLLTGMGVRCVVVAPALTPVRPGDQVKTDRRDAVRLAQLLRAGELTPVWVPGEEEEALRDLVRAREAAKRDLRRARQALNSFLLRHGVQPPQGTRRWSRMYLRWLDTLSFPHRATQVVFQELLHAVRELEARLERLEAEIHALATESRYAPLIQALQALRGVGEVVAATLVAEVGPFSRFRNPALLMAYAGLVPRERSSGAQVRRGGITKTGNAHLRFVLGEAAWAYRHRPAVKAGLRRRQQGADPEVLRIALQAQERLHRKYWRLLARGKPAGVAATAVARELLGFVWAIACHVEAQQAQQAA

SEQ ID NO: 462393 - protein, 388 aa, unidentified
MSAAERPVAYLGIDVGKSSHSACALDAGGDVAFRAELANRPDDIDRLLERAGSGALVVVDQKRNIGALVLARAHAHGNPCAYLPGYAEKQARGMFPGTAKTDAIDAEVIARTALGVPRALRPAPEEPEGTASLRILSSQREFASSARTRAKNRLRATLLEADPALEGAVDPSSRWQMSMLAEFGGAAGCSAAGWRRFSNAARRAGAPAAGARRLWEALLASSRSGRRLPAGEDVAVRMLAREIASLDADIEELDSLVADSLAGDEVYECLLTVPGIGPKTAAALVTSIDISAFRGHDELASYCGVAPSDRRSGSSIRSTSPQRGGNRQLKNLLIFSCNSLIGTDNRFGRYYGECRARGMRHGKALKAVARKRLKVIYAIMRDAVPYAA

SEQ ID NO: 462394 - protein, 383 aa, unidentified
MDVLYPRCCGIDIHKKSITVCVLIREPGRKEQKHIREFGTTTSAILSCGDWLRDLGVTHVAMESTGVYWRPVWNLLEGQFELLLANATHVKNVPGRKTDVKDSEWIAQLMQHGLLKPSFVPDTVLRDLRELSRDRTSLVAERSRLKNRIQKILEDANIKLGSVASDILGKSGRAMLTAMVKGTENPEGLADLAQGQLRLKIPQLVEALRGRVRAVHRFRLQQQLERIDFIDAQIAQLEEEVEKQNAPFEEAVSLLAEIPGFDRTTAWAVIAEIGINMNQFPSADDLASWAGVCPGNNQSAGKRLSGKTRKGSRWLRQKLCQSAWCASRSKKSYFAAFFQRIAAHPGTEAGDRSRQPCSAHSLLLPAAAQMSFSRLGRELLRPT

SEQ ID NO: 462395 - protein, 387 aa, unidentified
MTVRTVTNLPAVTHGETVRCLFAIELSTMSWVVAFNTPLSEKISRHALTGCKWKRLLELIEEVRARVSRETGRAVEVVSCYEAGYDGFWLHRKLEAHGIRNYVIDPASLQVDRRARRVKTDRSDTDRLLRSLMAYLRGEPKVWSVVRVPSVAEEDARRLHRERDRLVSERVQHVNRIKGLCALQGIYDYNPLRPQAMARLEQLRTAQGGAFPPRLKSEIMRGLQRLEMVVEMIATLEAERNAIVENEASTHLNAKKIQTLHKLKAIGPEFAAVLVGEIFHRDFNNRRQVASYVGLAPSPFQSGNVAHDQGISKAGNRKGRTTGIELAWMWLRYQPESDLSVWYRARVGATKGRIRRIAIVALARKLLVALWRYLETGLLPRGAVLKG

SEQ ID NO: 462396 - protein, 317 aa, unidentified
MAIDVGKKKSYIVVEDNGEVHTEGYVPTTKDGFSTVLSGLDKPTVIVEASSTMDRVASLLEEYNADVKVAHPRNVKLIAASTKKTDKNDAHTLLNLYKVGYLPEAYLAPKAIRDERNLCRNRDFLIRQRTAVKNRIRDQAFRSGVDFTHFNRRTLKELSKVSFTLERLVSELLALNDEIKEFNKRIADELQKNEYAKLLNTIPGVGVISAVGIASEIADISRFETSENLCAYAGLVPRIHQSSNQEWKGHVSKGNTFLKHLLVQCVQVHIRRSNSWISKAYYRIQIRAGKKKAKIAAARKLLVTMYCMLKEGRKYHA

SEQ ID NO: 462397 - protein, 457 aa, unidentified
MDQATRFIGMDVHKDTIVVAVTATGDVGKATPYGTFPNTAVTLEKLVGRLRQAGSGPLKFCYEAGPCGYGVHRTLTRLGEDCIVVAPSMIPRKSGDRQKNDKRDAASLAVLHRGGLLTAVWVPDAAHEAMRDLIRTRLAAVRAVRTARQQLSAFLLRHERIYPSGGKAWTKAHRGWLADQSFAQPAQQIVLEESIEAVRLGEQRRDRVDGYLRAQIPTWSLFPLVQNLGALRGLDAIASAGLAAAIGDPSRFASAPDFMAYLGLVPSEHSSGPRRRIGGITKSGDIHARTLLIEAAHSYRFPARIARHKLAAVDAVPEAVRTIAWKAQTRLCQRYRQMMAKGKPKPVVVTAIARELAGFVWSIACITSDPPAKTAAAATTADEVCPTKSTGHPRVLRRQRLKAATPHAARPEQTGAPIELRYVTVDTPSLVNNPKASTPASRTRRLAAASAEGSAAG

SEQ ID NO: 462398 - protein, 431 aa, unidentified
MFLCVIYYLQRSHMSLLPEQPFTAYVGIDWADTKHDICVQAPGSPRRESSCIAHRVAAIDEWANALHRRFGGPIAVALELAKGPIVAALQKYDFLVLFPINPATLAKYREAFQPSGAKNDPKDAELALDLLLHHPERFGPLRPQSAAMRTLVSLVERRRQLVDDQTRLTNRLCDTLKQYYPQALEWFDDRGTLLFCDFLDRWPTLRSVRQARTATLEAFFHAHHCRSARRISARIASIREAAPLTEDPAIIGPCRLHVLALAAQLRAVLTAIVQFEHEIAAVAPTLPDYTLFKNLPGAGAQLAPRLLAAFGEQRERFRSADELQKYVGIAPVTERSGKQSWVHWRLQCPKFLRQTFVEWAAQTIPRSFWAGAYYRQQRAKGSSHHIAVRALAFKWIRILYRCWQTRTPYNETVYLNVLRKRGSRLLGTLGT

SEQ ID NO: 462399 - protein, 391 aa, unidentified
MIYVGIDVAKDKHDCVILNAQGKSVCDVFSFQNSLEGFNLLFRSIQNVAPNLENVKVGLEATGHYSYNILAFLLDKGLPTFVINPLHINLFRKSTSLRRTKTDRVDARVIAAFLMSDAGLSSYSAISYHNEELKSLTRYRFDKVRHRAMLKQDVSRFVNILFPELEKLVSTIHSSSVYTLLAEFPGAKQIASCHLTHLTSLLEASSNGRFGKMKAMEIRDAARRSIGSSMPAKSLQLQHTIRLILELNSEIDEIEAAIRNIMDDIASPILSIPGMGYRMGAMILAEIGDFSRFDSPDKILAYAGLSPSTYQSGKLDNAYPHMEKRGSRYLRFALFNAAKFVCLHDPSFAAYLAKKRAEGKHYNVAVSHAAKRLVRLIFALVKSGRTYCPAA

SEQ ID NO: 462400 - protein, 387 aa, unidentified
MTKNKGRVVGLDVHPDSFAGAVVQGRDPASAVVLSTSTRVELERLEEWARRHTSTEDTLVLEASGNAFAVAARLRAIGREVEILDSHRAGKVGKVYCATDRVDAVKIARIYLSALSPIVWQPDQKTLERREIFSAYQAVVKESTRAKQQLRAMLNEHCVRLEKGFRLCPPHAITRLLKVREWTPARRMLLQQLHGSLVAARARRTMLRRHMAQEIVAEEALLRLTRLCGINLITLYGVVAAVGDVHRFTQSKKLVAYLGLNPSVSQSGNFQGNGALKRHGRGALRALLIQSGKKLLEVNNPLQKWGLAVAARRGRNKAAVAVARKLCVALWHVMMGHAIGTLERLDTLQTKLSKFATEIGPAALTAFGYNNKADFVEKKLYVLRSYP

SEQ ID NO: 462401 - protein, 353 aa, unidentified
MSAIPSPTAPLKYVVGIDIAKDTFVACFGRIDVQQQLRFGKEATFDNTLAGFTDLLAWTSKQQTTTAPLWFVVEATGVYYEALAYFLADNQQALSVLLSNKVKHFAQSTEQKSKTDQLDARLLCRMGLERALPAWQPPTPALRQLRALARERQSLKRQGARLKTQRHAYTHRYQPDERTLERLAARQQLLKQQVKAVDQDLAALLEAEPELARKLAHLTSVPGIGLTTAIVVVAETNGFVLIENERQLASYAGLDVVQRQSGLSAQATRISRRGNVHLRQALYLPAVSSLRYNPQQMAFYARLRARQPSGKPGVIAVMRKLLLLCFSLWKNDRPYDPHYHPAHMAEKEVAPTT

SEQ ID NO: 462402 - protein, 391 aa, unidentified
MEAKRNVTQIGLDIHRTFSVASARDAGGQLVWRRRLEHRDRLRLRRDLRRWPSATPVILEGSFGWSWLVDEVSAAGLEPHLASSRKVAAWREARGLAKSNRTDADLLAELWTQQPRWWEVWLPPGEVRSLREWFRFRMALVRTQTGVKNRIHAVLHRHGILWPGSDLFGGNGRRFLSRLLTPKSDALSESGRAVLKGYLQLLDHVRRQIAQVTRVVRSQVRRSPVAERLRSLPGVDYILAHTLMAEIGRIERFPSSRHLVSYSLLAPRAKDSGEPEEGPPQGRHVGFMGRRTLKWAWIEAAHGAVLRGGTCRVLFDRRTDGGKRDRNRGYIAVARHLCQCGYVLWRKGDVYREHALPRPGSRRRRRRSRPGTGQPDDAMVVAACGPPQASL

SEQ ID NO: 462403 - protein, 440 aa, unidentified
MSKRAYRATRVNDVNWDQLAQGKDGLDITLGVDVGKYSLWAVCRWADGRFERPWRVENPVEIPTLLALLKRVSAGRKLVVAMESSGTYGDALRQALADNQIELQRVGGKAAHDYAEVFDGVPSQHDGKDAAVVAELAALGKAMPWEYQPADPWEQELAYWVEWMVAHRQMLTIWQGRLEGLLARHWPEATQVLKLSSGTLLRVLKRYGTPQALAADGEAAKLLARWGGAFLAPEKIEQLLAGAGASVGVRLGEWQQRQIQNYAQQALAARQEANRAERRLRSLAEGHAVLQAQGKVVGVPTACVLWASTGDPRKYHAAGAYRKAMGLNLVERSSGTYQGKLRISKRGSSRTRQWLYFAVLRLVQKCGVRSWYEAKKAHDEADARRALVAVMRKLAVALYYVGVHHEEFQPRRLFGRIRRHRGSPGEQKSRTKRRSRAEQI

SEQ ID NO: 462404 - protein, 416 aa, unidentified
MSAVGLKQSHTHISAERRHASIMILVGIDIGKSSHYFSVIRKKDGEVLLEPSKIANDHEGFESLIRSVRSYRKEDILFGMEDTGHYHFALLKYLLDRKFKVALINPVITDFTRKANGGISKTDRLDTLTICDVLSSNRQKKPYRIFRVSRFDLYEQRSLTRHHHNLKEELNVYTNRLQKCIDIVFPEYNGLFSSRYGIVYNNVLKVYGSAANIASADIRSLRKCFEFKGRGRRISLTAEKLRQAAINSIGMDSAADTIQIRHLIQMIEQLSDQIEETDKKIEEFSIRLNSPILSIPGISHFSGTSILSETGDINNFTHHAQIIKYAGVAPLVYESSQYRAEHTRITKSGSRYLRKTLYQIIIPVIKSNEAFRRYYDLKISQGKSPRCAQGHCVRKLLRVIFHILKTDQQFDPTLLR

SEQ ID NO: 462405 - protein, 339 aa, unidentified
MGLDVHRDIIVACLVKGAVDAEPEAETRTFSTLIPEMQKLRDWVIEAECRNIAMESTGIYWQPIYEMLESCFDGEISILVVNARHMKNVPGRKTDMKDAQWIATLLRAGLLKGSFIPDKTFRELRHLTRYRKSVVHDITAQKNRIDKFLQSSGFRFTAFLSDTFGASGRNIIRHLIEHGSIDREALDKCLKTKTRNRIDEILVALNGSLSVHQRRFLNMVFLHLEDLEAHKHTIEDEITEEVLKHTDALNLLCSIPGIDVTAAAAIVAEIGTDMSAFPDSQHICSWTGLSPGNNESAGKRKSVHINKGNPYLKSMLCETAWIMASHRKLYLSGWYWKVK

SEQ ID NO: 462406 - protein, 318 aa, unidentified
MNEIAEHTHFVGIDVSMDWLDVHVLPGNLRCRVANGSRGIWSLIGKLSDYDEPLVVMEASGGFEARALETISSAGIAVAMINPRQVRSFARALGILAKTDRIDAFAIARYAEAVRPEPRMAAHRELGEIKALMTRRRQLSDMLTEEKDRRCRVTSGLVRRRLLVSMRNLKKEIGLIDREIDRLVVADEVMREREALLRSTPGVGKIVARTLIAFVPELGALSRRQIASLVGVAPFNRDSGTMKGRRTIWGGRANARAVLYMGALVAARRNPILSAFYDQLIARGKRPKVALVACMRKLLTILNAMMRNGTPWEEPVRT

SEQ ID NO: 462407 - protein, 339 aa, unidentified
MQHITTIGLDLAKSVFQVHGIDHEGQAVLRKKLRRGHVLKFFGTLPPCLVGMEACGSAHYWARELSAQGHQVRLIPPQYVRPFVKTNKHDAADAEAIAEALVRPTMRFAPIKSADQQAVLMLHRSRELLVKQRTMLINAVRGHCSELGVTASQGASRVTDLIEMIEDPDDVRLPAFAREALGVLIAQLQTVKEAIRSLERKLQEWHRSQEVSQRLTTIPGVGVITATALVATIGDGSQFKSGRHLSAWLGLVPRQHSSGGKSRLGRISKRGDGYIRRLLVHGSRTVLRWQRAAPQKSVPWIGELLTRRPTNVVLVAMANKTARTVWAMMRDQQTFKAVA

SEQ ID NO: 462408 - protein, 353 aa, unidentified
MRTYYVGMDVHRASIVIVVLNGAGKVVMQSVIETGAERVRGFLKQLRGKVYVTFEEGTQANWLHEVVRPLVTEVVVCDPRYNKLLQSGNKNDRVDAQKLAELLRQGALKAVYHGDNGVRALKELVRSYDCLVSDTTRVMNRLKAIYRGRAIGCAGHDIYRQDRREQWLEKLTERGAKQRASFLYQQLGALKPLRHEAKRMMVKEARRQPAYPWLMSVPQFGAVSVAQLLAIVGTPHRFRSKRQFWTYIGLAVVTRTTADHEVVNGVLRRSQRPVSTRGLNRNHNHLLKRVFKNAAKGACHSGPFKAAYELRVTQGMVPSLARLTVARQLAAITLAMWKRGEQFNPERMNQQTA

SEQ ID NO: 462409 - protein, 345 aa, unidentified
MGQVSTIGLDIAKHLFQIHGVDAEGTVVIRKRLSRGRVLEFFADLPPCRVGMEACATAHQWARELRKLGHDTRLMPPTYVKAYVKRGKNDAADAAAICEAVTRPSMRFVPIKDVEQQSMLMLHRARDLLIRQRTQLINALRAHLAELGLVAAKGREGLHQLVAVVTECGDERLPLCLSGDRYATARRADRNKRARQAHHSDPAHQRGLQTTRDNSRVRRDPIHAVAATMADPKVFRTGRDFAAWIGLVPRQNSTGGKERLGSISKQGDRYLRRLLVVGATSVINSARARPYKYPWVIELLGRRPKKVVAVALANKMARIAWAVLAKGEPYRVPTRSSNAVVPAAA

SEQ ID NO: 462410 - protein, 359 aa, unidentified
MNKLPKIDNFFNNVNLTADDDLFVGIDVHKKSYHVALFLNDAPATDFVMPSKKQQLIEKLKPAARALRNIAYETGPCGYALARHLKKADMPVCVAATSKIPRPAGQEDKTDRIDSKKLAQYAAKGLLKSVAIPTIKQEADRQLYRMRHRQVRNLAKVKTQIKSFLMMHDINEPEKLSHWSKKAVERLRILPLTKTLRLSLDELLGDLDYYTCRVKALDKSIAEHLDKGLLARRMALLKTHPGVGIVVSCQFATELYHYRDFNSTRQVYKYLGLSPRIHQSGDHSERGSINKVSNSRLRSNLVQAAWRWVSVDVQAKKSYHRLLNNCGQIKQKAIIAMARKLSGHLWMMLIKDQPYDPAK

SEQ ID NO: 462411 - protein, 348 aa, unidentified
MLTVIGIDPHKATHLAAAVDGNGAYLGELRIKARPGGHAEVIGWARREFSGERRWAVEDERNMAGQLIRDLLAAGETVVTVPAHLAAEYRKRGRRRGKNDSIDAVAVARTALREQLPEFVLDQPSRDIKSLADYRTTLVEERVRIQNRLRDLLHQLDPDLAAAIPSGGLTRYRWLDTVAAAVTDQPGVQPAIALQLAHQCRDLTEKIKKVERDLTPLVTHAAPALLTMPGCGILTTAKIVGEIAGVRRFRTDAALAAYAGIAPLDASSGQQRHHRLNRGGNRQLNAAIYQIVITQLRNHPPARAYLDRRINAGNTWKAAVRALKRQLIRAIYNTLTRQPNQDLTPQTT

SEQ ID NO: 462412 - protein, 408 aa, unidentified
MNAVGIDVSKGRSTVAILRPMGEVVQMPEDVTHDAISLEHLAYKILALGEETKVLMEATGRYHEPVAAELHEHGIFVSVVNPLVIHNYSTDSSVRKVKNDQKDSLKIAKFCLDRWAELREYTPMDALRQQLKLLSRQYDLYMKMRVTLENNLISLTDKVFPGVNEMFKSPERADGHQKWVDFITTFWHCECISRVSEEAFTERYKKWCKRKGYNFSATKAADVYIDSLGHIVTLPKNDNTKLLVQTAAKEFTSTSELMALVKAQMIALAKQLPEYDTVMAMYGVGDVTGPQLMAEIGDVRNYPRRSSIVAFAGIDPEVDKSGKNQSDGRPTTKRGSPHLRKTLFQIMSTYLRLSPQDEPVYQFIDKKRTEGKPYYVYMTAGANKFLRIYYARVKECMAALEAEESTER

SEQ ID NO: 462413 - protein, 441 aa, unidentified
MEAVYRRCAGLDVHKDVIEVCVLPPAGQSGSPQRRRFATFTSDLIRLRMWLVSLKATEVAMESTGLYWVPVWRQLEGHIGKRLLCNPQQVKALAGRKSDRRDGQRIAEFLQDGRLDPSFVPPKEIQQLRELLRMRVSLVQEHNRLSNRVEKLLQSYGVKLSSVASDILGKTGQRILTALAAGQTDPDQLSWKAVGSLREKEAQLRRALRADFDEHSCWMLGVLLGQLKENEQWREQLEQRITEGMKPYEPIVIRLMTIPGVDRLTAWSMVAELGTDMSVFPDQRHCASWAGVCPGTNESAGKQHSTRTRRGNRYLRRILTQSAWATSRCKRGYLRAAFHRIAQRRGHKKAVVAIAHKILVAAYFIIRDKTTYLELGEDYFDLLHPERTARRLARRLERIGYQVTLTKAAATAPQSSEGQQPKKRGRPCKCAERGIDCKHKR

SEQ ID NO: 462414 - protein, 338 aa, unidentified
MAILTVGIDLAKNVFAVHGVDETGKPALVRPEVPRGKLIELIAQLPPCLIGMEACSGAHHWAREFAKFGHTVRLMAPKFVVPYRMSGKRGKNDAADAAAICEAVIRPNMRFVPVKSIEQQSRLFVHRARQGYVEQRTALINRIRGLLSELGIVLPLKAATVRRQANKHLEDLPGWCNTVVGDALSELTRLDERIKQYDHYIEQAATEDVRSRQLMQLAGIGSTTASAIVATVGKGHDFTCGRQFCAWLGLVPGQYSSGGKQRLGRITKAGDPYLRTLLIMGGKAVLAAAKNKTDPVSRWAISVQARRGYWKAVVAIAAKNARMCWAMLQRGDAFKLPA

SEQ ID NO: 462415 - protein, 414 aa, unidentified
MDIVHMHCAGLDVHKKTVVASVIVSDGKVGLQKETRTFGAMTSDLLALSDWLMGYGVTHAAMESTGEYWKPVFNILENNFEVLLVNAQHIKAVPGHKTDVKDSEWIAELLRHGLLKASFVPPVGQRELRELTRYRSTFVRERSTLVNRVQKVLESANIKLASVASDVMGVSGRAMLEAIIEGQANPADMAELAQKRMREKRDLLAKALEGRVKPHHRFVLTELLCQIDSLDETIEHFNKEVEEYCRPFEEAVVLLDTIPGVGRQVAEIIVSEIGTDMNRFPSAGNLASWAGVAPGNNESAGKRRSGKTTKGNKALSTALNQAAHAASHTKDTYLSAQYRRLAVRRGKKKAIVALEHTILVIAYHLIIRKEPYRELGGDYFDKRRPEATATRLVKRLEQLGYSVSLQQPVLCTAG

SEQ ID NO: 462416 - protein, 422 aa, unidentified
MSTQHKLYVGIDIHSKKHTVALLPLTLLESSTSPWRTAKTLTIENNMSDFQRLHAAITSYVSSPYEAIIAVDHTGGHYSEPIVYFLQGREYPVYYLETKAAKAARERFLDQESKSDTIDAISCAYLLYLRDVHGLSFRISAVMPELGSKAAALRSLVLQRWQLSKLASQATNRLHQLLLAVFPEGEAQCFKKLLLVSPYYSTPKEILSSHCLETVERLSKKDKRKILELAQNTVGVENPLYASLIKDISNQRMEFLAKRDALTSKIREEVVAHPYGEILLSFPQLGEVIAATIIGIIGDINRWPDKKKFKKALGMYSKLTQSGATPAKTRRGREGSRHGRRVLFQACFGCARTQARESDFKDYYLARVARGKPRIKALVSTAGKLAEIIYHCLKARELYQYQGKYKATTTSDNKKLRGGLDS

SEQ ID NO: 462417 - protein, 385 aa, unidentified
MTVHAKVSTFIPRNYEIFSGLDVDKGSIAVTFSNHDGLLNSLRLPYSSKQLLNYVRKHFPQQRVAFVYEAGPTGFGLYDEITAEGHPCLVVAPSMVPTAPGNRVKTNRLDSRKLSQGLRAGDLRSIHVPTRPYRELRHLVQLRDTHVRQLSATKCRIKSLLLYEGITFPDPDGRWSARVLGELLALPCTEAVRFKLDLLIGTLHFHFNSAAVAQKQIRRFCQADPELRQSITLLKSIPGIGWIVAAHLVARLGDWREIDNVRSIASFLGLVSSEHSTGDKENRGPITRSGDSRLRNKLIQSAWASIGKDPELRAFYRRIYQRHAKKVAARKAIVAVARKLTTRIYAVLKQQRSFVIRPDSSTAPLTAEETAGLRERLDAAQNEQP

SEQ ID NO: 462418 - protein, 429 aa, unidentified
MRTESTPGARGPVFCGVDTHADSHWLYVLDWRGRKVLSRQFPADAAGYEALAGAIAAAGEPACIAMEGTSSYGAGLTRHLASLGMPVREALSPAGMQRRRPGQGKCDEADAERAARAAMSGSRLGTPKSQDGWVDGVRCMLAARSGAVKARTSAINTARSLLTTAPEGLRSRFRGMGGPRLMEELPSVRAEGALGAALGALADLWGAARDAALDMERAIEASLEENCPALLAMYGCGPVSAAKLAVAAGDNPGRLRSEASFAAICGACPIPASSGKTVRHRLNRGGDRQANSALHEIARQRVMRDPETAEYAERARGRGKSDREVMRCLKRYVAREAYRALMHPHEIRRPGDASGLVAARRAAKVSQVRAASILGTSEKYISMLERGQRELKPIRRAYEAWVEAGLPLDWDRRAFEAERKMDSKKHLAK

SEQ ID NO: 462419 - protein, 394 aa, unidentified
MYHRRRRIRGFASVLGGLFECLVEEEREVLQKAELSGLADSENNLGGSSKTMYYIGLDVHKKTISYCMKDAAGCVIGEGKVGATRRELDAWIMTLPQPRMMAMEATIFTGWIYDHLLPHAEKVKVAHPLMLRAIAAAKKKNDRIDAAKIADCLRCDFLPECHMAATEIRDRRRVLRYRNLVVKQMVQMKNRVSGLLMETGVSYNKRRLHKVGYFGELMSTNQDISDAVRPLLNLSRGTIRRSQKLEYDLVSWLERDPLLRERLRRLRTVPGVGSITALTWALEIGDYTRFSTNKQAISYCGLCADENRSADKVMRMPLSKQRNKHIQRVLIEAAKLAPRESPELAMIRARELERGNPNRATLAVARKMVCYMLAVERRQQDFVPAGELMPTAAA

SEQ ID NO: 462420 - protein, 354 aa, unidentified
MKFYTKTHQHYCGIDLHTKNLYVCILDHEGEVLIHKNIKANPKALMTLIKPFLDGLVIGVECMFSWYWVADFCEDNKIAFVLGHALYMKAIHGGKAKNDKIDSLKIATLLRGGMFPEAYVYPRTMRATRDLMRRRMHMMRFRAELLAHIQNTNSQYNLPEIGKNLRHAFNREGIAERFAHPSTQKSVELDLNLIGLFDQQLSKVEWHIKKHATACDYQSLMLLKSVPGIGHILSLVILYEIHDIKRFPRVQDFISYCRLVKCRKESAGKSYGTTGAKIGNAYLKWAFSEAAVLFLRKNPEGQAWVEKMANKHNKAKALSILAQKLARAVYFMLSRNTPFNKAQFFNLQGNGQVG

SEQ ID NO: 462421 - protein, 410 aa, unidentified
MEAILERVCGLDVHQATVVACLLVGKAHEKPRKEVRTFPTFTQDLMKLRDWLQSQGCTHVAMESTGVYWKPVYTILEDAFEIIVGNARHIKNVPGRKTDVKDSEWIADLLRHGLIAKSFVPPKPIRELRDLLRYRRKLVESRTAERNRLLKLLETANIKLASVASNVFGVSGMCMLRAILQGGATPEQIAELAKGRLRHKIADLIRALEGKLEEHHRFLLRLQMSRLEQVDADLRLLEQRIEDRLKPYGEEHARLTQIPGVDRVLAGVMIAELGTDMSVFHSANHLAAWAGVCPGNNESAGKHRSERVRKGNVHLKTALIEAANAAARKKGTYLKDKFFRLKARRGHKRSAMAIGRKILVSAYHMLSTGASYNELGEAYLDGRSKEHVILNLVRRLQRLGFDVQIQPKAA

SEQ ID NO: 462422 - protein, 456 aa, unidentified
MKIPQSTIRLLTGRLVKILLNREVSTMKSNTQNAKIEAITEKTLVLGIDVGSETHYARAFDYRGIEYSKKPFKFSNTEVGFATFKEWILDLKERHEKDKVVPGMEPTGHYWFNLGKFLQDNEMKPVLVNPHHVKKSKELDDNNPTKNDRKDPKVIAGLVREGRYMIPYLPDGVYADLRTASNIRFQLQAELTRIQNRISRWFNIYFPEYKTVYGKPDAKSGMLILKAAPLPEDILTLGIDGVNQIWRDAKLRAVGKARAKTLIEAAEHSVGSKEGAVSARMEIRMLLEDYESRNTRLQEVMVLIEELVRKIPMAEKLLEIKGVGIRTVSGFLAEVGDISRFNNPKELQKLAGLALVENSSGKHKGKTTISRRGRKRLRYLLFEVAMSLVAKNPEFRELHNYYTTRRLNPLKKMQSLMAIAAKLIRVFYAMLTKGVDYDPKKMVSDIKRPAVYLQAA

SEQ ID NO: 462423 - protein, 330 aa, unidentified
MHPQGGVASRDHRPNAGIDVAKQHLDACWAGVELRVANDASGWDELTAKLKAAEVDLVLVEATGGYERGLVCALQGGGITVARVNPRQARDFAKSMGVLAKTDRVDARLLRDFADVVSRHKDRAHYITPLIEVERLELAALTTRRRQLVEMRVAEANRLEQANKLTYRSIKRVIAMLDKQIAQIDKDADDHLDRHFKSQRKLLDSVKGVGPVTILTLIAQLPELGLLNRRQISKLVGLAPLANDSGQRKGPRRIWGGRAPVRAVLYMATLSAIRHNPVIRQFHSRLIAAGKAKKVAIVACMRKLLVILNAMLRDQAQWSAVKQLQMTETG

SEQ ID NO: 462424 - protein, 335 aa, unidentified
MSLKLLAIDLGKRSFHCYGIDGDGLIISRKISRSKLLETIRKLAPEAVAMEACASAHYWGRLLLAEGRQVLLINPRFVKPFVKGSKNDAADAEGIYEAALRPTMRFVPVKSTAQQDLQSLHRARERIVCDRTALINHMRGLLGEYGVILPQGAWRFLAQAQDAIAAAEISDLTRQLFGDLLDELRGLDLRLDKLDRQLVDLCRTNEACRRLSKLPGVGPVIATALVAAIDDGRHFRSGRELAAWIGLVPRQYTTGGKPRLGGIGRRANHYLRRQMIHGARAVMFRLAKRDDRRSQWLRGLAARRGFNRAIVALANKTARIAWAVLTRKEDYLAAA

SEQ ID NO: 462425 - protein, 344 aa, unidentified
MMYVGIDVSSKSFVIHAVDRQKRTVYQGEIAPTKATLLQLVADLGPERKKVVFEAGNQMKWLAETLQGCESVDLHVVHPNELKWISKSSSKTDKVDARKMAELARGDLLPRKVHIVEGPVRRLRELASARQTIQGKRVALINSIRALLLQEGVRLTEKFFGRRDWRERLTKVPVSETGRIVIIAYMQAIDALQTTEAELTAEIVAVKDRRLTLLESIPGIGVLTSRVLLGALDEAQRFDDRKAVAKYGALTPTIYQSGTVTQLGRINRDGRHEVRRVLLQCAHTVARMKSFESRPLRQFFERVMKRRGKKIAIVALARKLLTIAYGVLKNQAHYDPARLMPYAG

SEQ ID NO: 462426 - protein, 316 aa, unidentified
MSKHTTIFAGIDTGKRKLDAALHERPERLQVDNLPDGHRALSKWLRQHRVKRIGIEASGGYEQAVVSQLRRDGFVVVVLQPAQVRAYAKFHLQRAKNDKIDAALIAACTAATSRIHPPPDPRLAPFAEQLTLIEQITEDIAQIKTRRESCRNPRIQHLWNGEIARLKGVLRIELKQLVAAIRQHRDLAERLDLIVSVDSVGLRTAVAILVRMPEIGRVTREQAAALAGLAPYDDDSGEHVGARHIDGGRERLRKSLYNAALAGAFWNAQLNAIYKRLIAAGKPHKVALIACARKLLIFVNTVVARGTPWAPKPTTS

SEQ ID NO: 462427 - protein, 341 aa, unidentified
MTSVAQRKAFVGVDYHDSVVQVCVLDAEGEVLGNGSLDNEVGAILEFVGNVAEGRFVSGAAIEACCGAANLAQRLREQDWEIELAHAGICARMKQNPDKTDFSDAQLLADLVRVGYLPRVWLPPEEIRDLRRLVRYRQQVVERRRDIKLRIRAMLREERVVAPKEAGSVWTKAWKQWLKTTTALGPHSRWIMDEHLAELERVSAKIREVELRMEEATRDDPVVAKLREEKGVGLVTAVVMRAEIGCFHRFRNGKQLARYCAVTPKNVSSGKRQADGGLIKAGNLYLRTMIIEAAHRLARYVPKWRSLKEHLKSNGKSGSVAAAAVANRWIRQLYWQMQTAA

SEQ ID NO: 462428 - protein, 357 aa, unidentified
MGKSIRNFATVTRVGLDLAKRAFQVHAVDAKGEIVVARKLTRNQLIPFFAELPPCVVAMEACSSAHHWGRALIELEHEVRLIAPAHVKPYVRRNKSDQVDAAAIYEAMSRPGQRFVPVRSIDNQAELMRHRARELLAGQRTAALNALRGHLAEIGVVAPQGVQHAYDLKRLAGDGFNENGEVVVPDCVRVALRPLISQIDALDEAIGALDREIAASVKADATAKRLMTIPGVGPVTASAIVATIQDAGAFASGREFAAFLGLTPRQNSTGGKTRLGRITKMGDRYLRKLLVIGACATLRHRRGHSDALRLWASGMLERKTVKYKFNLTAVALANKVARIVFVLMTRGGQYDDRPVAA

SEQ ID NO: 462429 - protein, 341 aa, unidentified
MKKNLFFIGLDISKDDFAASIYQNPGQPILTKEAIPNNPEGFETLLLWLYDHHIDKKNCRICMEATGVYSQAIAYYLLFQGFPVSVEPPLKVKRAFDPIGHKTDPVDSKQIAEYAYRFQDELTSWKPRDEILEKIRQLLSVREQFTKQKVALDNSIQAYSKQRVQVTLIRKAQKETLNQLKKQITRIDKELEKLIKQDPEIFQRANNLDSIPGCGMLLAAHLLVITENFTKIQNSKRLAAFVGIVPYQHQSGTSVYKRAKIRHFGPGPSRKLLRLAAQSVATHNVTFRRYYLRKLDQGKAKPLVLNNIANKLLKVACTIIRNNTRYIKDYRSIHPMYLKSA

SEQ ID NO: 462430 - protein, 523 aa, unidentified
MAAKSRSKRARKSRSHSVHKPRGVIHPRVQAVGPQHFAFICVDCAKSRSKMMVTDYYGRVLMEPTIIEHDRFGFETALQQVRHTLTRHDIKDQIVVVERTGRYHGPVQRAFVQAGFEVRILHPYTTKQYRQPANPGNKTDDTDLFAMSRAAANGFGLLEHEPDPIYVRLQLLARHRRRLVHKNVMLRQQMLEHLHSYMPGYSSCFKDIFDSELLLWVPKHVGSAAEIVQAGVEGLDQQLRKAKVRSHRPTLQKIVAWARSAPSAEEPVSLHRRFFTEFDADRRAKLQLIRAIESDLAEPLSQTPYVLLLSIPGINVVSAAEFAGEMGPIKHYVKPRAIAGRAGLCPSRYQSDAVDHSNGPLVRLANHDLRRAILIIADNLIRCNEHFGVLAAGWRVKNADARDIRVRVGGRFCRIAFHMVSGRMSFRHPCTQQRDYILKKLLRFSLEHAIAPGLLLRNLDAAALHLLPSDERQEAESLAEELAELQNKRGSGPKAIGEILPAVLVKLGINLISSKESGEADLT

SEQ ID NO: 462431 - protein, 404 aa, unidentified
MEVTYPRCAGLDVHKKTVVACLMTPETRLTRTFGTVTVALLELADWLLGEGVTHVAMESSGVYWKPIYNLLEGLDLKLLVVNAQHIKAVPGRKTDVKDAEWIAELLRHGLLQASFIPDRPQRELRDLVRHRRSLMQQRSRVISQIDKLLESANIKLSGVVSDVAGASGRAMLNALVDGTSDPFVLASLAKGSLRRKQDELGLALRGLVGDHQRMLLRSLLRQLDFLGGEVAVLDEEVAQRLAPFEALIQRLDRHPGIGRRTAEDILAEIGTDMSRFPTAGHICSWARVCPGNDESAGKRRSGRTGHANRWLRAALTQAAQAAARKRGSYFQAQYARLAARRGKKRAIIAVAHSLLTDIYYMLSRDTEYQDLGSSHFDRFDLNRTKNRLVHRLEGLGFKVNLEAA

SEQ ID NO: 462432 - protein, 375 aa, unidentified
MATISRLGIDTSKSLFQLHGVNEQEEAVLRKQVRRGQFLTYLAKLAPTEIGLEACGASHYWARQLKALGHEVVVLPPQHVKPYAGHNKNDKIDAAAICEAMSRPRIRERFVAVKSAEQSAAQMLLGTRDGLLHRRTQLGNTIRGHAAEFGLVTPKGLAHIKPLLERIAADQTVPALARELFAILGEQFAELAPRIAQLDKKLKAFERSNELCRRLVEVPTIGPVIASSMIVKISNPAAFRSGRRCAAWLGLTPKDHSTAGKMRHGGITRAGDEGLRAALVSGATGYIQQVKRGRTRPSPWLAQLLKRKPEKLAAVALANKTARIAWKLMTSGERYDRARAEAREGLGATQHGGSTPSPSLQPHTADHGTSTMTAA

SEQ ID NO: 462433 - protein, 367 aa, unidentified
MMGWMAPLRHLSAKLLCDRISSEWEPSMGEVTTIGLDLAKQVFQVHGVDAKGATVLRKQLRRAQVLGFFSRLPPCLVGLEACATAHYWARELAALGHELRVMPAQYVKAYIKRNKHDAADAEAICEAVVRPTMRFVPVKTADQQAAVLLHRGRERLVRQRTGLVNALRGHLAEFGVIAPQGLRNVGKLIAIVRDQTDARVPDLARQVLQVLAAQIEQLEAAVAAIEKQLMAWHKSNPVSQRLASVPGIGPIIATAIAATVVEPSGFRSGREFAAWLGLVPRQNSTGGKHRLGGISKRGNQYLRRLLINGASANLLRSKATNADPWVIGLRRRRPPLVVAVALANKTARIAWAVMRRHENYQRVAAAA

SEQ ID NO: 462434 - protein, 447 aa, unidentified
MPAGKDITMHYQKVLKMPESIPYLSAGFDVGADFTWMSIMLPNGILIGKPFKIIHSDPQSRELAISKIKEAQEMYSLESRCFLESTGIYHIPLLCFLRDKGFDCAVINPIITKNSTNMNVRKLHNDKFDSKKAAKVGLDASLKASIVPDDAIIDLRNLVRDYYYFKDLQSAIVLKLHAELKVSFPAYLNVFSKVTTQTSLKLLEAYPLAADMLAAPKDELVETIRSTARFGETYALARYDAICTAAKDAAVFGRALPSNALRIRLYIKMYREYQAHLDSILEELHQAVGKLEGTPDYDRISFIQTLHGVGFLSAVVLIAEMGAFDLFSSPKKLYAYFGLDPGVNDSGKFHGGRVHMSKRGSSLARRILHMVAINNLKVDKATKTPVNPVIYDYYTRKCASKKRALLSGPSCTKSATSFSLCSGIISLLSSLRRKNTVNVMQQSTRNL

SEQ ID NO: 462435 - protein, 341 aa, unidentified
MGWTVAIGVDTHKRTHTAVALDRVGVQLGSCEIEATSSGYARLLAWAQQPGEPAFALEGAGSYGAGLARLLVTAGVAVYEVERPRRQERRRGKNDLLDAARAAGRLLNGDGLSELRGGGQAREDLRLLLLERRSAIGAHTAALNQLHALLLTAPAELRQRLDGLRGEKLAGRCSRLRPRDNSELVLVSVLRRLAARTRLLARELAKLESELERIISALVPELLDECGVGPVCAAQLLVSSGDPERMRSEASFAALAGTSPIEASSGPNCRHRLNRGGDRQLNCALHTIARTRIRCHPETRAYHDRLLARGKTKREALRCIKRALSRRLYQQLTTTPALQTT

SEQ ID NO: 462436 - protein, 403 aa, unidentified
MNSVGIDISKGRSTIAVMRPFGEVVISPFEVRHTGSELSKLAKQLKSLDGETRVVMEATGNYHASVAKLLHNAGLYVSVINAKLVHGYGNNELRRVKTDRKDAVKLANYGLDRWLTLPRYIPEEDTRLLLKNCYRQYRQYSKVQTVLKNNLISLLDTVFPNVNRLFSSPIRGDGSEKWVDFVAEFWHCRCVSEKSQKAFTNKYQRWCRKHGYNFSEAKAHTIHAETCGHIDVIPKSETTKLLVEQAVSQLRATSTALAALKHEMQSLASVLPEYPVVMDMFDVGPTLGPQLIAEIGDVRRFYSKKALVAYAGLDAPPNDSGDVTGRHKSMSKIGASSLRRTLFLVMSVYLQTAPLDDPVYQFMDRKRAEGKPYRVYMMASANKFLRIYYATVKAYLESLEHTV

SEQ ID NO: 462437 - protein, 320 aa, unidentified
MMTQGNLVVVGIDVAKDKVDACIRSLSRRQMFPSSAEGRRALIGWLRKHKVGKAAMEASGGYERDWAKALREADIEVRIVDPKRVRSFARSAGRLAKNDAIDAEMIGWFAETFGEVPGQAYDAAREKLSQIVNARQGLLDLQTKLQNRGEHAGPEPVQKMQARLLKKIAVEVAKLEAVIAAMIKTTPHFAELAAIIESVPGLAGTTSAGLIARMPELGQVSNKIAPALLGAAPYDDDSGRRRGERHIRGGRRKVRNLFYMACLGAATRHNPVLKAFYRRLIAKGKEPKVALVACMRKLIVILNTMIARRQKWDPGRCALS

SEQ ID NO: 462438 - protein, 358 aa, unidentified
MSMQQVPAHRRVVIGVDTHKYVHVAVAIDDLGTLLGHRSFAADAGGYIELIDWALGFGGKVTFGIEGTGSYGAGLASAVRRRDIGAIEVVRTDRRDRRLRGKSDTIDAENAARAVLAGQATAIPKSADGAVEMIRQVKVAKDIAVKARTAAMISLKQVIVNSPPELREELQPLSKMALINRCAGLRPGQVTTVLASSKYTLRAIARRWQQLNAEIAGHEKVLTQLTAQAAPELSAAFAVGPDTAAEMLIVAGDNPDRVRSEPAFAKLCGVAPIPASSGMTTRHRLNRGGHRQANAALYRVVIVRMQHHEPTKAYVAQRTAEGKTKAEIIRCLKRLLAREIWAAMRPLRQPLSPLTKAV

SEQ ID NO: 462439 - protein, 314 aa, unidentified
MGVLSPLGYYGVLMNSYVGIDVSKDELVVHVLPGEQARGFPNTASGLAGLVGWLMELDCQRIAFEASGGYERDLLDRLHQAGLPAVRLPARRPRDLAKALGLKAKTDALDAPQLLPAATTPPLTAAMQDLREWLQLRTALVGERDNHRRRIQQVRQASVQAYLRTLIDSLQQRIAEVEQQLRRTLEHCPLQITAAPGLGPILRATLVARLPELGQLDRRQVAALVGLAPYNRDSGRWRGRRCIGGGRADVRRVLYMATWAAIRARTPLAQSYQRMVAAGKPKKLALTACMRKYLTMLNAMARDQAPWTPAAPTG

SEQ ID NO: 462440 - protein, 385 aa, unidentified
MKPNSQVTLGEFFRQCVGIDISKNKFTTCLYMYDRASDVGCCTKSIDFDNTKSGFNQMVKWSRKEAVKDYPLTYLMEPTGVYYERLAYHLYKIGQTIYVVLPNKARKFCESEGIKTKTDAMDARCLALMGCASRKLKPWSPPAAIYRELRQMTRFHADLCVIRRSVANRMEALDHMESVSKTVRKHCEKLIKEIDTLTEKNDKDIIRKVAEDKELLAKVKRIATARGLGVTTIVCVIAETEGFHLIENRKQLTSYAGLDVKARQSGKEDPKHRISKEGNAHIRAALYMPALVAVRHNRQIREAYGRICQKHPKEKMIGVAAAMRRLLMLIYTLWKNGEEYDETRDKTHTPRKKELEPEYGPEHCIETNQESIDWNAVDENGEPPF

SEQ ID NO: 462441 - protein, 350 aa, unidentified
MTMVRGLDVHRQQITFDYVDNDGLVRWGRIRPATRKTLRSWLREHCPDGDGEFALEGCTGWRYVTEELAAAGVDVHLGDPAEIAVARGPKKRAKTDRADARLLRTLVLEGRFPESWIPPAHVLEIRTLGRLYCTLMDERRAWQQRVHAQLFHQGCPPIRALLSEAVRAALASVEVSAAGRQYVNTALRRVDELTAEIDPLRTQLVGFARRQRGCQALQRHYGIGGLCAAIMWAEIGDARRFSSSDQLVRFAGLDIAVYSSAGKRSPGHLSRQGSPELRWAAFEAAKCAARRGSPEHPYYHTLAAKHGGHNGKNPTLAVERKILRRCYHTLRELGDAALALPDTPPQEVAA

SEQ ID NO: 462442 - protein, 354 aa, unidentified
MSQKSASAIAVIGIDIGKNSFHIVGHDERGAIVLRQKWSRGQVEARFANMPPCLVGMEACVGAHHLSRKLNSLGHNARLMPAKYVRPYSKGQKNDFRDAEAIAEAVQRPTMKFVATKTADQLDLQALHRVRERLVSQRTGIINQIRAFLLERGIAVRQGQRFLRAELPRILATPPDVLSPRMVRIIEDLARDWRRLDERVEGLSNEIEAIARQDAGCERLMSVPGIGPIISSAMVAAIGAGDVFTKGRDFAAWLGLVPKQISTGDRTILGKISRRGNRYLRVLFVQAAWVVLIKPKIWERHGLKPWIEAARKRLHHNVLAIALANKLARIAWSVLARGRAFEARKMDQAANQSA

SEQ ID NO: 462443 - protein, 355 aa, unidentified
MTGETAMTLYIGVDFHPHQQTLAWCDTQTGETRTIDLVNDPEKVREFYSSLPEPATVGIEASARATWFEEMLFETGHKLLVGNPVLIRKRATSRHKNDRRDAELILRLLLQNEFPAIWRRPPESDQILEILRLRRSFVRQRTQGYNRLQALAHSVGLPKGKIGTRGFQQMLKAASMNEVASIRREHLFSLLEKLNAQIAELDDWLKKKADKDEKVQLLLSQKGVGYLTALATVHTLGDVSRFPRVSRQIANFAGLDPVEDSSSGRVRFRSISKAGSTLLRHQLGQAANIACRTDANLKSFYKRLAKKKPKAVAKTAAARKLLVKLSIMLRDHITADEFDRRGRTVGNARESHDLK

SEQ ID NO: 462444 - protein, 385 aa, unidentified
MDKSSTLFVGLDVHKDSIDIAVADAPRDGDVRHVGTIGGDLASLDKALRRLISRGQPLHIVYEAGPCGFVIWRHLTRQGLHCEVVAPSSIPRAPGVRIKTDRRDALLLARLARSNDLAVVRVPDAADEAVRDLVRAREDAVREQRNGRHRLKALLLRNGTPYTGKSSWTAAHLRWLAAIKLAHAAQQIAFQEYLHMITEATARIARLEQALRDALPAWHLLPVVQALQALRGVQLIAAMTLVAELQDFLRFESPRQLMAYVGLVPGEHSSGPKRRQGSITKAGNSAVRRMLVEVAWHYREGPRVSPIIAKRHDGLPTAITDIAWKAQTRLHAKFKRLLARKVMKTKAVVAVARELSGFVWAIGREVQTSGWRGTADTGTPQSAAH

SEQ ID NO: 462445 - protein, 317 aa, unidentified
MSIPPVYVGIDVSKRHLDVALYPVGEYFQVEHTAAGYQQLAERLSAYAIAWVVVEASGGYEQAVVEALLAAQLLVSRVSPARVRKFAQSRGQLAKTDRLDATILALYAAKNADELRPVVLPDAAQRELSALLQRRDQLQQMLTAEQNRLEHAPAAIQPSLQTVIQVLQDQLQAVRAAIEDHIDHLPPHLRAQYQALDNQPGVGPILASKLVADVPELGRCSRKQIAALVGVAPFAHESGSKRRRRVVKGGRADVRKVLYMATLAAVRYHPLIRPMYQRLLLAGKEKKVALVACMRKFLTILNAIARACTVSPSIPGS

SEQ ID NO: 462446 - protein, 345 aa, unidentified
MLYAGLDLSRKRLDFHLLDAEGAIVDVGASPPDADGLRGLSERLNRYGEPIRAAIESMNGARFVHDRLELAGWQVEIADAQKVKGLAPLACKTDRIDARVLAELARRDLVPAIWLPDPRVRAERERARWRHLVRHRSSLKQRVHAVLLTHGKPCPVSDLFGLRGRQLLARLGLPEPWQGTIEASLRLIDELDREISECERELRRLGADHRYVPLLCTAPGISWVLAYTIAAELGDIGRFATPRKLAGYSGLCPRVYQSGERDLRGPLSKQGPRYLRWALVEAATHACTHPVYRDRYQQTKARIGKQRGAKVAQVDLARRLSEAIWHMLTRDQPFAPKGATDPLAA

SEQ ID NO: 462447 - protein, 349 aa, unidentified
MAVTIVEEARPITGGVDTHADTHVAAALDPVGGLLGVKEFPATAAGYASLLGWLGGFGTVCLVGIEGTGSYGAGLARHVTTAGVRVVEVDRSDRQDRRRQGKSDPLDAVSAARAAQSGRARGAPKGRDGAVEAIRALMVARRSAAGERTQTINQARALVLTGPDDVRVRFAGHTAAALVAALASLRPRPGSTVGYATRIALRELGRRAQFPGTQLERLDELIVPLVTARAPGLLALYGIGPHTAALLLIAAGDHPQRLRSEAAWAHLCAAAPIPASSGKTVRHRLNPGGDRQANHALWRIAFTRMGSDPATRAYVERRTAEGKSKAEIIRCLKRYVAREVYPHLRTTAD

SEQ ID NO: 462448 - protein, 340 aa, unidentified
MKDTVIGVDLAKNIFQVHGASRAGEVMFRKKLRRQQFMQFMATQPPALVVLEACGSAHYWARELAGAGHEVRLIAPQYVKPFVKRQKNDAADAEAIVIAARQPEMRFVEPRTEAQQARGVLFRARQRLVHQRTELVNALRAVLYEFGLVVPQGIAHIRHIEAMLDEAVLPEAVKQECLDLLRQISEQSVRIDVRTKKIRMLAQESENACRLQSMPGVGPLTALAIEAFAPDLQSFRRGRDFAAWLGLVPRQFSSGGKERLGKISKAGQADIRRLLIMGAMTQVNWASRKAPAPGSWLARMLARKPRMLVAIALANRMARAIWAMATKQEDYRDPALSVAA

SEQ ID NO: 462449 - protein, 316 aa, unidentified
MSSSVAFGIDVSKRQLEMAAHDLDRTWTVDNDAAGHQVLLAACRELTPTLIVLEASGGYEREIVAALSVAGWPVVLANPRQVRDFARSTGQLAKTDRLDAQLLARFAAVVQPTPRPLADAETTELAALLTRRRQLVDMLVAERLRRRQAIAAVHADLTQHIRWLEQRVKRVDHDLDRWIQRSPLWRAKEDLLRSVPGVGPTIARTLLGRLPELGQLSRQHLAALAGLAPFARESGTWRGRRHITGGRREVRHMLYLAAVSAARCNPVLKARFTRLRTAGKPAKVALIAIARQLLSILNAIVRTQQPWAPTLDSQHR

SEQ ID NO: 462450 - protein, 337 aa, unidentified
MKFCGIDLHSNNSVVSVIDETDRVVAEKRLPNVLGTILSFLAPWQSELAGVAVESTYNWYWLVDGLQEAGFKVSLAHTIAVKKYDGLKHSGDETDARHLAHLLRLGILPTGTILPPEHRAVRDLARKRMQLVRSRTSHILAVENIMARQFGARLSSNQVKQLDEAAICQMQLPEDVAFALSTNVIVINTLSDQIELIEKRLQQRVRPNPDYALLGSIPGIGQVLATIILLETGPIERFQSAGNFASYARCVDSQCMSNGKKKAKGNTKNGNKYLSWAFIEAANFALRYCAEAKRFYERKKSRSNTIVARKALAHKLARACFYMLKEHKPFDMTRCFT

SEQ ID NO: 462451 - protein, 427 aa, unidentified
MAHTTIIGIDVSKNFADACAISAQGEVMLETKIFYDTVGLQHFLKQLDQLAGEQRHCAVAVMESTAHYHRILETYLRRSGIDVVVINPLQSGSMKNLEIRKIKNDRTDAKRIAQLYLFKMLRGNAVDSILVGALKDLTRQRSDIISERVKFSNKLTALLDQGFPGLRKVFSSLRTKSALAVLARFPGPEEICGANRIDIAKTIAFAAGRNTESAYAVKKANHLLDIAEQAMQLQVERGSFKTLITLFAEMLIQIQRAADQIERQIFETAQCDRTFWSQVELLTSIPGIGQYAAVVILAEIGDFSRFKKAKQLVAFAGIDPAVKQSGTSAYKHNKISKRGSPYLRKILDTCTHVAAHKGRNQQPANPILAAYYEEKRSVKPANVAQCACIHKMLGYIFSVLRNQKPFELRSPEEHLALMRSKTADIAA

SEQ ID NO: 462452 - protein, 324 aa, unidentified
MSKCKKFFGIDISKDVFDVMDSSENHHQFKNDLSGFKEFNKILDEYSHCVMEATGSYYQGLATWLYSRSISVSVVNPLSVKRFIQMRLKTSKTDKLDAQMIRMYGESENPKLWSPPSKLIIEATELHKLIEILVRQRAALKNRLHALKAKGISKSPVLTSVRRQIRNLSKEIADLELKLEAIIKEYKPALLARLCSIPGIGKRTAIYLIVLTHGFEKFESSRQLISYFGLNPIIRESGSSVRGKSRISKTGNNHIRNLLFMCAFTACEHNKSCREIYQRIIAKGKSKKLALIAVANKLLKQSLAIAKSGLYYDENYQSVYVNLG

SEQ ID NO: 462453 - protein, 348 aa, unidentified
MLADQLNYIVGVDPHRDSHAIAVVHVQSGAVVFETTVVANSDGYANALKVVGEHASGRRAFAVEGTGSFGARLTRFLTSHDERVLEVGRLRRERRSGGKTDALDAVRAARSVLTSERPATPRAGGERQALQALVAAREGAVNARRAGLCQLRDLLITTPEPMRSELRPLTRARLLQRLAATRPHSRHDAELRGSMLALRSIARRVLQLTAEERELAAEIETITRKLAPQLLDQPGVGPHAAAQLVLSWSHRGRIESEAAFARLAGAAPIPASSGQTIRYRLDRSGDRKLNRALHMILVTRKRSHPATIAYIERRLQEGKTQREANRCLKRYLARSLYRLLEHGTPLAT

SEQ ID NO: 462454 - protein, 460 aa, unidentified
MFTNSTDPVVGRAKPIADRGVRVQVGIDAAVVANHHVTIRETTRDGQVRLSRFHAPPTIAGLTRLGERLAPYPNVVAVAEPTSMTWLGLHVALKEAGCDLALVGTRHSARLRGAISGKNKSDVIDADVLAMAGDVFTLSPLRPPTPPQLALRRAVVRRGKLVIDGNRSRRRLISLARWAFPDVWEAFAGSWPTAVAVLTRWPDLAGLASARRSSITNVVAAHTRGVADVDARAVRIRAAAARTAQFWEGHLDLQALAWETSEHLRDIAIAADQIERATVQAHHYWAALYGDDPLLMSLPGMGPMTAPTVRAFFADASAFHSAKAAAAYVGLTPSTWSSGTVVQPSRAITKEGPAVLRLAFYQAAGAARRVDPQLAAYYRHLMVERGHCHTQATVAIARKLVERTWTVLTRGQPFQFRDLQGAPLTRAAAKDQAHSLTVPETVRARARAHSAATHRSKLTK

SEQ ID NO: 462455 - protein, 356 aa, unidentified
MSFREREEVPMTIVGGFDVHRQQITFDYVDSDTGVVRSGQIRPATRDVLRRWLGEHCPEGGGEIAVEGCTGWRFVVEELTAAGVVAHLADPAETAGLRGPKKRAKTDRADARLLRTLLWEGRLPDSWIPSPQVVEIRTLGRLYCALMEERRGWQQRVHAQLFHQGAPKIGGLLTEAGREALASAELSPAGRQYVDTAMRRIDALSEEIDPLRRQLVNFARRQPGCVALQARHYGVGWLCAVIIWAEIGDVRRFRRADQVVRFAGLDITVYSSDGKRSPGHLSRQGSPELRWAAFEAARCAARPGSPDYAYYHKVADVLDGKRPVLAVERKLLRRCYHTLRDLGDAAMVVVPERRAA

SEQ ID NO: 462456 - protein, 329 aa, unidentified
MDTTQSVVGVDVSKATLAVCHQVGAHVQHLEVANTPVGFRQLVRCGGARSLYVLEATGPYYLAVAYHLVAAGAQVAILNPLVVKRFIQMHLGKGKSDRKDAQWLLRYGQQQATPRWQPEEAVLVECRQVEQVVELLIRQKTMIHNALEAMQAQPVVSLAALEQLRQTLLHLEEQVQQLETKLLTTVEARYPPEMQLLCSIPGIGRKTAAYLLLFAGGFTSFPSHRQLIAKAGLCPREFSSGTSVRGKARISKMGGALIRSKLFMCSWSARRVNGACRALYDRLVAKGKNGKLALIAVCNKLLKQAYAIVTSGVPYQADFTKKVVAPLAF

SEQ ID NO: 462457 - protein, 413 aa, unidentified
MDLLVERCAGIDVGQAEVVVCARVADAATGAAAELVASYGTTTPDLLELHDWLAGLGVTQVAMESTGVYWKPVYYLLEDDFTVLLVNAAHVKHVPGRKTDTIDAVWLAQLLAHGLLSPSFVPPKPIRALRDLTRYRKALINERTAQVNRVHKVLQDAGIKVATFASDIFGASGRAMMRSLIAGEADPTALADLAKGRMRAKIPDLNKALTGRFSEHHAFLLQRMLDHIEGQEAEIAELDARIEGLLATSAAQVQLLATIPGVDVRSAQTILAEIGTDMSVFPTPGHLASWAGMCPGQRESAGKRGSGKTRKGSKWLRAALVQSARAATRSKDTYLRERYVQLRRRRGDARAVVAVGHEILLAAYRVLDTSQPYLDPGAVEVTERSAERARRHAVANLRRLGFTVTLGPAPSAV

SEQ ID NO: 462458 - protein, 355 aa, unidentified
MKQSQQSNKLRFDGQVFFIGIDVHKKSWTITIRLNGMQLKTFTMEPNAKQLQKFLKKNYQGGHYFSVYEAGFSGYWLHHQLTELGIKNIVVSPGDVPISNKEKSYKDDAIDSRKLARELENNSLKAIFVPTPKQSATRQISRLYALQSNENKKIRLRIKSFLNYLGIEIPFEVGSRWSNRLINWLEKLELENEGDRYYLDQLIKNMKAKRKELLATLKLIKKNYADHQVIKRLRTIPGIGLITAFTFYAEIMDIHRFDNENKLASYVGLIPSLKSSGNRTRVRGLNHRQNKLLKFRIIESAWVAIKNDPALTSSYMSYIKRMPKQKAIIKIARKLLNRMRSVWINQKEYQIGRMI

SEQ ID NO: 462459 - protein, 345 aa, unidentified
MSQIKRIGLDTSKAVFTLHCVDESGHVVLRTNLRRPQMATFFKNLAPAEITLEACGSSHHWARELAALGHEVRLIPPQYVKPFVKRAKNDRNDAEAICEAAGRPGMRFVPVKTATQQAQGMVLKVRETLVSQRTQLVNALRGHAAEFGIIAAKGISQITPLLEAIEAATTIPSEAREMLALLGQEIEHLDSKLNEIEVKLTAAHKANALSQRLATIPGVGRIIALTLATEVDPMAFESGRHLAAWIGLTPKEHSTGGKQRMGGISRAGNERLRRLLVTGATAVIRFATRSGNKHASEWLLKLLQNKPRKLVAVALANKIARIAWAMMRSGEAYRRPTAIAATVAA

SEQ ID NO: 462460 - protein, 390 aa, unidentified
MTLASQRSCAPAAIRTDLGAIFVSLELSRSTWLVTSLSPGNGEKMSRHSVRGGDLSGLLERFASLRKRASVRTGKLFPLVVVQEAGLDGFWLHRALEKEGIESHVVDAASVAISRRRRRAKTDRIDGESLVRTLLAYKRGEPRVCAMVRVPTPEEEDRRRLCRELKSLIGERVRHANRVRGVLFAQGVADYDPRRPDRRVRLDALRTGDGRPLPRHLKAMIMRELDVLDLLDAQINQVRAERDALVMTEAEADPGRAIVASLLTLKGIGPGFAGVLWSEGLFRHFDNRRQLSAYAGLAPTPWQSGSVNHEQGVSKAGNPRLRAILVEMAWLWLRHQSGSALARWYHDRVRRSGGRMKKVAIVALARKLLVALWKYVTAGVIIEGAAMKSA

SEQ ID NO: 462461 - protein, 421 aa, unidentified
MQVLYERCAGIDVHKDQVTVAVRTPGSGPGRRDTQVRKFGAFYGVLRDMTRWLISQGVTHVAMDATGVYTMPVHHALLEPGRFEHVLVCNAAHVKNVPGRKTDAVDASWLAELLECGLLRGSFIPPEDIKAVRDVVRYRRKIVQERASETQRLGGVLQDAGIKLDSVASSIDTVSGLAMIRALIDGERRGEILAELARGRMRAKINDLSQALEGRFDDHHALMCQLHLDHIAQLNEMIAKLDAQVEVMMVPFARQRDLLVTIPGIGLVAAAAIISEIGTAPGEFFSTAAHLASWAGLCPGNHESAGKRKHGKPRKGSQHLQPLLVECAWSAVRASGRLKARYHRLVLRFGGYRNPAAKKRAIVAIAHTLAVIIWHVLTTGTTYTDLGPDFYATRSDPAKETQRLIAKLEALGHTVTLAPAA

SEQ ID NO: 462462 - protein, 337 aa, unidentified
MQYLGIDWGTRRASWCAIDEDGTVGEGTIPADRDGLARLVLTLGAGEVRGCIEMMSGAVWVRDELALAGWDIRIADARKVKAIAPLACKTDRVDARVLADLVRRDLIPEVWVPSVHERANRERLRRRSHLVRLRTSAINRTFGLLTQWGLRRSLTALRKPGAIDELAEHGVPMVWRQSIVTLLGVIDDLDAQLDPLERELRPHARQDPRVQLLMTIPGVAELLGLTLASEIGDIDRFPTARKLVGYSGLTPTIKQSGQSSRTGRISKAGPDTLRWAAVEAAQQAWRPSNPWHRLYTDVKTRHGKSNPAKAAVARKILIASWHVLARQQPFKPSCAAA

SEQ ID NO: 462463 - protein, 311 aa, unidentified
MQQTFIGVDVAKSWLDIHHPKQRSLRIDNTPKAARAFAGACAKEGAWVIFEASGGYDRILREALETAEVPFSRVNPRQARDFARAMGVIGKTDRVDARMLVELGIRLNPPRTEPLAQARKALQAQTVRRRQLVDLRKQEDTRLKQTADTDVRADIKSLIAVLERRIAKIEREMVRLVNADAELAAIDEILQSAPGVGPIVSATLIAELPELGNVDRRAIAALAGLAPVARDSGKRSGPRAIEGGRPVIRTILYLAGLHASRAASRFRDFRDRLQRAGKAPKAAIIATAHKLLVTLNAMVATRQRYAVQPPG

SEQ ID NO: 462464 - protein, 369 aa, unidentified
MRKVALDLGARKTAYCEVAEGAVIQRATVTAVETLKSLLGPEAPPAVVALEACREAWHVHDLLRSWGNDVLLVDTTRSRRLGIGQHGRKTDRLDAEVLAFALERGGIPVAHVLSPHRREMRRLLNVRRALVEARAQYVTTARGLAREQGVRLTQCKADVFSRHARQCEEHVLAVIQPLLKILDAINLELEVVDAALSKLCETEPIVALLMTAPGVGPIVAASFVSVIDDAKRFRSSHHVESYLGLVPSEDSSGGKKRLGAISKKGNSYLRSLLVQGAWAVMRGTDRQQPLRLWADAVAERRGKKIAVIALARRLVGVLWAMWRDGSTYDPALLAAASSRGIRRSSRAFENQASQMSSLSHRASEVAASS

SEQ ID NO: 462465 - protein, 415 aa, unidentified
MDVLHDRCAGLDIGKKDLKACVRTPSPSGRRSRHQEIRTFATMTNALLELRDWLIQEKVTLVVMEATGDYWRGAYYLLEDTLNVILVNAAHAKGLPGRKTDVSDSAWLAQLGECGLLKASFVPPEPVRQLRDLTRYRSTLTVERTREAQRLEKELEDAGIKISAVASDILGVSGRAMLAALIAGEDDAQVMAEMARGRMRPKIPALVQALTGNFGEHHSFLCRMHLTRIDELSASIQVLSARIDQEMRPFVRQIERLVTIPGVRKTTAQVIIAETGADMTRFRTPGHLASWAGVCPGHHESAGRQYSGKRRHGNRWLGGALGMAAMAASRTSERTYLGARYARLVPRLGKQKTIVAVEHSILIAVWHMLTDNVDYQDLGGDFFTKRNPERAMRRIIRQANELGLTVRFDPIPGVA

SEQ ID NO: 462466 - protein, 461 aa, unidentified
MEIIHRCCCGLDVHKKMIVACLIVLDAAGQRQKETRVFGSMTQDILALADWLTGAGCTHVAMESTGVYWKPIFNLLEGQFEVILANAQHLKAVPGHKTDIKDAEWIADLLQHGLLRPSFIPPAPQRHLRELTRYRSTLVAERARLVNRVHKLLEDTNLKLTAVVTDVTGVSARAMLAALLSGQTDPQTLALLARGKLRKKREQLAQALQGQLQPHHRFLLTTQLAHLDFLDEQVAQCDSEIQRQIAQSIPPSVSAETSATAPRDEPPAELTALQASPPSSPGEEAKRAPAASTPLSIASALTLLDTIPGVNQRLAEIFLAEIGTDMSRFPDAQHLASWVGICPGNHQSAGKHLSGKTRKGDRWLRQALIEAAHGAMRTKDTYLSAQGKRLGARRGKRRAVVAIGHSILVIVYHVLKHKQPYQDLGSNYFDERDRTMVARQSVRRLEQLGYTVTLETPGEAA

SEQ ID NO: 462467 - protein, 347 aa, unidentified
MEQIIRIGMDTSKHFFQLHGVNVAEQAVLRRKFRRKEMIEFFEKLPPTVVAIEACGASHHWARLLISLGHEVRLIAAQLVKPYVKRGKNDASDAEALCEAMSRPTMRFVPVKSAEQQASLMLIGMRDRLVRNKTQLANAIRGYAAEFGLTAAKGLCKIEPLLERIAVNEDVPILARELFASHAKEYAQLQEELQDIERKLMAWHRADECSCRLAKIPGVGPIGASLLMMKTPSPELFASGRHFSAWIGLTPKDHSTAGKVRHGVITRAGDEALRSTLMLGATSILRRVREGHGGNASSWLLELLKRKSPKLVAVALANKMARIAWKMMVTGESFRKNAALPDLTGAA

SEQ ID NO: 462468 - protein, 355 aa, unidentified
MGTISLGVDLAKCIFSVCEMDGIGRVLRRREFRRDAFATYLAQLPAGTVVAMEACSGAHHWARRCREYGLVPRLIAAQFVRPFRKNPVAKNDPNDAEAIATAARQGNMRFVPVKDIDQQARLSWHRVREGYKAEHLAIGNRLRGLLAEFGIVVPNRDAALHRVLGDLDAHPELPGEFKELLRALSEHWVQVHAAMAACDARIERHARQDSRCARLRAIVGVGPLTADAMVASIGNAREFKNGRQLAAWLGLVPTQHSSGGHARLGAISCRGDGYLRTLLIQGARSSLERAKRVGLDKATPEQVWIQSLACRMPFGKVIVAIANKHARQLWAMLAHDLDYDPMASLNRTMQQRTAA

SEQ ID NO: 462469 - protein, 433 aa, unidentified
MIRKGYKMGYERVTWCGDDATEVAVVAGLDLGKAELACCLSKPDPDHPGRQLQAVTTWTTMTNSLTALAGYLIDQGVQLVAMEATSDYWKPVFYRMEAHGLNVIVVNAKHFKHVPGRPKTDKLDAQWLARLASKGMLRASFIPPADIRRLRDLTRDRADLVDQRNGNKNRVEKLLEDAGIKLSVVVSAIFGVSGRAMMEALIAGQRDPAVLAEMAKGRMRAKRAVLIEALTGLFTDHHSFRLRLLLDRVDQFDTDIATLENRIDELIGPYRHQVDQLSAIPGVGVTNAEAIIAEIGVDMTRFPTANTLTSWAKFAPGVNESAGKTRGTKSTGRGDKYLARALGQSAVATKTTKTFLGARYRRLSRRIGKQKTQVAIGRSILVVIWHLLSNPEAQWIDLGPNHYQQTHNRERNIHAHLRALHDLGYTVTLTPAT

SEQ ID NO: 462470 - protein, 353 aa, unidentified
MKRTTKYVALDVHQATTVAAVREASGRVIARSILPTEAAALVEYFQGMRGSIQVAFEEGTQAQWLHDLLSRVVDRVIVCDRRGEHRGHKADQVDADKLSQRLLNGDLRAVYHGSSERITLQELTRTYMNLVEDSTRAMLRLKSLFRARAVRAPGKRIYGTKDRPRWLAQLPDRGARFRAETLYAELDVLRELRPRAKTLMVVEARRDPAWQILGSIPNLGPVRVSLLLATMKTPWRFRTKRNLWAYAGLAVVSESSADHEFIAGRPVRRRRKPLTRGLNKNHNRVLKDVFKSTASASIGKPGPFQDLYRGMVARGMREDMARLTLARKFAALTLRLWKTGEPYDPAKLTVRAT

SEQ ID NO: 462471 - protein, 356 aa, unidentified
MQTQVTKKIDFSGKDLFIGLDVHKKSWSVTIVIDGMEHRTFTQPPDPGALNNYLQRMFPGGSYNSAYEAGFCGYGTHRKLKSLGINNIVINAADTPTSQKDKLHKRDPTDSRKIARELEKGSLRGINVFDRELEELRSLNRTRFYLMRDLRRSKNRIKSFLMYYGVPIPPEFDNNQWSLKFISWLKQVRMTTEAGQQAFSHLIESYEHYRQQLLILSRIVRLRIRHYDKELYSLLTSISGIGPLTASALITEVGDINRFTHINHLASYVGLIPRVRESGETTHTGGITFRCNTFLRTLLIESSWQAIRMDPALMQYYHKHVVNSKGHKVIIKVARKLLNRIKYVMKNRQPYETGVA

SEQ ID NO: 462472 - protein, 369 aa, unidentified
MTEITRGEIVRVGVDLAKHVIQIHAVDQAGRTVAAKPLPREKFLAWCTLQLPSGCLIAMEACGGAHHWARRLQEMGFDARLIAGHFVGPYRMQGKSGKNDANDAAAVCEAASRPSMRFVPIKTAQQQALLSVHRLREGYKEERTACINRIRGLLTEYGLVFAQSPEVLRLALQDTLEDASNELPALARMALQRAHLQWIETECHIAWCDERITAHVRTDVQAKAAAQLCGIGPVTASALVASVGDFTQFKTGSQFGAWLGLVPSQNSSGGRASLGRITKRGDDYLRTLLIQGAKSAVMSAHKRSDRISQWLVQLKERVGWQKAVVALANKNARIVWAVLAKGRVFDPNHVPVKPGEIVGAVGSAMVATA

SEQ ID NO: 462473 - protein, 379 aa, unidentified
MSKIRFVGLDVHADTIAVAVAEPDGEVRALGIIPNRLESIRKLVAKLGPAQQLKICYEAGPTGYVLYWELTALGVACEVVAPGLVPVKPGDRVKTDRRDATKLARSYRAGDLTAVWVPDAAHEALRDLVRTREDARQHQHRARHRLSKFLLRHGRRPPEDVKKAWTLKYMTWIQEHVHFDQPALETTLLDYVQEVEHMAERIVRLEKAITEAIQKAPPEIRAVVQALQALRGVAQLTAVTVVAELGSLSRFQSPRQLMGYSGLVSSEYSSGNRVQRGGITKTGNAHLRRVVIESAWAYQHRPWIGGFLLRRQRDLRLDPEVKEIAWKAQWRLHTRYKKLAAAGKKKPQIVTAVGRELLGFLWAIAVQTEAKFRPDRKAA

SEQ ID NO: 462474 - protein, 310 aa, unidentified
MDKIIVGIDVSKDRLDVAVRPSGEAFAVSRDAAGVEQLVARLRKLSPHLVALEATGGFETVVAAALGAAGLPVAVVNPAQVRAFAKAIGQRAKTDPIDAAVIAHFAEATNLEPRPLPDEQTRLLADLVSRRRQIVAMIGAERQRQQRLTAPRLRKSIARLIKALEKELASLDADIDDAMKGSPAWRAKEELLTSVPGVGPVITRTLVAELPELGQLGHKQITALVGLAPFTRQSGKWRGKSFIGGGRTAVRAALFMGAMVAKKHNPVLKAFFDRLVAAGKPKLVALIAVARKLLIILNAIVRDNRPWQTA

SEQ ID NO: 462475 - protein, 396 aa, unidentified
MSRVWAGIDSGKTHHHCVVLDADGAKLLSRRVANDEPELLQLLADVLGLADDATWAVDMADGGAALLIALLVNHDQELLYIPGRAVNRAADGYRGEGKTDARDALVIADQARVRRDLKPIRPSDEITAELKLFTARRTDLACDRNRSINRLRATLTSMFPALERALDLTTKGPLVLLTGYQTPLAIRRVGLTRLTKWLSVRNVRNAESLATAAVRAAERQHTAVPGEAAIASLVGALVEEVMALNEKIADVDKLIEGRFRRHELAEVITSMPGIGSLLGAEFLAAVGSDMASFATPDRLAAFAGLAPAPHDSGKSHGNLHRPQQYHRGLQRVFYTSALISIRSDPNSRRFYDRKRAEGKRHIQAVLALARRRVNVFWALIRDRRCYQVIPPVTHAA

SEQ ID NO: 462476 - protein, 388 aa, unidentified
MTKTTSLPSPAAAVDYDATLILAVETSNKSWVLAAHVPGLGQVKSKQTIAPGAEALAKAIDGYHRRAAGCGKTADRVIVVYEAGYGGFWLARWLAARDIEAHVVQPSSVPVERRKRRAKSDKIDADLLLRTLLAWLRGEPRVCSMVAIPDEADEDARRPAREREELIRERIVLTNRIGAILATLGVDDYNPLRRDRRVRLDALRTALDKPLPEHAKAKIGRIIERLELILAQIAALECQRDAVLEDEAPGRAERMIQTLVLLRGIGAQSATVLVYEAFVRSFSSGKALGCYAGLTGTPFNSGSSEREQGISKSGNRRLRGAMGELAWLWLRYQPDSALAKWFRERLAGANGRMKKVLLVALARKLLIALWRYATHGVVPEGVVLKPAS

SEQ ID NO: 462477 - protein, 370 aa, unidentified
MLLGDPAARSKGHGRKGRSVDGGAGSFSSKTSNGCLGTSPHLQARGRKGGNLRREQGAGESMFIGIDVSKTKLDVAVRPSGERWSVSNEEKGVSQLCQRLQSLSPQMVVLEATGGLELPVASALAVAKLPVAVVNPRQVRHFAKALNRLAKTDAIDADVIAQFAEAVKPELRPIADADMQRFSELLTRRRQLVEMLVSEKNRLAVATTKPVKQRISYHLHFLKEELKSLDQELEKEIRASPLWREKDDLLQSVPGVGPVVSRVLIGELPELGSLTGKEIAALVGVAPFNHDSGKLRGQRHIFGGRAYVRTTLYMAAVCGTRWNPVLKRFYAKLLAAGKPAAVALTACIRKLLVILNAMVRDQRPWAPEVA

SEQ ID NO: 462478 - protein, 372 aa, unidentified
MSTGLAILLSLTTELEYRRMVIIGVDPHKDVLVAVAVDGNGRQLTLRDAPARPRGFTTLLSWAEEFERRLWAVEDVRHVAGGFVRFLLAAGEQVVWVPTQMSSDYRKRLRASGKSDPIDALACARAALAENLPAAVPDTEARNVKLLLDHREDLVGEMVRMCSRLRWHLHDIDPDFAATVPKHKLHRPKWNKYVRDFLAGRDGSVATAICVDLIGRIQELARCAAQLEREIAALVVIHVPQLLALPGCGPLSAARILAETGDVRRFTSAAAYAMHTGTAPIPASSGNTQRFRLNRGGNRRLNAAIHRIAITQKRMHEPARTYLDARRAKGTSNTESLRALKRHLARRVYALLKAGPAQAVDPMVGQDTSQAA

SEQ ID NO: 462479 - protein, 391 aa, unidentified
MIYIGIDVAKDKHDCFITNSDSEVLFKAFTIFNNLDGFNDLYQKIESVMDDVTKVKVGLEATGHYSYNLLGYLIDKGLPTYVINPLHTNLYRKSLSLRQTKTDKVDARTIASMLMSDVNLKSYSDTSYHNEELKSLTRYRFDKVKERAKLKTSVSRLVCILFPELEKLVPTLHMASVYALLSEFPSAKHVATAHLTRLTNLLSKSSKGRYGKDTAITFRDSARASIGSNMPAKSLELKHTIKLIQELDSEIDEIENEIKIIMDEINSPILSIPGINYRMGAMIIAEIGDFNRFDSPDKILAYAGFSPSTYQSGQLDGAYAHMEKRGSRYLRYALYNATKYVCHWDPTFAAYLAKKRAEGKHYNVAISHAVKKLVRVIYHLEKTKQQYIKVA

SEQ ID NO: 462480 - protein, 489 aa, unidentified
MATAAQQPRAKNGSNAQRSAPKRKARGRHCPTGKGDRRSSKLTITNPDAAGIDVGAQAHYVAVPAGRAEVSVRSFGAYTAQLQELVHWLKDCGIKTVAMESTGVYWIPLFQMLEEAGFEVVLVDARQAKHVPGRKSDVQDCQWLQQLHSYGLLRAAFRPEDSICRLRSLQRHRKSLVECAAMWIEHMQKALNEMNLHLHHVLSDISGQSGLAILEAMVAGERDPRKLASLAHYRVQKSQAQIEAALTGDYRPELLFVLSQSLSNYRQMQQQIAQCDLSIEKQLASMADCTNPSQHAEPTTPGPASVAGKPRKRKPKGGLELTLAAHLKRILGVDLTTIPGLNVLAVLTLLSEIGTNMAKWRSEKAFVSWLGLCPNNRISGQRVLNSRTRKVVNRAATTLRLAAMLVGKTNTPLGSFYRRKRAQLGAPKAITATARKLGCLIYRLIKNGQPYQEPDIRTYELKYKDQILYSLRKRANSFGFDLVELPKAA

SEQ ID NO: 462481 - protein, 346 aa, unidentified
MRFYQATHSFYCGVDLHARTMHVCVVDADGRTREHVNLPCDAGRFLKLIEPYRERLVVSCECLFSWYWLADLCRAEGITFVLGHALYMRAIHGGKTKNDKIDSEKIARLLRGGMLPQAYVYPKEMRSTRDLLRRRMQLVRLRGQALAHVTNTFTQYNIEPPEKRLRNSSNRVGVAERFVHESVQRAVRSDLALAAHLDEQLRGIELYLTQHAKIDDPQAFARLQTVPGIGPILAMVLLYEVHDIRRFSSVQQFVSYCRLVKCSHESAGKKTAGRGNKIGNAHLKWAFSEASLLMLRELPAAKSFVARMEKKHGKAKALSILAARLGRTVYWMLKRQEAFDVNRFWK

SEQ ID NO: 462482 - protein, 411 aa, unidentified
MNQITSVGIDVSKGFSVVAIRQPGGVIVEPPFRVNHTSRELNALVQRLHILPGEIRIVMEHTSCYWRPIGLTLVNAGFFVCIVNAMLIHDFHDNSIRRVKTDRADALKIANYALTFWTELKPYSPEDELRQLLKMQCRLYERTLSTSVTLRNGLISLLDQTFPEINRVFHPLVKQSNGHVKWVDFVKTYWHKEKIATMTESRFMDSYRRWCKREHYQYYASHARRIYGLAKETVASMPRSESTRQLICQAVDSLNAVYEVLHQLRKEMLRLAQQLPEFEAVMSLPGAGNITGPKLMGEIGDVRRFTSKRALVAFAGVDAMPYQSGIMDSHSRRMSKRGSPLLRKTLFQMCSICLQLSRVDDPVYLFMDRKRREGKQFYVYMVAGAAKLLRMYYARAKSAFDADNKENKITA

SEQ ID NO: 462483 - protein, 341 aa, unidentified
MSESALIGIDLGKHSFHLHGQDKSGREVFRKKLSRPQMMQFFGNLPACTVVMEACAGAHFVARQLIAMGHQAKLISPQFVRPFVKGNKNDFVDAEAICEAASRPSMRFVSPKTEAQQTLSVLHRLRESLVHDRTKAANQMHGFLLEFGISLPKGLAIMKRLASILAEHELPVRLTGLLQQLHDHFVCLDEQIKELDKELASQLAADDLGSRLLSMPCVGPITASLLAVEMGDGQQYKCSRDFAASVGLVPRQYSTGGKANLLGISKRGDKHLRQLLVQCARVYMQRLDYQRGRLADWVRSMLTRRHSNVVACALANKLARIAWALAAHHTQYEAGPDALNA

SEQ ID NO: 462484 - protein, 411 aa, unidentified
MNVDSTDEPRFAAYVAIDWGDSKHVWSLQPADSDRRERGEIEHSPEAVAAWAAMLSARFGGQPVALAVEQSRGPLVFMLGKYEQLHVYPIHPRAAAQFRAALFPSGAKDDPSDAELLLDLLVHHRARLRRLKPDTEQTRLVQHLVEGRRKLVNERTRQTNRLTAQLKLYFPQMLDWFDAVDSPLVGALLKRWPTLETLQKARPDTVRSFFTAHNCRSQELIERRLDQIRQAVPAVRDKALIEAAQTMTKVLVELIATLREGIASFDRQIAQAVAAHPDFAIFDSFPGAGPALAPRLLAAFGSQRERYQSAADLQTFSGIAPVTERSGKSQWVHVRWACPRFLRQTFHEWAAHSIGFCDWARAYYQQQRGRGNDHHAAVRALAFKWSGSPFVAGSTRSPTMTCRAFAGAVRR

SEQ ID NO: 462485 - protein, 314 aa, unidentified
MLGIDVSKDRLSVCQWDGSRGCAAGAWEMPNTEAGVRELLAMSSAEEPLALEPTGRYSELVVREAWAQGRRVLLAPPRAAKQFLASVAPRAKTDRLDAQGLAQYAASVPLRLFVLKEPRMEELSQLLNARRLLALSLAALRQQAGALVEARAALQPVIQTTAAQIKELDRRLGRLGKQEPAVRQLQAVPGLGPLAAAALAVRLKTIPFAGYDQFVAYVGLDLRVVDSGKHRGRRRISHHGDAELRRLLYLCAQASVRTKGSPFAQQYQRELAKGLASTQALCAVARKLAKVAWALVHSGVPYDPTRVYQKPHRA

SEQ ID NO: 462486 - protein, 402 aa, unidentified
MNAVGIDVSKGKSMICIMRPFGEVVASPFEVTHTVGELSKLANSLKSLNGETKVVMECTGNYFYGVAYALHEAGLFVSTVHAKLIHDFGNNTIRRVKTDKADSIKIANYGLSHWLELPEYIPEEDVRRMLKAYSRQYTKYGKLRIMLKNNFISLTDETFPGVNELFSSPPRKSDGREKWMDFAFKFWHCECVCSLTPKAFSERYQRWCKREGYYFNRDKADEIYAAACGHLVGMPKNETIRLLVAQSVNQINAISQSIAVVADEMKRLAAMLPEYPVVSEFYGVGDILGPQLMAEIGDVYRYRNKGSLVCYAGLEAPPYQSGKFESANRSISKKGSPHLRKTLFQVMDCYLKRSPTDQPVYQFLDRKRAEGKHYYSYMTAGSAKFLRIYYARVKEFLDKIED

SEQ ID NO: 462487 - protein, 460 aa, unidentified
MKQYTRKSSPQKKSGGSSFPMINKDAAGIDIGSGEHWVAVPEDRDEEPVRSFGCFTADLHAMARWLKACGITTVAMESTGVYWIPCYQILEEHGFEVKLVNARHVKNVPGRKSDVDDCQWLQRLHTYGLLSGSFRPDDQICVLRSYWRHRANLVRYASDHIQHMQKALTQMNLHLHKVLSEITGVTGMNIIRAILEGERDREKLALLRERGVKNTPDAIAKALEGDYRQEHLFALKQAVELYDFYHRQIEACDREIERYLHTFETKVDPVQNPLPKQKRKKQMRYQSFIDLRTELYRVSGIDFTQMPGLDVLTVQTILSEVGLDPGKFLTEKRFVSWLGLCPNNRITGGQIKSTKTRKTANRAANAFRMAAQSLANSNTGLGGFYRRIRARLGAPKAITATAHKLARIFYRMWTTGQSYIDMGSDYYENRYKERVLRNITKRARELGYDAVLQPIEQRVA

SEQ ID NO: 462488 - protein, 355 aa, unidentified
MKGESQSKKVWVRGKEVFIGVDVHKESWHVTVRAEEEEIFHGRIHSRYDIFQKLLDHFKGCKVKVAYEAGPCGFWLHDRLAEDGIEVIVAPPSLIPIESGNKVKTDKRDSRKLARLLEGNMLKRVWVLTEQDRVDRELLRTRRQMVEHRNDVARQIKSKLLFYGIPSPFSARHGWTQSYLEWLKGLELRGEALKVCFESLIELYEYLTEQLVRLKQKVKELSESLKYRERVKLLSTVPGIGTLIAMEILVELQDVERFKRAEELASFIGLTPSEFSTGQYVRQGRITRCGNKRVRTCLVESSWHLIQKDPVMRTKYNRLKSKKGAKRAIIAIARNLLIRIRRMLLGREPYVVGVC

SEQ ID NO: 462489 - protein, 344 aa, unidentified
MDHFAGLDVSVKETSVCIVDDVGKIVREVKVASEPEALLAVLKNPAYHFKRIGLAGPLSQWLYSALAGAELPVICVETRHMRAVLKAQINKTDRNDARGIAQMMRAGLYRPVHVKTLRSQKLRMLVTHRKLLQAKAIAVENDLRATLRNFGLKVGVVGTVKFEARIKELVEDVPDLAVLVEPLLVVRRVLREQISVLHRRLLAIVRDDDVCRRLMTVPGVGPVVALTYRVTVDVPVRFRKSKSVGAVFGLTPSRHQSGESDRPGAISRCGDEMMRSMLYEAAQILLVRSTKWSWLKAWAMKIARHRGMKKAIVALARRLAVIMHRIWVNGTAFRWTQEQAAAAT

SEQ ID NO: 462490 - protein, 312 aa, unidentified
MAKDTIGIDVSKDRLDAFWHSRSEARRLPNTDEGFGQMCDWLGEEEGVLIVFEATGAYHRGLERHLSLAGRPFIKVNPKQARRFAQAIGRLAKTDSVDARMLARMGVVLDLAPQDVEGEEVHDPRELLTARRALVRDQVTAKTRLATAINPLVREQICRRIDDIGTDIKALDEVIAQIAKQRGTLEERIRRLMTIPGIGRLTATTMLIDMPELGHLDSKKITALAGLAPMTQQSGKWQGKERVTGGRSSIRRAIYMPTLVAIRFNRDLHDKNQQLVKAGKAKKVAITAVMRRMLVLANTLLRDARDWQPERP

SEQ ID NO: 462491 - protein, 338 aa, unidentified
MKLYAGVDLHSNNNYLGIIDQKDKRVYKKKLLNELPAVLEELEPYREELEGVVVESTFNWYWLVDGLMENGYKVHLANPCAIKQYDGLKHSDDTKESFHLAHLLKLGILPEGYIYPKEERPVRDLLRKRSLLVRQKTAHILSFQNLVSRTIGTRMDGDEVIKLCEEDVERIFGEKHLVLSGKANIAVIRFLLEKIKEIEKAVLKVARLKGEYKKLLTVPGIGKILALTIMYETGDTERFPGVGNYASYCRCVRSTRLSNGKQKGKGNRKNGNKYLSWAYVEAANFAVWSYPYIKKYYQKKMSKTNKIVAIKTIAHKLARASYYIMKDQEVFIPRKAFR

SEQ ID NO: 462492 - protein, 348 aa, unidentified
MKHYAGLDVSIKETSVCIVDESGKLCRERKVASHPEDLVAILSDPAFSIERVGVEAGPLSQWLFEGLAKAGLPVFCIETRHTKAFLDALQQNKSDRNDARGIAHMMRVGLFKDVHVKTLTSQKRRALLTARSLLQEKAIDLENEMRGLLRNFGLKVGHASGGTFERRILELVEHDVELAEIMEPLLAGRRKLREGLAKLEKRVLAEAKQDEICRRLMTVPGVGPIVSLAYVSTIDIPSRFRHSRSVGAILGLTPVLKQSGEMSRVGHVSLRGDAMMRRLLYEAAQSMMTRVVKWCWLKAWAMNIAKRHGSKKAKVALARRLAVVMHRMWVDGSEFRWTKEENTPTAAA

SEQ ID NO: 462493 - protein, 333 aa, unidentified
MNYAGIDVSHKELVIVVSVQGKAHKAKTFENTASGHKAIIQLLSKLKGESRACIEATGVYHFDLAVALSRAEGIDVMVINPKASHNFAKVLMKRSKTDAVDAEILAVYCERMPFEAWQRPTDERIALRALARRIAALTKLKTQTKNQLHALKATEETPVLVLEYTEELINVVDKQIQAHRDSARQLIQQHDELAEAFALITGIKGIAVASAVQMLGELMILPKDMSAKQWVAYAGLDPRQFESGSSVTKKPRISKAGNKFVRRALYMTALVATCHEPHIKGYYTHRIQDNGLKKIQAVCAVMRKLLHAIHGMLKAKKEFDGARFYTFPVEAKS

SEQ ID NO: 462494 - protein, 408 aa, unidentified
MSYKLAGIDVHKKVVMVVVIDRHNADAKPERRRFLTMPTELQQLSLWLQDRGVEEVVMESTAQYWRSVWMELEPHMRLHLAQAYSNRAPRGRKHDFKDAERLVRRLIAKELILSFVPDEEQRIWRNLSRMRLQLVRDRVRLHGQIECLLEEMRIKLSVVVADLFGASGLRILHAIAQGQTDAENLAKLGDERLRCPRERLIEAVTGRSHPTHRQMLALQLERLRLLEEQLDSLNTLLAQAMKSHQQTVIRLAQVPGLGIDSAQQVIAEVGASAASFRSAAEFTSWVGTCPGKEESAEENRSSRSAKGNKYMRRLLNQAAHAAARSKGTHFQAVFRRLLPRLGYQSAIWAIAHRICRVVWKILHEGVDYVEYGVGAEPQALMNRAKYLARQLRKFGYDLRITNTNPTTA

SEQ ID NO: 462495 - protein, 342 aa, unidentified
MHVTTIGLDIAKNVFQVHGIDAAEKVVVRKQLRRSQVMAFFEALAPCLVGMEACATAHYWARELTKFGHEVRLMPAKDVKAYVKRNKNDAADAEAICEAVRRPSMRFVRIKSAEQQGQLMQHRTRDLLMRQRTQVINALRAHLAELGVTAAQGREGLKELLAVIADERDERLPIDARASLIVLAAQLQALQTLIGSMEKRIIAQHRANEASKRLESIPGIGIVGATAIAASLTDPKAFRSGRDFAAWIGLVPRQDSTGGKQKLGPISKQGDRYLRRILVVGAHAVLRRAKQSPEKYPWLTQLLARRPFKVVAIALANKMARMAWALLAKGGTYRAPALAAAA

SEQ ID NO: 462496 - protein, 320 aa, unidentified
MNQPSSTTSKNTNEIQYIGIDVCKARLDIHGIEGLDYVANSPEGHKKILRKLKPKLHQIALEATGGYEDRFIFQLHSKAIKVSRIEASRVRDYAKSIGRLAKNDIIDARSITEYAQHVKPAALVPPSAEQSQLKALCSVRQQLVDHCSNLTKQLQQTYHAVAVKHLEKTIKDLAKQIGKIEKEIKDLLEKDEFKTKAQRLMQIRGVGLVGASGALGYMPEMGTISATKATALVGVAPMQNQSGTKEKQRRIKGGRAKLRRIIYMNAICCIRHNSQFKALYKRLRQAGKPVKVAVVAVMRKLVILMNRLLSDTNFNLAEEK

SEQ ID NO: 462497 - protein, 402 aa, unidentified
MNCVGIDVSKGKSMIAVMRPFGEVVVSPFEVRHTANELSELAGLLKSLDGETRVVMESTGNYHTPVAWLLHDAGIYVSVVNAMLVHDYGNNSLRRAKTDKKDAVKLANYGLDHWLTLPRYIPEEDTRLMLKICYRQYQQYSKVQTMLKNNLISLLDTTFPDANRLFTSPPRADGSEKWVDFVATFWHCECVCGRSEKAFTTQYQKWCRKHGYNFSEDKALDIYASACRHFGVIPKTDTAKLLVEQAISQLQTTSSALAALKQEMQSLAASLPEYPVVMGMFGVGPTLGPQLLAEIGDVRRFHSKKALVAFAGIDAPPYQSGQIDVRSRSISKRGSASLRRTLFLVMSVILQCAPIDEPVYQFMDKKRSEGKPYRVYMMASANKFLRIYYASVKAYLESLEHD

SEQ ID NO: 462498 - protein, 357 aa, unidentified
MTLQKSKGGLRMQYYTERHRHTCGVDLHGRNLYLCVLDPDRKIVLHRRVDCDEEKVLRALAPYREDLVVGVECMFKWYWLADICDEHGIPFALGHALEMKAVHGRKSGNDRLDAERIARLLGSGMFPVGYVYPKKMRSSRDVMRRRSYLVNQRSSLITHIQITSLQYNLPELGKISKPKNREGIIEQFQDPAVRASVEADMAVIDILDVVIARLERVIIRAARGHDPVAFTLLKSVHGIGDIIGLTLLYEIHDINRFDSLGGYLSYCRLIKCTKTSDGKPKGTGKRKQGNQHLKWAFSEAAALFLRANPEGQKLHSRLLKKHCKAKALGILAAKLARSVYFMLHRNTPFDMERFVRA

SEQ ID NO: 462499 - protein, 362 aa, unidentified
MKKSIRERESEWKQRPDRTVGVDLGDRFSHYCVLNGEGEVLEEGRVRTSEEAFRRHWEAEPRQRIVMETGTHSPWISRLLRGFGHQVIVANARKVRAISENESKNDRQDAEMLARLGYCNPRLLKPIQHRSAERQRDLNLIRARDTLVRARTMLINSMRGLVKSAGGRLPPASSESFAARVSAAVPAELGTATHPLLHQIAGLTVEIRGLDQAIEKLAERYPEIRILRTAPGVGPVIAAAYVLTLDGVDAVEHSRSVGAFLGLRPKQSQSGDSDPEHNISKTGNIYLRRLLVQAAQYILGRFGPDSALRRWGLKLAQGGKRTKKRAVVAVARKLAVLLHHLWRTGQHYQPFPEVAAAAGSAA

SEQ ID NO: 462500 - protein, 347 aa, unidentified
MTVYIGVDFHARKQTASYLTTEDGEIQQVELEHEKDIVRAFYDQFRGQKVIVGFESSGYAAWFEELLEELEYETWVGHAQAIRQFARRRQKNDRRDADLILELMVAGDFPRLHRYSREGRETLQQLRYRQRLVKMRTMVINSLRFMVASRGVSLRGTLQSRPGQARLMQVALPGPLGQQRDELLRLLVEVQQKVETVEVWLKQKAEADSRVQRLRTHPGIGLLTGLGLVHTLESIERFSHSRKVTAYVGLDPVEDSSGERRRMGSISKQGSRLLRLLLVEAGQVAARRDPELGQVYRRVTLRRGHATAKVAVARRLLVRAFIMLRDEIDYAEFCRRGVAARSSRGSA

SEQ ID NO: 462501 - protein, 387 aa, unidentified
MTSVDDLSRSVAVFEQNTCLTAVVEMSATSWLVAGMIPGLDRQPLKKLGPDPEALLSLLERWRAEAVKTGQTISRIVLAYEAGRDGFWLARWLQARGVEARVIHSTSVAVSREHRRAKTDRLDTAMLMRVFLGWLRGERGHCGMVAIPTLEEEDAKRPSRERESLVSERTRITNRMKSTLARLGIRGFKPELRKAPQRLATLQTPEGSAVPANTLDELRRDMARLAVVRGQIEEIEETRLERLEQAPREGANAMVRLLARIVGVGVETADMLVREVLSRNLRDRRAVARYAGLTGSPDESGSTRREKGLAKAGNARVRRGLIQLAWRFLLFQKDSALVQWYQARTEGAKGARKTTMIVALARKLLIELWRMVTTGTVPKGVVLRSAA

SEQ ID NO: 462502 - protein, 355 aa, unidentified
MPVFSQRKQREAAARPAPVSTPDLFIPDNAPAVWDLPALGIDVAKATFRACLLRPGAQRSVESDFANTPEGFAALTRWLEEHGAPRTRAALEATGHYSLALLRYLHGGGHAVSLLNPRWIKDYAGSEGRRNKTDAVDARLIARYVHTHVTRLWQPRSQAQEALQALSRRREEALRALTSEKLRLQSAPPQTACFIKTSIAHYERQLRELAAAVEALLKKDEGLRHHCALLESIPGIGRTTAILLLAELPDLECFERVRDAAAWAGLTPALCESGTSVRKRSRMNKQGNGRLRKALYMPALVLLRSKASHALSALRERLRRAGKAEMVIIGALMRKLFQTACGVLKHGQRFDPAFS

SEQ ID NO: 462503 - protein, 316 aa, unidentified
MVKSIEQYIGIDVSKRKLDAYMHPKGSHASFPNTERGYEQLLLWLSPNTIALAVAEATGGLELSVLARLHEAGHKVARVNPRWIKDFIRSCGRAAKTDKLDALQIALYGCRMQPEAYTPLDADGEALKALTARHRQLVDEITMENNRLKQSRHHWVTQLHKETIRFLEYQLREVDTMLVAMTDANEECCRKKEIITNVPGVGEVTAHMLIADLPELGKLTGKKIAALIGVAPFNRDSGTMRGYRSIFGGREAVRKAMYMTALGAATRNNPLLKTFYQKLLAAGKKKKVALVAVMRKLIVILNAMIKNNTAWQQKIA

SEQ ID NO: 462504 - protein, 342 aa, unidentified
MSIVGGLDMHRKQITFDYVDTMTGALCRGMIMPADRLTLREWLGRFADYGGSVRLVVEGCTGWRYVVEECRRAGIDIHVAEPADTASARGPKRHAKTDKLDAKHLRELLVQGRIPESWIPPEQVLEMRAKVRLYKDLRDERTDWIQRIRATLYHQGVPALPGGVLAAGNRAALEAGAGLSPAGAQAVTVAVRQIDRLDTEIDALLAEIRSFAAIQPGCKALQRQYGIGKLTAVIIWAELGDTRRFSASRHAVRHTGPDISVYSSDGKRTRGHLARQGPPLLRWALFEAAKSAAKRTSPDHAYYLQVAERAGANRATLSVARKLARRGHHTLRELGDQAFAPV

SEQ ID NO: 462505 - protein, 355 aa, unidentified
MSSEKYIGLDVHQATISVAVMDSQGKVVMESILETKACTLLEFFAGLRGSLLVTFEEGTWAAWLYDLLKPHVTEVLVCNPRKIPLLKQGNKSDKIDARKLAERLRLHDLKPVYHGETGVRMLRELARSYLTVVKDLSRVMNRLKALYRSWAIPCAGRDVYYTRHRSQWLEKIPEAGTRRRAEQLYQQLDMLQHLRQQARRELLAESRKHAITAKLRQIPALGPIRSALAVALIQTPHRFRSKRQLWAYSGLGLETRDSGEYHYVHGQVRRRKKQPTIRGLNKDYNHDLKSLFKGAATRASVQPGPFQEFYQRSLGKGIKPTMVRLTLARKIAAITLTLWKKGEDFDIDKLNSQAA

SEQ ID NO: 462506 - protein, 353 aa, unidentified
MRIIGCDLHARQQSLAMLHVETGEIEERTLEHEGEAVREFYAGLPGPVRVGIEATGSMQWFLELMDELGVECVVGHPAKIRACEPRKQKHDRREALLLMKLLAEDRFPAIWMPSVEQRDVRALLLHRHQWVRIRVRLQNALQSIALSHAIRRGAGLWSHGGQQTLAELVLPPHAGARRSELMRLYQQLQREIEMLDKEVARTAEERPQARLLMTHPGVGPITGLATEVFLGDPARFTDGKAVASYVGMIPSEFSSGGKQPSGGLTKQGNPLLRMLWCEAVGHAVRKDAELNRFYRRKLAQKGLGKAKVAAARKLGVRLWIMLREQIDYEEFCRRGRQRGEAHAEMPGREHGPA

SEQ ID NO: 462507 - protein, 321 aa, unidentified
MHKFHLGIDVAKAKLDCTLRLPTGKYRNKVIENNQQGFKTLIDWLAKHEATVVKVCMEATGVYWEAAAEYLAAQGMSVSVVNPAQIKAFGASHMVRTKTDRVDARLIAEFCFERSPEPWQAPLPSEQALRAMVLRLDALQAMRTQESNRLAVARDAVKLDISSHIAWLDNKIEALVKTIRDHMDNDPHLKDKKMLLDSIPGLGERTIATLLAFYANPERFAHARQAVAFAGHDPRHHESGSSVKGKPRMSKIGHAFLRKALYMPAMVTLYKTDWGKSFRNRLAATGKPPKLIIGAMMRKLIHVVFGVLKSRKNFDPALHSA

SEQ ID NO: 462508 - protein, 607 aa, unidentified
MSTIASLDRIGVGIDTARYGHRVSFLRPDRKPAAKPLTVMENRAGYQALQDRLNQLHEQHPTAYFHVRIDAAGQYAVNLELFLRGLKLPMTISVGEPKRNKDYQKAHFPKRTTDDTESQAMARFAVIELPNATPAPSTPMILLREVAGRLQSKVKQTTQAINRLHNLLARVFPELATLTEDISVGWVLKLLDKYPTAERIAQAQIASLEKIPYLSVEQAHAVHQAAKQSVASLRGELAEALVRDLVNQLRLCQKAEQHLHQLLLEAFADLPASPHLQVLTITGIGEATAAALVAKIVDINRFATPNHLVSYFGVFPEESSSGVDKHGKPLPPGTLIMSPKGNDLVRFYLWNAARTAIQHNPAIRALYRRLRAKGKRGDVAFGHCMRKLLHLVYAVWKTDRPFDKEHFPWEGSSDTQPSATTPPSADAGTTPSANEEAVGHKRDLPAEEVVTTADSTLEPASPAVKPASQSAAPRPKVDFACMREHVTIEQVLQHLGYYASLRGRGQQRRGPCPVYSQPTAPERTFSVHLGKNAFQCFHAECAVKGNVLDLWAAIHRLPLYEAALDLAETFQVPRNREEEPVKGTSSPRTATAKTSAPAAATATDGAK

SEQ ID NO: 462509 - protein, 409 aa, unidentified
MLKIIYPNCCGIDVHKTFVVAVIAITDKQGFTSYHRKRFSTFTNGLVQLRDWLEYYSCFDVCMESTGKYWIPVFNILEKSCKICSAHPKYVKAIRGKKTDKKDAQWIADLFKHDLVASSFIPPLKIRQLRAPFRYRMKLTQLQVSEKNRYQNCLTWSNLQIVSVVSDVFKKSAQAIIQSILDNPEDKSNIEQLVHKRMKNKVQDLEITIEGDVTPEQAEKIRIIKEHYDALAVSKEDLETMIRKLGQEYQEQVKLIQTVPGFKEELSALRILSEIGADMTVFSTAGKLCAWGGLVPANNESAGKKFSTRISKGGHYLKPFLVQIANAVVKSEKNPELRNKYLKLKKRRGHRKAIIAICRRLLVAIYHVLLKQESYNPRLQGLTEIRNPDKTMSGQDAVRFAQQHGFNVL

SEQ ID NO: 462510 - protein, 409 aa, unidentified
MRLFVGLDVSSFDIKACILNGEGKKLDSFSVNNDLPGATALKERVLQCIANQEIETFKIGLESTSVYSFHPSMFLHYDEDLQRFGAKVFLMNPKQIANFKKSYSDMDKTDEIDAFVIADYLRFGRNQMSIVKESQYVALQQLTRSRYQLVRMLTKEKQHFLQHLSYKCNTFSQEVDSSIFGNAMMELFLEKFSLEELADMPLEELAEFLQTKGKNRFGDPKCVASTIQRAVRSSYRLDKVVEDSIDVLLGTSIAVIRTYQQQIKELEKSIKRIMAGLTQTLESIPGIGPVFAAGIIAEIGQIERFDDETKVAKYAGLYWRTHQSGRFTAENTSLSRNGNHYLRYYLVEAANSVRRHVSDYQEYYVKKYNEVPKHQHKRALVLTARKLVRLVDALLRSHQLFTPERCVKV

SEQ ID NO: 462511 - protein, 428 aa, unidentified
MSNSDISRVKRFRQFKNEIRGSDRYLIVGLDIGKSMHHAFLGTATGKTVKRGLRVENSASGFEHLLTMLQFYMDRDGFTNVVFGLEPTSVYHKPLAEFLITQDHLVVYVTNEAIKKNRALIDGRWDKNDTKDAANAADLVSQGKCQFYDFPDIQLRDLRALLSLRRRLKKQLHSSRVRIRNNLVAQYFPELDKCWTQAQQENLAIVRWCLSPHKISELSFEDFFKIVTTGNKGLRQYNRLIKIWEIAPYSIGCQSGIAMEIEARILVENIKSIQTHIATVEETIEDICAGFQEYQYLLSIPGFGPYVSAVTLAAIGTAQRFDNTHQVLRFAGFDLNANRSGKKSQSAVPVISKRGKAALRYAVYQAALIASSLNTQFRGYYHHLLQGREREKGIRTKMRVKLAAKLLVIAWTLMKKKQPFDPSYLNAQ

SEQ ID NO: 462512 - protein, 309 aa, unidentified
MTAVGIDVGKRALDVAIDGAAGVVKFPNTAAGIRRLVRCLSGIADPGVLVEATGGYEEALLDACCDAGLWVARVNPRQARDFARATGELAKTDAIDARLLAIMMRLFHDRLRRYEAPAPWQRELRDWLRRRGQVVGVLQTQRQQAAMAASEVKHLMSRTIAALRRELQAIDGAIKALLKAHVTPALSSSKGLGPIFQATTLSLLPELGSLDRKQIAKLVGVAPMNRDSGQTQGKRRIRGGRAPVRVALYMATLSAVRWDPLMKAHYQQLRARGKVAKVALVACMRKLLTIVNARRRDELRGMLAAPSTA

SEQ ID NO: 462513 - protein, 306 aa, unidentified
MRRSEPEGCEEEEEAFVATYDDGGVDALISRLLQGPTVLVVLEATGGFERTVVGALAAAGLAVAVVNPRQVRDFARATGKLAKTDRIDASILARFAEAVRPAPKPLPDREIRALQAMVARRRQLLGMLAAENNRLYSAAKPVARRIKAHIGWLEKELSRTERDLEAAIESSTVLGENEELLRSVPGVGPVLARTLLAGVPELGTLTHKRLAALVGVAPLNRDSGTLRGHRSVWGGRAEVRAALYMGALLLVAARRNPVVREFYERLLAGGKPKKVALVACMRKLLSILNAILKYRTPWRSPHYLSP

SEQ ID NO: 462514 - protein, 354 aa, unidentified
MLIIGCDYHPSFQQIAFVDTETGECGERRLQHREEAEKFYRDLAATGMKVRVGMEASGHARWFERLLGELNVELWIGDATEIARKRERKQKTDRQDAQHILRLLLKDDFPQIWVPSWENRDLRQLLWHRHRMVQARTRIMNQLQAVALNEGLRCKKRLWREAGREQLESFRLAPWASRRRQDLLELLDRLNPTIAELSQAIEQEAEKFPEARWLMTHPGVGALTALAFVLIIGRTDRFKCGKQIASYLGLVPLEDSSGDRRRLGHITKQGSSMLRFLLVEAAQVTVRSLPEWRSKYFHLMMRRGRKIAKVAMARRLAVCLYWMWRKGWDYEQVKKFGSHAGQLGTGRGGQYNTE

SEQ ID NO: 462515 - protein, 405 aa, unidentified
MTCGKPISTKYFLGELPMIYAGIDVSKYKHDCFILSDFGEVVKDVFSFANTADGFAQLQQVLDELGNDNVRIGFESTGHYAINLKLFLEKNGFEFTEINPYLIKKWLEGDSLRQTYTDKICAKAIAGYLCEKEFYPHMTDFYDTFALKQLTRFRSGLVTTRTRYLIQLTNILDCVFPEFKPFFGNRFSVTALYILAHYQSAEKIANMNSQSYEKLRRISRGHFSMHKFVELKALAKNTVGVFNDYYRFQLETVLELFGQIDSKISDVETEIIKAIREINPPTASIKGVGEISAAVIVSEYGDFSRFSCPNKMLAFAGLEPGRYQSGTLAYDGKMVKRGSPHLRCTLMNCASYIHIHNEVFAVYYRKKRDEGKPHRVALNHVAKKLVRIIFALETKGVMFDPELLR

SEQ ID NO: 462516 - protein, 400 aa, unidentified
MPDGIRWVGLDVHARESTLAVFDQASGEVTTKRVVGRPHELLAWLRAVERPARMVYEAGPTGYGLARRARAEGLELGVCAPSKTERAAADRIKTDKRDAIRLARLLAAGELVLVTIPSVEREQLRDLVRCREDIRTDLTRARHRIGNFLLRREIYWEGGEAWTRKHRSWLTSVRFADHASRATLADYLHAHDVLIARRDQVEADLGALALTAPCAHTVARLRCMRGIDTLTALGLCSEIGEFERFDHPDQLSAYLGIVPSEHTTGAQRRLGSITKAGSTHARRLLVEAAYHYRRGPVVGEALERRQRGQAPEVINISWRAQRRLNARWRQLKDARKKPNGIIAVAIARELAAFCWEIATWASHPDRIAPTSLPAGDTLTQATPLPHKHTQATRKRLTNSR

SEQ ID NO: 462517 - protein, 461 aa, unidentified
MAKRPDPASRRPPRPATPKPQPALTVKNPRAAGIDVHDSAHWVAVPPDCDPQPVRCFGAFTADLEALADWLTACGVDTVAMESTGVSWIPLFELLERRGFRVFLVDARAVAKVEGRPKTDIHDCQWIQRLHAYGLLEKAFRPADDIVVLRGFVRQRQNLIAYASQHIQHMQKALVEMNLKLTLVVSDIAGKAGMAIIKAILAGQRDPIELAKLRHERCKHTEEEIAKALVGNWREEHLLALKQAVELYEFYHCKIAECDRAIDDYLKRLPNRAGENPLESQPRKSRKKDNEPMFDARKRLYEMLGVDLTAIDGISVGVALIIASAIGHDVSAFRNEKAFSNWLGVAPNHKITGGKIKSRKTRPGANRIATALRMAGASLLRTPTALGAFGRRMRSRVGSPKAITAVAHKLAKLVYRMLKHGEEYVKQGAEEYEALYRERRIAALRRNASALGFRLEAQPAK

SEQ ID NO: 462518 - protein, 465 aa, unidentified
MTKLDAARKKRKKGRQAIEASRPMVAGIDIGAEEHFVCGPARGDREREVRAFRATTAGLREMAAWLLEQGVTSVAMESTYLYWIPVYEVLEPAGLEVVLVNARMLHNVPGRKTDVQDCQWLQRLHSCGLLRGSFRPGDAICRLRALQRQRANLIEQRSRFVQWMQKALDQMNVRVHRAVSDLTGQTGMAIVRAIVAGERDPLRLAALRERGCKNSVETIAEHLAGNWREEHLFNLSMSVKLFDEIERAVAEYDRRLLREVEALQPEDRRHQAVPAHPNPGKERLIQKRGDQALREALWRFSGVDLTTIDGLSAQSAQVILTEIGTDLNAFPSENHFVSWLRLCPRIATSGGKPLKKRRNGMGASRVAATLRMAAVSVQRSKTALGAAYRRTARKKSAPVAVFSTARRLAQYVYRLLRHGQAYTDIGEALYEARFRQRQLHALTETAKSLGFNLIAAVEGTPSTAR

SEQ ID NO: 462519 - protein, 346 aa, unidentified
MEYIALDVHKRYTWARVENGEGERLYESRLTHSRGTIENFVKRWPGGSPVALETVGNWYWVVDEIEGGGGQPQLVNARLAKLMLGSVNKSDKLDARGMNRLQRAGTLPTVWIPPAEVRDARELPRTRMVLSHQRTQLKNRIHATLAKYGLVVEGVSDAFGKQGRKILQGLMPELPLHTREGLRVVLKELDHVEVNLKAMERRMGEVFAPCPETTWLKTAPGVGQMLSVVIWTEIGTIERFSRAEQLASYAGTVARENSSGGKFRYGRVRRDVNMYLKWAFVEAANSAVLNRQRCGYHHISRLYERVKARRGHGKAIVAVARHLAEASFWMLKKGEPYREPKLSTQE

SEQ ID NO: 462520 - protein, 358 aa, unidentified
MDKNSTLFIGLDLGDRWSHLTILDLEGQVVEESRVPTTGGALQKKFSALPAARIAMEVGTHSRWVSQALRDLGHEVLVANARKLRVIFDNPRKGDRADSHILARLARLDPMLLSPIEHRSPQAQADLDVLRSRDALVRSRTLLINHVRGVVKSAGGRIPSSSARTFPSRAASSLPEPLRPALTPILDTVSALNLEIRKYDHEIEDLGTSKYPDCQRLRQIQGVGPITALAFVLTLENPRRFAKSREVGPALGLVPRRDQSGGQDPQLHITKTGNAFLRRLVVGSAQYILGPFGPDCDLRRWGLRLANHGGKNAKKRAVVAVARKLAIVMHRLWKTGDDYNPEHSAQAVTLRLAMAQPA

SEQ ID NO: 462521 - protein, 341 aa, unidentified
MTAASPTLFVGIDIAAKTLAAAWLRPGEAVSRPITLTQSLQGFTTLHERLGQTGCTPTETHVVMEATGSYWIALATTLVHMGYRVSVINPAQAHHFAKALLKRAKTDAIDAQTLAQLAALLQPALWTPPPAVYYEVQQRLAQRDALLDVQRQLMNQLHALLFAPLVVASVKARMEELIETLGQQIRALDAEVSAALAADATWAAAAARLQSIKGVGLITAAWLLVTTLNFTICPTPEAAVAYAGLAPNPYESGTSVRGRRRIGHTGNGRMRTALYLATLSAAQHNPVIKAFYERMRAAGKPPKVARCAAARKLLHIAWAVVRNEEDFDPAYAQRQMQPVAA

SEQ ID NO: 462522 - protein, 393 aa, unidentified
MRRPVPPQSQGKLRCIKTHSRCKEETGMAHGSKRVVAMAGFERVIGLDLSDKKARFAELDPDPTSEEILAEGTVPLTEIGLRKRLGERARCRIALEVGAQSPWVSRLLAGFGHEVLVANPRQIALIFRNHRKTDRLDAENLARLARVDRRLLRPIVHRSAGTHADLVQIRARDLFVRQRTAAINFVRGELKADGVRVAPCSAETFARKAWVVLPDSLRPALGPALLEIARLTQRIQRYTRTVERLATEKYPETGALRQVKGVGALTALAYVLTIEDASRFRRSRAVGAYLGLTPRLDHSGQQAPELGLSKAGDPHLRRLLVQSAHYILGPFGPDCDLRRWGMGLAGAGSKGRKNRAVAAVARKLAVLLHRLWVSAEPYDPLYQVHLSEPEAAA

SEQ ID NO: 462523 - protein, 313 aa, unidentified
MYKYIGIDVSKATLDLYDGEKSYKVSNDTTGFKEVQKLSTKKEELCLIFEPTGIYSHALIEYCYKYSIKAIIVGSKEARDYARSIKQRSKTDKIDAKVLYRYHTQVVPKSITVPSIDTHMRKVTQRRNVYEKYQKIIGQLNNLIEASHKADKSLIASLEKQIISLEKSSQKVLDEIETLLLEKKEHQQAFTHLQTIPGIAKKSALVILMEFLRYPEAKSNEMVALMGLDPVLKESGMFRGKSRISKQGGKYFREKLYMSTVVAIQHNDRLKSFYERLVQNGKPKKLALIAAMRKLLRIAFAIVKNKEPYLALV

SEQ ID NO: 462524 - protein, 341 aa, unidentified
MEHIAIDLGGRESQICIRNDRGEILAEKRCVTSELSRFLATRPNGARVLVESSAEAFQVADWAQEHGHQACVVPSILVRALGVGERGLKNDQRDARKLSEMDCRMEVPGVHIPSAVSRDHQAEVTARQALVEARTKLVNTVRSFLRTKALPRVKGSPDSLAKNMRLALQSMGVSLPNHVERLLCTIEGLNESIDEADKALKQIAEQDPVCKLLQTMPGVGPVTAVCFATAIDDVQRFESANKVTSYLGLTPGENTTGFKTKRTGMTKAGSSRVRWTLTQAAWSMTRCRPNDPIVHWFKQVAGRRGKKVAITALSRKMAGILYAMWRDQKPYNPSKAVQEQP

SEQ ID NO: 462525 - protein, 386 aa, unidentified
MQTVADRPEAPTAIRTDLGAIFVSLELSRSTWLITSLSPGGGEKMSKQVVRGGDVAELLERFARLREKARARTGKVFPFVVIQEAGLDGFWIDRALQNEGIESHVVDPASIATSRRRRRAKTDGIDGEALVRALLAYKRGEPRVCAMVKAPTPEEEDRRRLCRERKVLIVERVRHVNRVKGLLFSQGISGYEPLRRDRRRRLDTLQTGDGRRLPDHLKAQVCRELDRLELLLEQIKAVEAERDVLLAAQRVAAPAAMLLDIKGIGPEFAAILWSEGLFRHFDNRRQVASYAGLAPTPWQSGSVDREQGVSKAGNPRLRTTLIQLAWLWLRHQPQSALALWFEERVRRNGGRLKKPTIVALARKLLVALWKYVTAGVVIEGAVMKSA

SEQ ID NO: 462526 - protein, 389 aa, unidentified
METTEQFFAAVDLHGDNGYYAVCDQHGRRIWGKRLPNSLPQVLEALEPYRDRLQKPIAIESTFNWYWLADGLMDRGYPVVLVNPARVEQYSGLKHTGDDTDAFHLADLQRLGLLPTAYLYPKELRPVRDLLRRRMLLVHQRTSHLLSFKSLLARQEAGRISASQLQRLGPDDLDALFASEPRAARMGRMNLEVIKFLSAQIQAIEADVLAICRPQEDWRRLQTLPGVGRILAMVIWLESGPLSRFASAGHFTSYCRGAKAARFSNGKKKAEGNTRNGNRYLSWAFIEAAAFAIRYDEAARRWYQRKLTRCGGLSVLARKALAAKLAKAAWHVMAKGEAFETEKLFGSRACEDRPANQPGGWPPARSVSGKAGRSSKQFAVESVGSDSVH

SEQ ID NO: 462527 - protein, 585 aa, unidentified
MGKHPIVVVHRATCWLHCSSCTALKASARSKSTDEVGRQLGEKTVKATTAGHATAIMWAREQFGLELIWGIEDCRNMSARLERDLLAAGQQVVRVPTKLMAQTRKSARSRGKSDPIDALAVARAVMRETDLPLATHDETSRELKLLTDRRDVLVAQRTSAINRLRWLVHELDPERAPAARSLDAAKHQQALRTWLDTQPGLVAELARAELTDIIRLTGEINTLAQRISARVHQVAPALLEIPGCAELTAAKIVGEAAGVTRFKSEAAFACHAAVAPIPVWSGNTAGQMRLSRSGNRQLNAALHRIALTQIRMTDSRGQAYYQRLQDAGKTKRAALRCLKRRLARTVFQALRTVHQPSSEHTQPAAACHRSYCSSHLGEPPRLTDMTQKTRIQPLPPKRAGLLIRALYRIAKRRFGEVPEPFTVTAHHRRLLIANVVHEALLQRASRKLPPSVRELAVFWTARSIGCSWCVDFGAMLQRLDGLDVDRLTDIDNYATSSKFSDDERAAIAYAEAMTADPHSVTDEQVADLRARFGEAGVIELTYQIGVENMRARMNSALGITEQGFNSGDACRVPWAAPDVPSAESR

SEQ ID NO: 462528 - protein, 358 aa, unidentified
MKKGNTEGVAQTVGLDVGDRFTFFCVLEQDSGEMVEEGRVRTTREALRRRFGGQPRMRIALEVGPQSPWMSRLLEDLGHEVIVANARRVALIHGNARKHDQVDAESLARLARVDPKLLSGIVHSSEIVQVDRAVLRSRDVLVRSRAGLINHVRGTAKAMGHPLPQCSAPSFAKRVVEEIPSPLSPALAPVLEQIATLTDSIRAYDRELEAMAAERYPETELLAQVDGVGLLTALGFVLKLGTPSRLRRNRMAGPYLGLVPRRDQSGARDPQLRITKTGDAYVRRLLVGSAHYILGPFGPDCDLRRYGERMTQRGGKNAKKRAVVAVARKLAVLLLHLWRNAEVYDPLYSERANKSKAA

SEQ ID NO: 462529 - protein, 405 aa, unidentified
MTIIDRTKYLFIGVDLHKHKHVAVLTNCFGDKIETFKIENAPNKFPDFLDKLAKYTQGQDVIFGLEDVNFYGRTFAKFLIQQGFLVKEVNASYTKKKRQQGTNRNKTDKIDALAISKNLIMEFNELPFANPQDIYWTIKQTLNSRNNYMNMATNFKVSLHNLLVHHYPSYKSFFKDLNSKTSRGFFYNFPSPDLLKDVDEQDLLKVLRQYNKSAPLNKAEEIIKEVKESGYWDNGYQQERNDLIRSYIDFVNQIEDEVEKLKEKLDVLIQETNYPIKTISGIDTILAATLIANIGDINRFPNSAKLAKIAGIAPVENSSGQKDNKYANKLGNRELNKAFYSLALTQIRKDTNPVMYDYYQKKIKEGRKKKQAMVYVERRLVNIVYRIMKDKVPYVQPEPKEEESA

SEQ ID NO: 462530 - protein, 335 aa, unidentified
MEFEFFVGTDVSKNELDFAVRQGKQLLFHQEIINEPAAIKAFLKELSKIPGFTLSNTVFCMEHTGIYNNHLLVCLHTKTANICLEAATHIKKSLGNIRGKNDKIDAIRIAEYAYDKREKLRLWAPKREIVQQLSHLAGTRSRLIKIKKILNTPLKEASPFVTKGIAKQNLKACIGSIKAIEADLKKVDKDINKIISLDPELKRLFKLVTSVCSIGAVIATQVLISTNEFKDIVEAKQFACMGGMAPFTEESGKYKGKGRVSHMANKKIKTLFHMAALVAIQHDPELKLFFERKVNQDKKNKMSVLNAIRNKLILRIFACVKQNREYEKNYARLVA

SEQ ID NO: 462531 - protein, 338 aa, unidentified
MVYGAIDLHMRASQIRIIDDAGVVQRDQRVPTTRERLTQAFASHGPMRILLETGTESEWVAQVLEAAGHDVIVADPNYAPMYGELSRKVKTDRRDAIALAEANRRGWYRATHRVSAVQRETRQILRSRRLLVQMRSSTVSLLRSLVRQSGYRLSSGTPETVPARVARLALPTSLAATLAPLVRQIAHLTSEVRAIDARVKTRVADDAVVARLQTVPGVGLIVATTFRAFIDTRERFADASQVSAAIGLVPREDSSAERRHRGHITKAGPRELRSLFVQAAWVCWRSPRSATLHAWVERLAARRGKRIAVVALARRLSRILFAIWRDDTTFDVTKLATV

SEQ ID NO: 462532 - protein, 349 aa, unidentified
MIIIGVDFHPEFQQIALVDTDGGEFQEKRLMHREEAEKFYRALAGAGQKVRVGMEASGFSRWFERLLAELPIELWIGDAAEIQRKRERKQKTDRQDAQHILKLMLKDDFPRIWVPSWENRDLRQLLWHRHRMVQARTRIMNQLQAVAINEGLRCKKRLWRAGGRQQLESFPLGPWASRRRSDLLELLDRLSPTIAELSQAIEQEAEKRPEAQRLQTHPGVGALTALAFVLIIGDVGRFQCGKQIASYLGLVPLEKSSGNRRRLGHITKQGSSMLRFLLVEAAQVTARSVPEWRSQYFRLTMRRGRKIAKVAMARRLAIHLYWMWRQGLEYEELVKFGSHAGQPGNPDGV

SEQ ID NO: 462533 - protein, 373 aa, unidentified
MKYSTVYVGMDVHKETFSLCCYTNEKEKAEYPQKVDGHYSKVINYLEAMRFHYGDDATFICGYEAGCLGFTLYHQLTDHNVNCIVMAPTTLLKPSGGKKVKTDKSDAALLARCLAHHDYASVHIPTDQDEQIKDYIRMRCDHKLALKRIKQQILAFCLRHGYRFTETNHHWTQAHLRWLRALKPGGLYQEILGEYLITFDNLTAKIERLDQRIEELASGEGYQEAVKKLTCFLGIQTQTALSVIVEVGDFKRFADAQHFSSYLGLTPGEDSSGPEQNRLAITKAGNRHLRMLLVEAAQCYGRGRIGYKSKALKKRQEGNAPAVIAYADQANERLRRRYYHLVLGKSKRNNVAKTAVARELACFIWGMMTENIA

SEQ ID NO: 462534 - protein, 326 aa, unidentified
MFFIGIDVSKAKLDCSLLLDDASNKRRAKTIANSVTGIADLLTWCIKQQVPIHELHAIMEGTGVYHEQAALALSDAGVTVSIVNPAQVKDFGRSLGVRTKTDGIDSLVLARYGALLKPKPWTPPAQEARILQAMLSRREAIAQDLQRERNRLEKADATDTPSLIRQSIDDSISFLEKQLAKLQQDIDDHINKHSTLKDDRELLLSIPAVGPQVGNHLLSVIHNHNFQSAEQLAAYLGLVPTERQSGTSVHGRPRLSKAGPARIRAVLYMAAIVATRHNPHIKALYQRLQERGKTKMSALGAAMRKLVHLCFGVLKTRKSYQVDYAV

SEQ ID NO: 462535 - protein, 405 aa, unidentified
MKTTAYCGFDWASETHYYVLKNARKEVLSEGTVPHATEGFEAFLESLEQCREGGRVALIVEANRGVPMNALLDVSWLDLYPVNPMKTRKLNELQGSLRQKSDASDCHLLCDYLIANESELSGSYVERDSLIRQMQEWIGMETDLVSNCRQLKQRIMSHLDTFMPDLKRMLPNLDKKVYVRYLFEFDPLTPVDCSEVESFLRRHGCRNAETIEAFAAGHVALRALGEDAEVHRAQADVLRAWAELLWQLQCSLEDCRKRINALFVQLPQAAIYSSLPGLGETLAPRMACLFGSRPSERFACKEQAVAYFGQSPVTEQSGKGLKVGRRRNCHRYARNTCFLWAMAVNKMPNCHWQRTFLDKRRRKGDARPTRYRKLGRKMLGILYRCVIDNVPYDEVKFIQNLHQKA

SEQ ID NO: 462536 - protein, 415 aa, unidentified
MLKIVYPICCGMDVHKTFIIATIAATNERSVTTYQTKRFSTFTKDLRALAEWLKSTGCVDVCMESTGKYWIPVYNILESSCRITLAHPKYVKAIRGKKTDKKDSIWIADLHKHGLVPGSFIPPEEIRQIRDLIRYYFKLVAFSSSEKNRVQNSLTVSNIMLASVVSDTFGKSASAIIDHLLDHPGDRDFDVRRFLHRSMLNKADDIALAIDGLITPPQAKKISLCKLHFEQLKSLKEQVKQAAAELAAPFSGQLQIIASLPGISDFSALAVLSEIGADMSEFHSAKHLCSWAGLAPCNDQSAGKKKSVRISRAGVYLKPLLVQCALAALQDKTFTHYRKRYEQIKRRRGHKRAIIAIARMMLTAIFHCLKNGELFDPSRYDDLVQQTSAKAREFALHKLFEDATRLGYSLVFSGT

SEQ ID NO: 462537 - protein, 432 aa, unidentified
MKFNQSNKQNQRISRISETTLVIGTDIAKHNHVARAFNYRGIEFGKHCLFQNDENGLLNLLAWAESIKQEHGLKDVLLGVEPTGHYWFPPFHFLKQRGVEVVLVNPHHVRKSKELDDNSPTKNDIKDAKVVAKLVIDGRYTQPQLPEGVYADLRVLMNQRDRLCGDLNRVKGRIHNWLDRFFPEYRQVFKDWEGKASLITLHHFPLPQDVVGAGETTIVATWKNNGVQRAVGPKRASLLYQKALKSIGLTEGATAARHELAMYLEQYAMLCRQIEQLMEHVAALVEQIPGATHMMSIPCIGLVTVAGFLAEVGDMSGYDHSQQIVRHAGLSLRENSSGQHKGETTISKRGRCRLRALLYRAALTMVAKNPEFRALHQYFTTRRDNPLKKKQSMIALCIKLIRVLFELGRKQKNYDSSKVLGPHREAQLQAAA

SEQ ID NO: 462538 - protein, 407 aa, unidentified
MELQPLYQRVVGLDVHQAQITACAILEADDGSSRVEHRQFGSFKRDRRALAEWVVEVGAQEVIMESTGIYWKSPYAALEAVGIQAKVVNARHVKSVPGRKTDIGDAQWLATLGRAGLLRGSFIPPARFRDLRLLARQRQKLTSQLSSEKNRLHKVLTDAGIRLGVVVSDLHGKAARAMTKALIAGEPPELVVTYAGNRLQASREAIRDALQGDLNEVNRFILRELVANLEATEAQIERFDRKLLSELKPEAGLLDLLETLPGVDRIGAAMLLVEIGTDMGVFGSAERLASWAALCPGNHESAGKRASGRTRQGNRYLRRLLVEVAHAASRTRSALRHKFDSLLPRRGYKRAIIAIGHKILRIIYRLLERREPYRDSATDYEALHVQRNAPRWLRALIKHGYITPATA

SEQ ID NO: 462539 - protein, 414 aa, unidentified
MEQKLIYLGIDWADDHHDIVITDDSAKTLGQFQIDHTPDGFAQLHANIANYQKSPADVLIAIETNRGLLVHELIRTGYTVYAINPKAVNRYKDRHVLSKAKSDMLDAQALAHLLRTDRHRFKALVPLPEDYRLLDRFCGDLRKLIDEKSRIVNQIISCLKEFYPKALELFSLNSQIFIDFLKAFPDHDTLRACKTKTFLAFIKKHRYPYPGKIEELWETIQSSTLQADTVTARAGKLRLLMLLDQLENLKIHCTHYEQEIQKILDTLPESNSIQSLPGVGDRLAPELVAALGPNGKDTHHRFHSAEEIAKLSGCVPIIKQSGKWEKVSIRHACIRSLRRTFHDWAFTSLTSSTWARAYYDYHKARNQSHFTILRNLGKKWIKILFAVWSKDTTYDEALHIQNLKARNIPWAMAL

SEQ ID NO: 462540 - protein, 373 aa, unidentified
MKKVRFLGLDVHADTIAVAVAEPDGEVRSLGIIPNREESVRKLVKKLGPAEQLQACYEAGPTGYVLYWQLTALGVKCEVVAPSLVPVKAGDRVKTDRRDATKLARSYRAGDLTAVWVPNQEHEALRDLVRAREAAKQDQLRARHRLSKFLLRQGRRVPSGFKVWTQRYQDWVKEYVHFEQPAQEYTLWDYLHEVEHMDDRIRRLDLAIAEAVKLAPPGMQEVIQALQALRGIAQISAVTVVAELGKISRFDRARQLMGYSGAVSSEHSSGKRMQRGQITKTGNAHLRRIAMEAAWAYRHRPAIGPRLRKRQEGLSEEVKEIAWKAQHRLHKRYCNLSAAGKEKQKVVTAIGRELLGFIWAIGVQAERNSKRVA

SEQ ID NO: 462541 - protein, 366 aa, unidentified
MKKSLIYVGLDVHKDSIVVAMAAKRQPAVVVRRMLNDWVQLVKTLDGLGGKDRLRVCYEAGPTGYDLARRLNAAGICCIVVAPSLIPVQPGLKIKTDRRDAKKLATLHEAGQLVEVKIPETETEAMRDLERARDDAKNAERTARQQLDKFLLRHDRRWSQTKWTRLHWAWIERQEFPAEALRRVLADYIRAVKEATARLERLEKDIEELVETWTLAPLVKAFQALRGVRLITAVILAAEIGDYARFGTPRELMAYLGMVPSEDSSGQRRRQGRITRTGNGHVRRILTESAWNYRFYPRPSRAILKRRESLPPQVVAIAEKAEQRLSRRFRYLIQKGKSSPKTVTAVARELAGFVWAIAQEVALKAA

SEQ ID NO: 462542 - protein, 381 aa, unidentified
MTTAATHNEHGNPTEATLFVAFELSEKTWKLGFTTGHGQKPRERTVTARQQERVLDEIAQAKRRLGLPETAPVVSCYEAGREGFWLHRFLQAHGITNQVVDSSSIEVNRRRRRAKSDGLDVRKLLSMLMRYHHGERQVWQVVKVPAVEAEDQRHLHRDLETLKQERASTTTRIQGLLSSQGLRVTSLTKLPEQLDALCLWDGSPIPPGLRRRVLRVYAHYTFLSAQIAEVEAERRALLQTSPEASIDKVRQLMQLKGIGINGAWVLVMEFFGWRAFKNRREVGGLAGFTPTPYQSGESAREQGITKSGNRHVRWMTTELAWSWLRFQPDSALSCWFRERFGGGGKRLRRIGIVAVARKLLIALWRFLETGVLPAGAVLKEG

SEQ ID NO: 462543 - protein, 445 aa, unidentified
MKNLFIGIDFAAKKFDVAVIYAEGLQEQAPAEYNQFENTDEGFKAFVSWVKKNSHKTKAQDWLFCGEDTGDYCRRLCNFLCRKEYDMWLENPKCIKDSGGLRRAKSDKMDARAIAEYAMRNYDRARLYKEPPKILSDLRELFQYRQWLVRDKVANTLRWKIKKENLEKSSATGFVVRKNQETIKHYEKQIKQVDDKIQKLIKSDEKLLATYKILKSVKGIGPVNICCLIVYTENFTKYDYDPRKIACQCGIAPFGQESGTSVHVSPHVHYMANKTIKALLTQAALAAVRFNPLISRYYNRLIDAGKIHPVALNNVKNKLIHIMTAMVKNGTEFDENYEAKRKTRTALNAESSTVSTNGKGIYTPAEQPTDAVSQLPELPIDEAFHEASQLPELPADGASQLPEDSNQDTQMHIDFPQESMATGHAHIPLKGSESCRPIEKSHIPI

SEQ ID NO: 462544 - protein, 449 aa, unidentified
MSSSGKTRRFDERLPQIRSAAAGIDVGGSEIWVDVGSRDPEPVRKFATFTADLHELADWLNHCGIDTVAMESTGVYWIPVCQILESKGIEVVLVNARHAKNVTGRKTDMLDCQWLRTLHSYGLLAASFRPARDIGVLRCYVRHRQMLIEYASSHVQHMQKALTQMNLKLQYVLSDITGATGMRIIRAIVAGERDRNRLAAMRDVRTKADEAAIAKALDGDYRVEHLFALKQSLELYDSYQQQIEACHRQIAEHLQSLESKADPSELKPARIRRKKPRNRPKFDLREEAFRISGVDLTQIDGINETSALGLIAEIGLDMSPWRTEKHFVSWLALCPNNKISGGKLLSRRTLKSANRARTILKMSAQGLLHSQSALGAFCRRMCGRLGIAKGITAVAHKLALLVYRMIKLGRQYIDIGQERYEQKYRDRLLKHLARKANAFGFQLVPSTSN

SEQ ID NO: 462545 - protein, 404 aa, unidentified
MNNVAGVDVSKGKSVVSVLRPFGEVVAKPFSVGHTGSELKELADYLKSLDGETRVVMEHTGRYYEPVARFLHEEGIFVSAVNPKLIKDYGNNTLRKVKTDKADARKIARYGLDNWAELRQHTPMDTIRMQLKTLNRQQGLYSKTKTMMKNNLIALLDQTYPGINALFDSPVREDGSQKWVDFATTFWHVDCVRAMSLTAFTERYRKWCKRHGYNFSQSRAIEIHMEAQDLIAMLPKDILTKTMIRQAIDALNAVSKSLEQLKAEMRTLAAKLPEYPVVMAMRGVGDSLGPQLMAEIGDVTRFTHRGAITAFAGVDPGADQSGTHEAKSNHTSKSGPPELRRALFLVMDCLLKTQPEDDPVYRFMDKKRSEGKPYLVYMTAGANKFLRIYYGRVKEYLASLKNAD

SEQ ID NO: 462546 - protein, 360 aa, unidentified
MSQRTAGSRVVSTSPATTIGLDVGDRWSVFCVLDEMGAVAERGRVRTRAEDVTTAFTAYGPVRIVLEVGTHSPWLSRLLRASGHEVIVANARRVRLIAESDQKDDRTDAEQLARLGRLDPGLLSPIRHRGERAQRDLAVLRARDCLVRSRTALVNHVRGAVKAFGSRLPACSTESFPQKVKDSIPEALVPALAPLLETIADLTQRIRAVERAVVATCERDYPETRLLRQVPGVGPITALAFVLTVEDPVRFTKSREIGPYLGLVPRRRQSGRSAPELRITKAGDRQLRRLLVGCAHYILGPFGPDCDLRRWGLSHSPAGRGARKRTIVAVARRLAVMLHHLWVSGEVYEPLHRATPAPAA

SEQ ID NO: 462547 - protein, 416 aa, unidentified
MSFALPEALFFTGIDWAAETHAICVTDARGKITAEFTIEHSADGIALLVRRLARYGEAGVMPVAIERPDGRLVDLLLEAGHPVVPVSPNAIKTWRDGEVLSGAKSDAGDAAVIAEYLRLRAHRLKAAAPYSDETLALRTAVRARGDLVEMRVAATNQLSALLDAHWPGAKAIFADVESPISLEFLTRYPTPAAAAHLGEKRMAAFLVKHGYSGRRPAAELLARLRAAPAGTSREALAEALRDIVLAAVGVLTALNAAVKSLDRSVAAHLGEHPDGKIFTSLPRSGQVNAAQVLAEWGDCRQAYDGPDSVAALAGVTPVTSQSGKHRDVHFRWACNKRFRAAVTTFADNSRHASPWAAKVYSDARARGKDHPHAVRILARAWIRVIWPCWLNGVPYDPAQHGAAAALTEQSGKQIAA

SEQ ID NO: 462548 - protein, 400 aa, unidentified
MLSIGIDVSKGKSTVCGMKPGGEIVYAPFEVQHTREGMSELVSLLRSSGEEVRAVLKSTGSYHCPVVAALLENGIFVSAVNSLRMKRFCSQSIRKVKTDRIDAMQIALYGLAYWQELQPARLPEDTYRELQLLARQYYQMTSILIKAKVDFNAICDQVLPGMQELMSDHAGRHKLSDFVLQYCHTTHILEMGETRFRKDYCKWAEKKGYRNCERMAVLIFATAQNGIPVLPNAPSTQIVITEAIRVLHTVEASRDAILTQMQAFAKTLPEYSLVREMPCIGDTLAPRLIAEIGDVRRFHSKRALIAYAGIDAPPYQSGKFRANNRHISKRGNRYLRKTGYEVMQSYVMHKPANDPIFTFIEKKRSEGKCGKLAMVAGLNKFLRIYYGKVTELYRSSSAIE

SEQ ID NO: 462549 - protein, 353 aa, unidentified
MLIIGCDYHPSFQQIAFVDRETGECGERKLTHKEEAESFYRDLNGRSVRVGMEATGQARWFERLLAEQNFELWIGDPAEIRAKRVRKQKNDRQDAEHLLQLLVEDRFPQIWVPSPENRDLRQLLWHRHRLVQMRTRVKNQVQAIALNEGIRRKTGLWSKLGRVQLESLSLAPWSARRRQDLLELLDRLNPKIDELSTAIQQAAEQRPEVQRLMTHPGVGPITALAFVLILGVPERFQCGKQVGSYLGLIPCEESTGGRQRLGHISKQGNTLLRFLLIESAHAVVRYDPDWRRRFLHLAMRRGRPIAKVAMARRLAVRLYWMWRKAWDYQQTLKFGSQGRKLSSHNVVTTGSTR

SEQ ID NO: 462550 - protein, 329 aa, unidentified
MNYKWFVGIDIAKKTLDVVLYKKELQKKSPYCQILNNSDGFNNLMKWLKEQNVVLKHTLFCMESTGIYGMALVNFITEKAHYCLESPLHNKRSLGLTRGKSDKIDAFQIARFCYLHRDELVPSRAASKIMLTLRSLINERERLVRTRTIDKTIVKELNYKENRSCIERAKNRINILTVDITQIEKEIKTILSENLDIERNYILAKSVTGIGLVNAVMFILFTNNFSSITDARKYACYSGIAPFEHSSGTSILGKTRVSKLSNKRIKVNLTNGARSAIINDPELKLYYKRKTDEGKEHGTVMNAVKFKLITRVFATVKRGTPYVKLRQAG

SEQ ID NO: 462551 - protein, 317 aa, unidentified
MMSTQNYGGIDIAKKNFVIGITGMAKTKTETNNPKGFEHAIEYLKKHQVDLVVMESTGGLEVPLAKALHHAGLRVVIANPRRTHSYSLSFSLGKTDNKDAKMLADYAQAIEIKGKTVQMLYCPRSAEEETLEALVKRRSQLVEMRTAEKNRLTQIHETQKQSVEDLIAHFDALIDALDEQIFQYTDSGFDGKGKIISSIKGVGNTTCAMLIAMLPELGQLSHKKIALLVGVVPPPDQSGDSDGKTGCIGGRKEVRDMLYMAALSASRFEPAIKVFYERLIAKGKPFKVAINACMHKLLRILNARVRDYLQSERLAHA

SEQ ID NO: 462552 - protein, 315 aa, unidentified
MATHHGPFVGIDVSKDRLDVGTLGERQVVQIDNTQTGIKELAARMQELQPELIVVEATGGYQRAVVEALFWAGLPVAVVNPARVRQFARAAGLLAKTDRLDAFVLAEFGKKMRPRLYESKSEAGKQLSALLVRRRQLEEMLKAEQSRLRTTPASLKSSVQKVVTCLKEEKKSLEKQIRDLLAEQTAWQEQTEILDSAPGVGLVTMATLLAELPELGKMDHKKIAALVGVAPMNYDSGKKRGYRKTKGGRGGVRSVLYMATLTATRYNPVIRAQYQQLLKRGKLKKVALTACMRKFLTILNAMIRDRQPFRCAAIT

SEQ ID NO: 462553 - protein, 412 aa, unidentified
MDSVHERAAGLDISKRDAKVCLRLPGQRAGTYTSTVTTWGATTGQILALQDFLEGEHVTTVVMEATSDYWKPFFYLLEETLPVMLVNAKAARNIPGRKTDVSDAAWLAQLGAHGLLRASFVPPEPIRELRDLTRARAIAIRDRTREIQRLEKFLEGSGIKLSSVVSGLTGVSSRAMLEALVSGERDPEVLAGLAKGTLRSRIPELVEALTGRFKSHHAFMARLHLDQIDAQSRIIDALTGRIEEAMEPFRAAREFLATIPGVSLKVADVIIAETGADMSRFETPGRLASWTGFCPGANESAGRIKSAHILPGNKYLKGALGIAALSASRSKDTYLAAKYWRVAARRGPMKATVAIEHSILTAVWHMLADGECYADPGADHFTRLDPVKAKNNAIKKLNGLGFNVTITPATAA

SEQ ID NO: 462554 - protein, 354 aa, unidentified
MNTTQVFEKRKIAVAIGIDLAKDHCDVVAYNADNKICFTKANWAYPHLMEWLANAQPAVVLMESCKGCHVRARDIADLGHDTRLVKGADVKALRNVCQKNDIRDADYIARLLYVPGTKFVFVKNQRQQSLQFLQNEYKSIQELRIQVGNQIHAGLEEFGCPGPKSKKFIQSRMMAHIEKNAELIPDEVMSSFLRRREMWLNLFEQEEDAKKRMEEIAKTDDDAQRIMTVPGVGAQTAVGMLVHIGGDIGRFKNSGQFAASIGLVPKQNSTGGNTTLNGITKCGPKRLRANLVQCGQVILMHADKLKGNFGDWVRKLRDSGKKRGVIVCAIAAKIARIVYRLMKDKVDYTPVPSR

SEQ ID NO: 462555 - protein, 337 aa, unidentified
MPDVHVLAIDLAKRSFQVCGTDRGGAVLFNRTVSRTKLIQLLSAQPPCIVAMEACATSHYWGRFGQGLGHDVRLVPPIYVKPFVKRQKNDAADAAAIAEAALRPNMHYVAVKSAEQQARAVAFRTHQCFVRQRTQLINALRGHLAEFGLIVAQGPAHLKQIVELLDQAGPEVPDAVREIVRLYLDQIDVLTLKIEELHRGLRDATQENAEMRRLCTVPGVGPVTAGAVLAFAPDLRAFSSGRNFAAWLGLVPKQRSTGGKTRLGGVSKMGQTDIRRLLIVGAMSRIRWIVRKGILPGSWLGNLVGRKPRMVAAVALANKMARIIWAIMTREENYRMA

SEQ ID NO: 462556 - protein, 333 aa, unidentified
MKSGTVHIGVDVSKEKLDIYVPAKEEGSRPLTKEVDNNINGFRELRDLARKAKATVCVEPTGGYELELIAFMHRFDVPVAYTDALRVRQFARAEGNLAKNDRIDAALISRFADKIGVRLIEAQDVEAVELKRKAKFRQTIMDSRTAMANRLETEIDPEMRAMLRAQIKGLDRLIDKTGRLCLETVGKNERMNTLRERFTLVGGVGDLTAISILAGLPEIGTLSDEKLNRLVGISPEENQSGSKDRLRRIWGGRKNVRNALYMAAVASIKWNAILGGYYRKKRAEGHPHKWAIVPTMRKLLSLLNRIARDPGFTPMPEPESTKQNANVGRKKAA

SEQ ID NO: 462557 - protein, 357 aa, unidentified
MLAAQIPGLPGVKAKRSIEPTPEALMAAIEDYRTRAVKAGQNVERVVAIYEAGWSGFWLARWLAQYGIETHVIQASSVPVDRRARRAKSDGIDAELLLRTLLAWLRGEPRVCSMVPIPAEADEDARRRVRERAELVAERVGLVNRISAVLATLGVGEYNSLRRDRRQRLDELRTALGGSLPTHARAKIVRMLDRLELLLIQITELEKSRDAVLEDENPDKAASMIQQLAKLRGVGVQSATVLVREGFVREFANGKALGSYAGLTSTPYSSGGTEREQGIGKAGNVRLRTLMVELAWLWQRYQPDSAQVSWFRERVSGTGRRMRKVMVVALARKLLIALWRFATQGVVPDGAVMKPAT

SEQ ID NO: 462558 - protein, 338 aa, unidentified
MKSVARIGLDIAKSTFQVHGVNAHGTVVMRKQLSRGEVLRFFANVPACLVGIEACAGSHYWARELQRLGHDARLMAGQFVAAYRKSGKNDANDAEAICEAVGRPNMRFVPIKGEEAQAVLAVHRARQLLISERTALANQIRGLLGEFGIVIPAGLARLRHALAQIGVGHRTLPVLAQETVGELHDRLRLLDACISQYDRKIEVIARASEPARRLMRVEGIGPVTSTALVASVGNARAFTNSRQFAAWLGLTPSQYSSGGRSRLGHISKRGNVDLRTLLIHGARSVLQFTSKKTDRKSIWVEALKARSGINIAAVALAAKQARIIWALLARGTEYRPAT

SEQ ID NO: 462559 - protein, 307 aa, unidentified
MWIGIDVSKARLDVYARPSGEAAQFDNDPSGLKALCKWLQRYADCHVVMEPTGGYERAVVRELLEAKVTLSVVNARQIRDFAKATGRLAKTDRIDAQVIAHFGEVVNPQPRTALDPQAELLEALLVRRRQLIEMRVQETNRRPLAAAAIRPRIDAIVQTLSAQIAQIDEELDQLIKQSPAWREHEDLLTSVPGVGAVTARTLSTMLPELGNIGRKQIGALVGLAPFNCDSGQHRGQRQIRGGRYAVRAVLYMATLSAIHHNPVIRAMHERLTAGGKLFKVAMVACMRRLLCILNAMVRDQKPWLPST

SEQ ID NO: 462560 - protein, 348 aa, unidentified
MNKYSESELITVVGIDLAKSVFHLHGLNKQGHVVVRKKLSRSKLAEFMARLPSCLVGMEACGGSHDWARRLMAMGHDVRLISPQFVKPYVKSNKNDIVDAAAICEAVQRPDMRFVPIKSAEQQDIQSLHRARSLAVSHRTAQVNQMRGLLLEYGVVIAKSVAALRKAVPDILEDADNALTPMFRELLCGLWEELLRLDERIAAYDAQIKHLSEQSEVCKRLMTIPGIGPMVSTALVAAANDGKAFKSGREMAAWLGLVPRQHSTGGKPRLLGISKRGDVYLRKLLIHGARAALRWSDRKQDRRSRWVSELATRRGQNVAAVALANKTVRTAWVLMTREEEYRIASVTV

SEQ ID NO: 462561 - protein, 334 aa, unidentified
MWHVGIDLHRATVVLAAVNDVGEAMNPITIPCSDTVAITNTVQPLGSFRAVIEACGTYRWLYDLLRPHGTVHLAHPMRLRAMIQRRSKTDKLDAQLLANLLRINQIPLAYIPPEPYQQLRDLTRCRARLGRQVAEVKIQLRALLARRNRESPYRTPFGPRGLGWFRGQEFGPIDDMVRNELLERFRHYAKQMLLFDQRLEEMRPAFPEVGALLDIHGIGLYSALLIVAEIGEVERFHAAKQVGAYSGLTSRVHQSGGHCYQGSITRQGSPWLRWVLVQAAMKAVHRDAALKNFYRRIRKRSGAKIARVAAARKLAEICWKRLRQWQREHAGQAA

SEQ ID NO: 462562 - protein, 350 aa, unidentified
MQQFIGCDAHKRFSVFVAVDERGNVTRPVRIEHLREEYAHFLNQLPPGSEIAVESTGHWYWLVDAMERAGHHVHLANPMEAKKRMGKTNKTDALDAKGLAILLRNGTLPESWIPPGALRDQRELLRTRMALRDLRSSLKHRIHAAVDRYGLHTDTITDLFGTKGRQYLAARLAEFPPETARMVEVQLLALDQLATHIENIEERIRVEIASSVEVQLLRSVPGVGEILAPVIGLEIGDVRRFPRAENLASYAGLVPRVFSSGGHTRLGGISRFVNQYLKWAFVEAANCAVRLKAHRHAHVGCLYQRLLTKRGHGRAVVAVARHLAEASYWILCKQEPYRAPHQNKISSRNG

SEQ ID NO: 462563 - protein, 456 aa, unidentified
MKKAEQPNTKAQLPKHLQQLNLCAAGIDIGSKSHFVAVPEGSDEQPVREFQCFTADLHRLVDWLISCLVTTVVMESTGAYWIPLFEILESRGLEVKLVNARHVKNVPGRKTDVLDCQWLQQLHTYGLLEGAFRPPEQICALRAYLRHRMNQVRYGAAHIQHMQKALTQMNLLLHNVVSDLTGVTGMRIIKAILAGERDTQVLAGMRDKRCKNSIETIAKSLEGNYRPEHLFSLKQAVESFEFYQTQIAQCDQEIEALLATFDAKAVTTPPTTPDPEDGASAQAQGRPPAFNLKDELLRVTGVDLTKIDGIDVTTALKVISEIGIDMSQWKSEKHFASWLGLSPGSKVTGGKRLSGKTKPVVNRAAAALRMAASSLYRSQCALGAYYRRMKARLGAPKAITATAHKLARLVYSMLKHGTEYTDVGQDYYEQQYQSRAIKNLKARARQLGFDLVETAI

SEQ ID NO: 462564 - protein, 276 aa, unidentified
MNISVIGLDIAKNIFHMYSHDEDNKPIKKKLKRAELLAFFANYPVSLIGIEGCGSAHHWARELIKLGHEVILLNARYVKSFVIGNKNDFNDAAGIFDAVTRPNKRVVVIKTIEQQDIQLVHTIRNGLIGKRTALANQTRGLLSKRGIIIPKSINQLRKQLPLILEDAENNLTPLSREMFAEHYERLVVLDDEIKIQDQRISRLCQSHELSKRFVEVLGVGPLIATAVLFDIGDGKGYARSSDYSASLGIVPRQNSSGDKQVYLVPDRKVLLSLINI

SEQ ID NO: 462565 - protein, 402 aa, unidentified
MNAAGIDVSKGKSTIAVMRPFGEVAASPYDVSHTDSELSKLAEMLKSLDGETKVVLESTGSYHLPIAHALHEAGLFVSVVNPQLTHNYDNNSIRKSRNDKTDAIKIANYTLTNWLDLTEYIPEIDIRKMLKAYSRQYSKYGKLKTMLKNNLISLLDQTFPGVNELFKSPPRKKDGHEKWLDFSSTFWHCECVCSHTQKAFSERYRKWCKRAGYNFSQAKAEDLYIDALGHFFIIPMTDTTKRLITQATSQINTISETINTLASEMKFLAASLPEYSVVMEFRGVGDILGPQLIAEIGDIYRYSQKSSLVRYAGLEPVENQSGKFRGGESISKQGSPHLRKTLFQVMDCLLKHSPADDPIFQFLDRKRSEGKHYRSYMCAGAAKFLRVYYARVREYIEKHFVD

SEQ ID NO: 462566 - protein, 371 aa, unidentified
MFHVGLDIHTKRISICALDEKGQVVHRSQVRSIQDLVRVLTDLPDRFQVCYEASCGYGHFHELLRPLATRVVVAHPGQLRLIFRSRNKNDRNDAERLAKLLYLGEAPAVHVPSADVRTWRELINCRSQVIAKRTRAKNAARALLRGAGVTPPKHPGLWTKEGLAWLRRLELPTASQQLRRDLLLEEMETLLRQVQRIERQLAQQAQRTPAVVRLRSIPGVGLRTAEAVAAFIDDPHRFPNAKAVGSYFGLVPCQDQSGDRNRLGHITRQGAPVVRQLVAEAAWQARRRSPTVRAYFERAQRDDPQRQKIALVATAHYLVRAMWALLKRGTDWQENPALAKAPASASCGGPAAERGEGEREKERGERMSESA

SEQ ID NO: 462567 - protein, 375 aa, unidentified
MDQHSRAFVGIDTSKLRNAVAVAEDGRGGDVRYLGEIDTTEAATRKLVAKLAAKYRQLTFCYEAGPTGYGLYRLIRKLGHDCIVAAPSLIPKKPGDRVKTNRRDAVGLAKLSRAAELTAVWVPDERHEAMRDLSRAREAARKDLKGKRQQVSSFMLRLGRHYPGKKTWGPAHMNWLMLQKLEHREQRIALEELLGAVRQESERVERLEQAIRDAVPEWSLAEVVTALQAMRGIDLIAAVTVLAEIGDLSRFQNPRELMGYLGLVPSESSTGDTVNRGGITKAGNGRARRILVEAAWSYRHPPRVSREKQIKVAAAPRAVREIAWKAQMRLCGRFRSLTRKGKRPTVVATAIARELSAFIWAINREVVGSHATANQ

SEQ ID NO: 462568 - protein, 408 aa, unidentified
MEVLHRCCAGLDVHQKSVVACVRVQRGGKAEHEVRTFGTLTRELEELSAWLAARGCTHVAMEATGVFWKPVWYVLEPRFELVLANAGHIRNVPGRKTDVNDATWISDLLAHGLITASFVPDTAIQQMRTLTRTRKQLIRERAKHVQRLHKILETANVKIGSVVSDLMGISGRAILEAIAAGETDPARLIDRTTGRLRASREHLEEAVRGYVTDHHRFMLRLHLDQIDGLERAIAKVDEEVDRVIEPFRGSVEQLTTIPGVSDVVAQVIVSEIGTDMSRFPTAGHLRSWTGLCPRNDESAGKRRSTRLRKGGNWLKTTLVQAAWSAARKKDSYLQAQFLRLKSRRGPKKAVIAVAASILTAAYHMLQEGTFYEDPGADYFTHRDRERSKNRLLQRLAKLGYQVEIREAA

SEQ ID NO: 462569 - protein, 347 aa, unidentified
MRFYTKTHQHYRGIDLHAKTMYLCILDSEGAVALHRNIPCEPEKFLRAVSPYRDDLVVAVECMFSWYWLADLCARQGIGFVLGHALYMKAIHGAKAKNDKIDSKKIAALLRGGLIPKSYVYPAEMRATRDLFRRRTHFVRHRGQLLAHIQNTHHQYGCVSPGKRIAYKSNREGIAEAFDDIAIQTSLAADLELVDYYDAIIGNLELTVLRQARGHDRDAYERLKTIPGIGKILALTILYEIHDIGRFPRVQDFASYCRLVKCQSSSAGKIKGSSGAKMGNAHLKWAFSEAAVLLLAKCPEGKKLVDRLAKKHGKGKALSILAHRIGRAAYFMLKRKRAFDLERFLKA

SEQ ID NO: 462570 - protein, 334 aa, unidentified
MPVMIGVDPHKASHTAAALDAHGQLLAQQRVPATLDGYRQLRQWAARWPQRCWAVEGAHGLGRALAQRLVGDGEQVLDVPAKLAARVRVLSVGHGRKSDPHDAVSVAVAARSVPALRQVGVEDQAVVLHLLTKRRQNLVAARTQTINRLHRLLMDLVPGGARRNLTAKRAAALLSEVTPAGAPAVTRWELATELVSDVCQLEQRIAAVEARIKAAVAESNTSLLELFGVGPVLAARFLGEIGDIRRFPSKHHFAAHTGTAPLEASSGQVIRHRLSRAGPQAEPRPVHDGDGAGPPSQRWAGVLPTQAGRGQVTQRGVTVPEAPVVRCGLPLPDG

SEQ ID NO: 462571 - protein, 449 aa, unidentified
MAALPKHLQHINTMAAGIDIGSKAHFVAVPESCADVYVREFQSFTTDLYELADWLEACGIVTVAMESTGVYWIPLFELLESRGFEVLLVDARHVKNVSGRKTDVLDCQWLQQLHTYGLLSGAFRPSEQICALRAYMRQRNVLIKQMSLHVQHMQKALSQMNIQLHNVISDITGETGMMIIRAIVSGERDPKVLTRHRNYRCKSPLAIIEKSLTGNYRDEHIFALSQALELFDIYQNKITACDEQIEKKLSLFEDAKTDENEKNTDETKPNKKTVKKSKNAPSFDLSSHLIRMVGVDLTTIPGLEAYSVLKIISEIGLDLNRWKSSKQFASWLGLCPGNKVSGGKILNGKSKRTGNYAASALRMAASTLHHSDSALGAFFRRLKARIGAPKAITATAHKLAIIMFNMIRKQLEFVETGADYYEKQYRDRLIKNLSNRAKMLGFELMEIAC

SEQ ID NO: 462572 - protein, 359 aa, unidentified
MPTIAQLEPVRVTVGVDTHKDAHVAVAKDHLGRHLGDNTIPTTPSGYRDLLAWAQSHGEVEAWGIEGTGSYGAGLLRFLRGADQAVIEINRPDRKARRLKGKSDLVDAEAAARAVLSGEASAVPKSADDRVEMIRALRAARSSAIKSRTQAINALKALVVSAPAELREQLRALSSTQLVRTCVRLRPGDIADPLAATKLALRSLAGRHEALAAEIKILDPELLRLTAEAAPALVELFGVGPEVAGTLLVTAGDNPERLRSEAAFAHLCGASPINAPSGKTVRHRLNRGGDRQANAALYRIVIVRLCYDAKTKEYAERRTAEGKSKPEIIRCLKRYVAREVFAVLSDIGQKNLAAAAWHL

SEQ ID NO: 462573 - protein, 395 aa, unidentified
MYSLWVGIDVSKEGFSVAGIHSGGKEAFSKAYAMDSTGFEELLKTVRAHCEEDSEVLMAMESTGCYHINLFSFLTSQGIRTMVVNPLLIANYAKLSLRKTKTDKKDAMTIARFLLDHHKEISQLSISQDVQDLRDLSRERESLSHLVSATKVEIKRVLRTTFPELETIGDIYTGVMLRLIQEYPSARLVKAAKRKGIAKLLKGPYLGNKLTYTAEDILGAAKTSIATVSPGKEIILRGKIATLVHLQARLEEITKLLTDLCKATRVDDLKILRSIKGVGPKTAAPFLAEMGMVNNFVSHKKLIAFVGMDPSVSQSGQFVGMSKLSKRGNRHLRRAIYLMTASVVSKNTWFKAYFQKRKAEGLAPQKALFATAHKLIRVIFAMLSQRTFFKVREAI

SEQ ID NO: 462574 - protein, 458 aa, unidentified
MSIVHRCCAALDVHKQSVTVCVRTGISRREQTLETAKFGTFTEDLEQLAEWLKQRKVRHVAMESTGVYWKPVWNVLELTRRHFRLLLVNPAQVKALPGKKTDRRDAQRICGYLRQGLLRGSFVPGRQQREWRELTRRRAHLQGDRNRVINRIRRLLETVNVKLGSVISNVVGKTGLAILRDLAAGQADPERLASNMFGRLKCTRAQMIASLRGRFTDHFRWELKHLLEQLDFLDRQVAEYEARIAASMDGHRDLLARLCTIPTVDLITAWTLLAEIGTDMSRFPTAAHLCSWAGLCPGNNESAGKRFSGKTRKGDRYLRRTLVQNAWAASHMKKGRLKQMFFGVARRRGMPKAAMAVAHRILQIAYFIIRDGTMYREVGVEMDERKRQRTAKRLARRLEEIGFEVSIKPRSGPPGAHARIPNAPGPLPGQTCKMCNAWGRACIHARNAVKTPPPTPST

SEQ ID NO: 462575 - protein, 440 aa, unidentified
MAVRKREDEVFPNAADIDVGASSHWVAVPRHLAEESVREFGAMTDDLNAMADWMLACGVDTVALESTGVYWIPVYEVLEQRGLKVWLVDARQMKYVPGRKSDVQDCQWIQKLMSLGFLRAAWRPDSEVCVVRAVARQREVLLIEQASWVQRMQKSLVQMNIQLTEVLADVMGMTGQAIIRAIVAGERDPKVLAKHRDRRVKATVEVIIKALTGNWRDEHLFVLRQALAMYDDIARHLRECDAELQTQLRALGQRNVDLGKAPRADSKQRQEFEARQTLANWAGVDLTRINGLGLAAVMKILTEIGPDLSRFANVKHFCSWLGLCPGTKISGGKVLSAKTKRSANRARQALKMAAMSLSRSSSALGAFYRRLCSRMDKPSANTATAHKLARMVYFMLTRGEDFVDKGQEHYEEQQHQRSVAALKRRAAALGFEIKLTSVPA

SEQ ID NO: 462576 - protein, 351 aa, unidentified
MNLYAGLDVSLKETAVCIMDQDGEMVLECKALSDPKALDDVLSAYAGALKRVGIEACAVGGWLQVELAQRGYEAILMETHHTHVALKTMRNKTDRNDARGIAQLMRTGWFKAVHVKSAEAQRFRTLLGCRKLVVRKLVDTENEIRGTLRGFGLKTGNGSRGEFAGRVKTLTQHQDPLIQEIMARLLAIREVLLEQRRQMDALVLKTVRADEVCTRFMRIPGVGPIAELSFRFGVDDPRRFSRSRTVGAHFGMTPRKFQSVETDYDGRISRCGDRDVRQALYDAAGSLLRRCQKHSALRAWGLRIAKRTCLQKAIVAVSRKLAIIMHRMWIDGTEFRWKKDIGGDVAVLPGT

SEQ ID NO: 462577 - protein, 347 aa, unidentified
MEKVIRIGMDTSKSVFQLHGVNAAEQVVLRKQLRRRQVLEFFARLGPTKVGMEACGGAHYWARELRALGHEVVLLPPQYVKPYVKRGKNDRADAEAICEAMSRPTMRFVAVKTAAEQAALMLAGLRDQLVRRRTQLTNAIRGYAAEFGLVAARGLSKIEPLLVRIADDESVPELAKDIFAAYGQEYAGLEGRITKLEAHLMAWFRQSEPSQRLTQIPGIGPIIASMLVMKIPDPGAFHSARHFAAWLGLTPTDHSTAGKTRLGVITRAGDKDLRRLLVSGAMSVIQQAQRGRGSPSPWLLGLLKRKELKPAAVALANKMARIAWKLLVSGENYDPRRAKAMAMDKAA

SEQ ID NO: 462578 - protein, 396 aa, unidentified
MISVGIDVSKGKSTVCIMKPCGEILESPFDIGHTADELDSLISLIKSFDEETRVVMEDTGHYHLPVATYLSSHNIFVCCVNALRMKKFCSQSIRRAKTDKIDSIKIASFGITYWNELVKAYPSNVIYDELKFLARQYYQVTGMLVKSKVNFSNLLDQVMPKINDVLSNQGENHKLTEFVSRYIHFQNILDMGEMKFTSDYCKWAKKKGYRLNERKAAEILALAQNGIPTLPNSQSVKIAVSEAVKLIHSIEESRNTILAQMQDLCNTLPEYSVVKEMDCIGDTLAPRIIAEIGDVRRFKNKHSLIAYAGIDAPPYQSGAFHASERHISKRGNSYLRKTGYEIMQSLIKHKPADNAVYNFIQKKRSEGKCGKEAMIAGLNKFLRVYYGKVMEFYSEH

SEQ ID NO: 462579 - protein, 391 aa, unidentified
MFYLGVDIGKLHHAAGLIDPHGKTIAVLPSFAATAHGFSQLAAFLQQHAPDTADLRIGMEATGPYWISLAQWLTARGFQPVVFNPLKVSSLRNYGVRGSKTDRIDAVLIAQALRWEAPRPCSVSGSTNAAELRCLTRLRFHLAKERARVTLRVGSFLSMVFPEFSSLFPKLASPSALAILQAAPSPAQVIALGEERLGEILRSASRGKLGIPRAQQLVALAKTSVGTTSSALTQALELLLAQIQLLCEQIHTLDEQIARLYESANVPLESLPGNGPVLAATCYSEIGSLDRFANASQIVAFSGIDPKLRQSGTFVGQVRMSKRGSPYLRRAIYLACQTAVRIDPYFQAIYQRQLQRGKPKRKALGAVMNRFIHVLYAVWRDNRAYSPLTPA

SEQ ID NO: 462580 - protein, 446 aa, unidentified
MARKSKSEQGRLAKVHARCAGIDVGSREHWVAVDPALCAEPVRRFSSFSDDLYAMVDWLASMKVEVVAMEATGVYWIALYEVLDARGFQVHLVNTRATRQVTGRKSDVLDCQWIWQLMSHGLLRGAFRPPDAIIPLRLYVRQRATKVRDQARAVAHMQKALTQMNLQLDAVLSNLMGKTGQAIVRAIVSGERDPQVLARLRDRRVRATQDTVARSLQGTWREEHLFALTQALETYDFLQAQIDTCDGHIAHVMAGLPVRDVTPVEPTKPLRSVHRSVAQQAVLHRALVRVLGVDLTAIPTIGVDTALVVAGEIGPDLSRFPTCDHFCSWLNVAPPTHISGGRPLPGRTPKVNNRAGQALRQAASNARRSQSFIGASHRARLARMDTSKAIKATAHQLARLIYAMLTKGQDYVEKGIDVFEAQRHDRQLRALEHKARQLGLALVQAA

SEQ ID NO: 462581 - protein, 334 aa, unidentified
MNDTIYDHYIAIDWAEKNMAIARMTKKSNKISAIDVPADLSNLKAYLKNLKGTKVLVIEETTTSQWLYVELQDYVDRIIVCDPHRNKLLSEGAKNDKIDATKLVTLLKAGLIKEVYHSNNKFIYFRRLVSGYDDLVKAGVRLKNQRSSLLKCCGKKGKSEPGKLELASDNFVLQCLNRQIDAYEEEKSGYEKEFKSLTKKYPEIRYQTSLPGIGHINAVKIVARVVTPYRFADKGHYWSYTGLIKHEKISGQKSYGKRSPRYCRQLKDAYKTGANAAIGGNNLINDYYEYLIREKGEIPYNARHKACRKLAILSLGVLKSGKKYNPFKKDNVNT

SEQ ID NO: 462582 - protein, 393 aa, unidentified
MVCVGIDVAKDKHDCFIISSEGEILADVFTIPNNAEGFDTLLQAIRRSTRPEDKIKVGLEATGHYSYNILGFLLDKGLDTYVINPLHTNLYRKSLSLRKTKTDRVDARTIAAMLMSDVDLKSYTDTAYHNEELKSLTRYRFDKVRERAKLKQSVSRLVTILFPELEKLVPSLHMASVYALLSEFPGAKQISSTHMTHLKAVLKNASQGRYGQEMAETIRNAARSSVGSVMPAKSLELQHTIRLIRELDAEIEDIETAIQAIVDEMQSPITTIPGMGVRMGAVILAEIGDFSRFDSPDKILAYAGMSPSTYQSGQLSLSGAYSHMEKRGSRYLRYALYNATKHVCHWDPTFAAYLAKKRAEGKHYNVALSHAAKKLVRLIFAMEKSQRPYCAAA

SEQ ID NO: 462583 - protein, 350 aa, unidentified
MMIIGCDYHPGFQQIAYVDSETGEFQERRLQHPEEAEKFYRDLGERKVRVRVGLEASGHARCFERLLEELSFELWTGDAAKIRAKRVRKKKTDREDARHILELLVENRFPKIWVPTWQNRDVRQLLWHRHRMVQTRTRIMNQLQAVAINEGVRYKKRLWREAGRKQLESLWLAPWANRRRKDLLEVLDRINPTIAELTQAIEEEAEKCHPARRLMTHPGVGALTAVAFVLIIGEAHRFDCGKQIAAYLGLVPEEDSSGERRRLGHISKQGNSLLRFLLVEAAQATARCDQRWRNQFFHLAQRRGRKIAKVAMARRLAVRLYWMWRREWNYEQLQSFGSHAGQPGNPHGVQ

SEQ ID NO: 462584 - protein, 458 aa, unidentified
MKPDSNPIEEIDSDETERILNCAAAVDVAKASGMVCVRRPHPSIEGRRMSRVWEVESTTSSILALGEDLVALGVERVVLESTSDYWRPFFYLLEAAGLPVWLINARDVKQVTGRPKTDKLDAVWLAKLNERGMLRPSFVPPREIRALRDYTRLRTELVEERSRHKQRLEKLLEDALIKLSPVATDLLGVSARAMIEALIAGERDPKVLADLARGKLNAKRAALLEALNGRFDDHHADLAQLLLDQIDACSDKIDRLTSRIEQLVAELPEPSPPTDSEPRRTLAGDVPVDHDPDARRLTTVERLDEIPGIAERAAQIIIAEVGLNMAQFPTPAHLVSWAKLSPQTIQSGPKVKAGHTGKGNRYLKGVLGEVATAAAKTDTFLGERYRRLVRRRGKQRALVAVARSILVIVWHLLNDPDARYIDLGSDYYTSRLDPDRKTRDLVRQLQALGHNVTLAPAA

SEQ ID NO: 462585 - protein, 338 aa, unidentified
MPQFKYFVGVDIASATFVSCIRTSVLEVIAEPKEFSNHENGYVSFLSWLEKHTNAVSEIAICMENTGVYSEGLAYFLAATNHAVAVEPPLKIQKKFPISGDKNDPKDSLNIAEYACRYVDKLSFWQPRNEILEQIKLLLTTRQQLIVQSTAHKNALHAVNRKEVYNQIAKKVHQDMIRGITIHIKAIDTEIRDLINSIPTFKQSVLLLDSIPGIGITLASHLLIMTQNSLDPRKLSAYLGIAPYQHRSGTSVFKKDTSRHYGPAAARGLLYLAACSVSTHREQFKKYFLRKTAEGKPGKLVLNNIQNKLIKIACAVLRTQKPYIPNYVSVNPTCLRKA

SEQ ID NO: 462586 - protein, 417 aa, unidentified
MREYAACLGIDWADKKHDLCLFDAASGKKTKQVLPHTPQAIAEYFTNLRAGYPNQQIAVGLEQSRGPLLFALLQYDFLVIYPINPTTLAKYREAFSPSRAKDDPRDAEYAAELVMQHRERLKAWHPDDTQTRTLRYLVEHRRRIIGDRTRLSNRMTSLLKCYFPQVLSWFPDLRTVLVCDFLLRWPALETLRGVKRTTLLNFFRAHHSVRSDTLEKRLSALKESVPLTTDRALLNSSVLMITALASQMKSTIEAVRQFDREIEKLCAAHPDFPLFQSLPGAGEVYASRLLAVMGTQRDRWTTAQELACLSGIAPVMERSGQRVWIRWRYFCPKFMRQSFHEYAGESVKHSFWARAYYEQQLAKGKSRQAAVRALAYKWIRTIWKCWQTSTPYSEVKYLESLRKKGSPLLAYAVTNPS

SEQ ID NO: 462587 - protein, 319 aa, unidentified
MANLICGVDVSAKTLDARIGRDGAYQRFDNNPDGIAALAEFCHQHGADLVVVEATGGYERQTYALLWAKDVPCAIVNPRSVRRFAQAMGLLEKTDRIDSGVIAWYGEIKRIVAQQPASQAQQELEAAATLLRQLVDEQTCLRNQGRLVTDSFASRLRTKVLAALAQAIRECEQRIIELIDTDPLWRELDVEFRTIKGVARRTSARMLAELPEIGTISNKAIGKLAGLAPLADDSGQRKGIRRIHGGRANVRSILYMSAGVAGKHEPDFIAFRDRMTAAGKPKMVTRTALAHKLLTRLNAKAREVRQRLTAAAAAVPAAA

SEQ ID NO: 462588 - protein, 358 aa, unidentified
MMTDDDTTRRVIGGVDTHKDEHVAAVLDEQGRLLETTSFPTNAFGYRDCYRWFTSFGEVLAVGVEGTGSWGAGLSRFLRARDLNVVEVNRPNRQTRRRKGKSDTVDAEMAARAVLAGDATVTPKAGDGPVEALRQLRLARRGAIKARTAAANQMHSLTDTAPDELRAKLRGLTTLQRARLCARFRAGDLLTPAGAAKRALRSVAARYLTLHDEIRELDRAIRQLLDTIAKPVVDRYGFGYETAGTLLCTAGDNPERVTTEAGFAALCGSNPVKVSSGKTKRHRLNRAGDRHANAALWTVVMTRIAAKHPPTIAYIERRTTEGLSKREAIRCLKRYVAREIYNDIRAIILTNQETRIAA

SEQ ID NO: 462589 - protein, 348 aa, unidentified
MRFYKQPHAFYAGIDLHARSMFTHILDHQGATVFERDLPASPEAFLNAVAPYRAGLVVGVECMFAWYWLADLCEDEAIPFTLGHALYMKAIHGGKSKNDRIDAAKIAGLLRGGMFPMAYVYPRAKRATRDLMRRRCFFVNQRSQLIAHIVNTNSQYNHPPLTARLCYAGNRSEDFADRFTDPATQLSIRADLTLIDNFDAQIDEIEHVVLKTAKIDDPASLAFLRTIPGIGKILSLIMLYEIDRAERFPEVGNFLSYARLVRCEHESAGKKKGSGGKKIGNAHLKWAFSEAACLMLRAMPDAKKWLARQERKRGKKKALSVLEAKIGRTVYHLLRKQQAFDAKRFFAS

SEQ ID NO: 462590 - protein, 415 aa, unidentified
MEPVLDSCAGMDVHEKKVDVCIAHGPLEKSPKFEIRTFSTMTSDLEDLKSWLKKYNVTTIGMESTGVYWKPIFNIMEGEFTIVLANAQRLKAIPRKKTDIMDCKRIAKLLRYGLLPNSFIPPREIRELRDLNRTRRKLVGMMTSEKNRLTKVLESSNIKLSSVVSKISGVSSMAMIRSLLEKDRLSKEEISQLAKGSLKKKVDLLEKALDGKLTDHHRFLLKMHMENLDHLARQIAKIDEQIERKMIPFQKESNLIQSIPGISKVSASAILAEIGTDMSQFPDEAHLSSWAGVCPGNNESAGKKKSGKTQKGNSFLKGTLAEAAWAASKVKRSTYNAFYQNIVRRRGKKRALVALAHRMLMDIYRVLKTGTPYQDTGAEEANERATKRKERSMIRLLEKAGYEVVRTCTSEIAAA

SEQ ID NO: 462591 - protein, 342 aa, unidentified
MEITTVGIDLAKSIFQVHAVDAVGHVVVRKALRRAQVVPFFAKLPRCLVGMEACGTAHHWARELMSLGHDVRLMPPAYVKPYVKRGKTDANDAAAICEAVTRPSMRFVPVKSTEQQAALALHRTRDLLVKQRTQLVNMIRGLLAEFGIEMARGLRHALELAARLSAGDAAEVPPLAQRVVTGLADQIGALQIQLTRLEKELLAWHRDSDLSQRLATIPGVGIVSATALAASVSEPERFRSGRQFAASLGLTPLQNCSGGKERLGRISRMGDRYLRRLLVVGMTSLIRRAKTTPTSVDPRLPALLQRKPVRVVTVAAANRTARVAWAIMTRGGTYRAPAARAA

SEQ ID NO: 462592 - protein, 353 aa, unidentified
MDKATLFAGIDLHKSYCFITVVNSVGEIILQMKVPNSNEAIRGFFAQFPDLPKAVIEATGNWYWLVDLLEEMGMDVSLAHPKKLKAIYGSKKTDKYDSQWLAQLLRMDMIPVSYKLSSNLRALRDLLRTRLRLVQVRTGLVNSSRSTLGKYNLDYTGSGKLYGEEGLSFLRSDELPLDLLYKLTLCTKADVVELLNSKISVLEKEIKRQIKTDEEIELLMTIPGIGVILASTIRYEVGDIERFPTEKAFASNCRLAPGVHSSGGRSRTTKTSKDGNGYLKWAFSEAIHPLTRSDQDANRHYNRLLRKKPKHTALSIMARSLARIAYYVLKNKEVYRGFKNPQLKKDLASGTLG

SEQ ID NO: 462593 - protein, 513 aa, unidentified
MTGKILNFGISNLWQRSSLSSGVLYPCLSFASRNSEIHFGDTFSAVFPYGSVPFIPIASLSHKLLYSLTIKSKVMAKETIFETVHEHVAGIDIGAEQIFVSPDGSEVVNFETFTSSYHACALYLKEKGIRKVAMEATGIYWLALYFLLEELGIIVCLVNPKETKQVKGRKTDVKDCQWIQKLFSAGILRHSFIPQGKYMELRQLVRERIDIIAMGSTYVNKMQKCLELMNIKLTEVISQIHGASGIKMIKSILAGNRDGASLLGLCNERIQKYKGEKILKALEGNYNNTYLFMLQENMELWEIHQRQVEKIDVRIAQLLDELSENKEEVSTGITKRIRHHAPKIEGLHNTMARLYGVDLCSISGMNDYTALRLIGETGTDMSRFPTVKSFVSWAGLSPKSHRSGKVKKNVRGTPCNPTGQIFKECAQGLMNSKYIAIGSFMRKLRGRKDSAIAIKAGARKLAIAYYNALTKGTAYVEQGIKQYEEQIKKRELMALKKLAKKYNLQLIENQEAA

SEQ ID NO: 462594 - protein, 404 aa, unidentified
MNVKATRTKKQVNVENQAIKLLSKEELGIKIEVIKKELRSYTWRDLETNGKFAKNDKLSFITDDMLIAGCDIGSETHYIRAIDVRGRELSSRAFEFSNTSEGFANAKAWMLALAAKNDKKQIALGLEPTGHYWFALAAWMVSNGISVVQVNPYAVKQSKEIEDNSQLKDDRKDPKLIANLVKDGNYGMPYLPEKVYADMRRLSMFRDQLTEDRIRNINRLHRELKIYFPEYMAAFGKIDGAFTLEVLKVTAIPSEIKALGAEGLKNIWHNAKLRGLGYSRAGEIVSYAEKSVGLTDVTDVGREAVRWYAEQILKLDGQLASVESILHRKCREIPYAENILAINGVGENILSGILAEMGDVSRFDDVKEIQKLSGMGLVSCSSGKHKGQTKISHRGRKRLRYWLF

SEQ ID NO: 462595 - protein, 375 aa, unidentified
MKKNIRFIGLDVHAETIAVAVAEPKGEVRSLGVIPNRRESVRRLVRKLGPSLRVCYEAGPCGYVLYWQLTEMGVHCDVVAPTLVPVKAGDRIKTDRRDAEKLARSYRSGDLTPVWVPDAAHEALRDLVRAREAAKKDQLRARHRLQKFLLRRGLRPPEAIKTWTAKHLAWVKTLRLEQPAQAATLLDYVTEVDHACERIDRLERAIDQAIEAAPPAIRAVVEALQSLRGVARISAATIVAEVGQLSRFRRPKQLMGYTGAVPSEHSSGEHVHRGAITKTGNAHLRRILVEAAWAYRHRPSLRGELQRRQKNASEEVKEIAWKAQVRLHYRYARLAGRGKLKQQVVTAVARELAGFVWAIGVAAERQLAQQPARAA

SEQ ID NO: 462596 - protein, 457 aa, unidentified
MSRKSKRTFGVEEARPFAGMSKVNQDAAGVDIGAVEIVACVSHDENTQIVRAFGNYTVDLQNIGKWLKEHRIKSVAMESTGVYWIPLFEELERQGFECLLISSRSLRRVPGRKSDIIDAQWIQTLHNYGLLESSFRPEGELAALRTLLRHRGQLLEHRAPHVLHMQKALLQMNVQLSQALSDVTGDTGQAIIRAIISGERDPQKLAELRNRQCKKSVEEIGKALTGTWRAEHLFVLKQSLELYDFYTKQVESCDMEIERMYALTRPDWEAGELKPLTAKKRKSHSKNAPQQKEEIRKHLKRISGVDLSVVDGFGVSLAQTVIMEVGTDMQKFPSEKHFCSWLGLAPKHEISGGKVLKNKTLKTKNRAGQAFRMAAQSVKGADCVFGSRYRRLRARLDNRQATVATAHAIARVVYRMLKYQVEYEELSVEEYEQEYKSQQVKYLKKKAEKFGFQLVSV

SEQ ID NO: 462597 - protein, 452 aa, unidentified
MEQDSISMKIINPKAAGIDIGSRSHWVAIGQADIDVREFGVFNEDLFSLADWLAENQIRTIAMESTGTYWQTLYAVLIARGFDVILCNGKFTKNIKGKKTDIKDCQWIQKLHSLGLLSSSFLPDIQTEQLRTYCRHRENLLHMAASTSKKMQKYLRLLNLRLDIVVKDICGLTGLKIIRSICEGETNPQKLAELRHYNCRRSEQEIAKALQSNGRQDYLFALKQELDTYDHLQLKIQQCDIQIEQFLNQIIDNDDNKKQHYIDPKSHKRINKNTPKNIDLNLKAYQMFEGIDLLAIEGLSHSTVLALVSEVGFEGIKRFPSAKHFASWLRLAPNNKISGGKVLSSKVPKGSNRLKIALRNVANAIGNLKESTPLRDFFHRVNFRKGRTSAVSATARKLAVIIWNMVVKNTQYINPEGYLFLDQKRKLGLTKRIKKQIDKFGLNPGDLGFSIT

SEQ ID NO: 462598 - protein, 369 aa, unidentified
MEKDTTYVALDDSKRKIVVGILRSGDTQPELREIANDPRQIRRLFERLKREGPVAACYEAGVSGYDLHRRLIALGVAGAVIAPALTPRRPGQRIKTDRRDAAKLVRLFRAGELTAIHVLDESEEAVRDLVRCRDDIRRDVLRWRHRVLKLLARHGRACLTGKNWSRAHWQWIREQRFDLPPLQRAFEATLFALEQALARQAELDKELEAVAATASYREPVGWLRCFRGIDTLSALILLAEVVDFQRFRRPRELMAYLGLVPSEYSSGESQRRGALTKAGNSHARRILVEAAWHYRHRPTIGRALASRTHGQPDEVVAQAWRAQQRLHRRYRHLVGHGKRTPVAVAAVARELVGFIWAAMTRHESRRAAA

SEQ ID NO: 462599 - protein, 356 aa, unidentified
MPETNPAEVIIGVDTHKHTHAAVALTALGARLGTITIPVNRKGYQELETWARSFGPVRAYGVEGSGSYGAGLSRFLQASGHTVIEVNRPNRQLRYQHGKSDPLDAEGAARAVLSGQADARAKPGTRAVEMIRHLKVGHDTAVKSRTQAMITLKALIVGAPDNLREQLEGLAGKMALIRHLAALRPGALTSPTASAKAALRALAQRWLTLDAEIKAHEAHLDALTAACTPTLRTAYGMSTGTAAEMLILVGDQPDRIRSEAAFAKLCGACPIPASSGKTIRHRLNRGGNRQANAALYRVVIVRMRSHPPTLAYVRRRTREGKTKLEIIRCLKRFVAREIFGYLCGAKTPPTAPLLAS

SEQ ID NO: 462600 - protein, 360 aa, unidentified
MKKDTRDGSGLIVGVDLGDRFSRYCVLDQKGQVLEEDSVATTGKAFRRLFGDRPAARVVIEVGTHSPWVQRLLQELGHETITANPRYVRLIYSSESKNDQLDAERLARLARVDPKLLHPIQHRGGTAQADRALLRSRNALVECRTKLVNHARGVVKSIGGRLPTCSTSSFHKRVRQDLPDELKPALTPVLDIIAALTLKIQKLETRIERMAAKRYPETGLLRQVSGVGPLTALSFVLTVEDPQRFKSSRAIGPYLGLRPRQSQSGDVDPELRITKAGDSDLRRLLVGSAHYILGPFGPDTDLRRWGLALAARGKKNAKKRAVVAVARKLAVLLHRLWVTAEVYEPLRTNQPGIVAEAISA

SEQ ID NO: 462601 - protein, 350 aa, unidentified
MVVLGIDVHKGTHTAVVVDQVGRKLGEKTVRATDAGHRQLLRWALRNWPDAESVFAVEDCRHVSSRLERALLTAGQTVVRVPPKLMAGARSSARTRGKSDPIDALAIARAALREPNLPTATHDSVSREIKLLVDHREDLVNTHTRMQNRLRWHLHELDPELNPTARGLDRLCELDRLAAWLHQQPTSMVVRIAAELVTDIRALTVRANALERELAQRMTHVAPRLLALPGCGALTAAKIAGETANVTRFRSEACFAMHTGVAPIPASSGKTNRHRLARGGNRQLNAALHRIAVTQIRLDGPGRNYTQRRRSTGDTTMEALRALKRRLAPIVYNTLQADTTTRPTHHPAAA

SEQ ID NO: 462602 - protein, 556 aa, unidentified
MQVPDAGTRPESQKPGWTIGGVAGKLWPTQYWRAVVPECKYGSGLGDREIGGGGFERSSFDPVGENVECIATGPVAQFSRGYMAVGNKGITKTPTKRLTRKQRKDLGRKIWSDHPGLEVVHRDAAGIDIGSREHYVAVGPDRDTEPVRVFGCFTAELRRMAEWLKQCGVRTVVMQSTGVYWIPVFEVLEEAGFDVWLANAQQTKNLPGRKSDVQESQWLLKLHTYGLLGKSFRPTPEIRALRCCWRERNEYVQQAGACIQRMQKALTEMNIQLATVVKDIGGVTGMKILRSIVAGERDGARLAEFRDPRIKASKQQIAQSLEGTWRPEQLAILKRQLEDWDHLQGQMAACDKDLQGMMQRLPTAKTKACPQPETADTSQKRKKRRNEPKFDLSEEWKRVAGVDLTRIDGIKVNTVQTVFSEAGLDMSRWPTEHHFTSWIGLCPAHEISGGRVLKRKSRKVVSRLATALRLAAITLRESDSYLGAQFRRLRTRIGAPKAITAMAAKLARLIYRMLRFGQEYVDQGEAHYNEKYREQQIRLLTKKARQHGFQLVPTST

SEQ ID NO: 462603 - protein, 419 aa, unidentified
MNEEERKWFAGVDWATETHHCWVSDDRGQKLGEKAFAHSGAGLVEMQDYILSLTGSTPDKVFVAIEVPHGPVVESFMERGFRVHSINPKQLDRFRDRFSPAGAKDDSRDAHVLSDSLRTDPHCFRPLLPLDPLVIELREWSRMAEDLTAERTRLSNRLHGQLWRYYPQMLQLTDDIAAGWLLELWALVPTPAKAQRVREITVARLLKQHRIRRLDASQVLATLRQPAITVAAGTVEAATGHIKILSQRLELVNRQIAEANQQLDRLTDRLAEKGDGEPGQKAEQRDVTILRSYPGVGRMVIATLLAEASDLLQRRDYHGLRCLCGSAPVTKRSGKSKIVVRRLATNHRLVNAVYHWSRVAIQHDPPSRAKYDALRQRGHGHARALRSVADRILAVTCAMLENQTMFDLQRAQTRTSNVS

SEQ ID NO: 462604 - protein, 394 aa, unidentified
MFLVGIDIGKHKHSFCIIEKETGESIVKPKFFNNNKVGFEELLSSFKGLPKKDILIGMEDTGHYHFTLLKFLLDKKYQVALINPVTTDLTRKLSGSHTKTDKLDTLTICDVLTSNQRTKPYRISKVDRFDLYEQKQLTREHHNLKEQSNVLKNRLQKSIDIVFPEFNSLFKSMYGVVYMNILKEFGSADALAHSDIRTIRKCFDFKGRGKRIELTAKELKNAAIDSIGFPSIAEVVQIKHLVNQIELVEEQIEELDKKIEEFSIANNSPILSIPGISHFSGTSILAELGDIHNYSKPSQIIKFAGVAPLTYESSQFMAKHTAITKKGSTYLRKTLYQIILPVINNNKVFKDYYNLKLSQGKGYRCAQGHCVRKLLRVIYQLLSTNTQFDPTLLV

SEQ ID NO: 462605 - protein, 356 aa, unidentified
MDSTKYIGMDVHKEATTIAVMNAAGKLVMESIVETKAATIVQALEGLRGELYLTLEEGTWAAWLYDLLKPHVTKVVVCNPRKNALLKTGNKSDRIDARKLAELLRAGLLSAVYHGETGLRTLKELCRSYLAISKDLTRTMNRVKALYRSWSIPCGGPSVYAPRHRAEWLSKITEAGVRRRAELFYQQLDGLQKLRQEARRDLLAESRKHGATDLLQRIPYIGPIRAALLIAMLQTPHRFRTKRQLWAYSGLALETHSSGEYHYVQGQLQRSKKALALRGLNENHNHDLKSIFKGAATKASSATGPFHDFYAALLAKGMKPTMARLTLARKIAAITWIVWKKGVCFDAQLLKPQVSV

SEQ ID NO: 462606 - protein, 335 aa, unidentified
MSQKLTAICVVDDVGRRLWRGQCASDPEQIELAIRRHSGDEARIGIETGPMTPWLVHELGGRGLEVTCLDARHARAALKMQINKTDQNDAEGLAQIMRTGWYRSVHVKSFGSHRARALLGARAQLVGMTTRLSNHIRGVLKIFGMLPGPMRGLPFDRRVEALLTARDDVAPIVRPMLAAWRQLRQQIAAFDKAVRALVKSSPTCRHLMGVPGIGVLSVLAYVSMIEDPARFGRSRSIGAHLGLTAKQYQSGEIDRSGRISKCGDALARTLMYEAAVVLMTRVKRASGLKEWAQAIARRSGAGKARVALARKLSVIMHSIWRSGEPFRWSEQSAAA

SEQ ID NO: 462607 - protein, 440 aa, unidentified
MKPLPVLDPKAAAVDVGSEKLHASVAGDTPKVFGTFTRELESLREWFKGQGVRTVAMEATGVYWLYLYEVLEAGGLEVVMVNGRYVQNVPGRKTDMSDCQWLATLHAHGLLRGGFVPSADIRRLQDYQRLRADHIIGAGSQIQKMQQALERMNVKFHDVISDLTGVSGLKVMRAILEGERDPARLLTLCDQQIVKKKSLAVQESLRGCWREEHLFALRQGLELWETFQQKIADCDRELQKLLQQLAGPPGAEGSSPLKLAAAKDPGKNAPAIERFQELLARICGGRDATQIPGLGVYLVLQLISEVGTDMTRWATEKHFTSWLGLAGGRKQSGKRKGTVKAHRNRAGRMFCAAARALAQSVDKALGGFYRRLRGKVGGLAANVALARKLAQLFYRLLRYGMEYVEKGLKEYEAKVLATETYLLRKLAKKQGFVLIPTLAK

SEQ ID NO: 462608 - protein, 330 aa, unidentified
MRKETVAGIDVSKDVLDVAVRRDEQRLETARFDNDVGGHRTLVAWLTKRGCTARVVLESTGTYSLDVALALHRARGIAVMVANPRAVKQFAGALMQRSKTDLTAAAALREYAARMPFVVWQPPAAEVLALRGIARRIAALVVERTRERNRLHAVRATAEQLAIVVNDIEVNIRHLERRIGLLTADAVALLREHPQLHHAFERLTSVPGIATHSAVQLLPELLVLPDDMTVRQWVAHAGLDPRACQSGTSVDKPARISKVGNAHIRRALFMPALVAVRHEPHVKAFFDKLVARGKKPIQAYVAVMRKLLHAIYGMFATETAFAGDKFHAAA

SEQ ID NO: 462609 - protein, 367 aa, unidentified
MKKLTTTMMQETLNKYDGRLTVGLDLGDRSSFYCVLDGTGDVLLEQKVSTTPKALNEIFGAMPRSRIAVETGTHSPWVSRLLSELGHETIVAHARSVRLIGESRRKDDRLDAMTLARLVRIDPRLLCPVKHRSAEAQADLTVIRARAALVRTRTMLVNAARGLTKSYGERLRGCNARGMKSKAAQDLSPELKYALEPMMHEIESASERICQYDQMLESMARNRYPEAERLKQIKGVGTLIALTYMLTLEDPCRFRKSRDAACYVGLQPGRRNSGQSEPQMHISKEGDPYLRALLVQAAHHVLGPWGVDSDLRRWGMRLAEHGGKRGKKRAVIAVARKLAVLLHRLWVSGDRYVPLRPGGHATLPAVA

SEQ ID NO: 462610 - protein, 372 aa, unidentified
MKEHSELFIGLDVSKLKTSVALAEDGRNGEVRFFGDIDASPAGVAALATKLAKRGRRLHFCYEAGPTGYDLYRQIVALGHDCAVVAPSLIPQRPGDRIKTNRRDALSLAKLHRAGELTPVWVPDVGHEAIRELVRAREGAMEALRRARQQLLSFLLRHGRVYTGRTPWSKAHSSWLCGQTFEHPAHQIVLAEYRHAIEEAEVRLKRLTAQVTETAASWSMAPVVKAYQAMRGVAFMIAVTFVAEIGDVRRFDNPRQLMAYLGLVPSESSTGERVRRGGITKAGNSRARRVLIEGAWTYRFPARMSRLIQGRQDDLPKAVREIAWKAQVRLCGRYRKLIAAGKLKAVTVTAIAREMAAFLWAIGQVIAPVLDA

SEQ ID NO: 462611 - protein, 414 aa, unidentified
MLKIVYPVCCGMDVHKSFVVACIASTNEQGVTSYKSKRFSTFTGDLRRCAVWLSENNCKDVCMESTGKYWIPIYNILEPTCNIVLAHPKYVKAIRGKKTDKRDAKWISDIFKHDLVAGSFIPPADICQLRDLVRYRWKLTSFTTGEKNRAHNCLTVSNFKLDDVFSDVFGKAASAITTRILENPAEKITDVSSFRTKGMKATNEQVLAAVDGQMCEEQAEKLRIIRSHMDSLQLCKLNLESLILSISEKYLPQLNLVMTAPGVQSFAAIGIISEIGVDMSVFPTSKHLCSWAGLTPQNNESAGKKKTTRISRAGAYIKPLLVQCALCAIRAKQFPEVRSRYLAIKKRRGHKKAIIAIARMLLTAIYNMLKKNEPYNPELYRKGDRPPAHREVSVEEAIYILQRQGYLVTALPTP

SEQ ID NO: 462612 - protein, 448 aa, unidentified
MSDIPTSSIQPEFVALIGIDWGDKKHAWALQAGDSTKIEKGEIEHTPEAIQQWAAELRRRFPSGRLAVALEQSRGPLVFALSKYEHLTLFPIHPSSAAEYRKVFRPSGAKSDGPDAVLHWDMLARHRDKLRPLNPDTPETRALQLLTEDRRQLVNERTRYSNRLTANLKSSYPQLLQWFDDLYAPVTLDFLEQWPTLEELQKAKPGVWSKFFQEHRCRDAKNQQLLAAIPTAVTATTDFAVVTAGRAGVCAAVRLLSNLNQAIQEYDRQIDQLAKGHPDFALFQSLPGAGKVLVPRLIAAFGTQRDRYQRAAEIQQYSGIAPVTEASGQQRWVHWRWSCPKFLRQTFHEWAAQSIAQCDWAAAYYRVQREDKNKSHHAAVRSLAYKWIRIAFRCWKDRQLYDGSYELALKTRAKATPEPKQPSSFPLPLRWISCAGFQKLAEKNEENT

SEQ ID NO: 462613 - protein, 357 aa, unidentified
MQSKVKKISFKGYNIYSGIDVHEKSWKVTIMVGDKYYKTLTMVPKAENLEKYLEREFPGGSYHTAYEAGFCGFSIHRKLEEKGIKNIVVNPADIPTTDKDRSQKEDRRDSRKIARSLKNGDLTAIYVPERELEELRSLVRYRKSVSRDLAREKNRIKSFLKVYGIEEPEEISKIRSWSSKYVKWLEGIEMDTEYGKMVIEERIEILKFLREKKLKVQRELQKVSLESKYREDLELLRSVTGIGRITSITLLTEIVDINRFKTLDQLCSYVGLIPRTNSSGEKERHGRITRRSNKEIRSVLIESSWVAIRQDPALMLKYNELIKRMKGSEAIVRIAKKLLNRIRYVLKNRKKYERSIV

SEQ ID NO: 462614 - protein, 323 aa, unidentified
MKRTTKYVAFDVHQATTVASVREESGQVIARSVLPTDSGALTEFVRGMRGARHVTFEEGTQAQWLYELLAPLVDRVIVCDRRGAPRQGNKGDQVDADQLSELLRRGALRAVYHGSADRATLKELTRTYRNLVEDATRVMLRLKALFRARAIPTPGTTVYQARARGQWLAQLADRGARFRAEALYAELDVLRTLRPKAKAAMVTEARRDPAWPVLRTIPFLGPVRVALLLATMQTPWRFRTKRHLWAYAGLAVVTRSSADYALIAGAPVRRRRAPMTRGLNRNHNRVLKDVFKGAATAATARPGPLQDFTTACWRAARGRNWRA

SEQ ID NO: 462615 - protein, 425 aa, unidentified
MGIDKCKMKSSIVLGRGEGNVKHVISFDVSMGKSYMVIYNSYKECLYEGEFTHTKLGFNEVKLRINQIINSYGISPEIVFESTGVYSKALERFMKENHYPYCLLNPLEAKIQCDSLRIHKTDRSDAHKLALTHFSMDRKEKTVSDSVFDQLKSLSRFYSELDDELGVIRNRLHKVMQETFPELENIFTRKSNLFLNIAQLFPHPDFLIGHSKTVIRNKIIANTNKNISKNRAEKKAQELLLAAEQSYPAVSPDDVLCEQVRIYSKRFQELLNEKDQCIGKMIKLADQRVEYELLLSFPGIGPNTAVRLMAEIGDIFRFSNNKQLNAFAGIDIRRFQSGKSFYKDKINKRGNKHLRKLLFIIIQNMIRLRRNGNNHIVDYYDKLKTQPYNKCHKVASIACVNKLLKSIFHLITHGISYDYRLATSS

SEQ ID NO: 462616 - protein, 367 aa, unidentified
MFHRQPDPATTFVGLDVHKNSITAAVLAPGAEVAVVDRIFPDEASIKRLVKGLGDRRRLAVCYEAGPTGYALARLLDRLGVACEVIAPSLIPSAPGARVKTDRRDARRLAELYRVGQLTPIRIPSEAEEAIRDLCRTRTDLVIDRTRARHRIVKFLLRHNVVFRDGTHWTLRHEAWLAQVRFDDEALTRTFARYRSVLSALDAEMAAVESDLRTYFTEGPFAEAVARLGAYRGVTELGALALAAEVGDWTRFPRASSFMGFCGLTPAEYSSGDRTKRGRITKTGNVHLRTALVESSWAYQHRPAVGAEIRKRQARASDETVVRAWKAQVHLTTKFRRLAATKSSRNIVVTAVARELAGFLWAEMVAA

SEQ ID NO: 462617 - protein, 407 aa, unidentified
MFAGIDWAADEHAVCVIDDVGRVAERFTISHTADGFERLVRRLARHGEPAELAVAIERPDGRLVDRLLDAGHPVVPVKTTAIKAWREAEVGSGAKSDPGDAQVIADYLRLRRHDLRSLRPFSEETRALRAVVRTRTDLVDARVAAGNQLAAMLTAFWPGAGELFADVWSEIALAFLERYPMPAAAAHLGEGRMAGFLRKHGYSGRRSPAELLARLRTAPAGLPDGPESEARRDALLATIRVVRALNRSIKDLDRAVVAHLDEHPDAIVFRSLPRAGQVNAAQMLAEWGDCREAYDDPEAIAALSGMAPVTRRSGKHLAVGFRWACNTRFRNAIATFADNSRHASPWAAQVYRAAMGRGADHPHAVRILARAWIRVIYRCWVDQVAYDPGRHGAARRLEEARTAGIAA

SEQ ID NO: 462618 - protein, 360 aa, unidentified
MKIQRTSVGLDVHARSVVGCGLDGDTGQVFGRRLTPDHDEILAWLRSLPQPVAVTYEAGPTGFGLARCLTEAAIVCQVAAPSKLQRPAGNRVKTDARDAAHLARLLHLGEVVAVQIPTESQEAARDVARAREDCRGDLMRTRHRISKFLLRQGIVYYGGNAWTGKHEQWLRAQRFDSAALTLTYRSALDALVTCEHRRDRLDDAITAMAADSEFTPVINRLCCLRGISTLTGFALAVEIGDWRRLTGRSIGAYLGLVPTENSSGGTRVQGGITKTGNTHARRLLVESAWHHRREYRPSRDLRRRWDSAPPAVRERAHIGNHRLHERWMAFNARNKRPVVANAAIARELAGWCWSLAVLDE

SEQ ID NO: 462619 - protein, 355 aa, unidentified
MKKKVFIGLDYSKLTVDAACFHIDNMDSIEYKQFGNNEEGFLALIKWAKKNHRDTSLWLICGEYTGIYSMPSTYVFNDKKIDLWLENPSQIKLCCGVRREKNDKLDSRDIAIYASRYTERVRLYKPQSDVLLKLRDLVRFKDRLTKNKISLQIPANESKRIRRTCCATEYICNATDVICSNIDVEITEIEKKMLTLLQTDPELKKMYKLINTVVGVGMQTAIYLLIHTWGFEAFNNPRQLACYCGVVPFSKQSGTSLKGKAHVSHIANKKLKSLLHMCALNAVRYDPILKQYYKRKLKEGKHKMNVLNNVRNKLIHRIFAVLRTGEEYSKEYTKTNDSNQNRNIEMCNLAQSDAA

SEQ ID NO: 462620 - protein, 338 aa, unidentified
MTVYAGLDLHATNTYVAMIDQENKVLYKQRHRNELPSIIGALDPFKKDLQGVVVESTFNWYWLVDGLMEQGYAVHLANPSAIKQYEGLKQIDDKRSSLWLANLLRLGILPSGYIYPKEERPTRDLLRKRLQLVRHRTSHILSVKNILARNLGLRVKSDDIKKLEDPEVKRLFRDQEMRTAVLASLGLIRHLQTGIDTIEDMIVKKVKVKKEFAKLITLPGIGTILALTIMLEVGDIHRFPTVGDYSSYCRCVKSTRISAGKVTGHGNRKNGNKYLSWAYIEAAQAARRFHETVRSYYEKKMAKTNKIVAIKALSHKLTRASYYVMRDQVDYDPARLFG

SEQ ID NO: 462621 - protein, 335 aa, unidentified
MKSYKRVIGIDISTERLDIADSNSKIIHEVDYSIDAIKSKILKLIKKPSETLVVCEATGGLEYTLVDVLHDAKIDVVVANPARIRDFAKGHGFLEKSDKIDARVLQLYGQQVKVSLAKPRTLQERNFIALTRRRTQLLQLISQESNRLRQSNDPQVKAFVEEMLKSLQTQMKSVDSWISKALDEQAKTNPSIDVIRSVPGVGPVMTATLVAELPELGTISRTKIAKLVGVAPMIKQSGKSEERRRARGGRGGVRRVLYMATLAATQKNDVIKKRYIKLVASGKPKKLALVACMRTLLTILNDMVRHETKWGEKKKSVAGSVVSNRPAPAHVLDKS

SEQ ID NO: 462622 - protein, 405 aa, unidentified
MLLVGIDWAERHHDVCVMAADGQVLAVERIADGMAGVARLHQLIAAHASEPAEVVVGIETDRGLLVGALVAAGYQVIAVNPLAASRYRERHTISRAKSDRGDARMLADLVRTDRHHHRPAKGDSGLAEAVKVLARGHQQLVWARQRQANIVRSALRAFYPAALAAFGGDPGGRDAVAVLGLAPTPELGRSLSHAELVVALRQAGRRRQVDARATRIQATLASQQLEAPPVVADAYGQVVAAAVAVIASLSGQLASMEAALGKAFSAHPDAAIVRSQPGLGVVLAARVLAEFGDDPNRYANARGRKAYAGTAPITRASGLRQVVLARSVGNRRLSTACHLWAFAALTGSPGARRYYDTHRARGATHHQALRALANRLVGILHGCLRHRQPYDEQLAWPTSTAAVAA

SEQ ID NO: 462623 - protein, 411 aa, unidentified
MNDLIRIGVDTSKSVFVLHGVDAAEQPVLRRKLRRRQVLEFFAKLPPTQVGMEACGGSHYWAREIGALGHEVLLLPAQRVKPYVPRNKNDARDAEAVCEAMSRPRMRFVPVKTIEQQAALMLVGIRDQLIARRTQLSNMIRGYAAEFGLVAAKGLDKIEPLLGRIAADTTVPALAQELFATLGEERAELKLKLGTIDAKLIAWHRENETSRRLAEIPTMGPIGATLMVMKVADPRAFRSGRDFGAWLGLTPKDHSTAGKLRLGVITRAGDEALRRVLVLGATAVIQQVRRGRGHPSPWLVALLKRKPPKLAAVALANKTARIAWKLMVSGERYDRTRAAAHGEPRCEHASSQPREPGAVLATVKARPTSAAARRTAGATAGLDGGCARREGAIAVGTKKRSAVEQRNETGH

SEQ ID NO: 462624 - protein, 344 aa, unidentified
MDATTVGIDLAKNVFEIALADERGHIVERQRLSRARFDRFFANRAACRIVMEACGSAHHHARRLSSQGHDVVLLPAQYARAYVRRNKTDAADAAALIEAARCPDIRPVPIKSIDQQALQQLHRLRSQWMAARTARINFLRGCLREFGIGVPVGAQRAIQTVRDALSHQHLAVPALLHPSLLELLAEIVSLEQRCKQIDQQLARLSEHDPVIERLLQIPGVGPLTATALRASVVDVQRFPSGRHFASWLGLTSREHSSGERRRLGRISKQGDPYLRTLLIHGARAVLLAARSAQRRGSALDRLRTWALELQERRGHNKAAVALANKLARIVWATWRFERDFSSKP

SEQ ID NO: 462625 - protein, 344 aa, unidentified
MDHFAGLDVSVKETSVCIADETGKVIREVKVASEPEALLAVLASPAYHFKRIGLEAGPLSQWLYSVLAEAGLPVICVETRHMRAVLKAQINKTDRNDARGMAHMMRVGLYRPVHVKTLRSQKLRMLLTHRKLLQSKAIAIDNDLRGTLRNFGLKVGMVGATKFEARIKELIQDLPDLAVLVEPLLVVRRVLREQLAILHRRLLAVVRDDAVCRRLMTVPGVGPVVALTYRATVDVPARFRKSKSVGAVFGLTCAKYQSGEIDRSGAISRCGDEMMRVMLYEAAQSMLRSTKWSWLKAWAMQIAKRRGMKKAIVALARRLAVIMHRIWVDGTEFRWSRAQATAEA

SEQ ID NO: 462626 - protein, 359 aa, unidentified
MKIVGCDFHPSYQQIAVLDTETGEVWEKKLSHGNGEAAKFYRALQGAALIGMEATGNARWFELEVEKLGHELWIGDAAKIRASYVRKQKTDKRDAAHILKLLVEKRFPRLWVPDVRQRDMRQLLTHRHKLVRVRTRLKTELQHLALNQGIQKKRQLWNEKGRALLASLPLQGWAQQRRKDLLQLLGLVEPQIEQLDKAVEQAAKADPQAVLLMSQPGVGPITALAFSVTIGDVSRFERSKQVSSYLGLIPTEHSSGSKRRLGSISKQGNVFLRALLVEAAQSVVRHDPGFRKEYQHRCHHKEKGIAKVAAARKLAVRLYWMLKSNKSYSELVLNGGSPRHPVAAKAKAVHLNGHPRISQ

SEQ ID NO: 462627 - protein, 342 aa, unidentified
METITTVGLDIAKSVFQVHGIDSAGNVVVRRRLTRGRVLAFFEKLPRCLVGIEACNTSHHWARELIALGHDVSLMPAQYVKPYVKRGKNDAADAEAICEAVTRPTMRFVAVKTPEQQSVMMLHRVRLMLNRQRTQLTNAMRAHMSEFGVIAPVGRMGVEQLLGVISDHEDRRIPADARVCLEMLAAQLAVVKQQILENDRRIRESARETELGRRLMDIPGVGPLLASAFVASIADPRIFRTGRDLAAWIGLVPKQNSSGGKERLGGISRAGNRYLRQMLVVGSMAVIRHAKRHGTKRAWLIQLLSRRATKVAAVALANKTARMVWALMTSGERYREPTVAVA

SEQ ID NO: 462628 - protein, 400 aa, unidentified
MISVGIDVAKGKSTVCMLKPYGEIVCKPFDIEHQNKDLSELASMILKFDDEVKVVMEATGIYHLPVLTYLQEKGIFVTVINPYLMKVYRSESLRKAKTDKIDSRIIANYGIEHWLTMEEFKVSEDIYGELRLLGQQYRHYMKLHVTSLHELTHLLDYTMPGIKTMLASWNEGNRKDKLSDFVEQFWHFDEITKYSEAEFIDAYAAWAKDKKYHQSQTKAKAIYELAHEGIPTLSSETPSVKMLVTEAVRVLKEIDATLGVILSRMQELAKSLPEYSVVREMGGVGDVLAPKLIAEIGDVRRFHSGKALIAYAGIDTPPYESGQFIGNNRAITKRGSAALRKVGYETMRCIKTCPRPDDPVYQYVIKKEAEGKAKKSAKIAGLNKFLRIYYARVKEIYNNS

SEQ ID NO: 462629 - protein, 323 aa, unidentified
MFYLGVDVAKAKLDCMLLDSTSGKMKSKSIHNTPAGFVQLLEWLTKNKAPKPHVVMEPTGMYHEGAALALTDAGLTVSLVNPAQLRSFAQGLGVKTKTDKADSVVLARYGATQNPDPWQPPSPSARQLKALLARRDAVADDLQRERNRKEANDFSPTPEAVGESIAQSIAFLEAELKRLEKLITTHINDDPDMRNKKELLETIPGVGPRVSSHMTALFAARTFERAEQLAAYLGLVPVQWESGSSVRGRPHMSKAGPAHLRKVLYMPAVVARRCNPHIKALNDRLLAKGKSTMAAIGAAMRKLAHLCFGVVYTGKPYDPTFAM

SEQ ID NO: 462630 - protein, 350 aa, unidentified
MLYTGLDLHKSFSYMTTMNDKGEIVGQKKLPSNGEILDFLKGFEGSMEVAIEATPSWYWLYDCLEDEGFEVKLSHPLRTKAIAYARVKTDKVDSATLAHLLRSDLLPLSYVPERTVRLNRELLRYRASLVKIQTRLKNKIHTILAKNNVNHSYTDLFGQQGMAFLRSLTLEENYKIALEGYLTVLEIVRQEIRVVSKKVKQLAEEDADTLLLMTIPGMGYYSALLTKSEIGDVNRFPSAKQLCAYAGLVPSTYASGNTCFHGHITKQGSRWLRWILVEASIHAVKRPGVLRRFYFKIERKKGGQIAKVATARKLLEWIYHILRDDRTYQEMERIADLLGRGELGNHSGRA

SEQ ID NO: 462631 - protein, 379 aa, unidentified
MPKNMRYVGFDVHAETIAVAVAEPDGSVRDLGVIRHRPEAVRKLVAKLGPAAQLRVCYEAGPTGYPLYWHLTALGVHCDVIAPSLVPTKAGDRVKTDRKDAARLARCYRAGDLTAIWVPDAATEALRDLVRAREVAKQDQLRARHRVSKFLLRHGCPRPEGLRAWTARHAQWLAGVSFDLPTLQVVFEDYRANLALLADRIARLERAIEAALPTLAPAQQALVGALATLRGVRAVTAATVVSELGTLRRFARARHLMGYAGLVPREHSSGRGVHRGAITKTGNAHLRRVLVEAAWAYRHRPNLTSAVLQLRQQAQPLPVVAIATRAQRRLCARYHRLTQLGKPPLAVATTIARELLGFIWAIGQLVEPLPAAVPAARGA

SEQ ID NO: 462632 - protein, 343 aa, unidentified
MGTQITGGVDTHLEVHVAAALDDHGGLLGTASFATTLDGYRELAAWLCSFGDVVLVGVEGTGSYGTGLARYLQAADINVVEVDRPNRQRRRRAGKSDTHDAVSAARAAFAGDALGAPKAREGNVEAIRVLRLARNSAMRDRTRALNQMRSLITTAPDDLRSQLRGLTIPKLLRTAAAFRPAGRTDVTSANRVAFKTLARRILELDDEIRALDTVLTPLVAETAPEMIERLGVGTDTAGALLVAAGENSHRIRNERSFARLCGAAPLDASSGKQQRHRLSRSGDRQANSALWRIVITRLSYDPATRDYLQRRCAEGKTKTEAIRCLKRYIARELYACLPHQTLA

SEQ ID NO: 462633 - protein, 414 aa, unidentified
MSESSVPMAAPAPLVYVVGIDIGMESCMMCSLTMQKRQMIKPSPFANTAEGFKNLFERLGRLETPPDQILVGLEATSRYGENVYHALLKRGYRVRLLHPAQMHAFAQQRGLRAKTDQVDAATIARALLSGEARFGYVPSEQVAIYRELVRLQQQLSDDVVRYKNELHALVVVLFPEFTQVFADPTGPTALAFLKRYPSAQAVAQTEVVTLSQVLHQLAPRRYGRRTAEKLLALAKESISSGVALSARSTSLRLLCDQLEHSQANLKRLQQEIEALLDHDPKVAGVLGIPEFGVMTVAVLRAELGDLDRFTRMDQVVAYVGLDLQVKQSGKYKGQTKLSKRGSGRVRRILYLAALRSIQLDDSPFGAYYRRLVHRGMKKGMAVVAVMRKLLIVAAHLILTEQVYESGKVAGLAVR

SEQ ID NO: 462634 - protein, 457 aa, unidentified
MTKNEIMKEGYLGIDVSKGYADFALISSNKKNLEEVFQLDDNQYGHVKLLELISKFRKKHDLKVINAVLESTGGYENNWLSYLKNEGPWEALHVARVNPLGVKHDSHASMERTITDATSARRIAIYAINHPEKINWESSASDKMSALRSLYKYIQTKVKQKVQLQNQLEKLVYSAFPELLNFMYEQPPKWLLSVLQEYPTAKAMREAKFEDLLKIKGIGQEKAKMLLNKAEQSISWTKEDSLRLIISGYASDILQLTQQVEKLKNTLEKEKELTAEIDLLISFPGIGKYSAVGLMIEIENIDRFKNVKKIASFFGVHPKLKQSGDKMAGFRMSKQGSPEVRGILYMVAKSAIVYNPHIRLIYDKLREKGMGYNQTMGVLMHKILRIIYGMLKSKSFYDSGYDLTQQQRTLLYTKKQAEKTNNVDKNSKNRYQKMDNEAPISRRQLKKRKERLTSPGS

SEQ ID NO: 462635 - protein, 321 aa, unidentified
MQVIGNDMAKATFDVALPLSDGKYRTKAKFPNTTKGCTEFLAWRAKHAPDAAVGMEATGIYHEALARALVEAGVTVYVANPARVKAFGQAEGVRTKTDRSDAKLIARFFEAQRPEKLHPYVPPTPSEVKLRALVRRRDDLQEMLQMEQNRLEVADISVQQGINDVIRTLEEQIKQVQKAIQDHIDNDPDLRGRHQLLTSIPGVGDTSSAQLLAFLGDLNKYSDVRQVVAHAGLNPAQRQSGSYEGKARISRVGDANFRKKLYMPALTGKTYNPTLKAFAERLSEKGKPFKVIMCALMRKLIHLVWGVLKSGRPFEPEVVLA

SEQ ID NO: 462636 - protein, 465 aa, unidentified
MQLNRRRSSGKPRVSPTILDRLNPNVAGIDCGSAEHFVAVPPDRDPTPVQSFTTVTTDLLRLADWLATCRVTSVAMEATGVYWIPIYEILESRGFEVRLVNARHLKNVPGRKSDVSDCEWIRELHSVGLLRGSFRPPDAIVALRASLRHRQTLIETAATHVQRMQKALVQMNLQLPVVVSDITGQTGLRILRDIVAGTHDPQRLAAHRDRRCHASQADIVAALTGHYRPEHLFVLQQNLELFDACQIQLAACDRAIAAHIQTLTDLRASAPTPLPPPRVTRKPRDNEPRFEIRTPVHQLTGGVDLTQIDGIGAYTALKLLSEIGTDMSRWATAKHFTSWLTLAPKNKISGGRLLSSRTQPSANRAAAILRMAAMTLGRTQTALGAFYRRLAARIGKPQAITATARKLAILVYRALKGELVYHDPGASAYDVQQRTRVLRRLRQRAAPLGFELVNRETGEVLTTGC

SEQ ID NO: 462637 - protein, 474 aa, unidentified
MARTRNRPASPPVPGDAGAEVTDEPVQVISRAAAIDVAKGSGMVCMRLPHESRAGRRTQKVWEVTATFAAVVALMDHLVCQGVERLVLESTSDYWRIWCYLAEAAGLEVWLVNARDVKHLPGRSKSDRLDCVWLCKLNEWGMLRRSFVPPEPVRDLRALTRLRANLTHDRVRHQNRIEKILEDALLKVSSVISDLMGGSGRRFLQALVDGERSPAALAALGDYRLHASKAELAEALTGRFRDIHGFEIGMLLELIDDLSAKITELDERIEAQLENVPGLGGVCTSCGQPGPDGPCTGCGEPVLGVIARLDEITGIGRGAAQVIVAELGTDMTQFPTPGHAASWAKLTPRAIQSGATSKAGRTGKGNPYLRGATGVAVMTAARTETFLGARYRRHARRRGKQKAIVAGCRTIIEIAWRVIADPGFRYIELGPDYHDQLDPRRKTRDKIRQLEKLNPGMTVTLTPRPEPGGQAPAA

SEQ ID NO: 462638 - protein, 321 aa, unidentified
MQSQNPVVYAGVDVAKATLQLHLQGQQSEFSNTPKGLLQLLAQLQTVPSVQVVCEATGGYERAMVKALQQEQIPVSVTNPARVRAAAQAQGQRAKTDRIDAQGLTDYGQRYQPEPTPPTSATQDQLVALTQWLKQLIHGRALAKTQAEHHQDAFVRRQHAKLMTHLQSQIEAVEKQIEALLEQDAALQQRVNCLDEIQGVGPRTAWMVLAHMPELGRLNRHEVAALAGLAPWTRESGTMKGMRCIGGGRPEVRLALYMAALSAARCNPVLCILYKRLRAKGKLPKVALTAVMRRLLTYMNHCIKALPSETAGVRTQELKAA

SEQ ID NO: 462639 - protein, 362 aa, unidentified
MAKSTTIIAFDQHAATTMAAVLLPGQRTPALHPLTSDSPTILRFVERVRRSGPVQTCYEAGPCGFELQRALTARGTPCDVIAPSLIPRRPGDRIKTDRRDAAQLAILYRAGALTAIHIPTAQEEAARDLLRCREDIRADLLRTRHRLSHFLLRHGRRFTATKRAWTKRHAEWLQAQRWPLPALEQTHRAYVRAVEEALARLHSVDQELRDLLTLEPLRARVERLRCFRGIDDLTALTIAAELGDPHRFPHAPSLMAFTGLIPSEHSSGTKQARGPITKTGNAHLRRVLVEAAWQYRHHAFLGPALTTRQRGAPPVAIDIAWRAQRRLHRRYRVLAARGKPKQLIVTAVARELTGFLWAALTQ

SEQ ID NO: 462640 - protein, 401 aa, unidentified
MKYGVGIDVSKGKSTVAILSAVGEVIEEPFEIKHDIEGLNFLDEKLKDIPNEDLKIVMEETGTYHLPVLGYLLDKGYFVVAENALKIKKYLDRGLRKAKTDKKDSYKLAEYTCNNWYKLNKVRENDEAYDNLRFLSRQYINNINVQVKQKNNFSNLCDLLFPGYYQLLDENNFILGLEIFKKYYHPEIVTNKKQSQFVEEIDKLAKKLGHKGAGITLANKIYLLAQKTISPRPNNEYAQLSAISCADALILTIKTTTTIITEMDKLARELPEYDVISEMPGCGKKLTSRIIAEIGDVRRFKNAGSIIAYAGLDAPPYQSGQFEATNRHISKRGNKYLRKTGYEVMKSIKSCCRSDNDLKSYIIKKENEGKLKKVAKIAGLNKFLRMYYGTVKKKYKQLEIW

SEQ ID NO: 462641 - protein, 328 aa, unidentified
MQAGEGILGIDISKESFDVVLRGTGGEQHRVFSNDQKGFKALVGWAEKQPERVVHICMEATGSYWEGLAEALYQGGYRVSVVNPYQIKRYGDHLLNRNKTDKADASLIAEFCEKDRERLRAWKPFSPEIKALRSMGRRLDELQGMKQQEQNRLKSGVTDLVVIESLQENLKQLDAQIKALWKKIKEHVNQHPDLREKQRLLTSIPGIGKLTAIKLIAEIGEIKDFTSASQLAAYAGLAPKQFQSGSSVHKQTRISKQGRTELRRCLYMPAVVASEHNPIVMDLKRRMLASGHVMMEVIVAAMKKLLHLVYGVLKSGKPFDPDYGNLFC

SEQ ID NO: 462642 - protein, 356 aa, unidentified
MSKYIGFDIDCKKTVACVVENGKKDIYQTLGPDIKSMQRFLKEQRRSGDRVELAFEVSGQAGFIYDSLAGCVDEIKVANPSKMTWIYRTAKKNDRIDARKMAVLMSIGELPVVYMPSSQVRQWRQTILHRKKIVCRVVQVKNRIRATLKSQGHNKPANKGGWWKKTNRLWMREVCEQSIGICSLWYMHLCNLLDELELLESQLSRVTKYLDGYLDKYPGGKLLMSIPGVGPRTSEAVLAYTDDIERFGNYKQYCSYFGLTPRLDESGSLRRLGHISKHGPSVVRWALCESSWMVIRKSKGLRAFYERVMGEQKGRKKIAIVAVARKLLAIMRAMLLSGELFNEELVNKVEETILVA

SEQ ID NO: 462643 - protein, 349 aa, unidentified
MLADQLDYIVGVDTHLDEHVLAVVASPSGAVVAKRSVRASARGYASALQFALEAGNGARVWAIEGTGSYGAGLARYLVGRGETVLETSRLPQSERRLRGKDDALDAVRTARAILASDTLALPRAGERREALRLLLVARRSAVDVRREALGQLRGVIVTAPDSLREQLRTLPVGKLLQRCSRLRRSSAMSTDEVAVRLVLRSLARRIEAATVEAAELERELLVHVHALAPQLLDEPGIGPIVAAQLLVAWSHRGRLRSEACFARLAGVAPVPASSGKTARHRLSRGGDRQLNRAIHTIVLHRRQHDPATRDYIERRIAEGKTRRDATRLLKRYLARHLYRLLEQQQPLMT

SEQ ID NO: 462644 - protein, 418 aa, unidentified
MLTVDGAETGVLFVGDDWAEDHHDIELQDGSGRVLRTARVPEGVAGMARFHELIATFLPDDADPAQVLVCIETDRGPWVRALVAAGYRVFGVNPKQAARHREVVSLSGAKSDKADAHTLADMVRTRRHHLRAVAADSDEAEAVKVVARAHQTLIWERTRHMLRLRAALRDYFPAALEAYKPLGLTGADTLELLAKAPTPAAAAKLTATQIGVALKRARRRDIPAKAAAIRAALRAEHLGQAAVVAGAYAATVRAIVAVLQTLNTEIKTLEGQVEAHFGQHPDAEIYLSQPGLATVLSGRVLAEFGDAPGRYADAKSRKNYAGTSPITRQSGKSKTVHARFIHNDRLVDALHMQASAAILHDPHCRAYYDELRGREIEHNAALRQLANRLVGLLHGCLKTGTLYDPETAWSHRAQPRAA

SEQ ID NO: 462645 - protein, 320 aa, unidentified
MQPVIGIDISKKYFDADILGNVKRFDNNPKGFTKLLHTLPSHSHCVMESTSTYGNKLSYALHEAGHVVYIVNPLQVSSFAKMKLSKVKTDKSDAKLITEFARMNLTDLKPYDFPSQSIQSAKQIETLLSELKTQRTSLINQLEALVHNHFVSAEVENCLKNAIQYFDQEISKLVEKEKHYIDKENKEKREKIATIPGVGDATACMLIAVTNSFTNFKSSKQLSSYFGCCPRVRQSGSSIKARGILSKIGMSRIRTQLYMCAVSAKKCNESCKALYERLLAKGKPVKVALMAVVNKLIRQIYAIISKNESFVENYKKEFAK

SEQ ID NO: 462646 - protein, 340 aa, unidentified
MNVTTIGIDLAKSVFQLHGVDAAGEVVFRRKLRRSAVLDFLRDLPACLIGVEACATAHFWAREIGALGHEVRLIPPAYVKPYVKRQKNDAADAEAICEAVTRPNMRFVPIKSAERQGVLMLHRTRDLLMRQRTMTLNAVRAHLAEFGIITAQGPRKILTLIRAIQAGEVQGLPPVAATALESLAMQLDCLADEVHKLERQLMAWHRADETSQRLETIPGIGIITATALAASVPDPSVFKTGRQFAAFLGLVPRQSSSGGKDRLGRISKMGDGYLRRLLVVGATSVVRRAGDNTSATGVWLRSLLERKPARLVTVAVANKTARIAWAVLARGETYRAPKTA

SEQ ID NO: 462647 - protein, 421 aa, unidentified
MARVVHAAFAALVGLDWADAKHDVCLHLTGTARREFLSFAHRPEAIDAWVQTLRARFSGRPVAVCLELNKGPIVAALRQYDFLVLFPVKPLTVARYREAFPPSRAKDAPTDAELQVELLLTHRDQLKPLQPQSPAMRALAQLVEHRRRLVGDNVRCTNRLTRALKISFPQVLQWFPEKDTAIFGDFLSHWPTLKAAQLARRSTLEGFFRAHHVRSADAIAPRLQAIKSAMALTTDDGVIAPNVLLVQALVAQLRVTLQAMADFDTAIAQRAQAHPDFPLFDALPGAGVVFAPCLLVAFGEPRERFTSAEALQKYAGIAPVTERRGKKAWVHGRLQCPTFLRQTFVEWAAESTRHSFWAQVYYQQQRDKGKAHQAAVRALAFTWIRILYRCWQDRTPYDESVYLQALKRRSAPLLHTLAKEA

SEQ ID NO: 462648 - protein, 391 aa, unidentified
MIFVGIDVAKDKHDCFILNSEGTVLADVFTIANNRIGFETLLSRIQSCSQGESKIKVGLEATGHYSYNLLGFLLDSGLTTYVINPLHTNLYRKSLSLRRTKTDRIDARTIAMMLMSDVDLKSYSNTAYHNEELKSLTRYRFDKVKERAKLKSSVARLVNILFPELEKLVSSLHIAVVYALLSNYPGASYIANANTEELAETLCTASKGRYTKSKTAEIQAAAGVSIGSKMPAKSMELKHTIALIRELDKEISEVESAIDKITSQMDSPIFTIPGIGRHMGAMILAEVGDFSNFASADKLLAYAGLSPSTYQSGQLQNCYAHMEKRGSRYLRYALFNAAKYVCLWCPTFSAYLEKKRSEGKHYNVAISHAAKKLVRLIFAMQRSGKAFLADY

SEQ ID NO: 462649 - protein, 353 aa, unidentified
MYSVGIDLHKERAWYCVFDAQGRQVSQGSLPASPESFKKFFGEIPRPFKMAVEATYNWYYAIDIAEEYAAEVYLADSYHVKAFAKKHKKTDKIDAKLITWLLHRGDLPTVAIPDKETRKKREVLRYRMRVVSDKTRNIVRVKALLDKLGLKGTGDFNTAKRRDEIRQMSVPAPYGEIVQHYLARIDQLCAEVKELNMLITTLAKTDDDVVHIMSVPGFDSFSALLITTEIFDISRFRSFPAMCAYSGLAPRVHGSGGHYYHGPLNTNRRKYLQWILLENAWHTMRKIPRLERKYVAIKKRKGSNTAKVAVARDVLKIIYHVLKEKRPFYPELIISNKTAAQSQSAGASALVGV

SEQ ID NO: 462650 - protein, 327 aa, unidentified
MLYSGIDIHPKVSQCVVGMASGEIVKEEKIKSDKNEIEEFYSGLGKVKVVFEATTNYEYFFEVFEKLGCEVVLAHPLKTRAIAAARIKTDKISARILMDLLRADLIPASYVPPKDIRELRKLTRHRIFLGRYRAQMKNRIHSELIKKALRYPGPNVFTLKGIEWLKQLNMPLINSYVSIFRSIDQELKLAENNITISGKNYPQVRLLVTIPGISWYSAMIIYSEIGDITRFPSEQQLFSYAGLVPSVHQSGDNCYYGSITKQGTKNLRWILVETLMVHIQCCPDSKITQFFYRLKKHKPSNVATIAAAKKLLQVIYHMLKNKTEFQN

SEQ ID NO: 462651 - protein, 365 aa, unidentified
MTDHSTKQVGVTIGIDLGDRHSHLCVLDGEGQIIEEGRVVTNRAAFERRFAGEAPARIAFETGTHSPWVLALLTELGHQVIVANPRKLRMIFKSDSKNDRVDAQQLARVARLDPQLLSPIQHRSQEVRADLHLLRSRDVLVATRTKMVNHIRGCMKGFGLRLPCVATTTFPRVAAPMIPRNLRSSLVPMLRMIAELTTRIRDSKRRIERLCAERYPQTEVLRQVNGVGPVTALTFMLTLEDPSRFAKSRDVGAYLGIRPKQRQSGHSDPELRISKAGDRELRRLLVQCAQYMLGPFGKDSDLRRFGLRLAARGGASAKRRAIIAVARKLAVLLHRLWVTGEVYEPLRQASLRAPGMESTRELARV

SEQ ID NO: 462652 - protein, 343 aa, unidentified
MQAVTTIGLDIAKSVFQVHGVDAAEQVVVRRQLKRRYVLAFFEKLPPCLIGIEACASSHHWSRELQALGHKVRLMPPAYVRPYVKRQKNDAADAEAICEAVTRANMRFVETKTPEQQSCLMLHRTRHLFIRQQTAVINAIRAHLAEFGIVAPVGRNGVEELLGVVADASDKRLPEIARACLAALGAQLRMLKAQILEFDRMINAWHRSNETSKRLDEIPGVGPALATALVASVADPRAFRSGRDFSAWIGLVPKQHSSGGKDRLGGISKQGDRYLRSLFTAGALAVIRYAKIHGAKHRPWLTALLARRPTKVAAVALANKIARMAWAMMARGERYKEPVALAA

SEQ ID NO: 462653 - protein, 373 aa, unidentified
MAMKVKPEEVIRHEEVYSVGLDVSQRSTSICVLDGSGAVVLEGQAKTNPFEIGRYLQKRLEGPLKLGMETGSLAAWLYHGLRKMGFDIAVMDAVHAHRALSLKRHKTDRNDAHGLAEMVRLGAEWMKIVHVKEQAAQELRVQLAARARLVKQRVDLENELCGLLKPFGFVVARGNVAPDTFRDRVVDVLAEAQDIGLHLKVVLMPLLDVHRLIATHIAEADQRLEAVAQAEPVCRRLMSVPGVGPVTALSFRAAIDEPTRFKRAADVGMYLGLTPRRFQSGEQDHHGRISKRGDSVTRLHLVQAATVLLVSVKRWSTLKAWGVRLVNRIGFNKAKVAVARKLATVMYRIWRDQSEFRWGKAPMGPAASAAATS

SEQ ID NO: 462654 - protein, 389 aa, unidentified
MYFVGIDISKYKHDCCIISAADQQIVSKFTIANDKDGFEHLLTTLNSLSNPEDIKIGFESTAHYALNLELFLENAHHSFMEVNPVLIKEYKKSTSLRRTKTDSVDCESIARWLMTVEYKPHSKGFYHAYSLKSLTRLRDRLIRQRSFYLVKITNVLDHTFPEFKPFFNKRLSKTAIYLLENYGSAEKMAHMNSTSYDKLRCVSRGKFSIQQFLRLKELAANTVGVNNSIFDIELNSLLTLYNSLCKEIKVLETEITRLIEEVHPHYMSIPGIGPISAAVIYAEYGDISNFSTPGQMLAFAGIEPGIDESGTESHGGRMVKHGSAQLRYVLLNACLPLIRFDITFATYYAKKRAEGKKHRVAITHVAKKLIRVIYALEKQDIDFNAQKLR

SEQ ID NO: 462655 - protein, 407 aa, unidentified
MDVLVERCCGLDVHKRTVVACLLTADPGSRPTKEIRSFATLTKGLLALRDWLAAAGCTHVAMEGTGVYWKPVYNLLEGQFTLILANAQHIKAVPGRKTDVKDCEWIADLLRHGLLRASFVPDRNQRELRELTRYRSSLVQEHAAEVNRLQKTLEGANIKLASVASDVLGVSGRAMLQALVAGETDPSVLAGLARGSLIDKRADLEQALRGRMGAHQRFLLGEQLRHVEALEASIARVSAEIEERLNPFAEALDRLDAIPGVGRRTAEVLVAEIGVDMSRFPSAAHLASWAAMCPGNNESAGKRKSGRTRRGSPWLRSALVEAARAAQRTKGTYLGAQYRRLKARQGGKRAAIAVGHSILISAYHILGGRQDYIDLGEQHWQQTAKRREHRMAERLRGLGYTVIEPAA

SEQ ID NO: 462656 - protein, 416 aa, unidentified
MKFKMQNKQNQLIERISVKHLVVGVDIAQQFHVGRAVNFRGIVVGDPLTFKNDEEGFTSFLKWIKNLQRLNNLCEEIVGMEPTGHYWINLSKWLLKQNIEVVTVNPHLVKRNKENRDNTQSKSDKKDALVIADMVKNGYYSEVRYTSESFEKLRVLMSNRDVVVKRLVSSINQLNRWIDIVFPELRQVFKDITAKGAIATLRLFPTPMELATKQPHEIIMGWKSLMKRQPGLKKAQLLLQVAKNSIGSRQALDAYKFHLEQLLEEYDLAVIQLERVEKQVTDVLNKIPYAKKLLTIKGISGISLAGILGEAGDISGFSHGNSLLRHAGLHLAEASSGKWKGQIVLSKRGRSRLRRFLYLATMSLVMNNPEFKGIHTHNVKVKKMKKMKSIMKLIGKLARIFVGMARRNESYNSEKL

SEQ ID NO: 462657 - protein, 408 aa, unidentified
MLTPIVKRCAGLDVHKMVVVATVLLEQEDGSLREETRQFGTFRKHRRQMVRWLDGFGVELVVMESTGIFWKSIFACLEEAGIPTYVVNARYVKKVPGRKTDVSDSQWLATLGRLGLLKPSFIPPKDLRELRLITRQRIKIRGMLAAETNRLHKVLDDAGIRMGGVVSDINGLSARALIRGLIEGKAPEDIVPHVYGRLKEKIPQLLDALDEPLSERHRFLLQSLQEHIGYLEKEIADVDHYLFAAMSPYKRQWEILQTIPGVDAISAVMLLVEIGIDMQCFGSAHRLASWAGMCPGNNESAGKQKGGRTRKGNHVVRQLLCEISNAASKSKSQFKGQYQGLVIRRGHKRAIIAVGHKVLRVVYAMMKSLQPYRDPEIDYTQLVVQRNAPRWLKALKQYGYLPAIAQAE

SEQ ID NO: 462658 - protein, 330 aa, unidentified
MLYGGMDLHKKSSEIVLKTKDGEKIKEGNVKSEKKPIKEFFEGIDDEIKLAIEATPQSQYYYDLIEEMGIDVVLSNPLKTRLIAEEKVKTDTVDANALCDLARGNLLPTCYVPEKDIRELREIARTRISLGKMKGNVKNHIRGVLDRKKIEYPGGDLFNKKGIRWLKKLDHPLVDAWIPLFETALEQCDKVERKLGKKAEKYDEIELIESIPGIATYSASVIYGEIADIDRFSSEKKLYSYAGLTPSIHQSGEVEYHGEMTKRGSKYLRWVTINAIGNHNRFCPNSKISQYYRRKKKEKPTKIARVNGARKLLQAIYWMLKNNDKFRAGG

SEQ ID NO: 462659 - protein, 350 aa, unidentified
MRILAVDLGKNKSVFVDYHVGGDRHFGKVDTNAHELQKLLLRCTPDRMVIEAGAAAGWVCDLAEKLKIPIQVANANDERWRWKNVKDKSDRKDALKLAQMSEMDCLPTVHVPNASVRQWRALIGYRNALVSRRTAIKNSIRSIYERQGIHLSAARKAWTPAAVEELTKETLLATPDQLWLFEVACELEQLQTLQDQIERIEVRLEEIAQKKESVKLLKTAPCVGPRLGEVVAAVLDDPHRFKNARQVACYAGLTPRRWQSGNRDCQGHISKAGPRLLRQLLVEISWLGVRHKTWMLDVYEHVCRGSDKRKRIAIVAVARRLLIKLWAMLRDGTPWIEPNPSRTAATAAGG

SEQ ID NO: 462660 - protein, 344 aa, unidentified
MEPMYYIGLDVHKRKISYCVKDSGGKVYSEGSLTATRLDLDVWMKTLPQPWSAAMEATLFTGWIYDHLKPHAAALKVAHPLMLRAIAAAKKKNDRIDASKICDCLRCDFLPECYMASTVIRERRRTLRYRNLLVRQMVQMKNKISGLLMEAGVSYNKQRLHRAGYFRELLATNSDIDEGLCSLLRLCRETVVRLQKTESAMVLSLERDSLLMDRVERLMTIPAVGPITALTWALEVGDAQRFSSIKKAISYCGLCGAEKSSANTVQRTPLSKQRNKHLQTTLIEAAKMAPRYSPNLAMLYDKEKQKGNANRATLAVARKLVAYLMAIDRGQRNFQVVETNCIAA

SEQ ID NO: 462661 - protein, 341 aa, unidentified
MTNLLPPRGKIKFYIGVDISKNKLDFAVTSNRSLLHHRAIPNVKQKITEFLSELKDSHQLKVKYCVFCMEHTGVYGNLLLQVLEKLKTIIVVENGYHVLHSFGLSRGKDDKTDAIRLANYAELRYPDLRLWKPARPALVKLAYLSTVRDRLVSISTQLKVPLKENKAFVIENLSVAAEVHCKKSSLAVKADIKKIELTMDKLIAGDERLLSLNKLIVSVPGVGKHTALQVIIRTNEFITIHDPGKFACYAGVAPFKTESGVKSSKGKLSPLANLKMKTLLHICAVRAVRVDPELKAYYDRKVAEGKSKMAVINAIRNKLVLRIFACVNNNRLFLRSTEIIK

SEQ ID NO: 462662 - protein, 328 aa, unidentified
MCVVDAAGRIVREARVPSEPDALIAWFRGLGLQVSRVGLEAGPLSQWLYAAMRGAGLAVELLETRHVRDAFKAMPVKTDRKDARGIAQLMRLGWFRPVHCKSLPAQEARVLLTTRKLLQAKHHDVEMSLRGVLRGFGLKVGPTPPRSFSGRIREPVEGHPTLTAVAGALLAAREALGEQLRGLERRLRDQARGDERARLLMTTPGVGVVVALTFAAAVDDPARFRSSKAVGAHFGLAPRKYQSGETDVTGRLSKIGDAGVRTALYEAANVILTRPVKGSALKSWAARLANRAGMRKAKVALARKLAVVLHRMLADGKPFAAERAAAAA

SEQ ID NO: 462663 - protein, 401 aa, unidentified
MRCVFGIDVSKDSISVAIVIDQTMFKETKLPLNRDGFRKLEEALQSFNNPEVVFEATGVYSRRLQRFLDDLGQDYTCLNPLVAKKQLDGLRPYKTDRNDARHLAETQFIMNRAVTYKISPVYRKLMDFSRFYQEVSKDVATHKNRLHRSLQLVFPKIEHVLSNTNNELYWSVVSQFSQASQVTEEYSFNEVVDLILKGTQKKISRARAEQIAHSLYSAARLSYSAVDDDSPVYLQVKHLVNQIREETKLKASIIEQMTALAKELPEYNELLSIPGLGVRTVVSLIGELGDIRRFRNSNVLNAFIGIDLRHYESGDYVANDHISKRGNTVARKILFKAIQNIASAAHYHPNHINDYYQRRKLENGQQGTKKIAIAAIHRLIRTIYHLVINNQFYDYTLATKG

SEQ ID NO: 462664 - protein, 462 aa, unidentified
MQTMTLGIDVACRAAHQCSLADERGHFVWSAKKFRTTSEDLEKLWQSLPETIQLTVVMEPTRNAWVPLAAWFRRHGAHVVLVPAEQSADLRDYYSKHTKSDRLDSRMLARLPLLHPEGLRAAEGMGPADPMRRATKLRANLVKRRTMVVARLDCYLELLGPSWHRAFGGDLVNNTPLQFLAAGYGDPNTLRRLGRARLIKFLWRYSHGAWGESHATDLLAAANETLRLWGHEIDFGELGDDIAVEARLALQLSKEIHELDERIAVFLQERDPAGIMASAPGVGKVNAAQILARLGDPNRFKSLAGARSFSGLVPSLNASGVNGHHGSPTKSGDAPLREALFMSAGWARRVDPTLAARYHRLMVKEGKHHNSALCHLSTVLLTRMIACWRNGTPYVIRDTDGTPITAAQGKAIVSERYRVSEDIRAQRRTTHKQSGTGRRSKESPGAPSTSPSQDQARTPQVA

SEQ ID NO: 462665 - protein, 331 aa, unidentified
MKNFRTVFMGIDVSKNTLDFCIHDSQNNKNYSIKNSEKEIMKLFNKCTSYSSCIIVGVENTGRYNWPLYHALLDKDVKLYVVSPLHLKRSMGLVRGKNDKIDAERIMMFIKKHHYELTPWKAPRLQIQKLKVLLTERNFRIRMKRQLLASQKDYYLMKNIQMQKPLLELNCELLNQINQQIKALEETIEELIMQDKQLHNKAKLMQTVPGVGKILCWVMLAQTNEFKNISNPRKMACYSGVVPFENRSGTSLIRKPRVSFLADKQMKSLLHLGAMSAIRLDNDLRIYYQRKVKEGKNKMSALNAVRNKIIHRVFAVVKNQVPYENKLIYSV

SEQ ID NO: 462666 - protein, 343 aa, unidentified
MNEYDGKQFVGIDLHRRHSVIVRQTSTGERLSAVRIVNDPDSLALQLEEAGEHPDVVLEATYGWYWAVDALQAAGATVHLAHPLGVKGFRYRRVKNDVRDAGDLADLLRMNRLPEAWIAPPPTRELRELVRYRAKLVALRSGLKAQAHAVLAKAGVLIAVSDLFGVEGRQRLARVPLGAAYAQRMSSLLELIDVLDTHERRFAEQIAAKLYDDRGYGAIQQLPGVGPVLAAVFVAEIGDVHRFADPSHLCSWAGLTPQHRESDTVVHRGHITKQGSKLVRWAAVEAIQRQPAGTKISVDRKRIEARRGKNIAKIAAARKLLTLVYYGLRDGHIRALTHQPAAA

SEQ ID NO: 462667 - protein, 344 aa, unidentified
MKITTVGIDLAKNVFQIHAIDERGKTALKKQLKRGQVAELFANLPVCLIGMEACGSAHHWARKLAGFGHTVRLMAPQFVKPYVKTNKNDAADAEAICEAVSRPNMRFVPIKNIEQQSVLALHRVRQSFVKARTAQSNQIRGLLAEFGLVVPVGIANIAKRVPELIEDATNELTGSVRLLIARLMDHLKELDRQVDELEAQIKSWHRASDASCKLEKVPGIGPITASALVATIGDAKNFDGGRQMAAWLGLVPRQHSTGGKSNLLGMSKRGDTYLRTLLIHGARSVIFRAQQKVDKVGWLNELVQRRNKNVAAVALANKNARIIWALLANDREFQSNYKTASMAA

SEQ ID NO: 462668 - protein, 412 aa, unidentified
MSDGIVSWFAGVDWGSERHQVCLLDAAGQVVGEREFRPGGAGLAALCDWLVSIAGEPGRVAVAIEVPHGPVVDALLDRGFAVHAINPKQLERLRDRVSLAGAKDDRRDARVAAGGLRTDPHLFRPVEAGDPAVIALREWSRLAEELQQERVRLSNRIRQQLWRYYPQLLEVSDDVTAEWVLDLWTLAPTPAQAARLREATLARLLQEHRIRRLEAERVLGLLRQPAITVAEGVTEAAVLHLHSLVARLRLANREFHQAERKLDELCTALKEDTAASGGVPRDAAVLSSLPGVGPVTLATLLTEAAGPISRRDYAALRPLSGVAPVTKRSGKSCIVTMRYAAQIRLRNAVFHWARVAVLNDPKCGSRYAALRARGHSYGRALRGVADRLLGVACVLLQRGMLFDPDYGSSAPA

SEQ ID NO: 462669 - protein, 430 aa, unidentified
MAYRIAGIDVHKKMLAVVVSDVEIEGEFQFERRKFGSNPEQLRSLAKWLLEQEVEEVVMESTAQYWRPVWEALERYWKPIREKREGAHRRSGTLHLAQALSNRGRRGRKRDFPDAERLVKRLVARELTLSFVPDAEQRLWRTVTRKKYQLTRDKVRLQNQLEALLEEAHIKLSSLVSDLLGASARRMLQALAEGETNPAALATLADQHLRATPEQLCDALGACTELKPVYRRLLKMALEQLQFLEQQMGQLDKEMANLLSQHQDAVQRLAEVPGLGVDSAHQIIAEVGPTAATFPSEGCLSSWVGACPGQEESAGVNYSHRSPKGNRHMRRLLSQTANAAVKAKGSIFELVYRRSVPRLGHNRAIGAIAHRLCRLTWLILHQGVRYEERGPAVSQKSKQARTARMIRQLRRLGYRIEAPNAQHPSSAQVQ

SEQ ID NO: 462670 - protein, 324 aa, unidentified
MAHSRDVVGIDVSKENLDVFVVASEQARRVTNAAAGHAELVGWLKSLGVTIAVMEASGGYERTVACTLQRAGFAVRIVDPRRVRHFAKAAGRLAKNDRIDARIIAEFGAVFALTERCEIAPDARRDHLAGLVAARRALVEHQTGLRNQTSAAPCGPARAAMAAALKPIASAIKKLDRLIAAAIAAHAPFATLAARLDTVPGLGPATIAAIIAWLPELGHLDRRAVAALVGVAPFDDDSGRRAGQRYIQGGRCKLRNVVYMAVMGAATRHNPVLKAHYTALINRGKLPKVALIACLRKLLTILNAMVAQQTDWAPKLSTAAARLG

SEQ ID NO: 462671 - protein, 343 aa, unidentified
MKLSRVGIDLAKNVYQLHGVDRSGKTVWKRRLKRHQWFKVLLDTAGPECEIGMEACAGAHHWGRELQSRGYTVKLIPPQFVKPYVKSNKSDAKDAEAICEAMSRPNMRFVTVKRVEQQDIQATHRIRAELMTQRTAKANQIRGLVAEYGLVAPKHLSSLRAAIPCWLEDAENGLTGDFRALLQGVWEDLRLLDDRVGEMDKLIKRLAENNEDCVRLQQLRGIGPMTSTAMIATVGDARQYQKSRQMAAAIGITPKQHSSGDRDRLLGISKRGDVYLRTLMIHGARAVVARAKHKDDRLSRWVTNIANKKHPNVAAVALANKTARMAWAMLRHETDYDPDFALR

SEQ ID NO: 462672 - protein, 274 aa, unidentified
MAILETKGKEPVTAKALPNNAVKIIKELAPYQEKGIVQVAYEAGCLGYTLCRTLKEFGFDCRVIAPNKVFHGGDATVKTDKRDALDIAWMLRRGEGESIAIPSAEDEATRDLLRCRGDIPEDLKRAKQRLLKSLLRKGINYETNRYWTAKHRRWLNSLVFEREFERITFEEYVTEVEHLENRLSGMGKKIAETAESPRYAEKVRLLRAFRGIDYLTALLLVVEIGDYRRFGSAEALRSYLGLVVKERTSGKKRRQGGITKTGNGHVRRLLIESS

SEQ ID NO: 462673 - protein, 323 aa, unidentified
MNKGIKYFGIDISHLVFDVTDSEGNYYQFKNNPSGFKKFEKFLDVDSHCVMEATGYYHYQLAYYLLELSIKVSVENPLSVKRFIQMKLSKIKTDKSDSKLICEYAKQVELKLWQGNSKHQTACLQMTRLLSVYTKQSTMLKNKLHGEAVLGNPSKVVVSSLRRSLRQVEKEIKTLEDKLLILVKQVHQDVLTRIKSIPGIGNKTAIMLVVLTDGFDRFKSGSELCSYAGLTPVIRQSGSSIQGRSRISKIGNQKLRNLLFMCSFNACKYNKACREIYERIVAKGKSKKLALIAVCNKLLKQAFAIAKSGLIYDDGHKSTLVKN

SEQ ID NO: 462674 - protein, 350 aa, unidentified
MMIIGCDYHPAFQQIAFVDTETGELQERQLEHPDGAEKFYRDLAAQGKKVRVGMEASGHARWFERLLAELNFELWIGDAAEIARKRERKQKTDRQDAQHILRLLLKDDFPQIWMPSWENRDLRQLLWHRHRMVQARTRLMNQLQAVALNEGLRCKKRLWREAGRKQLEAFRLAPWASRRRHDLLELLDRLNPTIAELTQAIEREVEKCPEARRLQTHPGVGPLTALAFVLIIGKADRFQCGKQIASYLGLVPLEKSSGNQRRLGHITKQGNALLRFLLVEAAQVTVRSLPEWRSKYVHLTMRRGRKIAKIAMARKLAVQMYWMMRKEWDYEQLKKFGSHAGQPGHRYGVQ

SEQ ID NO: 462675 - protein, 445 aa, unidentified
MYHHLSSRIAAEGRTVKYQKTGSHAVNSIHGGVIMEKVYDKCCGIDVHKKLIVACFKKGNRQEIREFGATTRELLEMADWLKDGGCEMVAMESTASYWKPLYNILESSDLNAIVVNARHMKAVPGRKTDVKDAEWIADLLMHGLLQASYIPDKDQRELRELVRYRKSLVGERNRELNRLQKMLEGANIKISGTITDINGKSARNILEYILSGKQIDSAEYDILYEKKVIAHNLKASKEQIIDDLNGIMSDVQRKMLRLLLKHLDELNAIIKELDDDIDNFMKPEEKRAAKAIQDIPGIGNTSAQAIISVLGTNMERFPSDGHLASWAGLCPGNNESAKKRKSGKTRKGNALLQETLVVSAHSAVKNKKSYFYAQFMRISTHRGKKQAYVAVAHSMLIAIYHILKDGVPFKDLGADYYNQFNKERKIHAYLKKLKALGWEAPVVAT

SEQ ID NO: 462676 - protein, 349 aa, unidentified
MLADELAYVVGVDTHLDAHVLAVVAAPAGAVVARRALPASARGYREALDFAEQYANGGRVWAVEGVGHYGAGLARFLASRGELVLEVSRSPRAERRLRGKDDSLDAIRTARAALTSETLTLPRSGERREALRVLMIARRSAVDVRREALVQLRSVLVTAPERLRDDLRGLPVGRLIERCIRLRRSRCASADELAARLVLRSLARRIEAATAEAGELEAEILGHVRALAPKLLDEPGIGPIVAAQVIVAWSHPGRVRSEAAFARLAGVAPLPASSGQTVRQRLSRGGDRQLNRALHTVVLHRRQHDPATKDYIAKRIAEGKSRREATRLLKRYVARHLYRLLENQEPLMA

SEQ ID NO: 462677 - protein, 321 aa, unidentified
MTYVGIDVSKATFVVAYSSAKSSETKTFKNTTKGIREFIRTISPEENHCVLEATGNYSMLLVYLLSKAGFTVSMENPLKIKNFARVMLSVVKTDEIDARLIALYGERMQPAPFKLHSDSLLLLKQKRTVLRQLKKQLIANRNLEGSLKVLPFIDSKCKKVLEKTIKFLEKQIEEMEEELTSLAEIEYKKQMDLLTSIKGIGATLAAALIIATGGFTYFDNAKQLTRYLGLSPTYQQSGTSVNVKGHINRNGDAYLRSQLYIGAMASLRCNTECKACFDRLRSNGKPGKLAIVAVANKLIRQAFAVVAHEKKYIDGYKSVKP

SEQ ID NO: 462678 - protein, 332 aa, unidentified
MTPVDSPCLASVLGIDMSKAKFNAHLSLPGDGGSHSGEFANTAEGFKALSQWLKKHTPKGGSLHAGVEATGNYALPLLMHLHRAGHRVSYLNPRRVKDFTRSLGRKAKTDPVDARDIALMVERLRPALWTPPAVERCELQALVRHRRDLVAQVTANGNRLKTAQSPAVKASLQQLLKHLRQQLKAIEEQISRHTLAHNSLQRDERLLRSIPGFGRTVSAAVLGELPRLEDFSRAREVVAFAGMAPTVTSSGSSVQKRGRMSKEGSPLLRQMIYMAALNAITRPTALKPFYQALVARGKSKACALGALMNKLLRIAFGVLKHQTPFVENFAKL

SEQ ID NO: 462679 - protein, 428 aa, unidentified
MNEGERIRLEDFRQLKKEIRGSERHLIVGIDIAKHKHKAFFGTATGKALLRVLVFENTIEGFNRLRSRTEALKVQHCLSKVIYGMEPTANYHKPLAEYLIKCGHHVVLVSGVAVNKNRELLDGRWDKHDTKDAANVADLISQGKCLYYDYPSDRLRDLRSLLSLKRRLKKQEHGVKVRIRNHLLAQYFPEFDRYFAKGCSESLAIVKWCLHPSMIAGMEYDEFIEMVAPRMKTLGQEKRLKSIWELAIDSIGCDGGQSLNFEAKLMVEDLQQSRDSIRAVDEHIEAICLHFREYRYLLSIPGFGPDISSKVLGAIGNPFRFTSGKQVLKLTGYDLSAHRSGKGSDSAVPVISKRGKASLRYALYQAAFIASTSNPHFIAYYTNKLRGREREKGIKTKMRVKLAAKMMIIAWTLMKRKEPFNPDYLKVE

SEQ ID NO: 462680 - protein, 381 aa, unidentified
MEVTYTHCAGLDVHKKTIVACGIVSSPGQKPVRKTQTFGTWTSDLLALSDWLSGQGITHVAMESTGEYWKPVYNLLEANFTLLVVNAQHIKNVPGRKTDVKDAEWIADLLRHGLVRGSLIPPLPQRDLRDLTRQRTKLVQEKAAVVNRLQKVLEWSNIKLASVVTDVTGVSARAMLKALVAGVEDVRELADKAKGRLRSKRQQLEGALNGNVRSHHRFLLTHHLTHLDFLEAQIAIFDDQIQTQILAQTLSPQSSSNSSGDTIENNLRESDDSPLTGEQAIILLDTIPGVGQATGEMLLAEIGLDMSRFQSAAHLANWAKLCPGNHESAGKRYSGRTGQANSWLRTGLVQAAHAAVKFHKSKVKSQKSKVLPLPEVRGFST

SEQ ID NO: 462681 - protein, 366 aa, unidentified
MSSVTPAAGPIHLGMDTSKNTIVVGVLMPGDEVPVIDRIWNEEGSVRHLVGRLGDPVALRACYEAGPCGFELHRLLASMGVACDVVAPSLIPRRAGDRVKTDKRDASRLARLHRAGELTPIRVPSPAEEAVRDLVRVRAALLADRKRAQQRLTAMLLRHGRVWRSGSYWTQAHERWIAGQHFKEPALATALAHYRAGLGTRRAELDAIEAELAPWAGREPLAGTVARLGCYRGIAELHGLALAAEVVDWRRFPSARAFMGFTGLVPGEYSSGDRTRRGSITKAGSEPVRTALVEAAWAYRFKPALGVTLRRRQRDAEPDTLARSWKAQRHLHSKYKAMTARGKPPGVAVTAVARELAGFVWAEMTS

SEQ ID NO: 462682 - protein, 346 aa, unidentified
MSHYVGLDVSVKSVSICIVDAQGTILARGETASDPDRIASFVHEHAPDPERVVHESGILAIWLTRELEKRGLPIVCIDARLAHKALSGRINKSDPGDAEGLAHLARTGWFTQVHIRSAASERVRVLIGTRERLIRMRKDLEGHVRGILKTFGICMSAVHRTRLREGFRDQLAEAATTDPAISVMAEMFNPIHKALCAATDAMDEELKTIARESDLARRLMTVPGVGPVVALSFIATLDDAGRFRRSRDVGAFLGLTPRRHQSGEMDWSGRISKCGDRDLRRLLYSAATTLITQVRKPSPLLAWAKRLQERKGFKKAAVATSRKLAVILHCIWRDGTVFETKMEVKT

SEQ ID NO: 462683 - protein, 414 aa, unidentified
MEVVYERCAGLDVHKQSITACRIIPAAGRGWQKEKRRFGTMTDELLQLADWLRAGQVTTVAMESTGVYWKPVFNILESEFEVILVNARHIKYVPGRKSDVSDAQWIGELLQHGLLKASYIPEQPQRDLRDLIRYRTALIQERAREINRVQKVLEDANVKLASVASDVMGVSSREMLAAIITGKDDPQALAELAKGRLRAKIPELERALQGRVRDSHRLLLQLHLEHIDDLSRKIERLNGEIEQQMPPFDQDEQLRRLDEIPGVGRDVAQIILAELGHDMSRFPTSAHAASWAGLAPGKNESAGKNRSGKITAGNKHLKSALVQAAHAVSRTKDNYLSAQFRRLAARRGKKRAAIAVAHSILVIAYHMLRDGTEYQDLGGDYFEKRNKDQLQRHLVKRLEGLGLQVSLQSAVAVT

SEQ ID NO: 462684 - protein, 371 aa, unidentified
MEQSSKTLSVGLDVHKESVAVAYAPEERGAEVVSLGTIGTRQCDIDKLIRRLQSKGARLVFGYEAGPCGYWLYRYLTRKGFTCHVVAPSLIPRKPGARVKTDRRDARTLARLMRSGDLTSIYVPQVQDEAIRDLSRAREDAMRDLKTAKYRLKAFLLRQDIRYEGRASWNPAHLRWLSEVVCPTPAQQIVFQEYLRTVTEQSERLYRLESELHDQVKSWRLYPVVEAIQALRGLELTGAVIVIAELGDLTRFDHPRQLMSYLGLTPSEYSSGERRRQGGITKAGNTHARRVLVEGAWAYRYPAKISRHLQLRLEKLPAEVQAIGWKAQVRLCKRYRQLTARGKHVNQVVVAIAREMAAFAWAIARTVPLAH

SEQ ID NO: 462685 - protein, 337 aa, unidentified
MERQYVGIDLYRRTSTIYRMSPEGEMLGCVKIPSQPLELAEAMAEAGEAPEVVLESTYGWYWAADLLKELGANVHMAHPLGNNWGNRRVKNDERDAKDLAAMLRLGRLAEGWIAPPEVRELREVVRYRFHLVSHRSSCKAQIHGVMAKNGVLPARKEMWGPGGTAQLDALELPTGYAIRIDSLRDLIDIYDGEVAVIDTYIHGQLKDHPGYRTIQQIDGVGKVIGAIFVAEIGDISRFDSPKKLCCWAGLTPKHRESDDKVHRGPITKQGCPLVRWAAIEAVSKMRGGPKLRADYHQIAERRGKFKARVAVARKLLTLVYYGLRDNEIRCLEAPEAA

SEQ ID NO: 462686 - protein, 350 aa, unidentified
MMIIGCDLHTRYQQIAMVDTETGEFVQRRLEHESGEARGFYAGLKGAVRVGIEATGHTHWFEAMLSEFGHELWMGDAAKIRAAVVRKQKTDARDAAHLLDMLCTERFPKIWRPALAERDLRQLLWHRQKLVWMRGAVKNQMHALAMGEGVCRKKKLFTAKGRKELEGLTLGPWASYRRQELLRMFDELQGSVTKLDEAVEQAAQSQPLAVLLMTHPGVGPITSLAFVLIIGPIERFERSKQVVSYLGLNPQEHSSGGRQRLGSISKQGNPMMRSLLVEAGHTAARLDPQLKRMYQRLKFRRGAAVAKVAIARKLAVRMYWMLRSTADYAQLVRMRGSSWATLVEDNPSLG

SEQ ID NO: 462687 - protein, 381 aa, unidentified
MLWSRRLPNDQPAIEALMDRVADMKFVVWAIDMTAPESALLRGVLAARRQQIRYVPGRVVHSMTGAFAGEGKTDARDAVVIAQTARLRGDLATVSAPDDVAIELDLLTGHRNDLVAERTRGINRLRGLLTRIFPALERCFDYSTLTGLTFLTRFATPSAIAAVSDDEIYDHLRSHGVRRPTIPKMIDKARAAAAAQTVTLPGEATTALLVQHAATSLVMLTRQIADLDKQITEVFRRHRHARILESVPGIGTRSGAELVAITGGDLTSFGSPARLAAYAGLAPVPHNSGNRRGALRRPQRYHRGLRKVFYMAALNSSQRDGPSREFYQRKRREKRSHVHALIALARRLVDVVWALIRDGRVWLPRPTVERVSVDEVGAMAG

SEQ ID NO: 462688 - protein, 313 aa, unidentified
MIITLRCVGIDVSKRRLDIFDEGIGVSERVANAPHAIAELVARWRCDALVVFEATGVYDLELCGALRATDIRFARINPARARDFARACGQLAKTDPIDARMLAAFARAMRPATEQVSTPARNALARLAKRRDQLVLMRAQEKNRRSEAGDRAMVERICRLIEVLDREVTEIEADISALIKAEPEISHDAQLMRSLPGVGPVASMQLIAQMPELGHVGPKQAAALAGLAPFNVDSGAYRGKRKIRGGRKRVRNALYMAALNAVRRADRFKAFYAKLRQAGKPAKLALIAVARKLLIILNAIMRDRKAYMPAQQT

SEQ ID NO: 462689 - protein, 415 aa, unidentified
MKVVFPTCCGVDVHKSFLVATIIKTPKDNLQPSYQKKRFSTFNADLNRFSDWLHENNCLDVCMESTGKYWVPVFNILEKRGIRVVIANPKWVKAVKGNKDDTKDSKWIGDLFRIGLVKSSFIPAKDIRILRELTRYRYKLVSMKSSEKNRFQNAFTVCNVALDSVVSDMFGKSATAITDYLTSDENFDPQHCVSLLQRSLKKKADDVLASIEGYEISPEQKYRIGIVRDHLHYIEKLIERVDSCINAMVEKYDGAISLLCTIPGIDRNSAITVISEIGVDMAQFGSSKRLCCWAGLTPGNNESAGKKKSVRISRAGVYLKPALVQVAHAAVKDKTNPYYALKYERIAKRRGKKRAIIAIARMILTAIYSMLSTGEIWNPVDLFKIDLPEHLKEQQLQKAVKRAVRFLEAQGLKVS

SEQ ID NO: 462690 - protein, 321 aa, unidentified
MNKYKEIYGIDISKDVFDVYGSQSGHNQFKNDAKGFVSFMKYLPKDVLVVMEATGYYHYRLAQFLYKSDVSVSVVNPLSVKRFIQMKLAKVKTDKSDARAISEYGEVNDVPLYTALTDVQSECLQLFRLLDSYIKHRTATKNKLKGEEVLGIPSKFVYRSLNRNLKHLNKEVLALESRLLELVKQDQQHQLTLLKSIPGMGVKTALFLIVVTDGFKKFENASQLCSYVGITPTIRESGSSVRGRSRISKVGNKKLRNLLFLCAFSAYKHNKACREIYERIVAKGKSKKLALIAVANKLLKQAFAIAKSGRPYDENYVSRLA

SEQ ID NO: 462691 - protein, 370 aa, unidentified
MAQSTVFVGMDVHQDSVMVAVLPEGARECEESRQLPHDLARVRRLFARLSKRGAVRACYEASGCGYVLQRALTKWGVACDVIAPSLIPVRSGDRRKTDKRDAAKLARLYRAGELTAIRIPDEAEEQVRSLVRCRETFTREILKSRHYVLKLLLARGHAYRGGGNWTQKHWDWLRQVKLEGADRITLQTYLELLEYKLIQRDSLDSQIEKIAFSEAYREPVGRLRCLRGVDTLTAMTLVCEIGDVRRFASPRQLMGYLGLTVSEASSGGIERRGGITKTGNARARRVLVEASWHYRYPPRSSRGLRKRQEDQPSAVVAHAWRAQKRLHKKFEALVYRMAPSKAVVAVARELVGFVWALLRDDPEVLAPRVR

SEQ ID NO: 462692 - protein, 378 aa, unidentified
MHKDSVYLCILRENGEKIERVFGVLTPQLDSMRDFMAKNEVSEVAMESTSVYWISIWRVLVDSFELKLVNPYFIKQLPGRKSDVKDAQWIAECVMKELIRGSFIPPPLVQQLRLYDRRIFEINAELGRKYSKIDAILQRCNIRLSNYVSNTDCKSYKNVVKQISEGVTSPQELLAHVHKRIINKHGEDTILAALTGVVSEAETDMLAQYVAESALLEDNKNKCIEKMREICNREFEEQMKNLQTIPGVSERSAQTILAEIGPDVNAFPSAKHLVSWCGFNPRNDESNKKIKSNKITHGNRFIRVASIQCAWAASRTKECYFSKFYAFHTQVRKKFKLKVVVAVARKVLVCIWHILKFNVSYKDFEPQKSVTKDCTQFA

SEQ ID NO: 462693 - protein, 358 aa, unidentified
MLTQRKELNFEGQNIYVGIDVHLKSWSVAVLSENCILKKFSQNPDSKALHKFLTTNYPDASYYSVYEAGFSGFWTHEELIKLGINNIVVNASDVPTMMKEKLRKTDAIDCVKLARGLRSGDLTGIYTPQRDALEIRSLIRLRSQIVKDMTRDKNRIKAFLYFYGIKLPEQFDRPSTHWSKRFMQWLREIELLTPYGKKALDLHIKKAEYQRDLLLQETKAIRKLCGGILKDEMKLITSVPGIGITIGISFLTEIGDIGRFKNAYQLAAYIGLIPMCHSSGEKENNGEMTIRKHTILRCYIIEAAWRAIRSDPAMTTAYEGYRVRMGANKAIVKIARKLVNRIFFVLKRKQEYVTCIVR

SEQ ID NO: 462694 - protein, 412 aa, unidentified
MQIIHPCCCGVDVHTKTVVACLIKQGKKQVRTFSTMTDDLLAMSDWLVAEGCTHVAIESTGVYWKPVFNLLEGVLEVILVNARHVKAVPGRKTDVRDCEWLADLLRHGLLKASFIPPLYIREIRELTRYRQTLVKEQTAVANRVQKLIESGNIKLGQVATDVLGVSGRQMLRALADGEHDTEKIADFARGQLKKKKNELQRALEGRLTKAQRFVLGELLKRIDELTAAIVRVNEELRAEVSRSTDPFVAEAVSLLETIPGIGQRIAETIISEIGVDMSRFPTDAHLASWAGMCPGNNESAGKRLSGKTNKGSTYLRDALIQAAWAATHTKQTYLAAQFRRLVRVKGKKRALIAVGHSILVIIYHVVKQRASYQELGGDYFDKQNTEKLRARLIRKLESLGVKVTVEMMAEAA

SEQ ID NO: 462695 - protein, 341 aa, unidentified
MPIVTVGIDLAKNVFAVHGVDEAGKAVLIKPRVARDQLVTLITQLPPCLIGMEACSGAHHWARVFQQHGHTVKLMAPKLVAPYRMSGKRGKNDAADAAAICEAVSRPSMRFVPLKDEHQQATLCLHRTRQGFVEERTATYNRLRGLLSEFGVVLPQSPEKLRRNIADHLDALPGWAKRSISDLLEHAGNIEDRLVEYDRAIAEIAREDARSKRLMQLRGIGPTTASALLASIGAGHDFKNGRQVGAWLGLTPGQHSSGGKQRLGSITKAGDAYLRCLLVNVARAVIANLGEKQDRFSRWVRSLVERRGYWRAAVAIAAKNARMAWAVLKYGDDFKHETAAA

SEQ ID NO: 462696 - protein, 347 aa, unidentified
MTVYIGVDFHARQQMVSYLTTEDGEIQQVELEHEKDNVRAFYEQFRGQKVIVGFESSGYAAWFEEMLEELEYETWIGHATAIRQFARRRQKNDRRDADLILELMVRGDFPRLHRYSRESRERLQQLRYRQRLVKMRTMVINSLRFMVGSRGVTLRGTLQSRPGQARLMQVALPGPLGQQRDELLRLLIEIQQKVATAEEWLKQKAEADPRVQRLRTHPGIGLLTGLGLVATLESIERFSHSRKVTAYVGLDPVEDSSGERRRMGSISKQGSRLLRLLLVEAGQVAARRDAELGNVYRRVTLRRGHATAKVAVARRLLVRAFIMLRDEIDYAEFCRRGVAARSARGNA

SEQ ID NO: 462697 - protein, 345 aa, unidentified
MPIVGGLDIHRKQITFDYLDTVSGEVRRGQITPADRAHLRAWLARFTGRDDVAFAVEGCTGWRYVAGELAVAGVAAHLAEPADTAAARGCKRHAKTDKTDSRLLRTLLAEGRLPECWIPPAHVLEYRALLETYHDLRRERTAWAQRIHAVLFHQGAPQLGDGALRSEQGLVALREASAACLSPAGQLQIAIALDTIAALEARMAMVRKQLLAAARHLTGAKVLATRLYGVGPVTALALTCWLGGAGRFSSSRKAVRFTGLDVTVWSSDRKGPPGRLSRQGPPVLRWAVYEAGKTHARSSAPDHAYYAAVKDRKNSKRAALSEARKIVRQACHILTELGDDALTAA

SEQ ID NO: 462698 - protein, 347 aa, unidentified
MKTPSYEGKQVYIGLDVHRECFVASCISEGAVVKRCRMPGTAEAVIALVTKAFAGANILAAYEAGYSGFWLYRKLEAAGIRCLVVNPASIEVSSRDTVKTDKRDSLKIAQQLAAGRLRGVRVPTREEEERRLLTRTREQLMNKKRRVMVQIRMRLHYFGLFPSSIQRRLKLQDVDEMLVGLEGELQRTIGMLREEWIEIVRRVKEIDRLLVEQAKEDPLDAIYQSVPGVGPLIARILSAELGDMSQFPNERALFSFTGLTPSEYSTGGHICRGHISRQGSTRLRHMLVEAAWKAVRKDPGMKEYYTKLSERTGKRRAIVAVARKLAGRIRAALRKEEHYKLDYKEAA

SEQ ID NO: 462699 - protein, 358 aa, unidentified
MASIASTSRVVIGGIDTHKDLHVVAVLDTAGVLLGTEAFSTTRAGYRALVGWLRGFGDVRLVGIEGTGSYGAGVTRHLGEAGIEVAEVDRPDRSDRRRRGKNDTIDAENAARAALTGRRTSTPKTKDGTVEALRVLRLTRTTAVKSRRVALQLLGNHIVAAPEELRDQVRNLTRMQLIRTCATWRPDTTGIRDPVVATRIALKSLARRILDLNDEIADLDQLITTLVGELAPQLLAATGIGVETAGQLLVTAGDNPQRLRSEPAFAMLCAAAPLPASSGKTQRHRLNRGGDRQANSALHLIVITRMRVDQRTKDYVARRIAEGHSKLEIIRCLKRYVAREIYYLLKPPPKENVKSRAA

SEQ ID NO: 462700 - protein, 366 aa, unidentified
MKYIFVGCDSHDKTLVNKIALNREASQTKRFAAGRAGRGKMMEHLKALSQAAGNAKVVVAYEASGNGFILCDELRKAGYECHVLAPTKIERSAKQKRNKNDDRDAERLLDIVRGHYLAGTKLPSVWIPDRQTRDDREPVRGRQDLSQKQTAVKTQLQMLVKRHGIEKPEGIGASWNKGYRQWLKALSEDAHQGWGMKQVLGSLLRQLEFLEKEIEQLNQAMEQLAATPRWKPIVQAMTKEKGVGLMTALKYSTDIAEFSRFRRGRQVGAFYGLTPSSNESGENNDRKGHITREGSPTGRQVLCQSTWSRVRHDEHEREVFQRLVLKNPKKKKIALVACMRRLAVRLWHVGFQAQLQMKAAPVENRD

SEQ ID NO: 462701 - protein, 541 aa, unidentified
MSRTRARPYSRSEVIHRAGDESIFPAFERERPRIVNNFAASASSGYELSSFSEKMNRTRLSNLTVVLESGNEYSDEDESSLRRLRLAIRNSHPARAARTTSKLPSSWKGLNMNESVSEQPLSPKVAAFVGIDWADQKHDVVLRSAGDPAEPEHQVVKSEINGLNDWIAQMHERFGEKGKVLVCLEQSRGALIYQLMAYELFELYPINPSQLANYRKTFFSSGAKDDRPDADLLSELVMCHRDRLKAWKPDDQMTRELASLNEGRRNAVNRRTELANEIKSQLKLYFPVALQILENDITTALAADLLVQWPTLAELQKVSPGKLRKFFYGHNSRHEKKILERLALIKEAKPLTADAAIIRPTALRVKLLAQQLKSLLPFIAEYEKRIAELFGSHPDRFLFDNLPGAGPALAPRLLTAFGTDRDRFEVAGDLLNLSGIAPVRIASGKKTGKNASVHFRRACPKFLRQSFHEFGECSIRYCPWAQACYQAQRGRGKGHHAAVRAVTFKWIRILFACWKRRIPYDPQRYFQALQTRGSDYAQTTT

SEQ ID NO: 462702 - protein, 374 aa, unidentified
MSKIARIGIDTSKGSFQLHGVNEKDEVVLRRTVRRRQFLEFMAKLEPTVIGLEACGASHHWARELGRLGHRVMLIPPQAVKPYVAPGRKNDKNDAEAICEAMSRPRVRARLVPIKSVEQSASQMLMGVRDSLLKRRTQLCNTIRGHAAEFGLVAAKGLDKIEPLLARIAGDDGLPALAREMFGDLGQEHAELSQRIVQIDRKLAAFHRSNELSRRLMAIPIVGPVGAGLLITKIINPHGFRSGRLCAAWVGLTPKDHSTAGKQKLGGITRAGDESLRAVLVSGATAYIQQVRRGRIVPSPWLAALLERKPPKLAAVALANKTVRIAWKLMTSGERYDPTHRVDREGLAASQYGGLRAEPLAPAPTGGDSHAVAA

SEQ ID NO: 462703 - protein, 350 aa, unidentified
MTILENRTITVTGGVDTHLDFHVAAAIDSNGGVLGVETFDTTTVGYQHLVGWFAGFGTISLIGVEGTGSYGAGLTRHLTSKGIRVVEVDRSNRQARHRAGKTDAVDAIAAARAALTGTATGTPKSRTGNIEAIRVLTVARRSAASEWISVLSQMRHVTFTAPDEIRARFIGLSPITLVRTTAALKPRRTDPDVVRYMTLATLRELGRRALFLREQKMRLNTEMRPLIRETAPSLLEVYGVGFDVAAKLLIAAGDNPHRLRSEAAWAHMCGVAPIPASSGKIQRHRLNRGGNRQANSALYRIMLTRMASDQRTKDYVAKRTADGKTMGEIGRILKRYIAREIYPHLLSTID

SEQ ID NO: 462704 - protein, 379 aa, unidentified
MTTAADLRDVCCAALELSKTGWVCAFTAPGEGRASLHRMKAGDTDRLMGLLNSGRAKAEREAGRPLQIVLCYEVGYDGFWLARLLTARGVRVIVFDPASFLMPRRGRRAKTDRLDAEGMTRTLRAWLGGNREAAREVQIPSIDQEDAKRIERERKSLVEERTSIVGRIKGLLALHGIWLTGKLIGQGLRARLDSMKTGDGRILGQFLRREIERLLTRYDMIRQQIAEVEAERKAALSSEANQFPSAEKVRVLSKLGGVGETTATVLVAEVYHRTFATRRHLASFLGLSPSPYSSGDVERDQGISKSGNKLARQTLVELAWFWLRYQPDSKLSLWWRERFGSKGMRARKVGIVALARKLAIALWRFVEAGVIPEGATLKV

SEQ ID NO: 462705 - protein, 338 aa, unidentified
MNSIGADLHKQTTRMHVVDQARRTIAAQTLYCCDPEKIQAWLMPFRPFQLVVEATASYEWFVQLIEPLAERVVLAHPGKLRVIAESTRKSDKLDAKVLAEFLALDMIPPAHRPTPRQRQHRALVRQRFYLRKRSTSVRNRIRRILSDYNADFSALFNQGTCRAQKRIPVTVSAADQFVLQQLWREYDFHLQQIEEVEKTLRAFGASAPVAEAQARELLHTIPGVGAVTVEAFLSEVGEVRRFRSQKRVAAYAGLAPGQRESAGKTKELNITHRGSKLLRWALNQASWQLVRRDLRWRRIFEGLAKRRGRKRAITAISRRLLCVMVSMVGSGQRYRPAA

SEQ ID NO: 462706 - protein, 336 aa, unidentified
MNFVGIDLHKKTISVCVVNQERKVLKRATLYCVEAQRIADFFRGLGAFTAVVEATASYEWLWQLLEPLAQRLVLAHPKKLRVIAESKNKSDRLDAQVLAEFLALDMIPEAYRPTPRQRQHRTLVRQRQQIRRALVRARNRLRHLLGNYNADRRDLFTAAGLAYLAEVPVSAADRFVRDQLLATWEHHREQLAALTKELAALAKKAPAAERAARACLASAPGVGPVTVDVLISEIGDIGRFRSNKKVMAYAGLVPGQRESAGRKKELGITKEGSRLLRWAMVQAAWRVVRPAGRWRLTFEQLRKRRGAKKAIVAVARRLLGVLATLWRTGQRYRLAL

SEQ ID NO: 462707 - protein, 343 aa, unidentified
MNVIIGVDPHKATHHVVAVSDDEHELAQVSVRACRTQTTRLVSWAAPFASRTWAIEGADGLGYLLSQQLVAAGERVVDVPATLAARTRVLGTGRSNKNDPNDARAVALTALRHHDLREVRPVGHSEMLRLLAKRNKDIGDQRTRLVGRMHALLVELAPGGIAKEINASDVDAFLTRVSPTSPVEQVRFELAVELLDDIRRLDAQLKESHKRIRTAVTASSTSLTEVFGIGPVLAAMLIGYTGDIDRFRSRDHYAAYNGTAPTEFASGGRVVHRVSTRGNRQLNHAIHMAAICQMRHPGSSGRVYVDRKVAEGKTKREAIRSLKRHISNTVYRHLVADARTRTS

SEQ ID NO: 462708 - protein, 318 aa, unidentified
MNRNTLPNINVGVDTGKSQLDIYIRPLDVYFTVSNTDKGISDTIKIIKKHKPQRVVIEATGRLEMPFILACDKAKLPYVIANPLRIKRFAEAIGQRAKNDRLDAELIAHYAERVQPELTKLKSENIRLMSDLVTRRNQLLTMQTMERNRLQILPKNISSTITPILTALKNQLEKVEAKITKLIESCPEYQAKNTILQSMPGVGKILAASLISNVPELGFITNKQASSLIGVAPITRESGRFKGKRMIKGGRPQVRTVMYMAMMSAIQCNPVFKATYKRLLEAGKPKKVAIVACMRKMVVTLNSMLRDGAMWDKDSVKN

SEQ ID NO: 462709 - protein, 548 aa, unidentified
MQSIVTVGIDVSKEKLDIAIFDGREFILKTFSNSEDGVEKLIDYVEERTGINNRGETKRKGGTARKERVIGKEKVTEKETKAYRNGKELSATRQGIKRKERTGNKNTCNRNIEPKSLHFVMEATGSYHTKALFGISKRNYPVYVLNPVISKRYTEEQMKRVITDKESSKSLAQYAFVSLSTNNILNGQSKDCNMLSKFRFNSKFEGNGYPCRKNRDNDYKDNGYEDNGYSTNGSGNSNCFDNKNENTNTNCNNSLCHHSNNHSNNRSNYNGDSNSGNASSENNNYNANEIKSSIKLRILVKTSEGLVRTKTRILNQIEALNQYPEGFSEEAKEDLEQLVVEIDKRIEHIRNTIKEMIKDNEETKEIYGRITKIPGIGERTASSIIAYFGSFSSFESAKQVASYIGLTPSIKESGKSVKKKGYAISKTGNPYLRQVLFMASLSASQYNPQCSLLYERLLNRGKDKKLIHIAVAHKLIRQIFAVVKYGKEYDPSYGISDKEKGNAETKKIDENSLKIKMARKIAKKQSKLKTKPDKIYSKIGDQNMEIFY

SEQ ID NO: 462710 - protein, 366 aa, unidentified
MKKISTVAVEGMQNFKENQLTIGLDLGDRTSHYCILNEAGEVILEQKLATTPEALQQTFAKIPRSLIALETGTHSPWVSRLLKELGHQVLVAHAQKVQLITKSKRKDDRHDARTLARLARIDPQLLGPVRHRSAKAQIHLTVIRARAELVSVRTALVNAARGLAKSYGQRLPQCGTQQVSRELAAGLHAELREVLEPLLQEIESLNERIQEYEVRMEKIAKESYPQVALLKQVKGVGTQIALTYVLTLEDPHRFPKSREVGSFLGLRPGRRNSGESQPQMHISKEGDRYLRTMLVQGAHYILGPFGEDSDLRRWGQKLAARGGKSAKKRAVVAVARKLAVLLHRLWVSGEVYEPLRNSHQAMRAVA

SEQ ID NO: 462711 - protein, 493 aa, unidentified
MTAVMIGVDPHKGSHTAVAISADECPLGRMGVRACPAQAEQLVAWAQAWPDRAWAVEGAAGLGHLLARQLVAAGEYVVDVPPKLAARVRLLEAGDTNKNDPNDARSVAVAALRSKAPRPVIAEDHAAVLKVWARRHRDLSRARNQAACRLHAVLCDLVPGGIPDEITAARAEGILGQIRPWSAAAGARCELAIEFLADIRRLDAQRGDAKKKLAAAVKASGISLTRKVFGVGPVIAATVIGDVRQVSRFPSRDHFAAYDGTAPAEVSSGNRKIYRLSLRGNRLLNHALHMAAITQIRHKHSDGRGCYERKIAEGKTHKEALRCLKRRISDAIYAVLVADARPAAAAPEGPGGQPGNLSVSPGGRLTPRAPALRTSHSRAPHHPTASRGRDAAASPPRGSADLENGCGWQLSHRTPQEPPPEIDLQGTQRNPLTTKGLDLDADGADLPTDGERAEICQFWCAASRPFVGDERASRRRACGISRHLPDVRAGLAY

SEQ ID NO: 462712 - protein, 375 aa, unidentified
MKEKVRFLGLDVHAETIAVAVAEQDGEVRSLGTIANREESIRKLVKKLGPVEQLRACYEAGPTGYVLYWQLTQLGEECAVVAPTLVPVKVGDRVKTDRRDAAKLARSHRSDDLTAVWVPDEGSEALRDLVRAREAAKQDQLRARHRLSKFLLRTGRRPAMGLKAWTERYLAWVQQIQFSQPAQEFTLLDYLHEVQHMDERVQRLEQAIAEAVKLASPQVQEVIRGLQALRGVAHLSAVTIAAELGNISRFESARKLMGYSGAVPSEDSSGKRQRRGNITKTGNAHLRRIAVESAWSYRFRPAIGPRLRQRQEGVPEEIKEIAWKAQIRLHKRYLKLMAAGKDKQKIITAVGRELLGFVWAIGIKAETAGKLQMAA

SEQ ID NO: 462713 - protein, 426 aa, unidentified
MENTSEFQVLVGIDRSDRHLDLCLQVERTGKPQALRIVNTPEAIQEWLNGLRAKFPAGLFAICLEQPAASLLHIFVHCPDVVLYPVNPLSLSRYRHAFVTSKAKCDASDAAFLLELVRDQRHKLTPWQPDDEQTRSVALLCEARRKAVDLRTRLSNQLKAHLKLYYPQALELAGDDLFIPLACDFLLRWPSLQELKRVRAATIRKFYVEHSCRRGETIARRLELIESAIPVSDDPALLLAATTTTRMLAAQLKQLAASIAEFDSKIAEVVAQHEDGFIFASLPGAGPVFNARLLAAFGTDRSRYESAEDMEKYSGVAPVIKQSGNTKIVQRRFARPLFLHQTFIEYSDISIRRCGWAKEYYRSQRAKGKGHYCAVRALAFKWIRIIFRCWKDRVAYDEAKYIESLRRRRSPLVANLPAIETAAQHA

SEQ ID NO: 462714 - protein, 399 aa, unidentified
MFVGIDWAQQAHEVCAVDASGTIRHRATVEHSQDGLDQLVRHLGRWATEGELLVGIERPEGRLVDRILEAGYPILLVPTFAMKDLRRRYAVGGAKSDRGDSYVLADVARTDGHRRRRLEPLSEHTRAPRAVVRTRDDLVDQRRALANQLRATLAASWPGAGAIVADVDSEICLAFLERYPTSESAARLTETRLTSFLTKAGYSGRRPAAQLLARLTAAPAGVVGIEAEARADTVRAMVRVLQALLVSIKNLDRSVIAHLGEHPDAEGFTSLPRSGQINAAQILAEWGDCRQAYPQADSAAMLGGLCPVTHASGTHRDVSFRWAGNKRLRQAMTTFANNSRRASPWAAEVYRQAIARGCDHPHAVRILARAWTRVIWRCWQDHRAYAPALHRAARRLKAA

SEQ ID NO: 462715 - protein, 353 aa, unidentified
MAVLSIDLGKTHSVACWYQMADSTHEFRTLKSRPQDFHALLTDRPVDRVVIEICDMAGWVVDLCRTLQIPVQVANANTEGWRWKNTKKKTDRDDALKLAKLSSMNQIPLVHVPERPVRQWRSLILYRHKLVERRTAIKNAIHAILVSEGRAMSRGPKSWNDQSMTQLRRLARPLEECSRDDLWRVHLQMELTNLDHLQEQILKLEEKLDALGEADAGVIRLKTIPGVGPRLSELVVAMIDDPKRFKNARQVGAYAGLTPRRYQSGEMDRSGRISRAGSGKLRKVLVQVAWGMLRNNTHGSAVFDRISKGQKSRRKQAAVALARRVLCWSWAMLRDGTDWRDPSRSRTPAMSGG

SEQ ID NO: 462716 - protein, 378 aa, unidentified
MPSSVNFWVGLDVHKDSITTAVFRNRDPEPIRVDRLPYDLHKIRRYFQRLQAAGIVRACYEASGAGYVLQRSLADWGVGCELAAPSLIPQRAGERRKSDRRDAIKIGRDFRDDRFVLIQVPTEEDERVRDLVRCRETFQREIVKSRHYILKFMRRRGLIYREGAHWTLRHLAWIRQALAPGSLADEDHVVLSEYLALLEYKVQRRDDLDRRIHALALMPRYKPLVDRICCFRGFKTQAAMVLATELGDLRRFENPRQLMAYVGLVPSEHSSGERRRLGSITKAGNTRVRHILIQAAWHHRKPPSVSASLRRRQRGQDPGVIQHAWKCQHRLYTLFHRLAAKKPRPLAATAVAREMVGFLWAALRDLDVTKLQEVSRAA

SEQ ID NO: 462717 - protein, 360 aa, unidentified
MSFNGTSVGLDVHALSVVAHAVDEESGLVERARLCPDHGEVLRWLGQLRGPLRVAYEAGPTGFGLARALAEARIECVVVAPSKLIRPAGDRVKTDVSDAAHLTRLLRLGEITPVTVPEAGVEAVRDLVRAREDARADLMRVRHRLSKLLLRQGRVYSGGQAWTGRHETWLRQQRFTDAHTAAAFDHHFDAVLSATAARDRLDQQIVGVAASPRWADTVDRLGCLRGISALTGLALAVEIGDWSRFTGSSIGAYVGLVPTEYSSGASRVLGSITKAGNAHVRRLLIEAAWHHRASYRHPGPTMRARWAKVDPALKARGHAGNRRLHQQWCRFLERKKHPAVANVAIARQLAGWCWSLATLD

SEQ ID NO: 462718 - protein, 410 aa, unidentified
MQALVERGCGLDVHQATVVACLLIVRKDGKVQKQMRTFGTTTQELLSLREWLLSEGCTHVAMESTGVYWKPVYTILEGALEIVVANAQHVKKVPGRKTDVKDAEWIADLLCHGLLRSSFVPPKPIRELRDLTRYRRKLVESQAAERNRLLKLLETANIKLASVATDVFGMSGRLMLRALVEGKATPQEMAELAKGKLRKKIPELEPALEGKVEEHHRFLLRLQLDRLEAAEKDLAVLEQRIQEKLKPYEAQLTLLDEIPGVDWTLAAGIIAEMGVDMSVFGSVPQLASWAGVCPGNNESAGKRKSSRIPKGNVYLKTALVEAANSAAKAKGTYLRDKFYRLKARRGYKRAAVAVAHKILVAIYYMLSHRVCYNELGDAYLDKRNKHQLTRNLIHRLERLGYSVTLEQKAA

SEQ ID NO: 462719 - protein, 344 aa, unidentified
MQKYNVIAIDLAKNVFQVCKLSPQGKVIYNREISRTKLKELLIKEKLSLVAMESCSSAHYWARYAKTAGHQVKVINARAVKGFQTKQKTDKNDALAIATAASLEHIYSIRVQSVDEQAMQSMERARNLALTHQIAQSNHIRGLLSEFGIILPQGLTSLREGIPFVLEDAQNGLPDRFRAVLLRLWEHLLVQIDHLDDLTKQLEIAIKDNDVCQKLMKLEGVGPLGALGLALRLGKGENFSSGRSASASIGLTPKQHSSGGKERIGHISKKSADMRLRSTLFQGALSVVSLVVNRPARTNKEQWLKALVERRGKKVAAIALANKTVRTAYALLKNDSVYQLEKLA

SEQ ID NO: 462720 - protein, 402 aa, unidentified
MSYYVGCDWASTAHQICVINAHGQIVWQNEVPHTAEGCAALRRRLQRFGAPADVPVAIERPSGLIVDLLLEWGHPVVPIQPNALKASRSRYRISGAKSDASDAFILADLLRTDGHRFRAMNPVADETRALRTLVRTRDDLVATRIGLANQLRAVLEGFWPGAAQVFADIDSPIALAFLERYPTPEGAEHLGEKRLAAFLGRNSYCGRRTARELLERLRRAPTVIVGEANTEASGEVVRALVTVLVDLVAQIQKLTSAIAQAMRVHPDGAIVMSFPRAGCTNAAQILAELGQERLRFPSVERLAAEAGVVPVTVESGKHRGVTFRWACNKRLRRAITIFADNSRRASPWAAQIYQRAQARGCDHPHAIRILARAWLRVLWRCWQSSTPYAVSNHGSAQRLSVA

SEQ ID NO: 462721 - protein, 315 aa, unidentified
MSDMPCFVGIDVAKAQLDIALRPSGERWSVPNDTNGVTTLVDRMQTLQPTLIVLEATGGLERLVTSALATAGLPVVVVNPRQARDFARATGQLAKTDALDARALAHFADVMRPTPRPLPDAQTQELRGLLGRRQQLIVMRTAEQNRLAGASGRLTQDIEAHIAWLNARIATLDDDLETMLRASPLWRENDDLLQSVPGIGPVCARTFLLELPELGTLTRQQIAALVGVAPLNCDSGTLRGRRTIWGGRAHVRTVLYMGTLVATRFNPQIKAFYQRLLAAGKIKKVALTACMHKLVTILNAMLKHRTSWKAQEVQN

SEQ ID NO: 462722 - protein, 359 aa, unidentified
MTSRTSAARIRPSSSLHLGPEEIVHVGVHKATYHVAVCTDRRGLVATWVQPADPGLLVAKLLPFRGQIAQVVYEAGPTGFALVRRLRAEGFRAEVIAPSKTPSTPGPEPKTDRLDGRRLATFAQKGLLTPVRVPSEQEEADRQVLRLREQLVRKSRSVQQQIKAFLLQHGLAEPAGLGCWSDAALRSLRGLELGAELRFCLDVLLDELDHARGQVAKLTKRLRELSRSERHQVAVARLRTVPGVGPVTAMTFRLELPGPERFDDAGQVARMIGLAPQVIQSGQTRRSGRLLKSGNARLRTALVESAWRWVARDESAGRRYRQLVANTGSGKKAIVGMARRLAVLLWRMSVRGEPYRAAA

SEQ ID NO: 462723 - protein, 426 aa, unidentified
MVDHDVRVLARKTVRVKAFRLGEALDWAVGQARAKGFTHVTVACEPTGPRWLQVQRLCAERGLPLVCIQPLMSHIAREQQDYTTHKTDEADCVLIARLAVELHCYLPEQLDETWAHLRHLGRRRAQLITAATASAQRIRDFLSVAWPAVTETCAQPLESVTWLAALQVVTARCGADPGRLAAMGQEAFTALVRGAVPGWGGKKGWGTICGRIFAALTSTEGVVVSSRRGLLRRCADELGDLQRARAQLRAVEADMVAVLAELGLSRLADIPALSAVGAAAILAETGDPRRYDSSSSLVKHAGMSPSDNASGAFYGEAHISRRGRPGLRLAVWRAVWPMLRYNPVMAAKYAAMTSAADDAAQAAASQADAGSRQVTAAAAAARARRARARVACAASLLRWIYSMVVHDSSWDPGVASGTASCPAEAA

SEQ ID NO: 462724 - protein, 340 aa, unidentified
MLHIGIDMHKRFSEVAVLDDAGKVIARQTLHHDNRERMIDFFAKFGPDATATVEATRNWYWLYELLESQKLAVKLAHPLKVRVIAEAKVKNDKIDAWILGHLERLGFLPEAYIPGREVRDQREALRYRISLVRARAMFKNRVHAILDKLGITHKFTDLFGRTGLEFLQTVELRTIYRQELDGYLAVIEFLEVKIAEATKLIRAILKPDPRVKLLMTIPGIGELTAYLLLCEIGDIKRFPAAKKLCGYAGITPIVRESADHRWQGRITKQGNRYIRWSIVEAAQVAPRQDSALLAFYDRIAERRGPKKARVAIGRKLLVAVWQVLTYEQEYRYNSLAKYCE

SEQ ID NO: 462725 - protein, 350 aa, unidentified
MRIIGCDYHPGFQQIAYVETDTGEFAERRLAPREEAEQFYRALASREDSVGVGMEASGHARWFEGLIAELRFELWIGDAAEIRTKGVRKQKRDRQDAQLILRLMMEDRFPRIWVPSWENRDLRQLLWHRHRMVQARTRIVNQLQAVALNEGLRCKKRLWRDAGREQLESFRLAPWASRRRRDLLELLDRLTPTIAELTQAVEQEAEKCPEARRLQTHPGVGALTALAFVLIIGRTDRFQCGKQIASYLGLVPLEDSSGQRRRLGHITKQGNSLLRFLLVEAAQVTVRSDPAWRSKYFHLAMRRGRKIAKVAMARRLAVRLYWMWRKGWDYEQMKKVSSHAGAPGHRDGVQ

SEQ ID NO: 462726 - protein, 348 aa, unidentified
MRFYNKQHNYYCGIDLHADAMYLCILDATGEAVLHKNIPTKPKSFLRLIKPYREELVVGCECMFTWYWLADLCADEKIDFVLGHALYMRAIHGGKAKNDKIDSYKIAVLLRGGSFPLSYVYPKEMRATRDLLRRRNHLSRKRAELYAHIQNTATQYNLPPLGRIAKPSERGDLLQKFPDPIVRMMVEVDLRTIEHYETLLEALERKLEKVADGHDPIGMALLKSIPGVGRILGLVMLYEIENIARFPRQQDFASYCRLVKPAKESNGKSYGHSGKKIGNAHLRWAFGEAVVLMLKGNKPVQEMKQRLASKHGKGKALAIISHRLGRAVYYMLKNQVPFDQERFLRKGT

SEQ ID NO: 462727 - protein, 424 aa, unidentified
MNYTQNKKIAQVTDKTLVVGVDIGSDKHFARAILSRGYEVSKKPLEFTNTRDGFEKFVNWSYHLATENQLTKIFVALEPTGHYWFNLADYLKAYDVKIVLVAPQHVKHSKEMDDNTQMKNDRKDPLVIAKLVTEGRYMFPYIPEDVYAELRTAFNRRCDLVEALNRNANRMIRWFDIFFPEYREVYGKANAISGLMILMRAPLPSDILTLGVDGICQIWREAKVRAAGINRAQKLVAAAEKSIGRKGGEAVRRELWQLMEEHDLLSKQLIDIMQIIADLLGQIPGADRLLKVPGAGVVTVAGFLSEVGDISRFTDPKQVQKLAGLAVVENSSGKRKGLPGISRRGRKLLRWVLFQLARCMVKSNKEMKAYHQYFTTRKENPLKKMQSLMAIAGKIIRIFFGMLKNGTEYDPAIVMKDLNKAVAA

SEQ ID NO: 462728 - protein, 455 aa, unidentified
MARKRKQDRQSKQAVLPVMRADAAGIDIGATEIFVAVPPDRAPENVRSFPTFTQDLYALAEWLKQCGVQTVAMESTGVYWIPLFQILEERDFEVYLVNARHVKNVPGRRTDVSDCQWLQFLHSVGLLRASYRPEQEVCAVRSLLRHRESLVQMAATHVNHMQKALDQMNLQLHHVISDITGQTGLAIVDAILEGERNPQVLAKLRNGRIQASAEVIAKSLVGDYRPEHLFTLQQSLTAYRSYQKLIGDCDREIRRALEQFHPPDPPQASATDIAPASPPTKTRFSDGVLRTELQRAFGIDLTQIPGIRTGIAQTLFGEIGPDFTKFRSASAFASWMGLCPDNEISGGKVLWVGTRKVNCRAATALRMAAQSLHHSKSALGDFYRRMRAKLGAPKAITAAAHKLARIIFHLVTTRQEFDASHFAADQLRFQKRQEAKFRAKARALGFQLVPLEQTA

SEQ ID NO: 462729 - protein, 310 aa, unidentified
MITVGIDIAKLHFDLHLLPEGTCARYDNNAQGIQECRLFLAQAKPERILLEATGGYETALVVELQAAAMPVIVINPRRVRDYARAANQLAKTDRIDARILAEFAATSLVVVRELPDAKARQRKALVARRDQLVALHVAESNRLEHADEAFIRKSVRAIRTAIEKQIAQVDRHLDRLIAADPTLQRKAEILDSAPGIAATTARMLVTELPELGNVNRHQIAALVGIAPMNRDSGQFRGKRMTGRGRVKIRTALYMPLLAALRCNAKIRTFYNRLVQSGKPKMTALVAAMRKLLTILNTLIKNNQTWNPNLS

SEQ ID NO: 462730 - protein, 400 aa, unidentified
MFYVGVDIAKNKHEASLIDASGKSLLDSISFSNSKEGCEKLLALLERFHVEKDSVVIGMEATGHYWLSVYAFFIELGFDVKVINPIQSEAFRKMYIRQTKNDSKDSFIIAQIMRFGQFSATTLSEEGVVALRQLSRYRLALVDSCGDCKRRVIALLDQVFPEYDKFFADTFGVTSKEVLLKYPTPEDMLAVSSNELAELLNKTSRGRFKGDKAEELQSLAENTFGVHFAKDAFAFQIRQLIQQIIFLENQIEELETEIAVLLEQMGSFITTIPGIGSTLGAIIVSEIGDIHRFDAPSKLVAFAGLDVKVNQSGEFVSSRSKISKRGSPYLRRAIWLAATRAAFCDPILSEYYQSLKARGKHHLTAVGAVARKMCNIIFVILKENRPYEPTPPKSSSESRC

SEQ ID NO: 462731 - protein, 355 aa, unidentified
MSQKLDTSPAVVGIDIGKNSFHIVGQNQRGAIVLRQKWSRGQVEARLANLPPCRIGMEACVGAHHLSRTLKALGHDARLMPAKYVRPYSKGQKNDYRDAEAIAEAVQRPTMKFVATKTADQLDLQALHRVRERFVGQRTGIVNQIRAFMLERGIAVRQGLRFLRAELPGILATRTDALSPRMLRILEDLSADWRRLDARIEDLSSEIEALARRDKGCERLMTVPGIGPIISSAMVAAIGTGDAFSKGRDFGAWLGLVPKQLSTGDRTILGSISRRGNRYLRTLFVQAAWVVLVKVGPKHWDRYGLKSWIEAAKKRLHHNVLAIALANKLARIAWAVLHKGRAFECVKTNEAYRPA

SEQ ID NO: 462732 - protein, 396 aa, unidentified
MIIVGIDVANRNHEASFVDSSGAMLGKSFSFSNSHSGMNQLLNQLERRNPEGLPVVFGMEATGHYWLGLYSHLMQKGHTVYVINPIQSDSLRNFYIRQTKTDAVDSFIIAETIRFGRFVATTEAEPDLVALRQLCRYRFSLVDTISDLKRKAITVMDQVFPEYETLFSDMFGKSSQELLSSFITPEEFLAVDTERLAALLQQASRGRFGLTKAEEIQAAARQSFGIKLGACALTFELRQLMDRLAFSEKQLAELEEQITTYYDRFPCTVHTITGIGKIMAAVILSEIGDVSRFSAPAKLVAFAGIDPSVKQSGQFQGTQCHMSKRGSSYLRRALWLVAFPTSRFDPVFAAFYQKKRSEGKARGTALGAVARKLLYTIFALLKSGQEYIPQVSESYS

SEQ ID NO: 462733 - protein, 336 aa, unidentified
MFQLGIDVSKNTLDLCLLREGVKGRVKTRRLKNDVNAASSVITWLGKQQCAPADVHIIMEATGVYHEPLAYGLYKAGAKVSLANPHRSREFARGMDILTKNDQIDAYMLACYGALKEPEPWVPPPESIRYLSALLRRRDALVTDRSREKNRLEKCRATDIPPVIAESIENVLRNLSAEIERLDELLLTHLNQHPELKKDFDLLTSIKSVGFQLGLNMLVILRGHRFDTAGQLAAFLGVVPVEKSSGTSIRGKPKLSKNGPPEIRAKLYLASMCGLRFNPVMKAMYERLCLSGKAKMCAIGALMRKLVHLCYGVLKTQKPFDAEHLSSDARSACKAA

SEQ ID NO: 462734 - protein, 430 aa, unidentified
MNSTLSRLEEFRQLKKEIRGSESHLIVGIDVAKEKHHAFFGTATGKSLLRRLIFDNNRDGFETLLSTTRAILSREVMDKVVFGVEPTADYHKPLAEFLIRKGFSLVLVSNGAVKHNRELLDGRWDKNDTKCSANIADLISQGKMLFYDHPPQPVRDLRQLLSLKQKLKAQEHSTRMRIRNHLISQFFPELDKFYGKREQENLAIVKWCLNPRKIAEMDFQEFVRMVTNRNRGYAQHQRLQAIQDAARQSIGCEVGKSVAIEARMLVAQLVDLRQSIKDLDAEIAEVSTQLPGYANIISIPGIGPAIAAVILAAIGDPHRFSSIKQVLKLAGLDLSASRSGKNSVNVIPRLSKRGNAKLRYALYQAGLIASYRNRYFVEYFTKILSGREREQGIKTKMRVKIAAKMLVISWTLMKTGEMFQGEHLLNNEVR

SEQ ID NO: 462735 - protein, 345 aa, unidentified
MPIVGGLDIHRKQITFDYLDTATGEVGRGQIAPADRAHLRAWLARFAGRDDAAFALEGCTGWRYVAEELAAAGVTAHVAEPADTAFARGRKRHAKTDKTDSRHLRVLLEQGRLPECWIPPAQILECRALLEAYHDLRREHTAWIERIHAVFFHQGAPRLGEGALRTEHGLAALRQAAAIHLSPAGQLQVATALDMLAAIEARMDTLRQQLLHAARHLAGARALQARLYGVGPLAGLAMTCWLGGAGRFSSSRKAVRFAGLDVTVYSSDGKRSPGHLSRQGPEILRWVAYEAGKTHGRASAPGHDYYAAVKDRTDGKIAALSQARKLIRQACHILAELGDDALTAA

SEQ ID NO: 462736 - protein, 346 aa, unidentified
MSKGSTKGEIKVLGIDLAKDSIQLHGVDADGQTVLRKKIPRKKVGAFVANLPVCLIGMEACGGAHHWARTFKALGHTIRMIAPQFVKPYVKSNKNDAVDAEAICEAVQRPNMRFVPEKSVEQQDMQSIHRIRSQVVARRTAQANQVRGLLLEYGVVIPKGISYVRKEIPLILEAADNGLTDLFRELLQELYEEFVHLDERVGTLEKKLTRLGKDNEDCQRLLTIPGVGLLTATAMSAAVGDISCFKNGRELSAWLGLVPRQHSTGGKPTLSGISKRGDTYLRTLLIHGGRTVARVSDKHDDRRNRWVSDVVKRRGRNVTAVAVANKNARIIWALLTHKTTYQASAA

SEQ ID NO: 462737 - protein, 410 aa, unidentified
MGYETINRRAHVMTRKNTLKSLPTDTEFRVVGLDLAKSDVSVAAIPVDDNTPSLVDRMTYADLLDWAGKISPTLFAMEPCNGYSLLCLQLENLGHEIKVISGSTVSMWINTHLSGQKTDLNDAIALARLAVSDAELTPIRHKSITEIRIQTVQAVRQQLMSQRSKSIVSFKALAQQWGIPCAAGHRNLKKLRESIEAKVDLITRPIANAMLFLLDAVKSLDRQIGQLNQTLQELVMSDERGRLLQSVLGVGTQISARVITVVGNIERFNSPRSLVAYVGVAPRNFITGHKNLTKKKHGNCPDLSHKGQGKISRRGDKLLRSLFIQGAACLYMQFCKDQLPECQLKRWILKQLARQKTYGKLIVSLAAKLIRIVWAVLTYGEKFNIQKAGMTRSMWSEMALETPLNKEVPA

SEQ ID NO: 462738 - protein, 380 aa, unidentified
MKQEARNVIGVDVAKSVFQIHVADARGTAVLRRQLRREQVLPFFAKMPQSLIGMEACGSAHHWARTLRSMGHIVRLMAPQFVKPYVKTNKSDRADAEAIAEAVQRQGMRFVGIKEVWQQDLLAEHRVRDRQVRARTALTNEIRGLLQEYGIVFARGSATLREGLLKLLASEDERLSAGMRRLLQRLLEEWSFLERALNESDHAIVRESRSREVCRNLETLPGIGPITSTALVATVGDPKVFKNGRHLSAFLGLVPRHTGTGGKMRLGGISKRGNRYVRKILIHGARSALRAAKKHERSPWAVRLADRRGFNKACVALANKNARRCWAIMAGREVPETAPNLDAASAPHAEDAFPTALPLGHLRSPRGSAVENTRSKCLSS

SEQ ID NO: 462739 - protein, 308 aa, unidentified
MTTIYTGLDIAKLNLQLHLAGRIHDLPNTAAGHRRLLKLLTAQVGLHVVCEATGGYERDVVAALHEAKVPVSVLNPARVRHFARATGQRAKTDDIDAAVLSAYGQALQPKPTAPRTEQEQQLAELVRRRVQVLEILVAQRQQTERLTVPALLRQAQSLVRRLERDVAQIEEQLKALRTQASTLDARVQKLEAITGVGAITALGVLAELPELGMLNRRQAAALAGLAPHPRESGQWHGRRSIGGGRAPVRRALYMAALVAAHSNRQLKEFYQRLRAAGKPAKVALTAVMRKLIVLMNHILKNPNFALQN

SEQ ID NO: 462740 - protein, 361 aa, unidentified
MVVSVGIDVSKDKHDCFIVSSEGEVLADVFMIPNTMDGFRSLLQRIWECCDSQDKIKVGLEATGHYSYNLLGFLLDNGLPTYVLNPLRTNIYRKSLSLRKTKTDRVDARTIASMLLSDAGLKPYTDTAYHNEELKSLTRYRFDKVKERAKLKGSIARLVCILFPELEKLVPSLHFASVYALLEEFPGAKQIAAAHLTRLKALLETASKGRYKRDTALEIRDAARNSIGSWMPAKSLELQHTIRLIRELDNEITEIEEQIQTIMDELNSPITTIPGLGFRMAAMIFAEVGDFTRFDSPDKLLAYAGLSPSTYQSGQLKNCYPHMEKRGSRYLRYALYNATKYVCHWDPTFAAYLAKKRAEGL

SEQ ID NO: 462741 - protein, 353 aa, unidentified
MKPNSQMTLDKYFRQCVGIDVSKDKFTACLFMYDMASDVGCCTESIDFPNSKTGFNQMVKWSRKEAQKGFLLTYLMEPTGSYYEPLAYHLHKIGLTLYVVLPNKARSFCEYEGIKTKTDAMDARCLALLGCKNQRLRPWQPPKAIYRELRQLTRLRASLTKMQTQILNHIEAIDHMENVTSEVCKSYKKLLSTIQKQLEQNEQAIAAKVAQDKELEARIKRIATAKGIRSNTVTCIVAETQGFHLITNRKQLTSFAGLDVVAKQSGKDDPKHKISKKGNAYIRAALYMPALSAAHCNRQMIQSYSRICDKHPDTKMIGVTAIMRKMLLLVYTLWKSGEEYDETRDKTHTQISN

SEQ ID NO: 462742 - protein, 403 aa, unidentified
MNAVGIDVSKGKSMVTILRPFGEIVSSPFEIKHTSSDIHSLIKLIHSIEGESRVVMEHTGRYYEALAHQLSAADLFVSAVNPKLVKDFNNDSLRKIKSDKADSVKIARYALDKWQSLEPYSITDELRAQLKVMNRQFHFYVKQKTAMKNNLIGLIDQTYPNANTYFNSPTRSDGSQKWVDFVSTYWHVDCIRKMSLNAFVEHYQNWCKRKKYAFNKSKAEEIYTKTKELVPVFPKNEITKHIIRQAIDQLNSTSVTVETIRTLMNETASKLPEYSIVMQFKGIGPSLGPQLMAEIGDVTRFTHKGALTAFAGVDPGVNESGSYAQKSVPTSKRGSSNLRKTLFQVMDVLIKTMPQDDPVYQFMDRKRTQGKPYYGYMTAGANKFLRIYYGRVKEYLSVLPDPS

SEQ ID NO: 462743 - protein, 346 aa, unidentified
MKVLIGVDPHKVSLAVAALDEATGELLERGGFPQNHAGLKALERWARRFSERRWAVENAGGLGRYLAVRLAGSGESVVDVPPKLSARVRVLSSGNARKNDGLDALATALAASRNDRLAAVDPEDSSEVLRLLSERREDLVTERTRALNRLHGLLRDLVPGGVAGTLSAERAARILRSIRPQRSSSRIRRRLASEVLRDVRTLDRKIADLNGRIEAEVQASSTTLTEIFGIGPILAAKIIGTVGSVARFPTKAHFASYCGTAPVEASSGEVVRHRLSLAGNRHLNYALHMVAVCQARSDARGGAYYRKKIAEGKSRKEALRCLKRRISDAVFASLVADSQLLSHSVA

SEQ ID NO: 462744 - protein, 352 aa, unidentified
MKKIVVGIDISKEKIDASAIDVRASQLGVVKLDYQVFENRPMGFRRMLVWARRLVKGAGLEDVLFCCETTGGYDRCLCDYIYAKGLDIWRESALQIKRSMGVRKGKDDKADSLMIAEYAMRHMDKAVIYESPSKILRGLRALLLYRGNLVKEKTQMAVRLKELEATAERSESLNFILRDIRKVIRVLDKSIAECVKQIQKVYDSDASLKKSYDHITSVSGIGIVNATALIAYTGNFAAIRTANKAASYWGCAPFREQSGTSVHKKAYVRCYSSSLLKAYLTQAAECTIKEHGIYHDYYLRLKAAGKPYGVIVNNVRNKLIHLVYSLVTDDKDYEQDHEYLRKKRKGEQKMSA

SEQ ID NO: 462745 - protein, 345 aa, unidentified
MLYIGLDVHQRSFALCILDHRGKRIKEIRERGGWQDLLRVLGTLRRPFAICYEASLGYGHLYDQLCKLARRVEVVHPGQVRLIFRTKRKHDRIDARKLATLLFLDQLPSVHVPSVEVRSWRQLIEFRHRLVARGVRAKNSLRALLRAHGLQGGYRKSLWTKKGRAWLAEVEFATSHATLQRDMLLDELAHTDRQRQRVEAELKQIATQQPAVALLQTIPGVGPRTAEAVAAYIDDPRRFATSRRVGCYFGLVPCQDQSADRNRLGHITREGPATVRKLLTEAAWQGIRRDARLQRYFQRIQGDDPGRRKIALIATAHFLVRAMHAMLCSGESWRTLETSKQRPAA

SEQ ID NO: 462746 - protein, 318 aa, unidentified
MNSKINQKEINIGVDTGKYQLDIYIRPLDISFSVTNDEKGIKESINIIKQHKPTRIIIEATGRLEHAFIFACSKHKLPFVVANPVHVRRFAGAIGQLAKTDPLDAKLIAHYGEAIKPDLSELKPESMRLMSDLLARRRQLMTMQTMEKNRLQIMPKEITGIIKPILTAIKNQIKKTDLKLIKLIESCEEYKEKNDIIQSMPGIGNVVAFNLLGNMPELGYITNKQAAALVGVAPINKESGSYTGKSKIRGGRHQVRTAMFMAMMSAMQCNPVFKEMYQRLLAKGKPKKTAIIACVRKMIIILNSMVRDGVYWDPEMGK

SEQ ID NO: 462747 - protein, 422 aa, unidentified
MKLKYSICCGLDVHKNVIVATIVTTNKDGISEYKQKSFSTINSNIQRFHNWLIENNCYHVCMESTGKYWIPIFNYLEHDIDVCLTHPKYVKAIKGKKTDKKDSKWIADLYKFDLVRCSFIPPKDFRQLRELSRYRFKLVCMKSSEKNRIQNCMTVSNVGIASVLSDPFGKTATEIMSYLLEHTSDSMDEHAVRKLIKKGAKAKSDEIIEAIKGYNIETDQAKKLELARAHLEYLDNMITQTEVELYVRIKPYYEFVEFVSTMPGMTELSSTIVLAETGVDMSIFDDAKHLCSWCGLSPANNESAGKKKSVRIAKAGDYLKPMMVQCALAAIKSKKQPYFAIKYGRIKKRRGHKKAIIAIARMMIVCIYHMISEKKPFSPTDYEELMDPQNHVERVVLTENNVFAYLESLGYDSSKLVKRNDN

SEQ ID NO: 462748 - protein, 356 aa, unidentified
MSREVKYIGMDVHKEAIVIAVLNDGGKLVMESIVETKASSILQFIHGLRGELHISWEEGTWAAWLYDLLKPHVHQVLVCDPRRNALLKEGNKSDKVDARKLADLLRTGMLRPVYHGEHGLRTLRELGRSYQTISQDLNRVMNRVKALYRGWSIPCAGTQVYAPRYREEWLGKIEHAGVRRRAELLYQQLDGLQALRRTVRPELLAESRKHKASKLLRQIPCIGPIRAARLIALMQTPHRFRSKRQLWTYSGLGIETHDSAQYRYVNGQLQRAKKPQQIRGLNRNHNHEMKDIFKGAATRASCGVGPLRDFYVALLDKGMKPEMARLTLARKIAAIALTLWKKEERFDAQQLKAQAA

SEQ ID NO: 462749 - protein, 349 aa, unidentified
MATRYIGIDVHSSSCTIAVMGPSGKRLREWQVETDHRVLVEAIKGVDGERYVCFEEGTLSDWLYQILEPAAKELQVIQPLKRRGTKNDSVDAWACAEAMRVQSRDVVRVFKAPKQFLSLRKATRAHLLIQRDMVRVKNRIHASYRARGVRDLNDEIYDRKQRESWQAKLPPAQRRLVEHFCLELDGLVEATQQAEAWLREEASKVDVVRLLSTAPGIGILRASHIVATVLTPHRFRTRSQFWAYCGLGVVMRSSSDWCKTDSGWKRGVVAQTRGLKNGQPLLKNVFKGAARTVLIMKDHPLKQRYQRQLSDGQKPNLAQLTLARRIAAAVLAMWKANQEYDVAKQQIAA

SEQ ID NO: 462750 - protein, 319 aa, unidentified
MLIGIDVAKAELVVAARPSGARWTTPNDEPGVRALVARLRADAPALIVLEATGGYELLAVAALAAAGLPVVVANPRQVRDFAKATGQLAKTDRIDADVLALFAERVRPAVRPLPDADAQELDALLGRRRQLLEMLQAERNRLGQVFGRGKPLVKKSLRAHIAFLERELRIADTDLGAMIRESPAWRERDDLLRSVPGVGPVLSLTLLAELPELGRLTRREIAKLVGVAPLSRDSGTMRGRRFVQGGRAGVRAVLYMAALVATKRNVVIRALYQRLLAAGKPKKLALVACMRKLLTTLNTMARTHQRWSLDYATAARHTA

SEQ ID NO: 462751 - protein, 355 aa, unidentified
MNQEKYIGMDVHQATISVAVMDSSGKLIMECILETKAATILEFIAGLRGTLSVTFEEGTSAAWLHDLLKPHVGHLVVCDPRRNALLKDGNKSDRIDARKLAELLHANKLHAVYHGEHGVRTLKELGRSYLTITKDLTRVMSRIKALYRSWAIPCSGATVYAPRHRAEWLAKIPHPGVRLRAERLYQQLDVLQPVRQEARRELLVESQKHHAVKLLRQIPSIGPIRGALLVALLQTPHRFRTKRQLWAYSGFAVEIHDSGEYRFVRGKLQRNRERITVRGLNHNHNHDLKNLFKGAAQSASTRPGPLCDFYVALVEKGMRPTMARLTLARKMAAITLIIWKKGVNFDAKQLNRQAA

SEQ ID NO: 462752 - protein, 354 aa, unidentified
MSQTPNTAIAVIGIDIGKNSFHAVGHDARGAIVLRQKWSRGQVEARLANIPPCLIGMEACVGAHHLSRKLASLGHDARLMPAKYVRPYSKGQKNDFNDAEAIAEAVQRPTMKFVATKTAEQLDLQALHRVRERLVSQRTGIINQIRAFMLERGIAVRQGIGFLRTELPTILATRTDALSPRMLRVIEELAGDWRRLDQRIDGLSGEIEALARQDQACSRLMTVPGIGPIISSAMVAAIGTGDVFSKGRDFGAWLGLVPRQISTGDRTILGKISRRGNRYLRVLFVQAAWVVLVRIKDWERYGLKSWIEAAKRRLHHNVLAIALANKLARIAWAVLAKGRAFELTRTDDAGVRPA

SEQ ID NO: 462753 - protein, 454 aa, unidentified
MESLPAGLEKVNLNACGIDVAAGMHAVAVPPGSSPDGEDVKEFEAYTRDLHAIADWLAACDVRTVAMESTGVYWVVLYELLESRGFEVHIVDPRQLKRAPGRKTDILDCQWLQQLHTFGLLRGAFRPNEQICTLRGYVRQRAMLVQYASHHILHIQKALEQMNIKLKRVITEVTGVTGMRIIRSILQGERDPQKLAALRDGRCKNDEDAIAKALEGTWRAEHLFALKQAVELYETFQDKILDCDRAIADYLATFNEAEARHEKSASPRKARRRNEPHFDVGTALHRATGVDLTRIEAIDSSTALKIISEIGTDVSSWSDSKHWCSWLSLCPGNNKTGGRQRSGRTTPSANRVAAALRLAARSLWHSNSALGAFLRRIAARKGMPKAITATAHKLARLVYYMLKYGTDYVVKSQQEYELQHRQRQIKSLHRRAAQLGYELRQLPQWQPLEPVTST

SEQ ID NO: 462754 - protein, 370 aa, unidentified
MERQHQQNDVKIKHYVAMDLHSDNVCVVIEDQDRRCVLKRKFPTRIKIILANLKPYSKSIEAIVVEATATWYWIVDGLMPFGYNVHLAHPAAIEERSGKKRTNDFDDCFNLIRLLRNGDLRESYIYPKEERPIRDLMRKRSFFVKSRTQHMLNFMNMVSRNKGFKLSSNQIKQLTEKNLEDLFDHHFLLLSAEASISTLNHFTQQIGVLEKAILKVGRLKPEFNRLMAFPGIGKTIALTIAYELGTLSRFAGKGDYLSYCRCVDSKRLSNGKKKGENNRKNGNKYLSWAYVEAANFAKRYCPYARAYFNHKLKESGFYTVAIKALASKIARATYYMMTREVNYDPEKVFGNYKAQAQAFIKKSKSRDSKP

SEQ ID NO: 462755 - protein, 415 aa, unidentified
MIPAVLECCAGIDVGKKFVVVCVLRGPAQGDAQAQTRKFGTTNAPLEELREWLVACGCTHVVMESTGEYWRPIFNVLEEAANLHIVLANSQQVKGLRGHKTDPEDAHWLAHLLRHGMIRPSYIPSLAIRQLRDLTRRRRQMVRTGAQERNRIQKVLEGANIKLGNVLTDVFGLSGQLMLEALLEGKATPEQIAQLAQRSAKKKIPQIREALEGHRMNAMQRKLIGFSLDHMAFLEEQITALDQEIAAHLGASELQQPHQILQTVPGVKQEAASSLLAEFGPDMKVFGSGAKCSAWAGVAPGNNESAGRKKRAPALHGNPWVRSTLVECAWSASRTNGSEFQRQYERLKVRLGHKRAIVAVAHSLALVIFQVLSTREPYTKPGANPMPETQAARLIRHHTRRLKTLRRRLTTRTKA

SEQ ID NO: 462756 - protein, 413 aa, unidentified
MQTLVERGCGLDVHQATVVACLLIVRKDGKVQKQMRTFGTTTRELLSLREWLLSEGCTHAAMESTGVYWKPVYAILEGGEGGLEIVVANAQHVKRVPGRKTDVKDAEWIADLLCHGLLRSSFVPPKPIRELRDLTRYRRKLVESQSAERHRLLKLLETANIKLASVATDVFGVSGRLMLEALVEGKATPQEMAELAKGRLRQKIDELGPALEGKLEEHHRFLLRLQLDRLEAAEKDLAVLEHRLQEKLKPYEAQLTLLDEIPGVDWTLAAVIIAEMGVDMSVFGSVSQLASWAGVCPGNNESAGKRKSSRIPKGNVYLKTALVEAANAAAKAKGTYLRDKFYRLKARRGYKRAAVAVAHKILVAIYHMFSHQVCYNELGDAYLDKRNKHHLTRNLVHRLERLGYTVTLEQKAA

SEQ ID NO: 462757 - protein, 398 aa, unidentified
MITTDVDIFIGLDVGKTDHWACAVTKDGTKIWNKTLPNDEAKLTAVYENLSAKGTVLVVVDQPATIGALAVAVAQHLGIPVAYLPGLSMRRIADMYPGTAKTDEKDAFIIADSARTMPHTLRSIQLSDEDEATLGMLTGFDLDLTRQITQTSNRIRGLFTQIHPSLERVLGPWLEHDAVLEVLASWPTPALLKHAGKARIDAKLKKHGARRHTAWTGAILEALDQQNVVVVGTDAAGLVIPHLARQLISLHAQRVDVAMHLEAMVEAHPPYPVLTSMPGVAVRTAAIIIAEISGKTFASAAALASYAGLAPATSQSGTSIKSERVSHSGNKRLKRALFLSAFASIRFDPTSRAYYDRKRAQGKRHNQALIALAHRRLTVLFAMIRDGSLYDLPELKIA

SEQ ID NO: 462758 - protein, 331 aa, unidentified
MNQAGIDVASESFDMQKRCGETIAHRTFANTNSGHQQAIKWLQHGSEQARVCLEATGIYHLQLALALCRSAGIELMVLNPRAARRFAEAQMVRGKTDKVDALVLLHYLECMPFVPWHAPSELRLELQSLAHRLSQLSKEQVRERSRLHAAVRAGQHTHAAQRDIRVHIRFLKRRYEQLEAKAIALMKQHEDLAEDLKLVDSAPGFAETSALQVIAEVGLLPAHLQPQQWVAQAGLDPKPNESGTSVHAPRHISKQGNAKLRAALFFPAMSACRCDPNVRAFYEKLLAKGKTKRLAQTAVMRKLLHSIWAMLKYRQPWDGDKFYRLPESINT

SEQ ID NO: 462759 - protein, 346 aa, unidentified
MNQIIRIGMDTSKHIFQLHGVDAAEQAVLRKRLRRKEVLAFFAKLPPTVIGMEACGAAHYWGRELRKLGHEVKLMAPQHVKAYVKRNKNDGRDAEGLCEAMSRPTMQFVPVKTEEQQAALMLAGVRQQLIARRTQLSNAIRGYAAEFGVTAAKGLDKIEPLLARIAQDESLPALARELFAIEGREYTQVQAELKAIEAKLMAWHRANAASRRLAQIPGVGPIGATALVMKTPDPRAFPSGRHFAAWLGLTPKDHSTAGKTRLGKITRAGDEVLRSLLVAGATAVIQQVRRGRGRPSPWLVALLKRKPPKLAAVALANKIARIAWKLMTTGESYDGARMLGASALAA

SEQ ID NO: 462760 - protein, 344 aa, unidentified
MTLPTISVLGVDLGKNLCSVVGLNSSGAVVMRRKVRRETLIGLAEKLPACIVAMEACCGAHHLGRIFAAHGHEVRLMSPEYVRPYVKAHKNDDRDAEGVAEAATRPTMRFVELKSQDQLDMQTLHRSRDRLVGERTALINQLRAILLERGIVVPQGKQKLKQFLAVLMDEQEGAGLSPRMILLVSDARAQWAELDRRIGAFDAEFVRWAKENQDARRLATIPGIGALIASALVAAVGRAESFGRGRDLAAWLGLVPRQFTTGGKPKLLGISKRGNRYLRRQLIHGARAALPYVAERDTLLGRWAKELLRRAHRNVAVVAFANKLARIAWAVLRRQERFAATLAA

SEQ ID NO: 462761 - protein, 483 aa, unidentified
MIRSVGIDLSRSGVHQVRCLDEQARPCDSFSFDNTLEGLKKFEERVFSDGATPTIVFEPTGLAWIPMAVYLRACHPECLLVKARLQKVAALRRYLRSRAKSDRVDGMTLAKMPFIDAEQLDEAYLPPAEYHALQRLTRQRERLMKSITIRKNRIGSIINGYLPGLRQAFSNEWADRARAFYRQRLNPFTVVRDGKRALETFLATVKSRGALTESHRVYQTCQKLADFYERSKTAGMINEDFFDDLQDEIACELRLMETEEVEVERVSRRIEELYRHLHPHDHLRTIPGIGVRTAQVFLAVIGDPHRFRSQAAFANWTGVVPGASQSADTEGKGLRMTKAGPSMMKRALFQAGDIARRYDPQLAHLYYREMVHHGKTHLQAMGAVMSHLGARIMAVLREDRPYELRDTQGKPISNKGAMELIRSEHKVPEETRQARRRRNPNEGRLTHHRTHEAAKAPHSGLLMPPRRTVYCTGELQSIGELRT

SEQ ID NO: 462762 - protein, 373 aa, unidentified
MASILYIGMDVHTTNFSVCAYRIGNEEVFGETNFTASSENIAAYLDTLRYNEEDPEKIKFICGYEAGCLGYSLYRELKAKGIDCRILAPSTMAMSPLDSRKKNDRMDAQRIAKCLAFGTYRPVYVPDEQDDAVKEYIRMRDDANAELKRVKQQITTFCIRHSKLYDGVKHKWTKEHRTWLKKLKFENAVLREVLDEYLLRLQQIEEKIATYAKRIEEFANTERYAETVKKMGCLKGIATHTALSMAAEIGDFRRFPTAQHFSSYLGLTPGEHSSGNSQHTLGITKAGNSHLRSLLVEAAQCYNRGAVGQKSAALKARQVGNSEAIIQYADRANERLRRKYVRMTMRSSSNVAKTAIARELACFIWGIMTDHIS

SEQ ID NO: 462763 - protein, 402 aa, unidentified
MLNAVGIDVSKGRSTVAVLQPGGTVVRKPFVVKHSSCELKSLAEYILSLDGETRTVMECTGRYHEPILKALNDAGLFVSAVNPHLIKNYGNNSLRKVKSDPADAKKIASYTLDSWSSLRQYSSMDTVRTQLKTLNAQMDFFSKQKTAARNNLISLLDMTYPGVNKLFDSPARDDGTEKWVEYASSFWHVDCVRKIGLKTFTQRYKAFCQKHGYYCCSGKPEELYNAAKELVAVFPKEKTYKDLIQTGIKQLNTASENVEHIRKQMNDLASTLPEYDIVLSMCGVGTTFGPQLMAEIGDITRFTHREALTAYAGVDPGVNESGDFRSKSNKASKVGSARLRKTLFLIMSTLLQCKPANDPVFRFLDKKRSEGKPYQVYMTAGANKFLRIYYGKVKECMAKAQF

SEQ ID NO: 462764 - protein, 343 aa, unidentified
MQIVRIGLDLAKYVFDVHGVDVHGKIVVRKTLRRAAVSTFFANLPPCLVGMEASNGAHYWASVLTDLGHQVRLISPQFVTPYVKSNKNDRNDAEAICEAVGRPTMRFVPPKSSEQLAIQAVHRIRHRLVATRVRLVNQIRGLLSEHGIVIARDISRLRRALAEIAGNSGDDLNDLVRMLIREVQVELIELDRRIAFYDRQVRELYRNSELCQRLGKIEGIGPVTATALIAAVGDRTCFKNGRQFAAWLGLVPKQRSSGGRTQLFGISKRGDRYLRTLMIHGARAALGKAGGKQDPRSRWLGNLRERRHPNVVAVALANKNARIVWAMLASDKFYEPKLSVQAA

SEQ ID NO: 462765 - protein, 411 aa, unidentified
MDVFCGIDWAEDHHDIAIADRDGGLVARLRVSDDAAGLARLLELLAEKGDSAEDPVPVAIETPRGLLVACLRATGRRVYPVNPMATARYRDRHSMAGRKSDHGDAVVLANILRTDLHAHRPLPADSELAQAVAVLARAQQDAVWDRVAAHNKLRSHLREYFPGFLAAFAAAKGGIMRPEARAILAAAPTPEAAAKLTLAQLRALLRKAGRSRSIDAEAQRLRGAFRQEQMRQLPLVEQAMGRQSLALLRQLDAACQSADDLEQAATESFSQHPDAGIITSFPGIGALTGARVLAEIGDDRSRFQDARGLKAYAGAAPVTRASGKSRSVTHRRVKNNRLAAAGYIWAFSAITASPGARAHYDRRRDAGDRHAAAQRNLFSRLLGCLHHCLATGQHYDEATAFPARSVTPAAA

SEQ ID NO: 462766 - protein, 353 aa, unidentified
MTQDTQPLWEGQNVYVGLDVHLRSWKVAIELESSSWKGFSQDPDPELLARYLQRHFPGARYHCLYEAGYFGFWIHRALCRLGIETRVINPADVPTTDKERVKKTDRVDARKLARTLRDGRLRGIYVPDETAVSDRLLLRTEWQLIRKQTRVKNQIKALLRYMGIPVPRSTWSKAFIATLERVAASDCALGASGRAALTCHLDELTALRALLREVNGKIRLLADEERYQDRVRFLTSLPGISLRTAMVFLTELVEMRRFRNLDHLAGYVGLVPSEHSSGEHERVGELTRRRNRRLRHVLIESAWIASRHDTELALAYTKLCRRMPKNQAIIRIARRQLSRIRYVLMNECRLEPA

SEQ ID NO: 462767 - protein, 415 aa, unidentified
MYYVGIDIAKDFHITSVIDEDEKKVINKPFRINNTNVGFNKMLTILDSISLDKKEFIIGLEATGIYGENLLEFLKSKGYSVKLLNPFQTTRYREQITLKKVKNDEIDSLVIALLLKSGKFSSGYITDDEYQSLRTLYRNRATIQADMKDVKKRILTQITVTFPEFEGFIKPFTVSGLALLDKYPTAHHYKHSSIDRIMKLFRHIQGNNFTQSKALQLLELSKESIYSGKAKDARAIAIRSTIRLLQMYLSELDIIESEIFSLLGSTSTKVTVDEAGIEIQKTDSLLANLKSIPGIAEKTIAALISECGDLTRFPTIAKFIGYIGLFPTENSSGNSKHIGHLSKRGSPLTKHALYMSAVSCLIHNTQLKQLYDTKRSQGKSKKEALIAVSRKIAVIIYSIVKYNVPYDPNRVFAKS

SEQ ID NO: 462768 - protein, 343 aa, unidentified
MQTVTTIGLDIAKSVFQVHGIDAAGRVVIRRQLKRRFVLSFFEKLPPCLVGIEACASSHHWSRELQALGHRVRLMPPAYVKPYVKRQKNDSTDAEAICEAVTRPNMRFVPTKTVEQQSCLMLHRARHLFIRQQTAVINSIRAYLVEFGIVAPVGRRGVEHLLEVVADADDHQLPEVARMCLVALGGQLRALKAQILEFDRRIMAWHRSNATSKQLDAIPGVGPALATALVASIADPKAFRSGRDFSAWVGLVPKQNSSGGKDKLGSISKQGDRYLRSLFTAGALAVIRYAKIHGTRHRPWLTALLARRPTKVAAIALANKLARMAWAMMARNEHYREPAALAA

SEQ ID NO: 462769 - protein, 340 aa, unidentified
MKQLYVGIDLHSNNNYLAIIDEQDKRIYKHRWPNKSDVILAELEPFKKNIVGIVVESTFNWYWLVDILIDEGYKLHLANPTAIQKYKGLKYSDDSHDAFWLAHLLRLGILPEGYIYPKAERPIRDLLRKRGHLVKLRTSLINSLQGIIYRNCGYKLNVDKIKQSKENHVRPILSGQYDLELSGEVSKDTIDYLTRQIHKIESAILKKIKLRDSFKKLQTVPGIGKILALTIMLETGSIKRFSNVGNFSSYCRKVPTKWTSNDKKKGKGNSKSGNKYLAWAFSEAAEFARRYDKSIRAFYDRKATKTNRMVAHSTLAHKLTRATYYIMRDNVEFECRKLFA

SEQ ID NO: 462770 - protein, 400 aa, unidentified
MEALLVGIDVGCRCHRVAVGMPDGALLDQFDLEHQPTAFNAFFSRVEKQAAKHGLPVSVGMEGYGGWARPLDEMVLAKGWTLLNVNNLKLARYKEIFPSPAKTDAIDARKILELMRLRPLLPQAKEILNEVISAPQVNHDMKLLTRRRRQLVNERIMVVNRMHGDLQAIAPGLLEITGSVDNQWFLRFLTARGTFDQLTRLHQSGILKIKGIGQKYAGLVRVWQQTAQLSSDVLMVGDMVMEDARRVLALADQITRIETQLKSLMPESSLACAIESITGFGLVCASELAGEIGAIERFSSESALARYIGMAPLDNSSGAYVGAKGGKQVNRRAKAAMMVAVARHYMNTPQSKAYYDKKRAEGKKHNQAVRSLGRHMTRIIWSLVKNNTRYEIREMPSKIS

SEQ ID NO: 462771 - protein, 343 aa, unidentified
MKVAIGIDSHKGSLAAAAVDELGRVVGVSEVANDHDGHRELLEWRRRLDGQVRIGIECSGSYGNSVARMLVAAGEDVYEVPSNLSHRETRRQNRGKSDSIDAVAIARVIARGDALPRPRINQRFEDLKLLSDHHDHLKRLRTQLANRIHKHLMIVRPGYDRSLGSLRTEKVKRAILMMLRRDGSVRAELIKRNVKELRRLDAEMNELKLEISGAVAATGTSLTSQCGIGSLIAARLLGEVGDVSNLRSQAAFARLTGTAPIPASSGKTVRHRLNRGGNRKLNHALYFVAVTRCRLDDETKVFMERKLSEGKTKKEAIRCLKRHLANVVYRNLVADGQRLKEAA

SEQ ID NO: 462772 - protein, 372 aa, unidentified
MDQVTTTFVAMDTHKQTISVAMAEGGRRGETRFLGEIPSRPEAVAKLVERLSKKHTKLAFCYEAGPCGYGLYRQIVALGHECVVVAPSLVPTRPGDRVKTDRRDAVTQASLFRSGELTSVWVPDEAHEAMRDLCRAREAAVETLRRARQQVTSFLLRHGRIYSDGKHWTGKYRKWLASQRFDHPARQIAFEELVQAMEEALARRDRLAGQMHELLRSWSLAKVVAAIQALRGVAAMSAMTLVAEIGDFHRFSNPRHLMAYLGLCPSERSSGAKTARGGITKAGNRRGRRMLVEGAWTYRLPARVGLAILERNKLLPPPIREIAWKAQVRLCARYRRLAKMGKPINIVCVAIARELAAFVWAIATNDAVSAIA

SEQ ID NO: 462773 - protein, 365 aa, unidentified
MTSTNTTQPIRFQDCRREVVLGVDTHKDTHVAAVISTTGKLINSRSFPATADGYQQLLDWARSSGLVSRAGVECTGSYGAALSRFLRTNELTVIEVNQPDKATRRRRGKTDTIDAAAAAHAVLSGRATATAKLADGPVEALRLFKMAKDSAVKARTQAVNQLRAVLVTAGPELREPLDGLTIPKLVRACKSLHRSTAGTATAAAVFTLRLLARRVEELDDEITALKQQITDMTRQHVPPLLDCYGVGPDTAAALLIATGDNPERLHSQASFASLCGVSPVEASSGKTQRRRLNRGGDRQANSALYTILLARLRWETRSRSYVERRVAEGKTRREAIRCLKRYVARELYTTIIRAHARPRDQVLAA

SEQ ID NO: 462774 - protein, 362 aa, unidentified
MTTIAPEIVLGQVQVAGGVDTHADTHTAAVVDTAGRKLGDRQFDATAAGYRQLLAWLRSFGTLLVVGIEGTGAYGAGLARHLRLEGVALLEIDRPDRKLRRLAGKSDPLDAEAAARAALARARTGTPKDRSGQVEALRNLRVARSSAVAQRADCQRQIKSLIVTAVEPLRAQLRGLKSARLIDTCAGLRPDPARIGEPEQAAKTALRTLARRHTALTEEIDELDKLIGPLVTAINPDLMTQTGVGADVAGQLLVTAGQNADRLHSEPAFAMLCGVAPIPASSGKTHRHRLNRGGDRQANAALYRVVLCRMRWDPRTRAYVERRTKEGLSKKDIIRCLKRMIARELYYVLRPTQPAENLASAA

SEQ ID NO: 462775 - protein, 315 aa, unidentified
MALYTHFIGIDIGKFEVVAAVDGSKTIQTFANTQDGFDSFIAAFKPLLKDALIILETTGGYEKLFLKALVKLNIPVHRANTRHVKAFVRSLGNKGKTDALDALALARYGVERHDRLTLYQLPKASLEVLQSLAMRRIDLNQLLVAEKNRLQAPDSSEFVKRSCKAMIESIQQQLHQLIEELKNLIALNPELVKKQKVLQTVPGIGDITSSMLVALLPELGQMNRRQIASLVGLAPHPNESGTKVGYRMTKGGRRHVRNVIFMAAMAAAHSKSRLGDTYRNFIERGKKKMVALTAIMRKIIVIANARVKELDLQAA

SEQ ID NO: 462776 - protein, 389 aa, unidentified
MLCIGIDVAKRKHDCCIIDSDALKTVESFTFPNSREGFDMLLSKISELGIPKDKIRVGLEATGHYSSNLAHFISEHDLPLLTFNPLLTNRYKQGFSLRKTKTDKVDACAIAQMIVSGKGSQTYSSSLYHNEEMKSLSRYRSQTMQKCSKLKISVSRLVTILFPELEGLTSSIHLASIYALLKAYPGHEQIAHCSMKRLTHLLSDASQGRFDKSKALEIHQAACRSIGKVSLSASMELVHTITDIEVLKQHIVEIDEKLKEMVDQEESSIIDIPGIGYTLCASILGEVGDFKRFPDVDKLLAYAGMSPSKHDSGDYHSKHNKMEKRGSPYLRKTLYLAARLVAQNVPKFKEYLEKKLSEHKPYKVALSHVAKKLIRLIYRLGISGCPYLA

SEQ ID NO: 462777 - protein, 423 aa, unidentified
MKPVEYAALIGLDWADQKHDVCLLVPGQSAPERLTLPNTPETIAEWLQKLRQRFGGRPVALALEKTRSGLIHALMQCEFVVLYPLNAEAVARYRQTFATSRAKDDPTDAELLLDLLAKHRDEFRPWQPDTATTRELTALVEARRQAVNHRARLACRLISTLKSYYRQALELIGEDVYSPLALDFLTKWPSLPALQRARIETVRRFYYAHNSRRADVVEERLKLIAAATPLTTDPAIVEPARLTVQMLVEQLRVLAVAIHRYETRQAQLFAAHEDAPIFQSFPGAGAIFAPRLLAAFGSDRTRYASALAIQQYSGIAPVTERSGNRCWVHWRWGCPKFVRQSFHEYANESIRHSLWARAFYASQQQAGKSHQAIIRALAFKWQRVMWRCWQDRQPYNEVYYLMQLQQRGSKLLKLIAEPAEKVA

SEQ ID NO: 462778 - protein, 338 aa, unidentified
MKLYAGIDLHSSNNFIGVINEKDERLFQKKMPNELNQVLAALNPFKKELESIVVESTYNWYWLVDGLMENGYKVNLANPNAIQQYEGRKHRDDKWDSFWLAHLKRLDILPEGYIYPKDERHVRDALRRRQLFVQHRTSHILSLQSAITRNHGYKMSVREIKRLNDSDASNLFNDPFLIMTARNNISVIRFLDNKIDEIESEVLSHTKLRPEFDKLLTVPGIGKILGLTIMLEVGDIRRFPTVGNYSSYCRAVKSIRLSDNKKKGEGNKKNGNKYLSWAYVEAANAAKRSYPEITSFYERKKAKRNNIVAIKALSNKLARASYYVMRDKVSYNAEKLFR

SEQ ID NO: 462779 - protein, 357 aa, unidentified
MRSRIISNEQNKSNHYLEFDHYIAFDWSQQNVALARLTKKGNSPKIIEWAQSDIKLIKEYLNKLQGSTLLTFEETTNSQWLYVEFKDIVDRIIVCDPYRNHLLSEGPKTDKIDSVKLCQLLKAGLLKEVYHSNDELYQYRCLLSAYTDLVKAGVRIQNQHSALYRARGLHHKKCDTNEAEHKISQHHLRQFVNNWQLQVIEHYHEDKKLFEDQLEKVVHSHKHINQLTQIPGIGIISAFKIFAIVIEPRRFRNRGCYLSYCGLVLHEKTSGGRSYGKRAPRFNRELKAIYITAARVATQNANNPLHDYFEKLIAKGLSSKQANLQLARYIARVSLAMMKSGQKYDPYRWRKDEVTAA

SEQ ID NO: 462780 - protein, 345 aa, unidentified
MPFTRLNPNSCPGFQARISQAWVGSEGGYNVDTNTYVGIDIAKERLDIAVRPTGASWSAPNDDAGIDDLRERLAGLAPLLIVVEASGGYERSVVAALAAAGFPIAVINPRQARDFARSIGQLAKTDALDARVLAHFAEVARPPVQPLRDDEARALSDLVTRRRQVVGMLTAERSRLRGAVVPLRERVEAHVAFLEAEVSALDAEIERAIRRSPLWRENDALLQSVKGVGPVVSATLLSTLPELGTVEHKRLAALVGVAPFNRDSGKFRGKRAIWGGRAHARQALYMATVVAARHNPVIKPFYQRLLAAGKPKKVALTACMHKLLTILNAMLKRRTPWGCPTPRTA

SEQ ID NO: 462781 - protein, 427 aa, unidentified
MKYNRNQKINQVTEATLVIGVDIAKKKHVARAQDYRGIEYGKALTFDNSRAGFTRLSNWISTLMTEHDKEEVILGVEPTGQYWMPLAAFMRKECIKIVVVNPLHVKRTKELDDNSPTKNDTKDARVIAQLVKDGRYSEPNIPTEIYAELRVGMNLRDRLTEDLRRVKGRIDNWLDRYFPEFGTVFKAIDGKTAMLTLESFPLPQEIVDKGVEGIVTTWKQRISRAAGKKRAIRLMAAAKDSVGLTEGLMMAKQEITSLLAQYKALEQEIENLMIQIENILKEIPGTAEMMSIPGVGMVTVAGFISEVGNLEGYRHPRQIQKLAGLNLKENSSGKHKGQTRITKRGRPRLRALLYKCIMPLVAKNHEFKVLHHYYTTRAKNPLKKKQSLIALCCKLIRVLFALGKKRIPYDGKKLLTNPLLSLVQEAA

SEQ ID NO: 462782 - protein, 381 aa, unidentified
MTKSNILFIGMDVHKESIEIALADDGAQGEVRRYGRIGGTLDALKKTLRKLVSKNKTLHFCYEAGPCGYELYRYLTDAGHVCIVVAPSLIPKKPGDKVKTDKRDAVQLVRLFRAGELTPVYVPDREDEAIRDLSRAREDAMIIQKSARQRLKSFLLRHNIRYQGRANWGEKHLRWLADEVRLPIPAQQVVFQEYVNTVTEAACRMERLVGEIHHYAKAWRLYPVVQALMAMRGVRMIVAVTVIAELGDLTRFENPKQLMSYLGLTPCEHSSGERQRRGAITKTGNHHARRILIEAAWSYRFSPKVSPEIQKRQQNLPLPIRDIAWKAQLRLTKRYKTMSQRGKVPNIVVVAIARELAGFMWAITQAMQSSQFIQDRIRVSC

SEQ ID NO: 462783 - protein, 350 aa, unidentified
MLIMGCDLHSRYQVIAMLETDTGEVVTRRLEHENGEARRFYAALPKASLIGIEATGYTQWFERMLGEMGQELWIGDPAQIWACSVRRQVTDTRAAEHLLELLLTKRFPRIWIPTPEERDLRQLLKHRDKLVRMQTAVKNQLHFLAMSQGVCRRKKLWSAGGRAELEGLSLGPWASQRRAELLELLDRLAPRITSLDQAVKIEAERRPEAAALMKQKGVGPVTALAYVLTLGPVERFPNSRKLVSYLGLNPSEHSSGGRQRLGHISKQGNEMLRWLLVEAAHSAAQFDPELRRRYLRLKFRRGAKVAKVAIARHLAVRLYWRLRQAKVAPSPVRTPGSPAQTVVDLSPSTL

SEQ ID NO: 462784 - protein, 314 aa, unidentified
MADIICGVDISSQTLDVRIGRDGELHRFPNTEAGIAELTTICRRNQVDLVVMEATGGYERLPFGLLWAAKIPVAIVNPRSVRRFAEAMGILEKTDSIDCKVIVWYAETKRIQASPPASATQTRLTALVVRLRQLTDLQVTQKNQRRLVTEPDVQDSFTAVLQTIAQQMRALETAIVALIDADPLWAKLNAAFREIKGVAGRTIARLLADLPEIGTLSGKAVAKLNGVAPIARDSGQKTGRRLVRGGRESVRSILYMVGQVVRRYDPDFKSFYETLKAKGKPHKVIRIALARKLLVRLNAKARDARQALAEAQAA

SEQ ID NO: 462785 - protein, 464 aa, unidentified
MARKSKKVTKKVQRQTPRSLKTIQPNSAGIDLGAKEHWVAGPTRDNDKPNVKCFGTTTPELYRLADWLQEQAIETVAMESTGVYWIPLFEILDGRGFQVLLANARQISNVPGRKSDMLDCQWIQLLHACGLLRGSFRPSDDICRLRALIRERSTMVDERSDWIRRMQKYLDQMNIRVHRAVSDITGVTGMAIIRAIVAGERNANALAKLRDPRCRKSEQQIAEALTGNWRSEHLFNLRQALKMYDQLSAVIDDYDGEILSCIADLQLDDDTPVPPPSSKTKAQNIVKRGQESLREGFYRMSGFDLTTIDGISVNTAAVVISELGLDYTVFPDENHFVSYLRLAPNLSISGGKKVPKKFKATTCTRVSTALRMAALTLRNSKSALGGYYRRVAYRKGASVAVFAIARKLAQLIYRLVRHGQAYLDTGAQAYEARFNQRRLTYYTNTLKTMGFRVEPIPSFEPIPA

SEQ ID NO: 462786 - protein, 416 aa, unidentified
MKIVRPICCGMDVHKNIIVATIGITNKKTRITEYIQETFSTLNPDLLNLKQWLINHKCFDACMESTGKYWIPIFNILEDEINIYLTHPKYVKAIKGKKTDKKDSKWICDLFKHDLIKFSFIPPKEIRALREISRYRYKLVGMRSSERNRYQNCMTVSNIGIGSVFSDPFGKSAQAIMKEVLESDIIEDEKILKCIHGSCKNKDKILDSIKHCNIETDQRFKMNESMTHMEELQVHINNCEIEMMKRAAPMFDQFMHITQLPGISTLSAILIISEIGVDMKQFESDKQLTCWAGLAPANNESANKKKSVRISKAGQYLKPLLVQCALGAIKDKEGYFGIKYSRIKKRRGHKKAIIAIARMMLVSIYHMILTGETFNPSDYESFRNPKPPIKQQVLTEESAIEFLKKSGFDVSKLTKP

SEQ ID NO: 462787 - protein, 342 aa, unidentified
MKRWIGVDLHKRQFTVCWMNAKEESEIEEYEVSAVGYERFKKKLRKGDEVAVEAIGNSGYFCDQIREQVKKIAVINPKQFKVISESANKTDENDARAIARYLKHGLLPEVRQMEKEQRELKSLIGTRDKLVKLRSSLKNKIHNVLNDNGIVSKKEMFSSEVSYERLKSLKLSEMVKFEIEIIVEQIKSLGKSIKVIEEKIKDTGSKMKGHKSITSITGVGELSAAIILNGIGDVEDFEDSKKLCSYVGLAPTVRNSADKEKTGHITRNGNKIVRTALVQVALIAIRYNEYLRKFYLKLKAKKCSGKAIIATARKMLDIIYRTLKNGWEFADFNNWVLKQKSS

SEQ ID NO: 462788 - protein, 416 aa, unidentified
MQVLYTHCAGLDVHKKTVVACLSTPDPQGGWRHEIRSFSTMTRALLALSDWLLAAGCTHVAMESTGEYWKPVFNILEAHFEVLLVNAQHIKAVPGRKTDVKDAQWIAELLQHGLLRASFIPPVAQRELRELTRHRSTFVRERATLVNRVQKVLESANIKLASVATDVLGVSGRAILRALSAGESDPGVMAELAKGRLREKREQLIHALEGRVQAHHRFVLTELLCQIDNLEETLARFDQQIEEYSAPFEEAIQLLDSIPGVGQESAEVIVAEMGADMSRFPTARHLAAWAGLAPGNHESAGKQRTGRTRKGNQALRQGLIQAAHAAAHTKNTYLAAQYHRLAARRGSKRATVAVAHSILVIAYCLLSRHEPYRELGGDYFDRLRPETTAKRLMRRLENLGYKITLQAPAQEALASG

SEQ ID NO: 462789 - protein, 425 aa, unidentified
MQFKWNEKINQVTENTLVVGMDIAKHVHYACFVDERGRVIEKAFAVRQSKEGFEHLYEKIRQTMKEAKKTEVIVGIEPTGHYWMNLANFLDHYGIPLVMVNPMHVKRSKELDDNLPTKNDKKDALVIARLLKDGRFSYPRLLKEVEAELRIGSTLRSKLTEDLASIKNRIIRWLDRYFPEFTQVFPAFGKMALATLEMTPLPQDIDGKSAEELVFLYRKVKGMRAPQLPKAKLLIEAATNSIGLTEGTQMARHEIATLLRQYRLLENEIESVNSQLSEMAQTTMEYELLASVPGLGDATIVDLLSEVGSFSLYENPRQLIKLAGLTLRENSSGQHKGQKHISKRGRKRLRYILFKVIVPLIRHNKGFKQLHEYYTTRQQNPLRGKQSMVVLCGKLLKVLHGICKKKVHFNEQNMIKDLYCLSEAA

SEQ ID NO: 462790 - protein, 369 aa, unidentified
MNDITYVGLDVHKATVCVAIAESGRGGEVREVGVFENRPVVLRKMVARLGKHRRRLNFCYEAGPCGYGLHRLLTGLGHDCVVVAPSLIPMKAGDRVKTDRRDALMLAKLHRAGELTPIWIPDAAHEAMRDLVRARATAVRALSKARQHLQGFLLRHDRIYHGARAWTLAYRRWLTTVRFDHSAQQIVLQDYIHAVEDAESRRDRLTRQIEELIPSWSMAPVAAALQAMRGVALVVAVTVVAEVGDFRRFTNARQLMAYLGLVPSEHSSGSTVRRAGITKAGNALARRVLIEGAWTYRMSARVSRKLHDRLEPLSAAIRDIAWKAQVRLCARYRRLAAIGKPKVVVTTAIAREMVGFIWAIARVAQPELI

SEQ ID NO: 462791 - protein, 420 aa, unidentified
MKVVYQTCCGVDVHKSFLVATIIKTSSGIEPSYQKKRFSTFNNSILQFKDWLMKNQCRDVCMESTGKYWVPVFNLLEDEINVTIANPKWVKAVKGNKDDTKDSRWIGDLFRLGLVPGSYIPCKPIRILREFTRYRYKLTSCRTSEKNRYQNALTVCNVALDSVVSDIFGKSAASVIDYLIGQSDNSINHEEIASRLLRSLKKKSDSVIESIEGYQMTDSQKYRMRLVRAHLDYITSTINDIDTMLDSLVTPYENAVQLLCTIPGVDRNSAVTVISETGTDMAPFSSSKRLCCWAGLTPGSNESAGKKKSVRITRAGVYLKPALVQVAHAAVKSDKSPYYKQKYERIRKRRGKKRAIIAIARMILTAIYQMLSTGEAWNPTDLYKVDMPEPLKEKQKEKAIKQAKKLLISEGIISESQLAS

SEQ ID NO: 462792 - protein, 438 aa, unidentified
MKVMYERVAGIDVHKDMIKVAVRSPGDKPWTRKTEILTFRTFYGVLRAMARELRRRGVTHVVMEASGVYTEPVYYALCGEDFTEVAVVNPAHAKALKGHKTDAKDCARLAELFECGLLQGSYIPAAGLKEMRDLSRYRMKTVQARTSEIQRLAKALESAGIKLGSVASEITGKGPVAMIEALISGERRGAVMADLAKGRARTAGKLADLSMALEGRFTDHHALMCRLHLDRITALDAAVADLEARIAATAADWQREIGLLKTIPGFGDIVAWAWIAEIGPAPHQWFASHHKLASWVSLAPGNNVSAGKRKDGRTGDAGTYIKPMLIQAAWAATQVRGRLQARYNRLVRRLGGPKNPAAKKKAIVAIAHTLLKIAYTVLKTGTGYQEPGADFYTRRESPGHRQAWLERQIQKLHPGCTVTITISPSPDPAPEAALPLGA

SEQ ID NO: 462793 - protein, 350 aa, unidentified
MTTIARRITGGVDTHLDTHVAAALDERGAQLGVQSFPATAAGYRELLCWLEEFGTVQLIGVEGTGSYGAGLTRHLLSHQVAVVEVDRPNRQRRRRTGKSDPHDAVAAARAAQGGDATGSAKTRDGNVEAMRVLRVARSSARRSRTQAINQMRSLISTAPEELRAELRDLSIYNVLTLASAFRHTGRSDVTTITKLTLRTLARRALSLEEEVKEIDRLLKTLVAETAPELNAIDGVGTDVASAILVAAGDNPERLKSESTFAKLCGVSPLDASSGKQERHRLNRSGDRQANSALWHIVFTRMVNDPRTKHYIERRMKDGRTKKEAIRCLKRYVAREVFVALPRSQFALDSP

SEQ ID NO: 462794 - protein, 423 aa, unidentified
MKYALVRVLPEVPPGGVCAGIDWASADHAVCVVDLAGQVADRFAAAHDRAGIAGLIARLRGRGAAEVAIERGDGVLADALLAAGLTVVVIGSRQVKNLRSRYGSSGAKDDRFDAFVLADTLRTDRARLRPLVPDSPATLALRAAVRARRDLVAHRVSACNQLRAHLQVAFPGAVGLFSELDSPLSLAFLAAFPGQQAAARLDEQALAAWLATVPRRGNTAPAGVLAARLAAAPRGAAGADAAQAAVTTQLAAATAGLAGRVRALEAEIAAQLAAHPDQHIFTSLPRAGTLRAARLLAETGDCRARYPDPWSLAGLAGVAPVTRRSGTYISHEFRWNVNRQLRDAICDFADGSRHASPWAATVYAAARDRGKDHPHAVRITARAWVLIIWRCWQDGTSYDPAKHRALQDVLTRQAAAGTPQPHR

SEQ ID NO: 462795 - protein, 353 aa, unidentified
MEFTMIARSDAACFVGIDLHKDTLTACTIVAKDREVAYRKISCVAREKVREFLAGLPRPSVVAIETVGFYRWLWMEAEPIVDQVVLADARGCRALAGRRIKTDREDALNVAELLMTGRLPMAWAPPGNIQRVRNLTRHRVGLSRDHAKTLHRVKSIMNRLNRPGPARMDAAGLQRYLLASVDRIEADDLTVLWQHQRRLVEVEQDRSAIDRRIIDLMRADEFRRLHTILESIPGVGLVVSATAIAEIGDFSRFPDSKAIGRYAGLTPTGYASADKNRLGRICKTGSPDLRWALQQAAWTAIRCDPDIKKTWLKISKTAGKKAAAVAIARKILALMWTLVRKDELYKAREPVAA

SEQ ID NO: 462796 - protein, 348 aa, unidentified
MAIVGGFDIHRRQVTFDYLDTVTGQVRRGRISPACRETLRRWLERFAGCEDVTFAVEGCTGWQFVVEELQRAGITALLAEPAETAHLRGPKRHAKTDKTDSRHLRMLVADGRVPLSWIPPRQVCELRALLQLYRDLAEERTAWAQRIHATLFHQGVPSLAGRLDDPQVRARLAAGGAGMGLSPAGAQAVAVALRRMDGLEAELGPVHAQIAAFARRQAGCKALARELFGVGPLVAAVVWAFLGDARRFSSSAQAVRHTGLDITVYSCDDKRTPGHLSHQGPPILRWALFEAGHQGSRRASPDHRYYADVAGRIDANRAALSVARKLARRSRHILRRLGDQAYAPVPGW

SEQ ID NO: 462797 - protein, 311 aa, unidentified
MATSSGTYVGIDVSKDRLDVAVLGEEQEWQVDNTPKGITCLVKQVTELQPELIVVEATGGYQRAVVDALFWAGLAVAVVNPARVRQFARACGLLAKTDKLDAQVLAVFGQRVQPRRYVGKSEAEKQLSALLVRRKQVEEMLKAEQNRLRTVSPSLRGSLERMIVVLKEEKKRLDEEIRGLMNEQQAWQEQIEILDSAPGVGVVTTATLLADLPELGKMDRKKVAALVGVAPMNYDSGKKRGYRKTKGGRTEVRSVLYMATLVATRRNPVIRTQYQHLLKRGKLKKVALTACMRKFLTILNAMVRDQQPFRM

SEQ ID NO: 462798 - protein, 364 aa, unidentified
METVFYVGMDVHKESIQLAVLKNGQGRSELEQRLSYDFSKVRKFFGSLKRAGTVFAAYEAGSMGFDLARVLSDMTIQCVVAAPGRIARQPADRVKTDRHDALMIARLLRNSQLEAVHVPTREDEAVRDYLRARADLKLDYTRSKQRLSKFFLRHGHLYQGSPWTQRHMEWMRNITFNPPMLADTFERYLETLLTQKEQLKAMDAQIELLATGPRYAASVARLRCLKGIDYLTALSLVCEVGDFRRFERAEQFMGFLGLVPGERSSGPKRRQGGITKAGNVHLRKLLVEAAWHYRYRAAASERLIERRNGQKAEVIAYAERARERLQKKFARLVHGKAKKSQVAVTAVARELSGFVWGLMVGKVA

SEQ ID NO: 462799 - protein, 419 aa, unidentified
MNSFCGIDWAEGHHDIAIVDGEGKLVAKKRISDDSAGFTVLTEMLAAAGDSFDDAIPIAIETPRGLLVAALRATGRPVFAINPLAVARYRERHSVAGAKSDHADAMTLANILRVDSHLHRRMPADSELAQAIAVLARAQQDAVWRRSKASNELRSMLREYYPAFLDTFAGKSATNLAKPEARAVLAIAPTPAHAAKLIKTRVAAALRRAGRKRGIDGLAVNILEHLQAPQLRQPELVEKAMGRQALALLAMLDAACTGADELAQTAAEEFRKHPDYAVITSFPGLADLTGARVLAEIGDDRDRFADDRALKAYAGSAPITRASGKVTSITHRRIKNDRLAAVGWVWATYAYINPGPAQDHYRRRRDHGDRHAAALRHLFNKMLGQLHHCLQTRQTFDPIKAFGQPRTAPREPAAAGIDP

SEQ ID NO: 462800 - protein, 409 aa, unidentified
MQVIYERCGGLDVHKKSVTVCVITPEGKETRTYGTMTRDLLDMVNWLEAKGVTHVAMESTGVYWKPIYNLLEETGIQPLVVNARDIKNVPGRKTDVKDAEWIADLLRHGLLRGSFIPSRSQRELRELVRYRRSLIEEQSREANRIQKVLEGANIKLGDVATDVLGKSGREILECLVAGETDPEKLADLARGRLKKKREQLAEALWGVMGPHQRMMLASQLRHIDFLEQEIARLDREIEERMRPFAEALERVDEIHGLGRRNAEEILAETGVDMSRFPSEAHIASWASICPGNNESAGKRLSGKTRKGNPYLRAALVRAARSAARTKGTYLSALYHRLAARRGGNRASVAVGHAILVIIYHMLKKGTRYQDLGPDYFDKLNERATVSRAVARLEALGYTVILAKKAETAA

SEQ ID NO: 462801 - protein, 311 aa, unidentified
MTEHSIGVDISKSHLDIYNLSTGASGQFDNNPSGFIALAKWLPKDDLRRIVFEPTGPYHRAFSLALGSKFPLVKVNPLQARRFAQACGVRTKTDAVDARMLAQMGAAFNLGPDPEPSLEALVLKELRVARLALTKQSTRLKTRLKMLTVPLLRCQANKQAKLVKNQITEIDAEIGMRMSQDQTTVRNMDILCSVPGLGKVTAAALLIEMPELGKLGRKQVASLAGLAPINRESGQWRGKAFIQGGRKPLRDALYMPAIVAMRHNPDLKQKYQTMVAAGKPPKVAIIALMRKLIELANTLIKNDRKWTQNRA

SEQ ID NO: 462802 - protein, 348 aa, unidentified
MRFYKQTHRFYCGVDLHARSMFVHVLDHEGQTLFDQDLPAGPDAFRAAVAPYRAGLVVGCECMFAWYWLADLCEDESIPFTLGHALYMKAIHGGKAKNDQIDAAKIAGLLRGGMFPMAYVYPRDMRETRDLLRRRTYFVRQRAQLIAHIQNTNSQFNLPPFPKKLTYAGNRSPQIAERFAHPSTRLSVAADLAMIDAFDDQIADLERHLIQHAKVDDPVTFHLLRTTPGIGPILGLILLYEIDAIGRFPEVGNFLSYSRLVRCQHESAGKVKGTGGKKIGNGHLKWAFSEAACLMIRGCPPVKAWVQRQQKKRGKRKALALLEAKLGRAVYHLWRKQVPFDLKRFLNG

SEQ ID NO: 462803 - protein, 392 aa, unidentified
MVVSVGIDVSKDKHDCFIVSSEGEVLADAFTIPNTIDGFHCLLQRIQDCTHAQDKIKVGLEATGHYSYNLLGFLLDNGLATYVLNPLRTNLYRKSLSLRKTKTDRVDARTIASMLLSDVGLKPYTDTAYHNEELKSLTRYRFDKVKERAKLKSSIARLVCILFPELEKFVPSLHIASVYALLEEFPGAKQIAAAHLTRLKTLLETTSKGHYKRDMALEIRDAARNSIGAWMPAKSLELQHTIRLIRELDREIDEIEEQIQSIMDELHSPITTIPGLGFRMAAMILAEVGDFTRFDSPDKLLAYAGMSPSTYQSGQLKNCYPHMEKRGSRYLRYALYNATKYVCHWDPAFADYLAKKRAEGKHYNIAISHAAKKLVRLIFAMEKSRQPYCSAA

SEQ ID NO: 462804 - protein, 317 aa, unidentified
MRSDDISTFMGVDVAKDKVDVARFGESTVLTLDNNKVALSKWLSTLPANCHLAVESTGSYHELLAELAYTRGFVVYVLNPKDVRHYAQSVGRRGKTDRMDALLLARYLAREHSDLHPWTPPSPAQRQLSQLLKRRVKLVEAKGAIRSSMAGLPMLANPTANVLREIEQMIDHIDREIQAQVHALPQGKETLKRLCSIPGIGLLNGAALTGLMQRLDFANHDAVVAFVGLDPRPADSGNKRGQRRLTKRGPAELRRLLYNAAMAARKSAYWKPYYERQLAKGLAATQALIVLARKLVRLAYALFKHKTSFDPGHNLAT

SEQ ID NO: 462805 - protein, 371 aa, unidentified
MEHTRFIGLDVHKERISIAVAESGRSGAVEYLGDIANEPGAIGKLCDRLGRAGKLLAFCYEAGPCGYGVHRQLTGLGYRCDVVAPSLIPKKSGDRVKTNRRDASMLARLLRAGELTAVWVPDPDHEAMRDLIRLRSVVRQIVTRARQHLQGFLLRHGRKHGRGRAWGMAYRRWLSTLAFEHSAQQVAFQDYVDAVMDAERRLKRAEEQIFGLVPEWNLRPVVDALQAMRGIALINAVVLVAEVGDFTRFSNPRQLMAYFGLVPGERSSGETVRRGGIAKTGNTHARRALVEGAWAYRMKPRIGRHKVDRIEALPKVIRDIGWKAQVRLCTRYRRLRARGKTANVVNVAIAREMVGFIWSIACAIQSAPKAA

SEQ ID NO: 462806 - protein, 360 aa, unidentified
MIRQRTSVGLDVHARSVLGCALDGDTGEVFQQRLSPDHGEIVAWLGDLPGPVAVTYEAGPTGFGLARALAGAGITCEVAAPSKLIRPAGDRVKTDARDAAHLARLLHLGQITAVTIPSASQEAARDLVRAREDCRGDLMSARHRVSKLLLRQGIVYRGGTTWRRDHHRWLAAQRFDNPALQLSFEAAFDAMLACLDRRTRLDDAITAMAADSEFTPVVHRLGCIRGIAALTAFGLAVEVGDWQRLTGRSIGAYVGLVPSEYSSGDSRSQGGVTKTGNGHVRRLLVEAAWHHRSPYRPGEQLRSRWDLACPAARARGQAANRRLHARWQSFDARKKRSVVANVAIARELAGWCWSLAVMPD

SEQ ID NO: 462807 - protein, 348 aa, unidentified
MKEPLFAGIDLHSNNLMIGIVDQSGQRIKYQKLACNLQQVIQFLEPFKVRLKSLAVESTYNWYWLVDGLREQSYPVVLANPAGIGQYSGIKHADDKNDAFFLAELQRLNILPTGHIYDPQLRPVRDLLRRRLGLVRQRTTLMLSFKSLFTRTTGQPMSLKRLKSMELSETKTLYEHPANCLIAAVQKEHIEQLDQSIERMEKAVLRSARKLPSYRQLTTLPGVGRILGMTITMETGNIERFASPGDFASYCRTVGSKRVSNGRNKGDNNRKCGNKYLAWAFVEAANFAKRYDEACRKWFDRKAAKTSTVIATKALACKLAKAAWHVMSQDSGYEEKRMFPELAMKQKE

SEQ ID NO: 462808 - protein, 352 aa, unidentified
MTRENTQLQSTVTGGVDTHRDTHTAAVIDSVGRLLGHRMFPATTPGYRDLLAWLNSFGTLLKVGVEGTGAYGHGLTRYLTSQGIKVIEVDRPDRKTRRSAGKSDPLDAEAAARSALSGNRTGTPKIRTGHIEALRNLRVARRSAITHRADCVRRMKSLIITAPDQLRDQLRRLTIAQLIKTCTALRPDTTQAADPAQAAKIALRSLARRYRHLSDEITDLDALITPLTHAANPDLLKLHSVGPDSAGQLLVTAGQNTDRLRSEAAFAMLCGVAPIPASSGQTRRYRLNPGGDRQANAAIHRIVICRLRWDPRTRAYLERRTADGLSKKDAIRCLKRIVAREIYYVLTKPQTT

SEQ ID NO: 462809 - protein, 341 aa, unidentified
MDYFAAMDVSLEQSSVCVVDGTGKIIREAKVASEPEALVAWFAESGLKFTRIGLEAGPLSRWLHAGLTAAGFAAILIETRHLRAALGAMKVKTDRNDARGMAQLIRMGWFRPVHVKTVPAQEIRALLTGRKLLQIKLRDIELGIRGLLRGFGLKVGKVSEGKYDARIRELATGHPMLEPVAAAMLQARASLRAEYAKLHRMLLRIVRADAVCRRLMTAPGIGAVVAVSYRTAVDDPTRFHKSRDLGPYFGLTPSKYQSGEVDRTGRITKVGDVMVRTALFEAAHVILTRVTRFSTLKAWALRIAKQRGFKRAKVALARKLAVVLHRMWVDGTDFRWRKAAA

SEQ ID NO: 462810 - protein, 343 aa, unidentified
MTQIMTIGLDLAKTVFQIHAADSGGRPVLRKRLRRGQVLEFFASIPSCRVGLEACASAHYWARELQALGHEVRLIPPQYVKPFVKTNKNDAADAEAICEALLRPTMRFAAVKSADQQSVLMLHRARELLVRQRTMLINALRGHCGEFGIIAAQGARKVVALIEMIEDPDDHRLPPLAREALMSLVVQLRAAEERIAELEKRLMAWHRSSEASQRLAGIPGVGVITATALVATVGDARQFRSARQFSAWLGLVPRQQSSGGKDRLGRISKRGDGYLRRLLVHGARIVLFWSRRKKEMRSDWLEALLARRPTNVVMVAMANKTARVVWAMLSRGEAYQPNRRAAA

SEQ ID NO: 462811 - protein, 372 aa, unidentified
MQQNLRVFVGLDTSKNKISVALAEDGRRGEVRFFGDIDNSPDVVRRLVSKLSGKYQQLLFCYEAGPTGYGLHRQITALGHDCSVIAPSLIPKRPGEHVKTNHRDAVTLARLHRAGELTTIWVPDLGHEAIRDLVRAREAAMEDLREKRQHLQSFLLRHGQRYPGLRPWTLVHARWLSNLTFEHPAQYLVLREYRQAIEDAEARLERLTQQVTEVVSTWSMASVVEAYQAMRGVAFLTAVTFVAEIGDVRRFETPRQLMAYLGLVPSERSTGEQVRRGSITKAGNPRARRVLIEGAWTYRYPARLSRPLQLRQESLPKVVKAIAWKAQVRLCARYRRLMAAGKRQTLITTAIAREMAAFLWAIGHEVQPRSAA

SEQ ID NO: 462812 - protein, 346 aa, unidentified
MDQIIRIGMDTSKHFFQLHGVDAAERPVLRRKLRRNDVLAFFAKLPPTMIGMEACGASHFWARELRKQGHEVKLIAPQHVKAYVKRNKNDGRDAEALCEAMSRPTMQFVAVKSEEQQAALMLLGLRAQLIGRRTQLSNAIRSYAAEFGLTTARGLDKIEPLLSRIAQDETVPALARELFVLQGKEYVRLQEELKAIDAKLLVWHRADACSRRLAQIPGVGPIGATALVMKAPDPRAFASGRDFAAWLGLTPKDHSTAGKTRLGKITRAGDEALRSILVAGATAVIQQARRGRGSSSSWLTALLARKPPKLAAVALANKTARIAWKLMVSGDSYNGARMPATSASAA

SEQ ID NO: 462813 - protein, 341 aa, unidentified
MDIAVLGIDLGKNTCSVVCLDASGRVVLRRRMQRKTIMGFAAKLSPCIIAMEACCGAHHMGRILAAQGHTVRLMSPEYVRPYVKAQKNDDRDAEAIAEASTRPTMRFVALKTEEQLDMQTIHRARDRVVAERTSLMNQLRAVLLERGIIVPQGRAKLKVRLTELLAQPCAELSPRIRSLLEDMMLRWHAFDERIAAFDAEFAAEAKRSEAAHRLTTIPGIGALNATALVAAIGDAQTFARGRDLAAWLGLVPRQATTGGKPCLLGITKRGSKYLRKMLIQGARAALPTLSRSNTPLGKWLRGLLARAHANTVVVALAAKIARIVWALLRHNRTFEQRAIAV

SEQ ID NO: 462814 - protein, 370 aa, unidentified
MKETITSYVGLDIHKDSIAIAVAEAGRSAPRFIGTSPPELATVCKALTRCAKRGHTLVVYEAGPCGYGWARYLSAQGWRCEVISPAHITRKGAEKLIKTDRLDAVLLARESRAGNLVKVALPDERDEAIRDLSRAREDAGTARLRARLQLKAMLLRHGRAYHGKSSWTAAHERHLANIEFDHPAQQIAFDEYRQAVKDAHERVERLTQALRAQCEQWRMNGVVKALMCLRGIDFVAAVILIAELGDLSRFAHPKALMKYLGLIPSEFSSGNTRRQGPITKAGNKHARRILVEAAWTYRFNPRVSRPIEVRQEGQPKAVRDIAWRAQLRLTYRFRKLNAGRKMTQNKCCVAVARELAGFIWDIARQVKLPA

SEQ ID NO: 462815 - protein, 377 aa, unidentified
MYRIIKIGLDVHSTNYTICALEPVIGEEDRVLATAQVAPDYREILLFIDGLKQKLGADNDYDIVCGYEAGCLGYSLYNQLTKAGVKCVILAPTTMMTQQGKRVKTDARDAKVIAQCLASGTYHKVYVPTEEDNYVKEYLRMRDDHKLALKKIKQQTNALCFRYGYHYEGSKWTGKHMTWLKKLELPALVRETLDEYLASYSEYIAKIERYDARIEEISAQVKYQEKVKRLSCFLGIKTHTALSLIVETGDFNRFAKGNTYAAFLGLAPGESSSGNHIIRTGISKTGNVHLRTLLIEASKGICKGAIGQKSKELRSRQLGNSAEVIAYADKGNVRLRSRYYRYIRLGKKKNVAVAAVARELACFVWGMMTDNIGIKAA

SEQ ID NO: 462816 - protein, 329 aa, unidentified
MQNFIIIGTDVSKLTLDHGLHTAMAHHKTTNNEKGFKDWLRWALGFGSKEQLWIILEHTGYYSYQFEIFLHQQQIRYTKVAALEIKRSVGLVRGKSDKVDALFISRYGWMNRDRLVPQKLSAAIITELKDLVNLRDKLVRDRSGYKARMKEQAATRKYGKAHIQNKIQTRMIKELTQDIKQVEAAIKELIKADAALLNNYKLLVSIKAIGFVTAVYMLAYTENFCKFLNSRKFACYAGLAPFEHTSGTSLRGKNRVSHYANKKAKCLLNLAASVAIQHNPEMKAYYQRRVAEGKSKMGALNIIRNKLVDRMFAVIKRGTGYQEVLSIAA

SEQ ID NO: 462817 - protein, 415 aa, unidentified
MALKIVYKICCGIDVHKTFVVACIASTNDKGVTSYESHRFSTYTSGLKTLLQWLLKRNCKDVCMESTGKYWIPVYNILENDCSIVLAHPKYVKAIRGKKTDKKDAKWIADLFKHDLVAGSFMPPADIRQLRDLMRYRFKLTCFQSSEKNRLQNCLTVSNIQLGNVVSDTFGKSAQAILDKLLENPADTSFDLEPLVYKSLKKKLPELRDAIDGYITLEQAGKLKVIKAHYESLESRKAELEELILALAAPYQQELAILQTAPGIRSDFTTIGIISEIGTNMEAFPSAKHLCSWAGLTPTNNESAGKKKSVRVSKAGCYIKPLLVQCANAVVTSKKHPEIRNRYLRLKKRRGHKKAIIAIARMLLTALYHMLKNGETYNAELYRKSDLPPVDREITVEQAIIIARNQGYKIKSATA

SEQ ID NO: 462818 - protein, 412 aa, unidentified
MTAINRFAAHVGLDWADKKHDVCVQFNNGERVFHVIEHTPEALDTWLKALHKKVKGRIAVAIELKKGPVVFALQKYPFITVFPVHALSLARYRQTFWPSGAKDDPQDAELALELMLRYPKKIKAIEPDNADIRLLQQLVEQRRQLIEDKRRFVNRLINTLKQYYPQLLEWFSHRGSLLLCELIIRWPSLQQLKRARRDTIRNFLNAKGGRATALTEQRVASIDNAIPLTTDPSVIEANALMATALATQIKVVSEIIKTYDERIETLFDTLPDAGLFKSLPGMGPCMGPRMLAALGDNRDRFNSAEEIQNYAGIAPVTERSGQKSWVHWRWQCAKFVRQTFVEWAAKTVNSSYWARLYYQGQREKGKSHQSAIRALAFKWIRIIYRCWKTRTRYDEAKYLLALEARKSPLLKP

SEQ ID NO: 462819 - protein, 351 aa, unidentified
MPQLDDLSRSLQAFEQNKTLVAVLEMSQSTWLAAGVVPGVERRPLEKLDPDPAALLRLVERWRDQAVKAGHAITRVVLAFEAGRDGFWLARWLRARGIEAHVVHSTSVAVSREHRRAKTDRLDTEMLIRVFLGWLRGEPRHCKMVAIPTLDEEDARRPSRERESLVGERTRIINRMKAALIRLGIRGFKPELLKAPQRLEALRTPEEIPIPPNMLAEMRRDMARLAWVREQIETIEQARLDRLEHAPANGPHAMVRLLARVVGVGVETADMLVQEVLSRNLRDRRAVARYAGVTGSPDESGAKRREKGLAKAGNARVRRGLMQLAWRFLRFQKESALARWYRERTEGAGKR

SEQ ID NO: 462820 - protein, 449 aa, unidentified
MTDERDGFPVLRRDVAGIDVGSEEHWVCAPSRTGDGRDVERFPATTPGLERLIAWLQDRRVRAVALESTGVYWIVPHEMLEQAEFEVRLVDTRELRRVPGRPKSDRRDCEWLQRLFSCGLLRGAFRPPETVCLLRTLVRDRATLIAERADWLRRMQKALDQMNVRVHRAVADLDGVTGMAIVRAIVGGERDPHRLAALRDYRCQKTEAAIAEQLTGHWRADHLFSLQQGLKMYDAITDRLADYEREILQQLAAMAQTDDTPPPPTNVNKARMIQKRGEEPLRQALYRISGVDLTTIDALGVETVNVILSEYGPDLSRFPTEKQFIAHLRLAPHQAISGGKPVRTPKKPQRRSARVTMALRMAATSLRRSRSALGAYYRRIAQRLGADVAVFATARKARPMGLPRAAVGAAVRRRRGGGLRAPLPPSAHYTLGGHGERSRICPRLGGGLT

SEQ ID NO: 462821 - protein, 410 aa, unidentified
MHPLIDRCAGLDVHQATVMATVRIPDEHGGRQVITETFGTTTEALVTLRDWLQAYGVTHVAMESTGVYWKPVYYLLEDACTLLLVNVQQLKQVPGRKSDVRDSAWIAQLLEWGLLRGSLVPPAPIRDLRELTRYRKHQTRDRAREVNRLHRVLEDAGIKLSSVATDVMGASGRAMLTALLHGTTDPAVLADLAKGKLRKKLPALRHALAGRFRGHHGFLIGQILAKVDFLDETIATLTEEIDHLVAPFEPMVAKLDTIPGVDRKGAITVIVETGGDMSRFPTAGHLCSWGAMCPGQNESAGKRHSGKTRKGNRYLRTALIEGGLATTRATGTALQARYYRVKRNRGHKKAVVAVGHQILEIAYYIMRDGVSYQELGPDYFDRRHRNRAVRRHVRQLEALGYRVTLDIEAA

SEQ ID NO: 462822 - protein, 342 aa, unidentified
MKKGSIIGLDLAKRSFQAHGACADGGVAFRKKLSREKVLAFLAEQPRCVVAMEACGSAHHWGRAISDLGHEVRLIAPAYVKPFVKRQKNDAADAEAISEAASRPTMRFVAVKTQEQQARAMLFRTRDLLVRQRTQLINALRGHLSEHGVVAPQGPTNVKVLSQAIENETTSIPLLVMELARVYLEQIDHLSKRIDVLEKTVAQEAARGAMTRRLQTVPGVGPITAMAIETFAPPMSVFKRGRDFGAWLGLVPRQHSTGGKQVLGKTSKMGQRDIRRLLISGAIAVIRWACRKGALEGTWLHRMLARKPRLLVAIALANKMARSIWAMMTKDEDYRVPVAVNA

SEQ ID NO: 462823 - protein, 455 aa, unidentified
MAKKQKICVTTKSQGLRVTHPSTAGIDIGKDLMQVSVPEDRSEKSNRSFGSFTKDLKEIISWLRECRIERVVMESTGIYWIPLFLQLQEAGFEAILVNAKEVKNMSGRKTDVNDADWLRFLGSCNLIRPCFQIAAVSRRLREYHRIHASKVRDMARELQHMQKAMGSMNIKLDSVISDIAGKSGMSIMRAMLNGERNPATLASLTDPHCKNDKATIEAALQGTWDIEHMLALRMAMETYDHLQTQIVRIEKEMEIFLDSYELTPVPSVKASDIKDNRSGKRKQSKNPIHFDVELYSFLMYGVNLMRIPGVSDSTLITLMCELGPDFTSKFKTPGKFCRWCNLTPVDNVTGGMVTSSKVPKRPNPVGQALRQAASTLRKSDTPLGQYRRRMAARLGPAQAVVATAHKIAEIIYLMVERKVEYDESKTSQSESELTQKRIRFLEKKLSKLKSAQNTL

SEQ ID NO: 462824 - protein, 348 aa, unidentified
MLADELDYLLGVDTHRDEHVLAVVTAPAGGVVAGAAAATNGRGYRELVRVAERHAPGRRAWAIEGSGSYGAGLARFLSEHGEAVLEVSRTLRAERRLAGKNDTLDAVRIARAALASEALALPRAGERREAMRLLLIARRSAVDVRREALTQLRAVIVTAPEPLREQLRRLSLAKLLDRCSRLRRSARPAPDELAVRLVLRSLARRVLAATSEADQLEREILAHVRALAPALLDEPGIGPIVAAQLIVAWSHHGRLRSEACFARLAGVAPIPASSGQTQRHRLSRGGDRQLNRAIHTIVLHRRHHDPATRDYIARRIAEGKTAREATRLLKRYLARHPYRLLEQQPAMT

SEQ ID NO: 462825 - protein, 340 aa, unidentified
MKEVIIIGLDLAKNVFQAHGAAADGSVVFRRKLSRAQLVKFFSAQPACLVAMEACASAHYWARTIGALGHTVRLIPPAYVKPFVKRQKNDAADAEAIAEAAARPTMRFVEPKSEAQQAAAMAYRTRDLLVRQRTQTINALRAHLAEYGVVAPAGVAHVGRLAAALEAGDSGLPEAVTALGSMLVAQIAALSWQIEKLEKELRQRACVDDTTRRLMTIPGVGAITATALTTFAPPCETFAKGRDFAAWVGLTPRQHSSGGKERLGRTSKMGQRDIRRLLITGAVAVVRWAARNGAPEGSWLARMLARKPRMLVAVALANRMARIAWALMRSEEVYRDPAVA

SEQ ID NO: 462826 - protein, 358 aa, unidentified
MQSNKISFKGQKIFIGIDVHAKNWEVAIAPEVGIVKRHSQKPSAKELFDFLKKNYPDGEYQAVYESGFSGYSTYYALKEVGIECMVIHAADVPTTQYEEVMKTDRVDAVKLVRSLKAGLLKGNYIMEKQYIDDRSVVRIRRTIQKQLSGYKSRVKHLLHCHGVEFPERFSKKQTHWSRAFITWLMKDVCLMSDTRASLDLLIRQVEVLRGTLLEATRQLRKMSQTERYKRRHDLLRSIPGIGLIVTMCILTEVCDVKRFHNENQFAAYLGLIPTSHSSGEKIVHGEKTFRGNKQLGPMIVEAAWITIGRDAGLGAQYYQYKKRMEPQEAIVRIARKLSNIIFSVLKNEKEYVPYQTGN

SEQ ID NO: 462827 - protein, 448 aa, unidentified
MTNKKNDKQKLSVIDPDAAGIDIGSREHYICVPADRDEKNVRKFAAFTSDLREMVDWLKQCGVKTIAIESTGVYWIPVFQILETSGFEVILVNARHVKNVPGRKTDVADCQWLQQLHSYGLLSGSFRPQDQICELRTLTRQRDRLTKNAATHVNRMQKALNEMNIQLHHVISDITGVTGMSIIKAIIAGERDANKLATFRDSRIKSDEKTIIKALEGDYRKEHLVVLKQELDIYEFYLKQIKECDEAIESCYKEFDKRGDGDVTNKQRKNKNSPKFYLQQSLYTVAGVDFSTIPGLSELSVQTIISEVGLEMDRWSTEKHFTSWLGLSPANKITGGKVFDTRTKKVENKASMAFRMAALNLGRDKSALAGFYRRIKSRAGTPKAITATARKLACMFYRLLKYGQDYVEQGIETYEKQYQETMVKNLQKQATRLGFSVVKIEASLEPVC

SEQ ID NO: 462828 - protein, 319 aa, unidentified
MTPAQVYVGIDVAKRRLDIALWPTGESRSLANDPTDINKLVTWLQTQQPQLIVLEATGGYERAAVASLATAALPVVVVNPRQVRDFARAIGRLAKTDTLDAAVLARFAEAVRPSPRPLPDAQMELLRALVTRRQQVVEMLTAERLRLASVQPAIQVLIQKHIAALEKELAHLEEELDRTIRQSPLWRARERLLRSVPGIGPTVAAVLLADMPELGRLDRRQVAALAGVAPLNRDSGQCRGRRCIWGGRARVRAALYMAALVATRHNPVLKNYYQRLLEAGKAKKVALVACMRKLLTILNAMLRDGTAWQETSVTHAIPA

SEQ ID NO: 462829 - protein, 341 aa, unidentified
MDTMIGVDLAKSVFQLHGAAMTGEVLFRKKLTRSQFLKFMSDHAPAVVVMEACGGAHYWARVMAELGHQVQLIAPQYVRPFVKRQKNDAADAEAIVVAAQRPEMRFVEPKTEEQQARAAIFRSRDRLVRQRTELINALRGVLYEHGHVFPTGAAHVGRIEALLRDPDNGLHPLVLADCLDLLDQISEKSGRIEARTRTTTALSAQASVTRRLQTIPGVGPLTALAVETFAPPMETFESGRAFAAWLGIVPRQHSSGGKQRLGKISKAGQGDIRRLLIIGAMTRLTPRGRRGVPEGSWLARMLERKPKMLVAIALANKMARQIWALLMKQEDYREPATMTAA

SEQ ID NO: 462830 - protein, 423 aa, unidentified
MDAIGLDVHRDFCEVAIVEAGVVRPAGRVQTEPAALELFAQSLGGDDEVALEATGNSLEIARIIEPHVGRVVLANPKAVKGITRAGAKTDKIDARTLAQLLAGGFLPAVWRPDEQTRILRRRISARAQLVRQRTRAKNQVHATLIRNLKGKPPVSDLFGARGRRWLAAQELPADEQETVAACLRQIEFLDGEIALLERALAEQVLAFAEMRRLLTLPGVNFVTAAALIAAIGEIGRFPSARQLVSYLGLDPRVHQSGSEPARHGRISKQGPGETRHVLVEAAWHATRTPGPLRAFHQRIAVRRGGNIATVAVARKLAVIAWHMLSRGEDYAFARPSLTREKLRRLELMTGAKHQKGKRIGVFVTKEQHRLDRELAAQAEIAYRRLVQDWQPAIRGAGAAPGRASCGPSSGQAARQETAPPPAL

SEQ ID NO: 462831 - protein, 346 aa, unidentified
MQNDTLVAVDIAKEVFEVGVSDRPGHVARRRRLARYEFLEVFAQLPAATVVMEACGSAHYWARRLEELGHVVVLLPPQYVRPYVVRNKTDRKDVDGLLEAFRNDRIIPVPIKSVTQQVLSTLHRLRSGWLADRTRAINALRGLLRELGFFIPEGRKHVLPDAWEIIQDPNSGLPDALKPSLGSLCQEVASLSTRIEEIEAQLEALAKQLPVVARLRSVPGVGLLTATALYAFVGDALRFPSGRHMASFLGLTPREYSTGLHRRLGRISKRGDVYLRMLLIHGARSILWHAKRMKQPDRLRAWALRLERKLGHNKAAVALANKLARISWAVWKNDRNFEPLPELQAA

SEQ ID NO: 462832 - protein, 451 aa, unidentified
MDQGNNGLSRGDRNRNARLAALRVVLPRDHAILGIDLAQSRQAAVLADHDSRVLARWRPRCSPWKLGELLDRALRKARSAGFAGITVACEPTGHRWMVIAQLAAGRGMPMVCVQPLVVARGREAEDYTRGKSDDRDAVLIARLAAQLHCYLPEQAGQAWARLRHLGARRSRLIDSSTMCIQQLRDLLEVAWPAVLPAAAKPLESATWLACLWVALERGDGDLGAVHAMGRDRFIAAARGGLGAWGARRICQRIAAAAYAALADPAQVAAQRPGAPGRAFSVLGDWRTIRGELAGVNARMLQALEAMGVLEVAGSIPGVSALQVAAILAETGDPSRFPTARAIVKHAGLAPCENSSGNHAGQAGISRRGRPAPRLAAWRAVWGALRHNPVYAARHASLTGRAEDQLPDQQARAAIAAALLRQIHAIITRRILWDAGIAAGRHRPGQEVNAAA

SEQ ID NO: 462833 - protein, 383 aa, unidentified
MRQIEQMPSAWDAAVFVAMELSKSAWLLAAQGSPSGKASSHRLEGGDIAGLLGLLRRLQAREQQACGRPVQIILGYEAGYDGFWLQRRLAAEGISCWVMDPGSLQVDRRARRAKTDRLDAAMLLRALMAWWRGDRAACHMVQVPSVEREDARRTHRERQRLIAERVQHVNRIKGLLATQGIYDYRPLRRDRWERLEDLRTGDGRELPPRLRREIEREFRRLELVLEQIAATEVERDATVAAPAAEDADAAMVAQLARLGGIGPELATVLVREALYRPFANRKEVAAYAGLTPSPYASGDRHRDQGISKLGNPLLRKAMVELAWLWLRYQPDSALARWFTERVGSVRGRIRKIMAVALARKLLVALWRYLTTGLLPEGARLKVV

SEQ ID NO: 462834 - protein, 414 aa, unidentified
MLKIVYRVCCGMDVHKSFVVACIASTTEYGVTTYKSKRFSTFTGDLRRCAAWLAENSCKDVCMESTGKYWIPIYNILEPTCNIVLAHPKYVKAIRGKKTDKRDAKWIADIFKHDLVAGSFIPPADIRQLRDLVRYRWKLTNFTTGEKNRAQNCVTVSNIKLDDVFSDVFGKTASAITTRILENPAEKITDVSGFRTKGMKATNEQVLAAVDGEMCEEQAEKLRIIRSHMDSLQLCKLDLESLILATAEKYLPQLGLVMTVPGIQSFTAIGIISEIGVDMSVFPTSKHLCSWAGLTPQNNESAGKKKTTRISRAGAYIKPLLVQCALNAVRAKKFPEVRNRYLALKKRRGHKKAIIAIARMLLTAIYNILKKNESYNPELYRQTDRPPAHREVSVAEAIFILQRQGYLVAAPPTP

SEQ ID NO: 462835 - protein, 327 aa, unidentified
MMFIGFDISKDKVDLCWLRDPATNKKKTKVFKNNQLSFKDIEQWLLSTTQAVAEKVVITVEPTGVYHEPLMYFLYQQGFNIVLANPGKAKKYAEALNIVHKTDKSDAIMLASYGYAKHSIVNYWQPEAKEIRELKALLRRLDALESSKQREHNRLEASEFNAASERVIQSLKETINFFDDEIKKLKLDIDNHIDSFPNLKKDRALLETIPGIGPVMSRELTYIFAAKKFNQAKQAAAYCGLIPKLHESGKMKGRTTLSKLGPSRIRSKLYMAAVVAGQWNYQIKQQKIRLMNHGKTSMQIIGANMRKLIHICFGVVKNQEAFKLQES

SEQ ID NO: 462836 - protein, 400 aa, unidentified
MAFTGWDWGMSAHDVTVSDDAGTKLDRFPVAHTEDGIAAALARLARHGDPTRLPVAIETTRGLVADRLLAAGHPVIPVHPNAFHAARPRWGAARAKNDPGDGFKLADYARTDGHRLPVLAPTLPETIELQALTRQRGDHLELRIAAANQLAALLDAHWPGGKTIFARIHSAIALDFLDRYPTPQAAAGLTPARVEQFCKRRGYSGRRTGAELLTRLRAAPTAASRLNESVVAQLIRAQVSVVRSLQAGIDALDAVIAEAVAAHPYAQLLADLPRVGTLNLAQIIGEVGPILERATSFEQLTAETGIAPVTRASGKTHTVAYRHATNRRARQALHTWLDNSRRADPWAWQRYASARARGQRHPHALRTLGRAWLRIIWACWRTKTAYNPTRHEPQTQPVAA

SEQ ID NO: 462837 - protein, 431 aa, unidentified
MLGGNQEKLMSQNQPEIQYAAFVSIDWADQKHVWSLQEANSSTREHGEVGHMPEAIEAWIAQMSQRFAGRPIAVAVEQSRGALVFMLSKYEQLHIFPVPPAMTANLRKAFYSSGAKTDPADTDLLQDVLQMHREKLRRLSPDTEATRLIQNLVEERRKLVDEKTAQSNRLEAHLKIYFPQIPQWFGDVDSPLVCALLERWSALEALQKARPDTLRSFFRKHHCRKEELIESRIKAIGEAMPALKDRAVVEAQLAVVKVLVQVIQVLHQGIEDFNRQIQEAAEAHPDFFIFESLPGAGAVMAPRLLAAFGSQRERYRNAAEVQTLSGIAPVTESSGKSSWIHFRFACSKFVRQSFHEWAALSIAQSQWARAYYELQCRRGKRHHAAVRALAFKWIRIIFRCWRERVAYDEKVYLAALAQHNSPLLAATKIAL

SEQ ID NO: 462838 - protein, 314 aa, unidentified
MSPLVFVGIDVSQARLDLAVRPGASFSIPHDESAIATVTEQLCALSPTLIVLEATGGMEIPLTSALATAGLPVVVVNPRQVRDFAKASGRLAKTDALDAQVLAQFAEVMRPQPRPLPDADTRALAAVLTRRRQLVEMLTAEKNRLLSATAPIRKRLRTHITWLERELQSTNTALAEAIRQSPVWREKDELLQSVPGVGPVVTSTLLASLPELGTLTNKQIAALVGVAPLNRDSGTLRGRRTVWGGRAQVRAVLYMGAIVAARFNPVIRVFYQRLQRAGKAKKVALTACMRKLLTILNAMLKHRTPWRGVEASHA

SEQ ID NO: 462839 - protein, 364 aa, unidentified
MKRKVYVGMDVHKETIQIAYLTSNSKEILKEQQIKHNEVQIKKFIKKLKTEWNEIYCCYEAGVTGYPLYRYLKSLGVNCILVAPGKIPRQNTDKIKTDKRDAIKLARLMRSGELESIHVPSEEDEAVRDYLRSRDSLRLDLGRNRQRLMKFLLRKDIKYSTTKYWTVSHYKWLNNLHFNNEILQETFNDYYSRVRVQEENLKAMDKKIQEIAESEPYREKVGILRCFRGVDYLTAMFLLCEVNDFKRFKTAGSFMSFLGLVPGEYSSGSKRKQTGITKTGSPRLRRILTEAAWQHRFPGTGSKIITARRSGQPALVVALAEKASLRLHKKFRNLQLRGKTPQVMITAVSRELSGFLWAAMNLVA

SEQ ID NO: 462840 - protein, 341 aa, unidentified
MEKATIIGVDLAKHVFQVHGASADGSVAFRKKISRVKLLPFLSSQPRCVVAMEACAGAHGWARDIQAQGHEVRLIAPAYVKPFVKRQKNDMADAEAITEAAGRPTIRFVAVKSAEKQASGMVFKTRDLLVRQRTQTINALRGHLTEHGIIAPQGVFHIGRLAAEVENVNSHLPVIVTELCTLLLRHIATLDEQIASLDRRIRDRAREDETARRLMSIPGVGPVCATALEALAPPPETFARGRDFAAWLGLTPRQNSSGGKVRLGRISRMGQRDLRRLLIIGATAVVRWAARRGAPAGSWLARMMARKPRMLVAVALANKIARIAWALMAKGGIYRSLAAAA

SEQ ID NO: 462841 - protein, 316 aa, unidentified
MSQSERVIGIDVSKNLLDVAVVPENDTWSVDNDEKGIRTLIKDAKRLRPRLIVLEATGGLEAAVVAPLAAARLPVVVVNPRQVRDFAKSLGKLAKTDKIDALVIAHFGEATKPEIRPLKDQQAQQLSALVARRKQLVEMLTAEKNRLMTALEPVDNDIKAHIAWLEQRLNDINKDLRKAIKASAVWRAKEELLRTVPGVGPVLSVSLLAGLPELGKLNRKQIAALVGVAPFNRDSGKFRGRRSIWGGRAHVRAVLYMGTLTAIRFNPVISAFYQRLCAAGKAHKVALTACMRKLLTILNAMMKNHAPWQPYSRETP

SEQ ID NO: 462842 - protein, 369 aa, unidentified
MQLRHIFVGIDLGDKNSVARIAVDRDKSERIGFLNSRKGRARLFREVKRRSEQADGARIVMAYEASSCGFVLSDEAEALDIKCWVLAPTKMEKSVEQRQQKNDDRDANDVLEKLRGHVLAGNRLPTVWVPDLQTRDDRELIRTRLDLTEKQTQIKAQIRMLIKRHGLEKPVGLGAGWTIGYRRWLQALAESEQLLGWSTRQALDSLLGQLRFLEAEIDRIQKPLEELANKPRHKPIIEELRQEAGVGLLTAMVYRTEIGQAGRFGRGRQVGKFVGLTPTSHESGQQSDRKGHISRQGPPRLRKVLCQASWVHIIHDDRARRIYQRLVSRNPKKKKIALVAVMRRLAVRMWHRMRKIERQQLQAGSECRV

SEQ ID NO: 462843 - protein, 350 aa, unidentified
MNFVGIDIHKRYSVCTAQDEQGRKLAVARIDGNAASGFAQFFEGLGGESRVVIEACWNWGKIHDLLEGLPQVVEVVLAHPLKTRLIASAQIKTDKIDSNALATLLRGNFIARAHIPNRAMRQRRDTLRQRLYWARLRTRIRNRIHALLDRQPQLTLPQCSDLFGVRGMCHLRKLRLAEPDHTLLQEDLALLELLNLQIRDQEKRIAAQSQPDEDTRLIQSIPGFGPIFGSIIAAEIDGIGRFSDSAHLCACAGLVPTTYASGGHVSHGGLLPACNHWLRWAFIEGAWTAIGSSPYLGSIYQHHRARGKQARAAIIIVAHRMCQIVHCLLKERRPYQNHPKQFSPVAPATA

SEQ ID NO: 462844 - protein, 343 aa, unidentified
MKVTTIGFDLAKNVFQVHGVDERGHVVVRKQLRREQVAVFFAKLPACLIGMEACGSAHHWARKLQGFGHCVRLISPQFVKPYVKSNKNDAADAEAICEAVARPNMRFVPIKTMEQQAVLSVHRVRQGFVKARTAQANQIRGLLTEFGLVLPQGITNVMRGVPQLIDAAHDLPASMRQLIARLLENMKVLDRQVKELEAQIKAWHQGSELSRKLEKIPGVGALAASALVASIADARNFKNGRQLAAWLGLVPKQDSSGGKPKLLGMSKRGDTYLRTLLIHGARSAIVAAQRKGKPNVWLSGLLARRHRNVAAVALANKNARTIWALLAYEREFRPDYMPRPATA

SEQ ID NO: 462845 - protein, 346 aa, unidentified
MKTTTIGIDLAKIVFQIHGVDERGKVSVRRQLKRAEMSSYFVNLEPCLIGMEACGSAHYWARKLEGYGHTVKLMAPQFVKPYVKANKNDMADAEAICEAVARPNMRFVAIKTVEQQAILSVHRARQGFVKARTAQGNQIRGLLAEFGIIIPQGIRSITKQMPEVLEDGENGLPGTMRNLFERLTDNLKEMDRQVKELEEKIQLWHRENAASRKLAEIPGLGPITASAIVATVGDAREFKNGRQLAAWMGLVPKQHSSGGKQNLLGISKRGDTYLRTLMIHGARAVIRFAESKAEPESWLRKLMARRNKNIAAVALANKNARIVWALLANDRMFRPDYTPAAVVAGM

SEQ ID NO: 462846 - protein, 466 aa, unidentified
MKNNTTTLHDCTLEGIRFGGCGNSEAMVWKLGLDIELRAVAVAIQCGRGVIGPAVKWSREQLLQWVKEKRARGEAVHTVYESCGFGYTLHEQLSAAGANSLVTTPMRLNLERKRKNDRIDARELCVRLSRYLDGQSHELRPIRIPSRCEQQRRELGRQREFWKREVRRLENHGRALRIEHEHETLEAGWAGPRKWKRLAPQCSQFVREQLTPVVAQIRSAKAQLDRLSEQIESLVKKEQIPVGLGALTVSLIEGEVCQWERFAHRKAVGSYTGCCPSEHSSGPIQRFGAIDRHGNKHLRVLLVEAVWRLLRWQPHWHARQKYLLKLRHGSKKKIAVALARQLAIDLWRWRTGRASAQELGWSLPTLPLPEQPKPALVFTKPHQPRQSVPQGGTLLDAAADPKGSSLRMGAFHPQALPQVQARHHGRRSPLTTARIGAGDREKPPRINGKPPIAEQTDPWEKPQKQK

SEQ ID NO: 462847 - protein, 350 aa, unidentified
MKTTHPIIIGIDTHKSTHVAVAIDTQGTRLAALSIPTNPKGYLELERWSQSFGDILPFGIEGTGSYGAGLSRSLLAQGHNVIEVTRPNRQLRYTQGKTDSLDAEGAARSVLSGQATARPKTQTGSSEMIRHLKIARDTGVKSRSQAMVTLKTLIINAPADLRETLDPIRGKVALIRHIAAFRPGDIDTPLASAKAAMRALARRWLWLHEEIIAHDKELERLVTERAPDLIASHGIATLTIAEMLILVGDDPTRIRSKAALAKLCGVCPIPASSGKTHRFRLNRGGNRQANAALYRVAIVRMRSHEPTLAYVKKRTKDGKRKSEIIRCLKRYIVREIYSQLCVPKSAKIAT

SEQ ID NO: 462848 - protein, 468 aa, unidentified
MARKSKKHGKSKNRKRQPRTLKTVQPNAAGIDLGSREHWVAGPPLPDGSPNVQHFGTTTPELLRLAGWLDQQEIVTVAMESTGVYWIPLFEILDNRGFDVNLVNARQISHVPGRKTDMIDCQWLQLLHACGLLRGSFRPDDDICRLRALIRERNKVVDNRSDWVRRMQKSLDQMNICVHHAVSDITGVTGMAIIRAIVAGERDPQILAGLRDPRCRKSEAQIAEELTGNWRPEHLFNLEQALKVYNQLCAVIADYDTEILNYIDSLQPPEANDSSVPPPTNKTKARSIVKRGQEPLRQALYRMSGIDLTTIDGIGVDTAAVVISELGPDLSAFTDEGCFISYLRLAPNISISAGKKVPGKFKAVTSTRVCNALRMAATTLRNSKTALGAYYRRISYRKGASVAVFATARKLAQHIYRLVRYGQAYVDAGAKVYEERFAQRRLKSYTNALKEMGYKVESLTVQETVGAI

SEQ ID NO: 462849 - protein, 314 aa, unidentified
MMELYVGVDVSKARLDIAARPSGETWRVVNDEEGIEALLDRLREMRPALVVLEASGGYERPVVAALAAAGLPVAVVNPRQARDFAKATGKLAKTDELDAQALAHFAEAVRPEVRPVPDKQAQEFAAILARRRQVVGMLVAEGNRLETSVSPVRERIEAHIGFLREELDELDGDLDLAIRESSVWREKDELLRSVPGVGPKVSATLLADLPELGTLDNKKLAALVGIAPLNRDSGVFRGKRHVWGGRAAVRQMLYMAAVTAARCNPVFRKFYVRLLAAGKPKKVALVACMRKLLVTLNSMLRHGTLWGQPNPLLV

SEQ ID NO: 462850 - protein, 345 aa, unidentified
MEHIAIDLGARESQICVRRPDGEIVLEARRATRTLRAFLAGRPPSRVVLETCAEAFGVAVVARELGHEAVVVPAGLVRALGVGARGLKTDVRDARHLSAASCRMTRLPAVHVPQRQARTRKAECGLREVLVGARTKLINAARGWLRSEGFGPLRRCTPGWFSRRLRAHVTAQAGTVPPALERVLATIETLTTAIAEATTAVATLATGDPVCTRLMTAPGVGPVTAVRFTATLDEVGRFGAAAAVQAYLGLVPGEDSSADRRRVTGITKAGASQTRWTLVQAAWCAWRCRPHDPMVRWAQRIAARRGRRIAIVALARKLAGILYALWRDGTTYDPTRGARLPAPIV

SEQ ID NO: 462851 - protein, 483 aa, unidentified
MTFAAGNDLVQEFAFNPHLGRFTRSIKEVFMSKKSQKRRSEMLPVLHPDAAGVDIGAEELFVAVPSDRDSQPIRRFSTFTRDLLELSEWLRQCGIRAVAMESTSVYWIPLYQILETHGFEVFLVNAQYVRNVPGRKTDVSDCQWIQYLHSVGLLRGSFRPPDVICAIRSLWRHRDSVIQMAAQHVMHMQKSLDQMNLQLHHVLSDITGLSGQRILDAILAGERDPIKLAELCHGRVRSSQDTIAKALEGDYRSEHLFTLKQALAGYRYYQQQIQEVDREIHRQMLVLPVAESAHPELPKRTKKHPYAAKHNEPTSFSLRSELYRVFGVDLTNVPGISAVTAQTILCEVGPDLSRFRNASAFASWLGLCPEKQISGGKVLYTRTRQVRNRLSIALRLGAHALHHADNYLGEFFRRLKRKLGKPEAVTATAHKLARIVFHLLTTREEYDESVFIKWEQQAAGRAETRLRKQAERLGFQVIPATHG

SEQ ID NO: 462852 - protein, 320 aa, unidentified
MEKEDIKHWVGIDVAKDAMEVFVAPESRRFAFENTGDGIAQLVKELGSLESVHVVFEATGGYEAELSEALTRAKVRFTRINPRLARDFAKALNRLAKTDRIDAELLAEFGKCLKPTPTVLPDEMSRLLHDLVSRRRQLVDMRSMEQVRLKQARAKRLVQSLERTITFLTKQIKSLDDDICTSCKALPAFEVRDEALRSIKGVGPVTRSTLFALVPELGYVTGKQVASLIGVAPFNDDSGKGERRRHVRGGRGDVREVLYMAAMSARLHDPTLRTFYGRLLEAGKCHQVAIVACMRRLLVILNARVRDALRAKPQLSTSRA

SEQ ID NO: 462853 - protein, 426 aa, unidentified
MNCTQNYKIDQVTEQTLVVGIDIAKRTHYACFVDDRGRVLRKSFPIFQSKEGFQQLYKAIQEAMQAFGKSEVIVAVEPTGHYWLNLAYFLEEHGIPLVMVNPAHVCRSKELDDNLPTKHDAKDALVIARLAKDGRFLVPRLLHEIEADLRVGSTLKEKLRKEQTAVKNAIVRWTDRYFPEFWTVFRDLGKTALSVLEWTPLPADMAGRTVEELLEVYRQSEGMKCPQKAKIQALINTAKDSIGVTEGTAMARFEIAALVRRYRQLEAEIAALDAELKALVQTTMEYQWLKTVDGLGDAMIIDLLAEIGSFAHYRDPRQLVKLAGLTLKENSSGQRKGQKHISKRGRKRLRSVLFRAMIPLIRHNEAFRELHEYYTTRSVNPLTGKQSIVALCRKLLNVLFAICTKKQAFDAERMKQDVLSQVQRAA

SEQ ID NO: 462854 - protein, 398 aa, unidentified
MTRKNTLKSLPTDTEFRVVGLDLAKSDVSVAAIPVDDNTLSLVDRMTYADLLDWAGKISPTLFAMEPCNGYSLLCLQLENLGHEIKVISGWTVSMWINTHLSGQKTDLNDAIALARLAVSDAELTPIRHKSITEIRIQTVQAVRQQLMSQRSRSIVSFKALAQQWGIPCAAGHRNLKKLRESIEAKVDLITRPVANAMLFLLDAVKSLDRQIGQLNQTLQELVMSDERGRLLQSVLGVGTQISARVITVVGNVERFNSPRSLVAYVGVAPRNFITGHKNLTKKKHGNCPDLSHKGQGKISRRGDKLLRSLFIQGAACLYMQFCKDQLPECLLKRWILKQLAIQKPYGKLIVSLAAKLIRIVWAVLTYREKFNIQKAGMTRSMWSEMELEKPINKEVPA

SEQ ID NO: 462855 - protein, 345 aa, unidentified
MVGPNVFVGCDLSDKRASLCVVDARGRVIGRADLRLREPELSAWFSRQPRARVVLEVGSHSAWVSRLLRRLGHEAIVANPRRVELIARSQRKTDERDAELLARLGRADVTLLAPVQHRSEQVQLDLVTIRSRDMLVKTRAKLVSHLRGIVKPFGARIPRATPPVLPDRAEAAIEGPLQQALQPILECLRLMNEKVKLYDRMVEQRARDAYPEAERLSRTLPGIGPVTSLAYVLTIEDPTRFKKSRAVGPYLGLTPRRRQSGQRDPEGHISKAGDPLLRRLLLQCAKCVLRRCPDSDLQRWGRGLAARGRKAAANRAAVAVARKLAVLMHKLWVSGEEYRPLRAAA

SEQ ID NO: 462856 - protein, 327 aa, unidentified
MKYLGMDVSKAKLDCTLLDPLTDKRKTKVVSNDLGGFKLLAEWLGKQNVAISEVHSVLEATGVYHEQVAIWLADAGAVVSVANPAQVKDFARGLAVRTKTDGVDSVVLARYGALLKPQPWQAPSLEVRELKALLARLEALEADLRRELNRREKATVGGVPHLVQKSLASHISLLHKEIARLQAAIDDHIDRHPHLKQDRERLLSIPAVGEKTANRMLAVLHSHSFKSAEQAAAFLGLVPVEHQSGSSIQKRPRLSKNGDAKTRAVLYMAAIVATRYNPDIKALYERLCARGKAKMAALGAAMRKLVHLCFGVLKSQKPYQPNYANRG

SEQ ID NO: 462857 - protein, 473 aa, unidentified
MAAGKMNRKQQRKELARRMQSASPGLEVVHPRAAGIDVGNTAHYVAVRPERDAEPVRRFECFTADLHRLADWLEVCEVKTVAMQSTGVYWIPLYEILEERGVEVYLVNARHTKNLPGRKSDVQESQWLLKLHTHGLLNNSFQPPAEIRVARTYWRRRGEHVHGASTCVQRMQKALTQMNVQLANVISDLSGLTGQAIVRAILAGERDPRKLAERSHPQIRAGREEIVKSLEGNWRPELLFVLKQEMEMYDTYQRKIAECDRELQAHLKQFADNVERSAPEVASTEQPKASQVKKAKRSQGNAPAFNLSSELNRISGVDLTRIDGVNVIVAQTVLSEVGLDMSRWKTEAHFASWLGLCPDNRVSGDKVLKRGTRHVINRAATALRLAATTLIRSRSYLGAQYRRLRTKLGAPKAITAMAHRLARLVYRMLKYGQEYVDKGAQFYEQRLREQQLQLLKKRAASLGLRLIEAEEVA

SEQ ID NO: 462858 - protein, 290 aa, unidentified
MISWVGIDISKSNLVVWVQPQGEGFDLPNTSEGFVELIERLSQYEVGRVLLEATGGYECKVMAALQGADFKVLRINPRRARAFAVAMGKNAKTDPIDAAVLADFAEVLHASRDKIISPEREALRELIQLREQFVQQRDDNKRRLQQVQLPAVTEAIKGLVRYLQVQIKQLDKTIHQSMHELDAEKAERLISVKGIGTVATASLLVYLPELGALDRREVAALAGIAPYNDDSCNHSGKRQIYGGRARVRRALYMSCWVVIRHQPDFKARYDALRERGKSAKVALIACMGSY

SEQ ID NO: 462859 - protein, 339 aa, unidentified
MGRFIGVDLHKNMFMVSFFEPGTGEHHLKSYYIKDIVSFKKVLRKDDVVGVESTNNTRYFVDQIRGNVGDVKVINPSQFKVISRSVKKTDENDAKVIAEFLSKDMVPEVRMKDKKTAQINSLANTRDKLVKLRTALKNKIHNILSSHGILLEQESLSSEKALARVLEYPVDSTAHVELEVIVTQIRSLNEGIKKLDKELEDKGRELPGHENITSIKGIGKRSGSILLSVIGDINDFESEKKLDAYFGIVPRVSNSNETERQGHITKHGSKLGRTTLVQCTLIAIKYSPYLRTFYERIKAKKGSGKAIIATSKKLLGIIYMTLKENIIYEDFPNFVIKTT

SEQ ID NO: 462860 - protein, 371 aa, unidentified
MSKTENGRLCVGVDLHKTQFTVCAMNEEGEYLLEKKYPTTEEGYEAFSQEMHRQEEQGYSIELAVETTGNARYFKNRMEKEYFAVKVVNTNRFKVITMSTKKTDANDAATLSYYLMKEMLPEANLCSQTSEEIRRMLKTRTILVQSTVKIKNQIHGMMLGYGIETKAAQFQSKKKRQELMNDLADHEYSAFTASSLKVMLQIIDDLSEEIKRVEAQLVEMVMKNEDVELLMTIPGVGINTATTIAAYTENLERFDGNYKRFASYIGIVPSVHNSNETKHLGRITKHGPQELRTAFVQAALGMVRLTKVTSEWRLIKDYHRKKEDKGSGRAIIALARKISRIVFVMLSKREAFIPDLMRLNEQNFQQSALIY

SEQ ID NO: 462861 - protein, 385 aa, unidentified
MFYVGIDIAKTKHDLACINETGETVITNFRFANSYQGFHQLKLKLKQLSPITQDIHIALESTGHYNYNIVAFLRELGYTVFAYNPFIIKQFAKSQSLRKTKTDKKDALLIARKLRSDVTPEYYQTDKVMDELKELTRYQNRLIQSRSKCKNLYIRLLDIIFPEINSYVSNLHSHFVYELLTKYPSAQKMARARVSSLLKIKRLTADKAHQIQEAAKQTIGNASSALSLELVQLIESIQHYDKQINQTQEEINRLMTGLDSPITSIPGIGSRLGAIILAEIKTIHNFKNPNQLQAFAGLDPAIYQSGQMDNTGHMVKRGSSYLRYALIQAAKLISIYSPHFKDYLKLKISQGKHYNVAVTLIAKKLMRVIYHLLKTNQTFDEAKLR

SEQ ID NO: 462862 - protein, 398 aa, unidentified
MDLPVYYELETNNGNRDYRIQIGGHYMNYNTVYVGMDVHKESFTLCSCKYEDEKASHYQRTPASYKNVLRYLAFLRTIYGEDTRFVCGYEAGCLGYSLYHQLENFNVECVILAPTTMLEQRSKRRIKTDKRDAEIIARSLAQHNYSPVHIPTETDNQTKEFIRMRDDHKAELKKIKQQILSFCLRQGYQYDGSGNWTAKHVKWLRSLKPAGLYKEILDEYLLTYTILTDKLNRLDQRIEELASKEEYKESVSKLTCFLGIKTHTALSVIVEVGDFQRFVSARKFAGYLGLVPGQHSSGDDRNGLGITKAGNTHVRRLLVESAQSYTRGKIGYKSRVLRSRQAGNSPQVINYADRANERLRRRYYKMVLKDGKKYNIAKTAVARELACFIWGMMTDNIY

SEQ ID NO: 462863 - protein, 347 aa, unidentified
MLYAGLDLSRHRLDVHLMNQAGEPVQVTTAPPDVDGLRGLARQTAGFGEPVVAAIESMNGARFVHDQLELAGWEVQIADAQKVKGLAPLACKTDRIDAWVLAELSRRDLVPAIWLPTPEVRGARERARWRLHLVRHRVALKNRVHATLLAFGRPCATSDLFGVGGRQLLQRLGLPEPWAGTTAAAVALIDDLEAQVDGCERELRRLGADHQYVPLLMSAPGIAWVLGYTIAAELGDITRFASPKKLCGYTGLCPRVYQSGRRDHRGPLARNGPKYLRWALIEAAVHAARHPCYHDHYQRTKQRLGTQRGPAVARIEIARKLTEAIWHMLTTQAPFRPARPHAKALVA

SEQ ID NO: 462864 - protein, 351 aa, unidentified
MHMLADTVELVIGVDTHKDTHTAAVVTATTGAVLAQATVSATPAGYRQLLALADQQPGHRVWAIEGTGGYGAGLTRFLQAHAEQVVELDRPKRAARRHGAKSDPLDATRAAREALGRDQLAQPRAAGHRAALQARLTTRRSAVQAATDAQRQLHALVVAAPDALRGRLRGLTTRQLVTTCGRLRQRTDGDPETAATAASLRALARRIQLLNREIAEHTRAITTLVRAWRPELLTPCGVGPIVAAIVLCAWSHPGRCPSDAAFAMLGGAAPIPASSGQTVRVRLNRSGDRHLNQALHLVVLTRMRYDPATRAYAQRRRAQGKTNREIRRCLVRYVARQLYRLLEANPSFDPT

SEQ ID NO: 462865 - protein, 358 aa, unidentified
MESQDIKYVGIDCGKKSLEVVRIHSENSLKERRQFSTTEIGINNLLKWLTQNDIVGLEAGTQSFRIAKSILNKGIQVIVLNPGDLATIYQSLKKTDKEDSLKIARLIQRYPIEELPVVPIPNDEEEDNRRLCSEQENWTIQLTQGKNRLHSLFTQAGLTHITKKHLRTKANRETSVALLPSRYQKEAERILKVLDLVEQNLKLIEEEIKEALRKNQTYTQTIMSMPGIGMITSLAILSYMGDCKRFSSAKQAAYYVGLVPRVDISGDSAYYGRIVNRGCHSIRRVIVQAAWSLVRCQHGGKLKEFYERLYSKKGAKKSIIAVSRKMIEVLYSMIRTGALFDSMPEEVLYRKLAQHGLM

SEQ ID NO: 462866 - protein, 382 aa, unidentified
MPDVSSTAPAQVTTWVAIDQHKLSLVAATLPASGGTPEVVRLENTERAVRRFVEKLGGPEGLAIAYEAGPGGYQLQRLLTRLGVACDVIAPSLIPIRAGDRVKTDRRDAKKLVRLYRAGELVFVQPPSPEHEGLRDLVRCRDDLRRARTAARHRITKQLLRHGHIYRDGKSWTIRHRTWIAAQRLADPLAQAALEHMLGHLATLDAQIAAVDGQLERVASREPWAQPVSWLCSFRGIATRTALGLLAEVGDFRRFSSPRELMSYLGLTPTEYSSGQQQHRGHITKAGNTHARRLLTEAAWNYQHRPRQSARAARLAGEVPPEITARAWQAQTRLFLRHRALRENGKRSTVATTAVARELVGFIWAAMVQAPLRQPVVQEAAA

SEQ ID NO: 462867 - protein, 255 aa, unidentified
MTVYLGIDIASKKFDAAELCDGAYRCKAFENTPAGFKALCKWLQVGSIPDIHVCLEATGNYGTALATFLYEKNLKVSIVNPARIKGFAASELTRTKTDKADSRLIARFCKAMQPDQWKPISAPVRKLQALVRRIGALNGMLRMECNRRENTDIDTQDSVERMINHLKMEIEAVRREIKDHISNDAELKRQDDLLQSIPGIGAISSSMILSFMTSKEFKKAKEVTAFLGLNPRHHQSGTSVRGKARMSKMGDAKLR

SEQ ID NO: 462868 - protein, 315 aa, unidentified
MSLKLLAIDLGKRSFHCHGIDSDGVIFSRKVSRSKLLETIKELAPETVAMEACASAHFWGRLFLADGRRVLLINPRFVKPFVKGSKNDAADAEGIYEAALRPTMRFVPVKSIEQQDLQSLHRARERVVCARTALINHMRGLLGEYGVILPQGAWRFLTQAADAIATAELSDLTRELFDDLLEELRALDLRLDKLDRQLLGICRTNEACRRLSKLPGVGPVIATALVAAVDDGHHFRSGRELAAWIGLVPRQYTTGGKPRLGGIGRRANHYLRRQMIHGARAVMFRLAKHDDRRSQWLKELAARRGFQPALVAPAS

SEQ ID NO: 462869 - protein, 344 aa, unidentified
MTYYAALDVSLRSVHICVINEVGDILSEDKLASEVEDIIAYLKGQDVQIISVGLEAGTLTQYLTYGLQSAGYDVVCMEARQVKAALSAMRNKTDKNDARGIAQLLRSGWYSRVHVKSLASHQIRVLLSSRKAVLNKCIDLENEVRGLFKVFGIKLPPKLGHGSFDKVVRPTIEADPALVHALLPLLDARLVLYRTFRELDNRTRKLAQQDTVCQRLMSAPGVGFITALTFKAAVDDPTRFKRSRTVAAHFGLTPRRFQSGERDHAGHISRAGDADVRCTLYTAANSMMTRSSKFSSLKVWGMQLAKSRGHRRAVVAVARKLAVILHRMWLDDTQFRWGTEGAAS

SEQ ID NO: 462870 - protein, 416 aa, unidentified
MSGVTLLYQRCAGLDVHKATVVACVMLTTSNGKSSKEIRTFATTTAGLLALADWLASRGVTHVAMESTGVYWRPVFAILEATFQVILVNAQHMKAVPGHKTDTLDCQWIADLLRHGLLKASFIPPKPIRDLRDLVRSRKTLVQQRAQAINRIQKVLETANIKLSCVASDVLGKSGRAILDALSAGISDAEALANLARGRLRSKLPALREALDGRVDDTHRTLLRYQLDLIDFLQGQIEQMSIDIDEHLHPYEEQIARLMQIPGIGRTAAAAILAEIGTDMSRFPSAKHLSSWAGVAPGNRQSGGKRLRASTNKGDSHLRAVLAEVVWVISHTKDNYLSAQYHRLARRIGKKRAIVAVSHSVLTIVYHMLRANQDYHDLGPHYFETLDTTRQRDSAVRRLEALGYKVTLAEGQEVSV

SEQ ID NO: 462871 - protein, 346 aa, unidentified
MLHAGLDLSRKRLDFHLLDEEGAAVLAGAVPPDADGLVGLVRRVSSIGQPVRAAIESMNGARFVHDQLEQLGWEVEIADALRVKGLAPLACKTDRIDAWVLAELSRRELVPAIWLPDPDVRAERERARWRLHLVRHRTSLKQRVHAILLAHGKPCPVSDLFGVGGRALLERIALPEPWAGHLAASLRLIDELNAEIAVCERELRRLGLEHRYVPLLMTCPGIAWILAYTIAAEIGDIWRFPSPTKLTGYTGLCPRVRQSGERDRRGPLSKQGPKYLRWALLEAATHAGRHPAYRERYERTKRRLGRQRGAKVAQIDVARRLSEAIWHMLTRNQPFAPTGAAPALTA

SEQ ID NO: 462872 - protein, 368 aa, unidentified
MPRPALNSRLRNLNQENPVTANHYIGFDVHKKSVSYCVKTADGRIVEESRVRATHQALRQWAQQRKEPWRGAMEATLFSGWIYDTLQPFAGELQMGHPALMKAIGASKKKSDKLDARKIADLVRCDLLPACYVAPVEIRELRRMLRYRNLVVAQAVRMKNKMSGLLMEVGAEYSKQQLHGKKYFSELLDTVEEVPESVKDLLRLSRGALEMFEATQQQLLVRLQRDRRLAQRVILLKSIRSVGEVTALTWILEVGDPHRLSSVAHAVSYCGLTSALVSSADKQQRGPISKQRNAHLQTVLIEAAKLAPRWNPELAAVHARELERGNRNRATLAVARKLVAYLLAVDKSGQPFQIRNQSAAETEVQKVV

SEQ ID NO: 462873 - protein, 339 aa, unidentified
MVIVGCDFHPGWQQVAVFDAETGEISKFQISSGDGEAERFYRRLEAPVLVGIEASGNTQWFEDLLEKLGHEVWVGDAAEIRASFVRKQKTDKRDAGHILKLLMEDRFPRIWRPGAGDRDLRQLLIHRHRLVAIRTRVKNGLHHLMLNQGVQLKYKLWTEAGQKKLQEIELAGWAAQRRKDLLQLLHMLNPQIDELDQAVELAAGKDERARLLMTQPGVGPITSLAFVITMGDVSRFANGKKVASYLGLIPSENSSSSRRRLGSITKQGNPFLRMLLVESAQTVCRLDEGFRKQYKHRCHYKKKAIAKVAAARKLAVRLYWMLRTNTAYPEIAHIESSPR

SEQ ID NO: 462874 - protein, 418 aa, unidentified
MNRTLTKKLAQVKPGTIYIGVDMGREHNVAVVLNEQAERLARFRFPNDGDGYDYFHRRGAALQKRHQAPAVLVGMEPTNYFWKLLAADLEQREVAYRLVNAYTVKKHREGDQLDRSKDDARDAFTIADLLRTGKFTETQLLHGGYAELRQYVAVYDRLRKDIRSQKNLIHNVVGQLFPELSSVFKDLAGETALAMLRRHAAAAVVRQMSVECFIAGVRADLRGRRLMVSRLRRAHVLASTSIGLQEGVQALQLGLRFHIEMLEKLRSEMGRVQKALLETFLALPESRYLLSVPGLGAITAVIILAEIGDPSRYHNAHQWVKLAGIQPVPNTSGRKTRSRTPMSHKGRPRLRTALYFAVLRLVQVDEAFAREYQRFQYREHNPLTKMQALGALMNRLLRILWALVRHQRLYDPHYQPTT

SEQ ID NO: 462875 - protein, 444 aa, unidentified
MPKISIDQNWSILNPNAAGIDLGAREHWVAVPSDRDAQSVQCFGVTTPQLEAMAQWLKQCRVTHVAMEATGVYWIAVYQYLERQGFQVLLVNARQIKNVSGRKSDALDCQWIQRLHTYGLLGGSFRPADAYCVVRSLMRYLDELIAGRTTQIQHMHKALLQMNLQLRAVLSDICGESGLAIIEAILQGERDPVKLAALAHRRVKSSRDQIAQALAGDYRSEHLFVLKMGWELYGSYQHQISQCEQELAAAVERLPDRVNLSEHPLPAKPKGKKIDQALRTSLYRKLGVDLTAIESIGTTVALTVVTEVGPDLSAFPTEKHFCSWLGLCPEHRITGGKILSSHTRRVVNRLSDALRLAATSLENSASALGGYYRRMKRKLDAPQAITATAHKLARIIYRMLKHGEAYVRQGLEDYERKNQEQSLKRLQRAAEAIGYKLTKSESFA

SEQ ID NO: 462876 - protein, 444 aa, unidentified
MAVRKREDEVFPNAAAIDIGASSHWVAVPLHLAQAAGDEPVREAGAMTDDLNMLARWLVKLGVDTVAVESTGVYWIPVFEVLEQHGLKVWLVDARQMKYVPGRKSDVQDCQWLQKLMSLGLLRAAWRPSAEVCVLRAVARQRETLITEQASWVQRMQKALVQMNIQLTEVITDVMGQTGQAIIRDIVAGQRDPKALARHRHRRVKASEADIVKALTGNWREEHLFVLKQALGVYDDIGRHLVECDAKLEALLDQRAGAKIDLGATPRAGSKARAEHEIRQRLADWAGVDLTRINGLGVTIVMKLLTEIGPDLSRFATVKHFCSWLSLCPGTKISGGKVLSSGTKRSASRARQALKMAAQSLCRSESALGAFYRRLCGRMDKPKANTATAHKLARMVYFMLTRGEAFVDQGQQRYEEQQRQRSIAALKRRAAALGFQINPFVVAA

SEQ ID NO: 462877 - protein, 418 aa, unidentified
MQQVQSLHRWTGRAIGLDVHRDFCVVAICEDGRVRSGARVPSTPEGLALLAESLMPSDRVALEVTGSCWEVARILEPHVERVVVVSPDDTGITQARAKTDRLDARTLARLLWSGELESVWMPDERCRVLRRRLARREQLVHARSRAKNEIHAVLQRRLQGKPPCSDLFGVKGRRWLAGLELPVEERESVDAGIRHIEFLDSEIAAVERLIAQQALDWPEIRRLMTVPGVNLICAATFIAAIGYADRFLTSRKLVAYLGLDPKVRQSGEAPARSGRISKRGSAAARWALVEAAWSVVLQPGPLHAFYDRTRARRGHGKAIVATARKLAVLFWCMLTRGEDYAHQQPSLTKKKLRRLELTAGAPTRKGKPSGVWVTRQRMRQAERQLAAQAQASYERMARDWSAASPKKNVGASVTAERA

SEQ ID NO: 462878 - protein, 364 aa, unidentified
MTAAQAGRQAASSTVEVVGGVDTHKDTHTAAAVDTAGRVLGSAQFPTDAAGYRALLRWLRGFGTLLLVGVEGTGVYGAGLARLLAAQGVAMVEVDRPDRKARRWQGKSDPVDAEAAARAALARVRTGVPKQRDGRVEALRALRVARRSAVGQRADVQRQIKALIVTAPESLRAQLRKLPDRELIEVCADLRPDRADADDPGTATKIALRSLARRHRRLSVEVADLDELLGPLVAQINPGLLALKGVGAEVAGQLLVTAGENADRLTNEAAFAMLCGVAPLPASSGKTTRHRLNRGGDRAANCALWRIVITRMGTDQRTKKYVARRTTEGLAKPEIIRCLKRYVAREVFLALQSASTEKRPANAA

SEQ ID NO: 462879 - protein, 453 aa, unidentified
MARRNAKVSLPPGRTRPALTITHPHAAGIDVGSRSHFVAVPPDRADVPVREFPCFTEDLHALADWLQACGVDTVAMESTGVYWIPLYELLESRGFTVLLVNARHVKHVSGRKSDVLDCQWLQQLLTYGLLRGAFRPAEPVCVLRALWRQRGLLLRHQARSVQHMQKALTQMNIQLAAVIADVVGETGQRILRAIVAGERDGAALAAMKNGRIQASHAELAKSLQGTWRAEHLFALKQALHAFDFVGTQVAECDAEIEAQLKTLRAHDGEPAKAKKRGRPRNAPRRDLRQYLFQMCGVDLTRIDGIDVTTALAVISETGVDMSRFPSAGHFASWMGLCPGTKITGGKVLSGRTKPCANRAAQALRLAAAALRPSRSALGAYYRRLCARMDKPQAITAAAHKLARLIYTMLTKGEEYTDQGQDYYETRYRERALRQLAQRAKQLGMTLVVAQEPA

SEQ ID NO: 462880 - protein, 381 aa, unidentified
MFLAFELSSSNWKLGFTIGFGQRPRERNIRAGDLHALEREIGQAKERFGLPQDAPVLSCYEAGRDGFWLHRYLESAGVRNLVVDSSSIEVNRRRRRAKTDSLDVEKLLTMLLWYHGREKKVWHVVHVPTLEQEDHRQLHREMMALKKERTRHINRIKALLAGQGVCMQVRKDFLQQLDATRLWDGSRLPEGLKALLKREHDRFQLVEEQIAELETERMEAIQNSRRPDVQMVRDLLRLRAIGVNSSWLFTMEFFGWRKFRNRKEIGALSGLTPTPAQSGSSYREQGIGKSGNRYVRAMAIEIACRLAPAFRRFSRHERWGWLRYQPESKLTQWYEERFARGGSRMRRIGIVAVARKLLIELWRYLETGVIPEGAVLKPGLP

SEQ ID NO: 462881 - protein, 310 aa, unidentified
MSSSVYVGIDISKHRVDVATEPATPPTHFPQTEAGIGALVTHLQPLGPALIVLEATGGFETAVVTALAAADLPVVIINPRQVRAFARATGRLAKTDAIDAAVLALLAARLQPPQRPLPDAALQDLKARVARRRQIREMITAEQQRLPQTRGRIRADIEAHIAYLKARSDEIDTDLRTLIAESPHWRATDDLLQSVPGIGPTTAAALIADLPELGRLAARPLAALVGVAPLNHDSGTRTAPRITWGGRAPVRSALYMATLTATRYNPVIKAFSQRLLAVGKPRKLALIAAMHKLLTILNAIVKTQKPWAHA

SEQ ID NO: 462882 - protein, 338 aa, unidentified
MSTITFGVDLAKNLFSVCAVDGAGRVCQRRELRREALLPWLAQLPAGSVVAMEACGGAHYWARRCIEHGLAPRIIAAQFVAPFRKSRAIKNDRNDAEAIATAARQGNMRFVPVKTVDQQARLSVHRVREGYKVEALALGNRIRGLLAEFGVVVAKSEIALRRRLADLDVLTELPGEVKAVLEELRAHGARLHAAIDACDARIASHVREDVRCQRLRQITGIGPLTADAAVATIADAGMFKNGRQLAAWLGLVPTQHSSGGHARLGGIGCRGDAYLRTLLIQGARSSLQRAKAVAPERATPEQRWICALDGRLAFGKVLVAIANKHARQIWAMLAHDAD

SEQ ID NO: 462883 - protein, 347 aa, unidentified
MNFYTKQHKYYCGIDLHAKKMYVCILDRDNKVKIHQNIKTDPNEFLKLIEPYREDVVVGVECVFCWYWLSDLCTEHQLPFVLGHALYMRAIHGGKTKNDKIDSYKIAMLLRGGNFPTAYAYPQAWRATRDLLRRRMYISRKTGELVAHILNTNTQYNLPAFRKKLTRKYNHAGVAERFTDPSVRKSVEVNLEMIVCFNQILKQLEWYIEKTARLHDYHTLYLLRSIPGVGEILALVILYEIHDIRRFPRVQDFSSYARLIRPKKESDGKWAGSSNKKIGNAHLKWAIKEAAILMLRDSSDAKYYVGKLERKYNKGKALGIFTHKLGRALYYMLKNKEAFEMKRFFAK

SEQ ID NO: 462884 - protein, 352 aa, unidentified
MEKYIGIDVHSESCTIAVMNSAGRQLRQQVLDTQAKVLIEFLKGLAGNRYVCIEEGQLAEWLVETLEPYAKEIAVVQPKAHQGHKSDAADAWALAEQLRVRAKGVYVFKPTRQYRPLREAVRTHGIAVKDMTRAKNRFRSLLRARGVANFDSSIYEAEQRSAWIRKLPVAYRRRAEWLGKQIDSRVEAHEIAQSWLKEEAEKCPEVERLQTLPGFGPIRAAQVVALVVTPHRFRTTRQFWNYCGLAIVTRASSEWKRDSSRDSWQHVRGNVQTRGLNRNCCSQLKAVFKGAATTVIGKPNPLREHFEQLVANGTKVHLARLTIARRIAAATLAIWKKKEDYDPTKHQSIKPA

SEQ ID NO: 462885 - protein, 496 aa, unidentified
MSMHYTTKQKVEQVKEKLLAAIDVGKRSLHVKYMDYTRKVHNRKAYRFDNSSKGFEDLIDCTKKMCDSLGLEEAVFGMEATGHYWQNLAVHLEILGYTLVTVNQNHTKKVEEIVDGSQRKDDDKDPEGIGILMALGDWSPYYRPEGDYAEIRKAYRLLEWCTEDTTRYTNKLHGYLDKHLPGYEPCFGKEKGVTGALSLAVLKKAALPEDIINLGAEGIINIWKEAGLRGTKNRAEKIVSAVSGNKGYAITDGSQTCRLELACIVRELELAIRTEKEAEEQVRKIVARIPGAQRLLGIKGISYRTVAGFFAIVGDLKKRFSNVKQIVKLAGLNIVIRSSGTYKGEARISKRGCPELRAALYRVLTALLENTPAFKPLRDHFMKRTDNPLNAIKANVAMCNKLLRIFYAMVIHDEDYDEKKMLGDIKRMERTKVSQAAVEAGKLKNELDMILCGAEGKEVTNEMIESIRKVGKAMKGLVAVAERGTVKETLPQAVGG

SEQ ID NO: 462886 - protein, 409 aa, unidentified
MKLFVGLDVSSQDAKVCFLNGEGDRLESFTITNDLPGAIILKEKILNTASKLTCEVIKIGLESTSIYSYHPAMFLHNDKELRTYGSQVFMINPKQIANFKKSYPEMDKTDAIDAFVIADYVRFGRHTMSIVKEEQYIALQQLTRSRYQLVHALTKEKQHFLQHLGLKCSQFTQDVGSSVFGNAMMELFLERFSLEELAQMPLQDLALFLQEKGKNRFGNPEEIAKSIQKAVRGSYRLSKVVEDSIDLLLSTSIQIMRTYQAQIKEIEKGIESLMSSLPQTLESIPGIGPVFAAGIVAEIGQIERFTNETRIAKYAGLFWKKYQSGRFTAENTLLTRSGNQYLRYYLVEAANSVRRHVPEYRDYYAKKSAEVPKHKHKRALALTARKFVRLVDALLRNNQIYTPGRSVDR

SEQ ID NO: 462887 - protein, 345 aa, unidentified
MQPMYYIGLDVHKRTIRYCVKDGSGAIHSEGSLPATRFDLDHWMKTLPQPWTAAMEATMFTGWIYDHLKPHAAALKVAHPLMLRAIAAAKKKNDRIDASKICDCLRCDFLPECYMASTAIRERRRTLRYRNLLVRQMVQMKNKIGMLLMEAGVSYNKQKLHKAGYFRELLATNPDIDEGLRSLLRQCRETVVRLGKTESALIRSLEHDRLLAERVERLMSIPAIGPITALTWALEIGEVQRFSSIKKAISYCGLCGAEKSSANTVQRTPLSKQRNKHLQTTLIEAAKMAPRYSPTLALLYDREKQKGNANRATLAVARKLVAYLMSVDRGQCHFLVLDQETRTAA

SEQ ID NO: 462888 - protein, 339 aa, unidentified
MDITTIGFDLAKTVFQVHGADGKGRPVLRRKLRRGKVLAFFAGLPSCLVGMEACASAHYWARELQALGHEVRLIPPQYVRPFVKTNKNDAADAEAICEAVTRPTMRFAVAKSAEQQSVLMLHRARELLVRQRTMVINAIRGHCAEFGLIVAQGASKVEELVAIIEDPGDDRLLPLAREALGSLVEQLRSAQARIKQLEATLLAWHRSNAASLRLATIPGVGVITATALVATIGDGAQFRSGRQLSAWLGLVPRQHSSGGKDRLGRISKRGDGYIRRLLVHGARAVLRWRRAKPGAHPSWTDRLLERRPTNVVLVAMANKTARVAWALLRYERIYQPTPA

SEQ ID NO: 462889 - protein, 351 aa, unidentified
MPRTFDTAVVTTIGIDPGKNTLHLVGLDARGEIVLREKVARTKIVSRLANVPPCLIGIEAGMGTHYVTRELLALDHDVRQVPPVYAKPFRQTHKNDFRDAHAVAEAVQRPTTRCVPPKTDEQLDLQALHRVRYRLVGERTAIINQIRCFLLEHGITVRQRLHWLRHALPDILAQRTDVLSPRVVRILEDLAQDWRRLDDRIEAVGGEIETLAQTTESCRHLMTIPGIGPIISSAVVAAIGDGAAFARGRDFAAWLGLVPKQISTGDRTILGRITKRGNRYLRTLFLQAARVVLLRPRNWMQHGFGPWLAAAAQRLHHNVLATALANKLARIAWSVLAQHREYEARLSVAAT

SEQ ID NO: 462890 - protein, 309 aa, unidentified
MQHTLGIDVSKDRLDAHALSLGEARSFANDRAGLARLLRWTRRLDMPLVVYEATGPYHRLLERTLAGAGIGFHKVNPLRARRFAEGCGRLAKTDRIDAEMLARMGAALALEAQVPAPQNLCELKDLLTARRALARDLARERTRTPRSALLRRLAAARERLLLGQMAVLDAEIAARIAADPGLARRAEILRSIPGIGPVTTAELLIDMPELGSIGAGEAGRLAGVAPVPRQSGKFRGQAHIRGGRPGLRRALYMPALVAMRCNAGLKAKAQRMATRDKPPKVVITAVMRNLLVLGNALLAADRHWQPERP

SEQ ID NO: 462891 - protein, 381 aa, unidentified
MIPETTTIQQYTAIQPHLYIAFELSQKKWLLGFTIGFGQRPRQRTIAARDLSALQKEIRLAKQRFGLADDTQVVSCYEAGRDGFWLHRYLHSIGVANLVVDSASIEVNRRAKQAKTDRLDLGKLLTMLMRYHAGEKKVWSVVHVPSPTVEDNRHLHRELADLKAQRTQHSNRIKGFLANQGICMSVRGDFPKRLQQQRLWNGDSLPAGLQARLLREYQRFQLVQEQIKALETERKEAIRHSSQPEVEQVRQLLRLRGIGHNSAWLFVMEFFAWRAFRNRREVGALAGLTPFPHQSGEDTRETGISKVGNRHIRAMAIEIAWGWLRYQPDSELSRWYQRRFDKGSKRLHKIGIVALARKLLIDLWRYLETGRIPPGTVLKSS

SEQ ID NO: 462892 - protein, 370 aa, unidentified
MLDTTTFIGLDVHARSIKAVSLDVMTGEVRAATFGYDAGAVAGWVRSVDPRARCVYESGVTGFDLQKRLSGLGVDCVVGAVSKMIKPSADRRRKNDRNDAEFLARMLSVGNVVEVWVPDDECEAARDLTRALEDARDDLSRSKQRLSKFLLRHGLVFDERTPTGRRKGNWTRAHWSWIESIRFAEGADNDVLAYYVDAVRRAAEEKARLEGLVEAEARKPRWRKRVDSLRCLKGVDTASAADLVFEAGEFSRFRNARSFAAWVGLTPSEHSSGESDRRGAITKAGNKHLRKTLVEAAWHYLTCSGRPKDLAKGQAPDRGARRHAAKGVRRLVERREALLARGVHGNKANVATARELACWVWAVGLMAEEA

SEQ ID NO: 462893 - protein, 335 aa, unidentified
MELLVPRCAGLDVAKDEVVACVRVPDGQGGRRQEVRAYPTFTSGLEALAEWLAAEGVVQVVMEATGQYWKPVWYVLEERGVALMLVNARHVKILPGRKTDVADAAWLAELLEHGLLRGSFVPPAAIRELRDLTRYRKRLIQAHTAEVQRVQKTLEDAGIKLDSVAADVLGVSGRAMLAALVGGERDPEVLAELARGRLRNKLPQLRQALRGRFSDHHALLLRLALGHLEHLEGAIAALDTEVDRVIAPFARARDQLDTITGVGKRAAETIIAEIGVDMTVFPTAGHLASWAGRCPGNNLTGGKRRSGKPTKGNRWLGEVLTECAWPGSTVSVFSC

SEQ ID NO: 462894 - protein, 364 aa, unidentified
MEVTTIGIDLAKNVFAVCGADSSGRVLMRRQLRRAQVLSFMRGLPRCVVGMEASGGAQYWARQLTALGHEVRLMSPALVMPYRKGNKTDRNDADAILEAVTRPSMRFAMVKSVAQQDLLALHRVWAQLVKSRTALCNQLRGLLRERGVVVRTGAAALKRSLPAALADDSSELSGEMRELLCEMSQWLRSLEQRIASCEARITRKFKHDERCQRLAAVPGVGPLTATALVAAVGNAQRFRNGRELSAYLGLVPRQHSSGGKTVLLGITKRGDRYLRTLLIHGARSALRQCEGDARSGWARRIGAERGPNVAAVALANKNARVLWALLARGDRYRSTNIAAHAVFRSGSPPAVKRARSAKLHVRKD

SEQ ID NO: 462895 - protein, 344 aa, unidentified
MKVTTVGVDLAKNVIQVHGVDEQGKAVLKKQLKRDQVASFFGDLPACLVGMEACGSAHHWARKLQSFGHTVKLMAPQFVKPYVKTNKNDVADAEAICEAVARPNMRFVPIKTTEQQSVLSLHRARQGFVKARTAQGNQIRGLLNEYGIVMPQGIGHITKKLPEILEDGENELPGQFRTLLQRMAENLKEMDREVRELEREIKTWHRENEASRKLEKIPGIGALTASALAASVGNASCFADGRQMAAWLGLVPRQHSTGGKQTLLGISKRGDTYLRMLLIHGARAVVRVSERKPDPDTWLKRLTGRRNKNIAAVALANKNARIAWALLRHDREYALDYAPALATE

SEQ ID NO: 462896 - protein, 296 aa, unidentified
MKFYTTFHKYYCGIDLHARILYICIIDERGNKVVHQKIKADKHELLRLISPYLEDIVIGVECMHCWYWVSDLCAEHDIDFVLGHALYMKAIHGGKAKNDKIDSYKIASLLRGGNFPLAYNYPANMRSTRDLLRRRTRLVQHGAQLKAHIVNTNSQYNYPPLELHMKNKCVRQEFQTRFDDQAVQRNVNFDLAILDAYAEELKKLEYYLESKAKKHQPNYYAQLRTIPGIGLILAMTILYEIGDINRFESVQKFASYCRLVKCKAESAGKTYGTSGNKIGNGHLKWAFSEATVLYNS

SEQ ID NO: 462897 - protein, 347 aa, unidentified
MEQIIRIGMDTSKHIFQLHGVDAAEQVVLRKRLGRKQMVEFLTKLPPTVIAMEACGTSHYWARELGKLGHEVKLIAPQHVKPYVKRNKNDGRDAEGLCEAMSRPTMRFVPVKTAEQQAALMLAGLREQMIARRTQISNMIRGYAAEFGITVAQGLNQIEPLLARLAQDESVPELARDLFALQGRDYARLQVELRAIEVKLRAWHRANADSRRLAKIPGVGPIGATTLVMKTPDPRAFPSGRHFAAWLGLTPKDHSTAGKTRLGKITRAGDERLRSVLVAGATAVIQQAKQGRGDPSPWLLALLKRKPPKLAAVALANKIARIAWKLMSTGESYDGALMPKASVAAAA

SEQ ID NO: 462898 - protein, 317 aa, unidentified
MAAKQDRVVGVDVSKRVLDVAQTGCDPVKRWSNDAAGIADLVAALVREPPALVVLEATGGYELAAVQAMQQAGLAVAVVNPRQARDFARASGQLAKTDAIDARILASFGAALRPTPLPPIDASQAAISELVARRRQIVDMLVAERNRLEHAGSATRRWIEDHILVLKSQLAQVDAALGLAVENSAELQRRHQVLTSVKGVGALTAAVLLAELPELGAIGHKQIAALVGVAPMNHDSGQHRGQRHIAGGRQSVRCALYMATLVGVRFNPTLHAFYHRLRQAGKRPKVALVAAMRKLLIILNALVRDDALWQPLTQDGC

SEQ ID NO: 462899 - protein, 348 aa, unidentified
MSQKLNAAIAVIGIDIGKNSFHIVGHDHRGAIVLRQKWSRGQVETRLANLPPCLIGMEACVGAHHLSRKLQMLGHDARLMPAKYVRPYSKGQKNDFRDAEAIAEAVQRPTMKFVATKTADQLDLQALHRVRERLVGQRTGVINQIRAFLLERGIAVQQGLHSLRSELRGILATRTDVLSPRMLRIIEDLAEDWRRLDARIEGLSSEIETLARQDQACERLMTVPGIGPIISSAMVAAIGTGRDFGAWLGLVPKQISTGDRTILGKISRRGNRYLRALFVQAAWVVLVRVKCWERYGLKSWIEAAKKRLHHNVLAIALANKLARIAWAVLNKGRAFECVKTEETASRPA

SEQ ID NO: 462900 - protein, 310 aa, unidentified
MDAIVVGIDVSKDRLDVHVHPSGEAFGVARNAEGLEELNARLAPLGAWAVAVEATGGFESVVAASLGGSGLPVIVVNPAQVRAFAKALGKRAKTDPIDAAVIARFVEATKPQIRPLPDADTQLLAELVTRRRQIIQMIVAERQREKQMANRRLKKSVARLILALSKELNELDAGIDEAVRGSPAWREKEDLLKSVPGVGPIVSRTLIAEMPELGQLDRRQVASLAGLAPWTRQSGKWRGKSFTGGGRRTVRTVIFMAAMVAKRCNPVLKDFHQRLINAGKPKMVAIIAVARKLLTILNAILRDKKPWQPA

SEQ ID NO: 462901 - protein, 461 aa, unidentified
MRAKKPTGKQKRSVQKKVDWKALEIVHPDAAGIDVGGSEHWVAINPDRDPEPVRRFGCFTADLRKMGRWLVEKGVRSVAMQSTGVYWMPVFEVLEQQGLEVYLVNAQHTKNVPGRKSDVQECQWLLKLHAFGLLNNSFQPSDEIRVARTLWRHRGDLVAEAGSSVQRMQKVLTEMNVQLSHVLSDLSGVSGMNIIKAILEGERDPQVLAAMVMPGVKATPEDIIKSLEGNWRDELLFVLRQHLELYRLYQEKITDCDRQLRKHLESLGSKVDPQMQPLGPRPKGKKIARNAPEFDLRSELYRISGIDWAQINGIDVLTAQTVIAEVGADLSAFPSEKQFTSWLGLCPTNEQSGGKILNRRTRKVVNRATVALRNAARTLLRSQSYLGAQYRRLRTRLGAPKAITAMARKLACLFYRLIKHGHQYVDKGTEYYEARYREQQIRSLTKRAQKLGLQLVIPKTA

SEQ ID NO: 462902 - protein, 340 aa, unidentified
MHVTTIGLDLAKNIFQVHGVTTDGTTLFNRPVRRAQLLKFFEKQEPCLVGMEACATSHYWARELTKLGHEVRLMAPGYVKPYVKRGKSDAADAEAICEAVTRPTMRTVPIKTPEQQAVLCQHRARELLIGQRTQLSNIIRGLVGEFGYTLRKGLSYIRAFAEELKNGRGPDLPDVAADVIASLCKQLLTLHRRILTLEKKIFQAARRDRRVKLLETIPGIGPVSASAIIATVGTPDNFKSGRDFAAWIGLTPLNKSSGGRERLGKITRMGDQYLRKLLVTGMTSRVRAAKAHPERADRWVANLLERKPVRLATVAMANKTARIIWAVLTRNEPYRNLSAA

SEQ ID NO: 462903 - protein, 387 aa, unidentified
MPQPNDLSRSLVALDQDSTIIAVVEMSQSSWLVGGVLPGIERQPRKKQEPSPERLLALLHRWRDESVRAGRTITRIAVAFEAGRDGFWLARWLEARGAEAHVIHPSSVAVSREHRRAKTDRLDTELLKRGFLGWLRGERGHCSMARVPTIAEEDAKRPNRERECLVKERTRLVNRIKGTLARLGIRNFKPTLRQATERLATMRTPEGTPVPPNALAEVQRDLARLRFVVGQIKQIEEARRQRLEEQPERGPHAMVRLLARVVGIGIETADMLVNEVLSRPLRDRRAVARYAGLTGAPDESGAKRREQGLAKAGNARVRRGMIQLAWRFLRFQKNSALAQWYQARTADHRGATRKTMIVALARKLLIALWRFGTIGEPMDGVTLRPAS

SEQ ID NO: 462904 - protein, 315 aa, unidentified
MGIDVATATLDIAVRPTAETWRAPNDAPGIDALVMRLGAWAPTLIVLEATGGSQGPLVAALVAAALPVVVVTPRHIRACAQAVGILAKTDRSAARVMAHCAEAVTPAPRPLPDAETQELRALRGRRRQLVAMVSAERARLDTAPPSVQDAIQAHIAWLTTPITGLDDPLTHASQTHPAWQAKDDVWQSLPGVGPVLARTMLGQVPAWGPLGAQPLAALSGVAPCNRDSGTRRGRRTVYGGRAEVRAVLSMGALVATRHNPVIKAFYERLFAAGKAKKVALTACMHKLLTIMNAMVRDLKRWQPREVSIAEHARDP

SEQ ID NO: 462905 - protein, 467 aa, unidentified
MSEVRLGIDVACRADHRASLADERGEFIWSSWKFRTTTADLERLWAKIPEDASVTVILEPTRNAWVPLSAWLQARGATVILVPPEQSADLRDYYNKHTKTDRLDSRVLARLPLLHPEGLRGIDNLGPAQSLRRAVRHRFSLVKRRSAASLRLDALVELLGPGWADSLGSATASKTALVILEKYADPRALKRLGRSRLAALLIRSSSGLWREDKADELLAMASETLELWSCGGIDFAELAHDIASEVRVLRRLDDEIAAADKRIAVLYDEADPEGIVRSAPGLGPVLSAAILGNAGDFNRFANLAGVRSFTGFVPKIDQSGLVSGRKGITKAGDAGLRQALYLAADHARHIDPTLAQRYHRLVIIEGKHHNSALCALSAVLITRIAASWRKGELYQLRDEDGDAITEAEGKVACADRYKIDPKVRAARRRNTPAKVLKNRAGRGRKESAQKVAPTFDPPDGEASENAA

SEQ ID NO: 462906 - protein, 357 aa, unidentified
MSEAFPAAQIIVGVDTHKHVHAAVAISELGARLDTITVPASAKGYQDLETWARSMGPVRAFGVEGTGSYGAGLSRFLCEQGHAVFEVNRPNRQLRHQHGKSDPIDAEAAARAVLAGQAAAVPKAGTSTVEMIRHLKVARDTAVKGRTQAMLTLKALIVSSPVALREQLDGVVGKMALVRHLAALRPGPLTSTTASAKTGLRAIARRWLALDEEIKAHDAHLGSLTEQRAPELIKAHGIGVGTAAEMLLLVGDNPERIRSEAALAKLCGVCPIPASSDKTRRHRLNRGGNRQANAALYRVVITRMRGHQPTLDYVKRRTAEGKSKAEIIRCLKRYVIREIFGHLCVMSTRADTPANAA

SEQ ID NO: 462907 - protein, 413 aa, unidentified
MVRSGGGWLEIFCGIDWSEAAHDVAVVDETGRLLARRRIADDAAGFTALTELLAGYAGRPERVDVAIETGRGLLVAALRAAGHRVFAINPKAVDRYRDRHGVAGAKSDPGDARVLADILRTDRDRHRPLPADSDLAAAVGVLARAHQDAVWARVQDANRLRSLLREFFPAALTAFADLTTNTALAVLAAAPTPTAAARLSRANLTDLLRVAGRGTRPTEAARLAEIFTVDQLRQPPVVEAAMGQAVRAIVRTLTAANQSISDLEAALAAAFDQHPDGEILRSLPGLGPILAARVLSEFGDDPTRFPDPASRRAYAGTAPITRASGRSRVVLARHVRNKRLADACYLVGLRRLNRSPGARAYYDTRRAAGDRHNAALRRLASKLLGQLHHCLTTSRPYDEALAWPQPDTTPAAA

SEQ ID NO: 462908 - protein, 370 aa, unidentified
MNRLFIGMDVHKEKIVVIGLPEEGSHPVVREEFGGGDLRRLTKRIQTFSRSWEVASCYEAGPSGYGLARIFLEAGIPCRVVAPSLIPRRPGNRVKTDSRDAKALALALRADTLTFVRIPALEEEETRGLIRCREDVARQVRLFKTTVSHWLLNRGQRVPAGVKRWTPAYWKWVRALPLSPMDRTTLDHYLDVVSLLENRRKQVEEQICALAKEDPYRERVKRLIVLRGFSPLAAMRLIAEVIEFKRFRSASSFMKFTGLTPSEYSSGDRTRRGRITKAGNSHLRHVLVEAVQKAHFSANPGRLLLRRWQEVSGPLRQIAVDCLKRLHHKFWSLTQRGVPAGKTRVAMARELAGFVWALMTHPEIETPVAV

SEQ ID NO: 462909 - protein, 358 aa, unidentified
MKRELKKELFVGVDLHKKKFNSTFYCEGKRSEYLIFDFTDKGLLEFIEMLEAFRKRDYSVKVALEMLTGSYYFYDAVSEHCDEIIIIDANKFKIIASSTKKTDKIDSETIALYHSKALLPTVYVPNRSVRHLRETVAFRNKLVRERSSHKNQIHSLLLKVGTTIPKRCLSTRKQLEALKELKLSDIFYEKRLKMLVEQIERLNETIKETESLMEEITESEGNEDLKKAVEILQSIPGIGYLSARILISAIATIDRFETEKQLASYIGIVPSVRNSGGETKHGKKKKKGNRIARTILVQNALSLLKCKNGPLKGFYNGVKSRGGTGKAIIALARKTLTIAFYLLKKGEYFDGSYYKKAA

SEQ ID NO: 462910 - protein, 321 aa, unidentified
MQTVVGIDVSKETLAVCHSVAGKPQHLEVENAKAGFRKLVKICGPESLYVMEATGSYYMRLAYYLAKQGAELAVVNPLIIKRFIQMHLGKGKSDRKDAQWIMRYGQQNELKLWQPDDAQLVECRQLEQTIEQLIKQKTMTLNSLEALEQQPVSSKVTLKTLKLTSLMLQKQIRLLEQELDNHLQEQFKEQLELLSSIPGIGKKTAGMLLLFYGGFRQVGSYRQLIAKAGLCPREYSSGSSVRGKVRITKMGGGQIRSKLYMCSLTAMRANTACRELYQRLVARGKNKKLALIAVCNKLLKQAFAIVNSGIPYQPDYKRISA

SEQ ID NO: 462911 - protein, 344 aa, unidentified
MDKNTVIAIDLAKTKFEVAVSDEPGRVNRHRRLDRSELLAFFAQTPAATVVMEACGSAHHWARQIEHLGHKVVLLPPHQVRPYVTRNKTDRADAKGILEASRNGDIHPVPVKTIPQHVLGSVHRFRSGWIAARTAQVNTLRGLLRELGVFIPEGIEKVLPQVRLLIADADSGIPDGLRGTVAAACDQIQSLGEQIDQAEKQLEALAEQTPIVARLRSIPGIGLMTATALVAFIGDILRFPSGRECASYLGLTPREYSSGLRQRLGRISKRGDSYLRMLLVHGARSVLCHAKKAKTHDALRTWALKLQSRTRHNKAAVALANKLARIVWAVWKNGRDYQSMPAAA

SEQ ID NO: 462912 - protein, 403 aa, unidentified
MNMNAVGIDVSKGKSMVAILRPYGEIISKPFEVKHTVSGIRSLIEQIQSIDGESRIVMEHTGRYYEPLVRELSKADLFVSAINPKLIKDFGDNSLRKVKSDKADAVKIARYTLDSWTELRQYSLMDEIRNQLKTMNRQFDFYMKHKTAMKNNLISILDQTYPGANTYFDSPAREDGSQKWVDFSATYWHVDCVRKLSLNAFIDHYQKWCKRRKYNFSRSKAVEIYEASKELVSILPKDDLTKLIIKQAVEQLNTASQTVEQLRTMMNEAASKLPEYPVVMAMKGVGKSLGPQLMAEIGDVSRFTHKGALTAFAGVDPGVNESGSYEQKSVPASKRGSNTLRKTLFQVMDVLIKTKPQDDPVYLFMDKKRAQGKPYYVYMTAGANKFLRIYYGRVKEYLSSLPE

SEQ ID NO: 462913 - protein, 356 aa, unidentified
MSQELNSAVAVIGIDIGKNSFHIVGHDQRGAIVLRQKWSRSQVETRLANLPPSLIGMEACVGAHHLSRKLQMLGHDARLMPAKYVRPYSKGQKNDFRDAEAIAEAVQRPTMKFVATKSAEQLDLQALHRVRERLVGQRTGIINQIRAFLLERGIAVRQGLRFLRAELPGILATRDDVLSPRMLHVVEDLAADWRHLDERIEGLSGEIERLARQDKGCERLMTVPGIGPIISSAMVAAIGTGDAFSKGRDFGAWLGLVPKQISTGDRTILGSISKRGNRYLRSLFVQAAWVVLVKVGPKHWDRYGLKSWIEAARKRLHHNVLAIALANRLARIAWAVLNKGRAFECVKANEMTSRPA

SEQ ID NO: 462914 - protein, 397 aa, unidentified
MAAAVQVVGGVDPHADTIHVAVLTAVGKVIGDAEFATDAGGYARAVEFLTSYGLVERVGVEGAASYGAGITSALTAAGISVVEVERPTRSARRRAGKSDQIDAYHAARAVLAERSTPVKDPAIGGLRALHLARRSAVKARTAAGNQMKAILVMAPEAVRARFRGLDSDKLVATVLRCRGFYADPIVADTIVALKALAERHRDLGRQISMLTAHIDPIVTAANPALRAAIGVGPQVAAQLLITAGLNPDRLTSEASFAALCGVAPVPASSGKTRHYRLSRGGDRQANHAVHRIALNRMSHHQPTIAYVYRQTDRRRSNKEILRLLKRAICREIYRLLTQRCPVPQWDDLRPAREAKGITLTTVAQHFGVWPATISTLERGLRRDDEPTTSYRAWLAAA

SEQ ID NO: 462915 - protein, 313 aa, unidentified
MNFIGVDLHKKSITICICVMDEKRKILARKTLPCTQTNEIVEFFRQFRPFKVVVEATASYVWFVELVEPLAEKIVLANPKKLRVIAESTKKTDNLDAQVLTEFLVLDMIPESYQATPRLRQHRALVRHRQYLQGRITSVRSKIRHILSNYNADRKDLFSSNCGLAYLKEVGLNDVDRFVIKQLWAEWQDHLAQRLAVSKKLKAFVAKAPQREAEAREILKTAPQVGSVTAEVILSELGDISRFRNAKTVCAYAGLVPVVRQSGERKSKDMKITKEGSGLLRWALVEAAWRLVGKSPKWAALFSRLMHRSVKGP

SEQ ID NO: 462916 - protein, 343 aa, unidentified
MLAITTIGLDTAKSVFQVHGVDAAGRVVIRRQLKRRHVLAFFQRLRPCLIGIEACASSHHWSRELQAVGHTVRLMPPVYVKPYVKRQKNDATDAEAICEAVARANMRFVPTKTPEQQSGLVLHRTRHLFVRQQTSVINVIRAHLAEFGIVAPVGRHGVEELLGIVADPSDKRVPEVARACLAALGAQLRVLKAQILEFDRMITAWHRSSETSRRLDDCPGVGPALATALVATVADPKAFRSGRNFSAWIGLVPKQHSSGGKDRLGSISKQGDRYLRSLFVAGALAVIRYAKIHGTKHRPWLTALLARRPTKVAAIALANKIARMAWAMMAKGERYKQPVALAA

SEQ ID NO: 462917 - protein, 346 aa, unidentified
MKKIFIGIDFSKEKFDATLIKAEGLKECAPSVHEVFANKTSGFRRLVKWVKGESDGLPVDFWLFCGENTGGYSIALSNYLYASGYEMWLECAYKIKHSVGIQRVKNDKSDSRAIAEYAMRNYDKMLPYKPMSPSLTCLREVFLYRHSLVKEKVALTVRRDEKRLTQAKSDVSAFMSFTSKHLITEVNKAIAKCDQKIKEIIAADGELREVFDIITSMPGIGIQNATCLMVYTDNFRRFDLNSRKIGCYYGIAPFGRQSGTSVCGRPQVSPFANRMIKSLLSQAALAAIKFDVNVYNYYQRLIGRGKHPLLVHNNIKNKMLHILVAMVRDRMKYNPDYVYRANKNIA

SEQ ID NO: 462918 - protein, 418 aa, unidentified
MNEDGDTRGSRRYIALDIHKKYSVIGGVDREGRAVLHAVRVEHADLEGWLKKNLRSTDHVVIESTTNAWHVYDLLEPLVERVVVANPAKVKQIANARVKTDVRDTFILARLLAANLVPDVWVPPVHVRELRQLLSQRRQLVETHTQIVNRMHSVAHRHHLQHERGKRFNEKNTVWQKDKRLSKIEQFQLELEMENREYIEKQISRIGKEVAKMSHQKPWADRMTYLMQLPGFGVITGMTVLAAIGEIQRFGTPQHLASYSGLTGGLDQSGTHLVQKGITKEGRKELRWAMVEVAQRAVKSDPWWKHRFQEMQKRMHRNQAIVAIARRLLELVWYVLTRRQPYRHFSQERIAYKYLTWAWQMDEAARDGLTRQQFARYYLIRLGIGHDLTRVALDPKHPRKIASEAELLTLRPELNHIE

SEQ ID NO: 462919 - protein, 322 aa, unidentified
MMSTTTVEERYAGVDVSKARLDVAVRPTGERYSVTNEPEGINTLIERLGEAGPPQLVVLEATGGFERPAAAAIVASGIAVAVVNPRQARDFAKATGTLAKTDKIDANVLARFAEALKPEPRTIPSEEALLLGEILGRRRQLISMLVAENNRLSVIVSAPVKRRIRAHVRWLEKELSRTDLELEKVLEASPIWRENEALLRSVPGVGPTLARTLLAELPELGTLTHKRLSALVGVAPFNRDSGKIRGKREVWGGRAKVRTALYMSAMVASKHNPIIREFYERLVEAGKPKKVALVACMRKLLAILNAMMRDRRPWRFTHALTP

SEQ ID NO: 462920 - protein, 366 aa, unidentified
MKKHTSKKQTTRKGTAKETFAFYIGIDLGDKKSDICVLDEQGEVHEEVRLRMNAQEFQTYFAALACSRVAIEAGAQSRWVAEVIERCGHQVYVSNTRQVPYIHQSDAKNDPGDAYKLAELVRFQPRLLHPIQHRSQEAQADLSWIRAREVLVQSRTQIINAIRGMSKAFGERLQKCSTTSFTGKRADRIPAQIRSAVAPLLETIDHLNEQLGYYDQMIQQVARTRYPRHRLLDQVQGVGVHTALAYMLTIGDPERFDKSRAVGSFLGLRPKQKDSGERKPQMGITKAGDEYLRKTLVNCAHYILGPHGADSDLRRFGLRICERGGKNAKKRAVVAVARKLAVLLHRLWISGEVYEPLRNRTVAAAA

SEQ ID NO: 462921 - protein, 417 aa, unidentified
MIKDVKWYVGIDWATQSHCVCLLDAEGNQVGQRDFAHGGAGLAELCDWLLEKTQAAPGQIAAAIETPHGPVVEMLLERGFAVFAINPKQLDRFRDRFTVAGAKDDRRDAHVLGGSLRTDRAAFRELAADNPVTIELREWSRMADELKQERTRLANRLRQQLWRYYPQAAKLTDDVADDWFLALWQKVPTPESAAKASEKAIARILTAHRIRRLDAATALKTLRETPLLVAPGTTQAACAHIRSLAARLHLVNQQIKEAQQNLDRLCAQIEEEENASGQNLEQCDVTILRSWPGIGRINLATLLVEAAEPLRRRDYHALRALAGVAPVTRQSGKQRFVVRRLACNRRLQGAVHHWSRVAIQHDAAARQRYDALRRRGHGHARALRSVGDRLLCGLCATLKRKIPYDPGHNSAKTSAKA

SEQ ID NO: 462922 - protein, 412 aa, unidentified
MDVLHTCCCGLDVHKETVVACLIHPAAQGQRPKEVRTFGTTTAALRELAEWLRAAGCTHVALESTGVYWRPVYNVLEDEFTLLVVNAAHLKAVPGRKTDVKDCEWIAELLQHGLLRASFIPDQAQRELRDLTRTRTTLTDERSAAVCRLQKVLEDANLKLAGVATDILGVSGRAILQALVEGNTDPATLADLAKGRLRRKRAALEQALDGRLRAHHRLLITTHLAHIDFLDETIAQLSQEIAERLRPVEAELERLDTIPGVGRRTAEILAAEIGLDMSRFPSAGHLASWAGMCPGNYESAGKRKGGKTRKGSKWLRRALTEAAQAAARKTHCYLAARYRRLVVRRGKRKAAVAVGHTILLTAYYLLVRQDTYHDRSPAQLDAHRRERARQRAVAQLQALGFDVSLTPKEPAA

SEQ ID NO: 462923 - protein, 352 aa, unidentified
MMLIGVDPHKSTSTATAVEPDSNREVASIRIDATLREYRRLLTWAGRWPERRWAIENAEGLGRHLASWLLARGERVVDVPTTATARVRQLSRGGGRKNDRIDAAAAACVAALQGDARPLEAEGTTDAMALLDERRANLSQARVRVVNQLHALFRALLAGGAPTGLSAAEAGALLRTVRPVGEVERVRKQLAGDLVAEIRSLDARLKRNAEAMAELVKASGSSLTQTVGIGDITAARLIGRTGRPSRFPTAAAYATYSGVAPLEVASADKTRHRLSRSGDRQLNSAFHTIAVTQIRTTGSPGNIYYQTKIAEGKTPREARRCLKRRLADHVWRTMIADEKRQRAKASESVDAA

SEQ ID NO: 462924 - protein, 321 aa, unidentified
MVYIGIDISKSSFVAAYPSAKGYRTQTYPNTAAGVRKFIATLSVTEHHCVMEATGNYGFLLLYLLHQTGIAVSLVNPKQIKHFARMMMTVTKTDEKDACMIAMYGEKMNPPIYKMPSQAILLLKQKKTVIRQLRKQLVASKNLRESLVVLPYRDKACVRTLDKTIDFLTKQIEQLETELADIASSEFDKQLKALTSIKGIGITLATALILTTGGFTYFDNAKQLSRFIGICPTYQQSGTSVNIKGHINRNGDEQLRALLYIASWTALRYNAACKECYVRLKANGKPSKVALIAVANKLVRQAFAIATNDSTYIDGFVSTKK

SEQ ID NO: 462925 - protein, 389 aa, unidentified
MENSITHVAMDTHKKQHAVAWADRETGEVQVFTVPNTPKDIKKMVKKFQRKAPGEVQFCYEAGVCGFTLKRQIEALGGHCQVIAPSLVPRKKGERIKTDRRDARKLLGQFLAGQLTAVHTPNPTQEAAREVTRCRQAAQDDLKRARHQLVKFLTRHGYLYHDGNHWTQKHDRWLRSLQFDIALLREVFDLYYTQLQHCQQRLAMLDKEVAALAEQPAYKEIVDLLRCLRGVETLTAITLVTELFEFGRFDSPRKLMAYLGLVPSEHSSGEKRRPGSITKTGNGRVRRLLIESAWHYRHRPVVSKTLTRRRKDQPQWAIDIADRAQLRLHKRHQRLMMRGKIPAKVVVAVARELAGFLWAILHEWQRRRGDNVSMAQESSWTKADVTATA

SEQ ID NO: 462926 - protein, 344 aa, unidentified
MYYIGIDVSTKESALCILDAKGKIVRETRLPTDPEIIARFIAATGLAIVRVGLESGCTAAWLFAGLQRYGWPVICIDARHAAAALQAGFRNKNDRNDARGIADLMRVNKYRPVWVKSPEAQRQGRLLTARATLQSQLVALENTIRGLLRQEGIGLTDRRTAFEAAVREAIGDDRLLKAAVHPLLETRNAVLQNRATLDRRIVRADPVCRLLMTAPGVGALVSLAFKVAVDDPRRFSRSRDVGAHFGLTPREYSSGEVSYHGRISKMGDREVRRLLYVAASRMLRRDAALWCPLKVWAVRLAQRVGIRRARVALARKLAVVLHAMWSDGQVFQWRRAEASASASA

SEQ ID NO: 462927 - protein, 341 aa, unidentified
MEYYAGIDVSLEYSSVCVVDGQGKIVRESKVASEPDALICWLRSLGYELNRIGLEAGPLSQWLFAAMREAGLAVELLETRHVRKAFEAMPVKSDRNDARGIAQLMRLGWFRPVHCKSMGAQETRSVLTARKLVQSKLRDVENSLRGILRGFGLKVGKTTDVKFAGRIQELVVGHPHLEMIAEALLLVHAVLLREFKVFERRVRSMARFDAKARLLMSTPAVGPIIALTYASAIDDPGRFKSSKQVGAHFGLTPKKHQSGETDYTGRISKIGDGSVRTALYEAAHLMLTKPIKGCSQLKSWAMRIARRAGMSKAKVALARRLAVIMHRMLADGTVFNAAAAA

SEQ ID NO: 462928 - protein, 357 aa, unidentified
MIFVGIDVAKDKHDCFILNSEGTVLADVFTIANNRIGFETLLSRIQSCSQGESKIKVGLEATGHYSYNLLGFLLDSGLATYVINPLHTNLYRKSLSLRRTKTDRIDARTIAMMLMSDVDLKSYSNTAYHNEELKSLTRYRFDKVKERAKLKSSVARLVNILFPELEKLVSSLHIAVVYALLSNYPGASYIANANTEELAETLCTASKGRYTKSKTAEIQVAAGVSIGSKMPAKSMELKHTIALIRELDKEISEVESAIDKITSQMDSPIFTIPGIGRHMGAMILAEVGDFSNFASADKLLAYAGLSPSTYQSGQLQNCYAHMEKRGSRYLRYALFNAAKYVCLWCPTFSAYLEKEAF

SEQ ID NO: 462929 - protein, 347 aa, unidentified
MEYFAGLDVSLETVNVCIVNAAGDILLEKKIAAEPAAIVHLLKGFGSPFKRIGLEAGPTSSWLYGELRAAGYGAICLECRHVKAGLSAMRNKTDRNDARGIAQLVRLGWFRQVHVKSEEAQRTRTLLVNRQQLLTKALDIENSVRGSLKVFGLRIGVVARRGFEARVLELVADDPILLAVTEPMLRVRQALLEEFERLDRLCQQLARRDPVCRRLMTVPGGGGVMTITNRTGVDAPERFSKSRDVGAHFGLTPKRYSSGQTDYDGRISRCGDEMVRTALYQAANVMLHHGRWSSLRSWAMRIAKRGSVKGAKVALARRLAVVMHRMWNDGTDCWWSDTSRMTAPTAA

SEQ ID NO: 462930 - protein, 471 aa, unidentified
MKKTSSWKTGPRQRKTGRGSRTLLPRLNPDVAGIDCGASEHVVAVPPDRDPAPVQTFTTFTHDLIRLADWLQACGIKSVAMESTGVYWIPIYELLEARGFEVLLVNARHLKNVPGRKSDVSDAEWIRDLHSVGLLRGSFRPTAAVVTLRAYLRHRQTLIDSAGIYIQRMQKALVQMNVQLPRVVSDITGVTGLRIIRDIVAGERDPQQLAQHRDVRCKASAAEIVAALTGHYLPEHVFALEQNLQLYDMCHRQMTTSDRTVEAHVQTLTAPLAPAPTPLPAASRPAQRKANEPAFDIRTPLHQLTGGVDLTQIDGIAPYTAIKLVAEIGTDMTRWPTAKHFTSWLTLAPKNKISGGKLLSSRTEPSANRAAAILRMSAYTLNRSQTALGAFYRRVATRVGKPQAITATARKLAILVYRALKGELVYQDPGAAAYDVRQRARTLRQLRQRAATLGFELVNRETGEVMVAGGS

SEQ ID NO: 462931 - protein, 346 aa, unidentified
MDLYIGLDVSLASTAICVVSAQGKVVKETAAPSEPEDLVRVLRGLPGRVVGVGLEAGPLSQWLYQHLTEAGFATVLMETRQVKGALKAMPIKTDRRDAEGIARLLQMGWFRSVHCKSLSAQEMRALLSSRKAIQKATLSLELSIRGVLRNFGLKMGQVAKGRFEQRVLELAEGNPMLEAAATPILSARRALRQELAGMEKLLRDHAKSDRVCRQLMTMPGVGYRVALTVKAAIDDPERFRSSRDVGPWVGLTPRREQSGERDIIGEISRAGDAGLRTALYQAATVMLHSGRPNWLSAWAWNVAKRRGKKRATVALARRIGVVLHRMWRDNAEFRYTRSDAVAATTA

SEQ ID NO: 462932 - protein, 344 aa, unidentified
MHIASIGIDLGKNTFHLVALGEHTKVLIRKKFSRAQLLAYTANLPSSLIGLEACAGAHFMGTALREQGHKVRLIPAQFIKPYRKSNKNDFIDGEAIAEAVTKENMRFVQIKTEEQLDVQAMHRVRDRLVQRRTALINEIRGFLLERGITFAPQPKHLSKNLPAVIEDAEQKLTPRLRWLLDRLWQEWKQMELDINAVTDEIERISKENSLCRRLQQIPGFGPLVSTATVAAIGNGSAFRRGRDFAAWVGIVPRQYSTGGKQKLFGISKRGNHYLRRMLIHGARAVLLRVKYDTGGFGQWVHRLAQRAPRNKVLVAIANKLARIAWAVLSSGKDYQHQPLQVTAA

SEQ ID NO: 462933 - protein, 341 aa, unidentified
MAQVTTIGLDIAKYVFQVHGADATGQVVFRKRITRGKLIGFLAAQSPCIVAMEACAGAHYWAREIGKLGHSVRLMAPAYVKPFVKRQKNDAADAEAVCEAVQRPSMRFVPVKTEEQQANAIVFRARDLLVRQRTQCVNALRGHLLEYGYAFSQGIGQIASLVALIEDPGSSLPEGVRSILKLLVDTFTGLEAQIAVLDAEINRRSKTDPAACRLMTIPGVGPIVSTAITALAPAAHSFAAGRDFAAWLGLTPLQRSTGGKQKLGAVTKRGERTIRRLLIIGASAVVRQASRRGAPKGTWLAQMLARKPKMLVTVALANKMARIVWALLVKGGSYRAQAAAA

SEQ ID NO: 462934 - protein, 344 aa, unidentified
MTIIRIGLDTSKSVFQVHGVDEQERPALRRQLRRGQIEKFFVKLPPTRIGLEACGASHHWGRVLRDLGHEVVLIPPQYIKPYVKRGKNDAIDADAICEAMSRPGMRFVPIKSREEQAALMLLKVRDLLTKQSTMLSNAIRGHAAEYGVTGAKGPQKIKELLERIAGDANVPEPARELLNSLASQLAVIEVRLAALEAKLMAHHKADPRSQLLATIPGVGPVTAVTIALKVPDPTVFRSGRHFAAWLGITPREHSTAGRQRLGKISRQGDEDLRRLLVLGATAVIQQVERRRKADKTSGSDSPWLLRLLARKPKKLAAVALANKMARTIRAMLVSGELYRRPQAA

SEQ ID NO: 462935 - protein, 344 aa, unidentified
MKITTIGIDLAKNVFQVHGVDERGKPVLKKQVKRDQMAAFFAKLPVCLIGMEACGSAHHWARRLQGLGHTVRLMAPQFVKPYVKANKNDVADAEAICEAVTRPNMRFVPVKSIEQQAVLSLHSVRQGFVKARTSQANQIRSLVGEFGLVMPTGIMNVRKRVPEVVENASSELPAAFRHLVDRMLDHLKELDRQVGELEAQIKAWHRSSELSQKLEKIPGIGPLGASALVASIADARSFDNGRQVSAWIGLVPRQHSSGGKPTVLGMSKRGDVYLRTLLIHGARSAIVAAQRKATVNPWLAGLLHRRNPNVAAVALANKNARTAWALLAHDREFQPDYVPMRATA

SEQ ID NO: 462936 - protein, 442 aa, unidentified
MNEEDRSRLEEFRQFRREVRGSKEYLLVGIDVAKDRHHAFFGTATGKTVFRRLVFDNNLEGFQKLLAQAEAMRGQEGLKKVVFGMEPTGNYHKPLGEHLIRCGREVVLVSGAAAHENRKTLDGRWDTNDTRDAANVADLMSQGKCLFYEFPVGALQDLRNLLSLKRRMKKEEQGYRVRIRNHLLAKYFPELDRYYEQSETTALAIVRWCLDPSEIAGLEYKRFFQLVSLSLARERSSQERRLQAIWKMAVDSVGCEAGPTVELEAQVMVEGLRRVRESLRQIDEKIHEICCQFPEYEVLLSIPGFGRDLAAKVLGAIGDPDRFQNGRQVLKTAGFDLNAERSGKSSERAVPVISKRGKADLRFALYQAALIASVKNRDFIGYYTEKLRGREREPGIKIKMRVKLAAKMLILAWTLMKKREPFDPSYLRAAGQAFSAGGRRER

SEQ ID NO: 462937 - protein, 423 aa, unidentified
MKRHRRRPSPKPRTSPDALERLHPHAAGIDCGSAEHFVAVPPDRDATPIRSFATFTGDLHRLADWLTACRVTHVAMEATGVYWIPIYEILEIRGFQVILVNARHTKNLPGRKSDVSDCEWLRDLHILGLLRGSFRPVDGMVALRGYLRHRGTLIECAGALVQRMQKALVQMNVQLPLVVSDITGVTGLRILRNIVAGRRDPQQLAQHRDYRCRASEAEIVAALTGNYRAEHVFVLQQNLELFDTYQQQIAACDRAVEAHLQTLATQAARATLPLPPERPRQKPRGNEPRFDVRTPLHQLTGVDLSQLDGIGPYNALRLLSEVGTDMTRWPTDKHFTSWMTLAPQNKVSGGRLLSSRTQPSANRAAAILRLAAMNLGRTQTALGAFYRRLAFRVGKARAVSTILRQPGAAIYCSDSTVRMSAVD

SEQ ID NO: 462938 - protein, 381 aa, unidentified
MPSTNLQNSIDFNGQKFYVGLDVHKKSWSVTVRSLERQVAHFMQPPSADTLFSTLSHKFPGGIFYSAYEAGFCGTGHHERLCSLGIINIIVHPADVPATDKQKKNKTDLHDSRSIAEHLEKKNLRGIHVLLRDQQELRSLFRLRESKVRDVTRANNRLKSFLFYYGIEIPAAVSTREFISKKVLDWLGNLELAHEAGTITKQELMEELRYQRKQEYRITKLLRKQVQDNHNEQYTLLLSVPGIGPITAMALLSEIADFSRFDDPDDYVSFLGLTPWNDSSGDVIRTKGIQPRCNTHLRPMLVEASWVAIRHTPQLFAYYSKHAAKNNKHAIIKVARRLALIAKGVVVNKHPYQPDYLQNKKNEEKTAKKLRQTIKQSSQNE

SEQ ID NO: 462939 - protein, 368 aa, unidentified
MKYIGIDVHKKICVACIKDEGGTTLTEIKFSNNKEGFNHLFSVVGEPEARAVMESTGNYWLQLYDALEAQGIEVVLANPRKTRVIAESNLKTDSVDAAMLADLLRANLIAPCYVPPPEVRDIRALIRERMSLKKECTRVKNRIHSLLAKHELPPFPGSDLFGKKGLQWLEDQKEHLLSVDWIILEIELVRLKTLVGLIEKINGDIAVIAQQTEEVSLLMTITGVDYYTALLFTSEIGDIHRFSSSSKLSSWIGLVPRVHQSADTYYHGRITKQGSPLVRWALIQAAQVAVRWDSHWREVYERISSHAGKKKAIVAIARKLAVTMYCMLTRKEPYRYCNEETYRRKVKKLERIINTTPKNRGEIVLLSS

SEQ ID NO: 462940 - protein, 436 aa, unidentified
MMHHRRPSQKGDSAVERDYRIYVGIDWATQAHQACVLDSAGQILAERSFAHAGNAIAAFAQWLNELAGGHPEQVAIAIEVPRGAVVETLVERGFHVFAINPKQLDRFRDRYTVAGAKDDRRDAFVLGDSLRTDQHCFRRVRLDDPLVIQLRELSRVDEDLMREGNQLTNRLRELLHRFYAQTLPLCPAADEPWLWALLELAPSPSVGRRLRPQRVQRLLREHRIRRLRAEEVVAALRAPALSVAPGVVEAATEHIALLLPRLRLVHTQRQRCGARIEALLDDLQAAQDEDEEQGEHRDVEILRSLPGVGRVVAATVLAEASGALAERDYHGLRALAGIAPITKQSGKHRTVLMRHACNGRLRNALYHWARVAAMCDPPSKTYYAALRQRGHSHGRALRSIADRLLRILIAMLNSGTLFDSSKACPPQLRVLSEKVA

SEQ ID NO: 462941 - protein, 350 aa, unidentified
MLIGVDYHPSFQAIAFLIEETGECGEQELNHSDGQAERFYRDLQQRGISVRVGMEATGYSRWFERLLAELGFEVWMGDPAEIKAKRVKKQKTDRNDARLLLRLMRENNFPQIWVPSPENRDLRQLLWHRHRLVQMRTRIMNQLQALAMNEGYRWKKKLFSEQGRAQLEKLVLAPWASRRRQELLELLDRMNPTIEELTAAVEREARKRPEVLRLMTHPGVGPLTALAYVLIIGTPTRFQRGKQIGTYVGMIPSEDSSARKQRLGHISKQGNSLLRFLLVEAAQAAARIHPDWRRRYMHLAMRRHKSIAKVAMGRRLAVRLYWMWRNGCGYSQSLEFGPYAGQLGTGHGVK

SEQ ID NO: 462942 - protein, 340 aa, unidentified
MPLYGGIDLHANNSVVVLLNEQDQVVYEKRLPNHLPTVLDLLDPYRAEIMGFVVASTYNWYWLVDGLMEAGYRVHLANPAAMQQYSGLKDTDDHSDARWLAHLLRLGVFPEGYIYPKAERAVRDLLRKRAHLVRQHTANVLSVQNIIVRNTGTRLSIKRIRELTKQELEGLLPEVAQVLAVTSSLAVLACLSHQIKTLEQTVHKRLKHTPSYEQLLTVDGIGTILAQTIALETGTIGRFPTVGNYASYCRCVNSTKISNGKRKGQGNVKNGNRYLGWASMEAAQFALRFHPSAQRFYQRKLAKSNNNTTLARKAVAHKLSRACYDSMRDRVPFDALKAFG

SEQ ID NO: 462943 - protein, 338 aa, unidentified
MHITTLGIDVAKQVFQLHGVDGRGRVVLSRRVKREQLLHTVASLPPCVIGMEACGSAQHWGRAFEQLGHTVKLMHPKYVKPYVKTNKNDRRDAEAICEAVSRPTMRGVSIKTVEQTDLQAVHRTRSLFVKHRTAVINQIRGLLAEYGVVMGRSPTKVRPALVRLLDDAASGLTALARETFAELYAQLTELDARIERVTHRVEGLFQAHPVCQKLAAVPGIGPMTATALVATVGRPHAFQNGRHLAAWLGLVPRQYSSGGKERLGGISKRGSRYVRTLLIHGARAVVQRAERRTDTQGRWLCALKHRKGTNVAAVALANKNARVIWALLAHEAAYRSPA

SEQ ID NO: 462944 - protein, 324 aa, unidentified
MEAEAVYVGIDVSKAGLDVAVWPGAERFRVGNDPRGIAELVEKVVALTPQAVVLEATGGLEAMAASELHAAELTVAVVNPRQVREFARSLGRMGKTDRLDALVLAQFAQSAHSNERLPKLRLPDAAEAELKALVTRRRQLVAMLTAESNRRERAPKVIRKSIVASIRALKRSIAAIEQQVREVMSDSPVQQAKAVLLAAVPGVGPQLTATLLAELPELGSLGRRKIASLVGVAPHPHESGKFYGRRRCWGGRATVRTTLYMAALSGVRFNPALRACYQGLLGRGKSRKLALVACMRKLLLILNAILRDSASWNPHHQLDFQHSR

SEQ ID NO: 462945 - protein, 474 aa, unidentified
MEKELSKKQQEVIKLLEKQKIRDVKDLESYKLSICHPFSAGIDLGSRELYVALSPDIATEMNVPIVHRFETFTKDLLACKDLLVFCGIKTVSMESTSVYWTTIFSILQESGIEVCLVNPKKFRMVPGRKTDIADCQWLQTLHLYGLLRGSFHPSQDIEILRTYMRERDSIIKERSVFVQRMQKAMTKMNLLLYNVIDDITGKTGRQIIEAILKGERDPKVLAAFRDPRVKKSEEEITEALRGYYKEDQLYLLKINYQSYCFFDGQLNDLDKQITAAVKRFPLKKEKKEKRANNAKSTSRSKNNIRTKENLEDILFHILGVDLSALPGIRANAILQIISEVGTDMTKFPSSKHFASYLGFVPQNKITGGHIISARTDRIKNSAAQAFRKLIPSISQTKTALGAFYRRLAPGIGKAQAITAACRKLAVLVYNTLAFGIEYTERGEIFYKQKQEDWERKKSASLAKKYNCNIIPIVA

SEQ ID NO: 462946 - protein, 421 aa, unidentified
MKGLRTKRVRAVKEGTLIATVDIGVASNTGYCTTLDGRSTKSFRFDNTKEGFEKFWCMTIASKNRFGCDEVVVGYESTGPYAEPLVHYLASKEVKVVQVNPMHTKKMKEVNDNSPLKTDSKDPRVIADIIRLGRALSIVVPEGDAASLRRLNNARERHVGEQTALLNQLQQLVFLIFPEFKTVLKNVKSKTAQHILNRYSTPERIGGLSKEALGEQMRKWSMGKFGIKEAESLIGLARETVGIKEGIAGIFLDIRHILMQLEAEVRFISEIEAEMGATLDRIPYSVRLLSIKGLGAVSVAGLIGEVGDFSKFGTQSEIMKLAGLDLYEISSGKRKGQRRISKRGRSLLRKILFYAAIQMIRKNGIMYDYYARLTGRGMERMRALIAVSRKLLRIIYAIVRDNTDYVGEYQVPQRMVIKKAA

SEQ ID NO: 462947 - protein, 344 aa, unidentified
MFYAGIDAHVKSSTIWIVDRKGRKVSSSTVMTSAEGFAAGLGRWGRRGLKAAVEASGITPWICQLLKDLGVKVVVVNPNRVRLIAESRKKSDRVDAETLAELLRLGGLPEVHQPSIEARRLRTELSVRRQLVRQRTGLINQARGLLRGWGVILPARFFQARGGWKDLEAKKLPEYLRPLLETMKGVYEQLTRAIRQVETTLKQREHSDERVTRLETIPGVGPVSALTLVAAVDKVARFARAKQLTAYNGIVPTVRSSGEREQQGAITRQGRSEVRAVWIQAAHSLVRSRQPAAGPLQRWFWKVARRRGARTGIVALARKMLSLAFYLLRDGTQYEPLRLKQAAA

SEQ ID NO: 462948 - protein, 349 aa, unidentified
MSDHLRGVAFVVGVDTHKASYTAAVVSRAGAELETMAVASDAFGHKKLLTFARRVGDGPRLWAIEGTGSFGRGLTTFLLEQGEAVAEIDRPARPARRNGAKTDALDATRAAREALARDHVAQPRRRGPREALRVLVRTRTTAVRAKSVAICHLKSLIVTAPGPLRDQLRGLSDVRMAPKCARLRTTLGQSAEHRATITAIRATARRILFLEAEAEDHASAIELLVQQLAPQLLDEVGVGPLTAAELLIAWSHHGRVRSEAAFAQMAGVAPIPASSGQVTRYRLNRCGDRHINCALHQIVLARLTHHAETKIYVARRSAEGRTPKEIKRCLKRFLARRLFRLLEASEIPT

SEQ ID NO: 462949 - protein, 450 aa, unidentified
MADRYAGVDWAGDKHDVLVEEANGDEVLATTFTHDERGVSALCGTLVRLGVVLVAIERPDGLLIERLLDAGLRVMAMHPNQVAAARPRFRTSGGKSDRFDAFVLCELARTDSHRFRVLVADSDDTKALRALSRAREDLVQTRVALANQLRAELERFWPGAALVFAEIDSPIGLAFLARYPSPLDAAGLGEKRLATFLARHAYCGRRQPAELLGRLRDAPRGRAGDSETEARRAIVLALVAALRPIVSKIAELTREIAQRVHAHPDGHIFLSLFKDPKSVVCAAALLAEIGDCRARYRTAEALAADAGMTPVAVESGKRKVACFRHGCDHRLRAATCTLADATRHWHPWAHDRYAAARARGQDHQRAIRTLGRAWIRVLWRCWQDGVAYNPARHRGLQQHIAVVISDESRPRLDLTATQRMAGAAVTRKAARSDEREALDGKPTSATKTEG

SEQ ID NO: 462950 - protein, 363 aa, unidentified
MDTNIQTGRDKLRVSFSGRQIFLGIDVHKKNWNISVFIDDIFFQNFHQEANSLLLLNYLNSHFPEARYLACYEAGFSGFSIQRELESLGIDCIVVNPSDIPQTNQGILSKTDTSDSRRLGMALSRGLLTPIYIPDKLTESDRQLIRYRKKTLTDLQKKRKILKSAFHSMGIIIPKEYDKPYWTKKFIDWIRNLKPKEVSSQILISHVIDDVEFLRKRLLQINKDIRHLSSHERYKEVYSILISAPGIGIITAMTMLTEIGEIKRFNNFAKFNSFIGLCPSEFSSGENIRKGKMTPRANSALRPLLIEAAWIAIRTDPALALKFQELIKSRTKKRAIVVIARKLLSRIYHIWTNTRLYEKGLLR

SEQ ID NO: 462951 - protein, 359 aa, unidentified
MVVVGVEMVVVGVDAHKRTHTLVAVDQVGRKLAERTVAATSDGHLQAVRWAALWPQPQVTFALEDCRHLTRRLEADLLRAGHRVLRVPTRLMATARRSGRQPGKSDPIDALAVAQAALREPDLPVAHLDGPTRQVKLLCDYRADLVVERTMLCNRLRWHLHELDPELQVPSRGLRRYKVIDELAARLVGVDGTVAQIARELLARCRELTVRINQLEADLRDLVRVLAPGLLAIPGCGVLSAATILGETAGASRFRSRHAFARFNGTAPIPVWSGNAVRVRLNRGGNRTVNWALHMIAVTQARGVGPGQAYVERLLGAGKTRTEALRLLRRRLSDVVFRVLLADEQRQAEPVPVSAPRAA

SEQ ID NO: 462952 - protein, 461 aa, unidentified
MKRKKYYLGIDVSKGYSDFTLLDEAKNPLENVFQLDDNRKGHDALKKFIQDKIKEHDMDCLYCGLESTGGFENNWFNSLTGWSKTMPVKVARLNPSGVKNNIAAGMNRNVTDSLSSRYIAEYLIGHESKVSYDVEDNKYSEFRSLYAYIQIENKQKTQLINEMKMLLYSGFPEMVRFCKQGVPVWVLELLKKYPTAEKVAKLKSSQLSKIRNITAEKAETIIAKAKETVSSRHSSTQEFLIQRLAEQIMNKQESIEKAKKFLIENCNGPEVDLVASIKGIGKYSASCIMIEIENIYRFASTKKLVSYFGVHPELKESGDKIKKYRMSKKGRSSMRSALYMCAQSAAMFDLHFKQIYHHHRSKGKSHKQAIVVIMHKLLRLIWGILMTKKPYEATIDIANQNKKVSAIKDENKRNENKVKRRYQEADLEAPISNRQTKIRKVQSDSQVDIVEQMRDVPIARL

SEQ ID NO: 462953 - protein, 314 aa, unidentified
MEEIKEELFLGIDVSKTSLDMAQWGKNQVTKYENDIGGITTIVEELSTLPAVVLIVVEASGGFEQTLVGELAAGALPVVVVNPTRVRNFARAKGQLAKTDNIDARVIADFAQAIRPKVRSLNTADQQLIKALVTRRRQLIGMQTAEKNRRTSINTALLPRLEKHLEWLGTELQEIDEELDDWIDKNSSWRETRSRLESVPGVGPVASFTLIAELPELGALSRQKIAALVGLAPFNRDSGRMRGRRHIHGGRADVRSVLYMAALSGIRHNPVIRSFYNRLISRGKLFKVAITACMRKLLIILNAMVRDGTYWQTP

SEQ ID NO: 462954 - protein, 388 aa, unidentified
MIYVGIDIAKLNHFAAASSSDGEILIEPFKFTNDYDGFYLLLSNLAPLDQNSIIIGLESTAHYGDNLVRFLISKGFKVCVLNPIQTSSMRKNNVRKTKTDKVDTFVIAKTLMMQDSLRFMTLKDLDYIELKELSRFRQKLVKQRTRLKIQLTSYVDQVFPELQYFFKSGLHQNSVYALLKEAPTPAVIASMHMTHLAHLLEVASHGHFGKEKARDLRVLAQKSVGVNDSSLSIQITHTIEQIELLDSQLFHTELEMANLVTCLHSVIMTIPGIGFINGGMILGEIGDIHRFSEPKKLLAFAGLDPSVHQSGNFQAQRTRMSKRGSRVLRYALMNAAHNVVKNNTTFKAYYDAKRAEGRTHYNALGHCAGKLVRVIWKMLTDEVEFNLE

SEQ ID NO: 462955 - protein, 339 aa, unidentified
MSKRSNLGPAMVFCGIDVSAATLAVAVQQADRAVERREFANTARGHKALIAWLGKRKAAVRVSLEATGIYSLDLALALDAADGIELAVLNPKAAHRFAQTLRRSKTDKADADALAEYSRRMPFLAWRAPSGEGLRLRAISRHIGSLGEEHTRESNRLHAAQGSAETPGCVVQDLKRSLAALERRMARLRREAVKLVQADAAMRQRFDLLTSIPGIAESSALQLLGELAPLSPEMSARQWVAHSGLDPAHEVSGTSVHRPSRISRAGNRHLRRALYMPALVAARRDPHMKAFYELLQSRHKAKLQALIAVARKMLHAIYGIFRTLTPYEGHKLFPALLPG

SEQ ID NO: 462956 - protein, 347 aa, unidentified
MSEYIGIDLHKAKSFVTRVDQRGRVLEQVELRHATGEMQRYVEKVPGDTRIVVEATGNWMWLYELIEERHPDLVLAHPLKTKAIASARIKTDKIDATTLAHLLRADLVPAAYIPPRAVRDTREILRFRASLVRLRTQVKNKIAAILSKNGLTPPTKTAFGVKSRQFLATVAVRPCYRLALDGYLRQLGHLTDEIDQVAQTIEAQAQADPEAQLLCTMPGIGAYSALLILSEIGDVHRFPDSRHLCSYAGLVPSVHASGGKTRLGRLTKQGSTWLRWILIELSMHAIKGAPQFRQLYQRVARKHGRNAGRTAVARAMLKTIYAMLKHQEAFRPIEQGSTGQRLGAMAG

SEQ ID NO: 462957 - protein, 457 aa, unidentified
MRIVYQRCCGMDVHKDSVTTCVLLIDEYGEWRSEKRKFRTMTRDLREMATWLASLRVEAIAMEATGVYWKPVWDILEAENKFRLLLVNAHHIKQVPGRKTDQKDSEWIADLLQHGLLKASFVPPQTIRRLRDLTRMRVKIRQMLATFANRIQKVLEDANIKLGSVASDVLGVSGRHILHAVVEGQQNPEQLAALALGRLREKRAELQLALEGHITDHHRFQLKFLLESVQFGEKQLSQLEAEIRCLLAQVEPASVPPEDTVTAELEAPGAGAEAVATAVKSPLQTVVEFWDTIPGIDELTATTLVAEMGANMDQFPSAGHAAKWAGLCPGNKESAGKRLSGKTPKGSVWLRRSLCQAAWAASRTKNTYLAAQYHHLIVRKGKKRTIVAVAHTMLVMAYYMAKRQCTYQELGGDYFDRRNADTMQHRLVKKLKNLGYEVTLTPITTPPTAQEPTAQCC

SEQ ID NO: 462958 - protein, 338 aa, unidentified
MQTYAGIDLHSSNNFIGVINDKDKILYGKRHANRLDDVLRALDPFKDSLKGVVVESTFNWYWLVDGLQEHGYRLHLANPSAIQQYEGLKYTDDPWDSFWLAHMYRLGILPEGYIYPKEHRAVRDLLRRRLLFVRHSTAHILSLQSMISRNLGFKMSNNEIKKLKPADIESLFDCSNLVFMANNSLAAIEFLKKITKGIEKKVKSQVKLRKEFEMLLTIPGIGNILGLTINLEVGDIGRFPKVGDYSSYCRCVESKRLSNGKKKGENNKKNGNKYLAWAYVEAAQFARRYCVKAQSFYQSKEAKTKPVVAIKALSNKLSKASYYIMRDQVAFDEEKLFG

SEQ ID NO: 462959 - protein, 343 aa, unidentified
MEYYVGLDVSLKLTAICIVDQTGVVKHEAMIPSDPDAIAEFVQARVESVVRIGLESGPTSTWLWTELNKTGLPVICIDARHAKAALKMQINKSDRNDAVGIARIMQTGWYREVRVKALDSHAIKALLVSRALLVKIKRDIENQIRGLLKNLGLVIGRAKMNTFKTRAQELIEDKPALIAVVEPLLIAREAIAQQIADLDRKVMRLARNDAQVRRFMTTPGIGPITALCYLATIDDPTRFNKSRNVGAYIGLTTRRYASGETDWTGRISKCGDAMLRSYLFEAANVLLTRVAKWSALKAWGMRIAKRSGIRKAKVAVARKLAVILHRMWIDGTEFNWSSKEAVA

SEQ ID NO: 462960 - protein, 370 aa, unidentified
MKKPATLFVGLDVHKDSLSVAHVPDDRRAEVTYVGRIGTRPSDIDRLIRRLQTKADRLIVAYEAGPCGYLLYRHLTRRGIPCLVVAPSLIPKKPGDRVKTDRRDAVQLARLLRSGDLNSVYVPSVQDEALRDLCRAREAAVVTLKAAKFRLKSFLLRLGLHYTGRADWNDAHLRYLSKVVCPTPAQQIVFQESLRAVGEQVDRLKRLEAELTDLVPASRFAPLVQALQALRGVQNTVATTLIAELGDLTRFDNPRQLAAFLGLVPSEDSTGDSRRQGPITKAGNGHARRALVEGAWAYRYPAKVSPLIRKRLEGLPAPVQDIAWKAQVRLCKRYRQLIARGKHPNVAVVAIARELAAFMWAIAKEVPITA

SEQ ID NO: 462961 - protein, 356 aa, unidentified
MSSVSEVYQYVVGVDTHAKIHRYAIVDAGTGRVLDEAGFPTTGAGLARAVGWIGRRTAGDLDAVLVSAEGTGSYGARLSKVLLGAGYRVVDAPSPKRDRGGDKNDTIDAIKAARSQLSKDAARLADARAGDLQECLKVLLAARERMSGESTRTINALTALLRVYDLGLDARKKPGYPQIREVSRWRSRSESSAVAVARAEAVRLASRALQLRVELAANEKELGRIVAAHVPVLLDMPGVGPFTAAVVLSVWSHPGRIHGEAAMAKIGGVAPIEVSSGSKNEHRLSRGGDRQLNRALHTIARTRMRYDPQTIAYVERRTKQGLTKARSRRCLKRYIARQLYRTLQASADACPATVAA

SEQ ID NO: 462962 - protein, 337 aa, unidentified
MEYFAGLDVSMEETHICVLDREGALIREGKTVTSPKAISVFLAGGPVCKGVVFETGRMAPMLFHGLVELGISVQCIESRQAYQALKSLAGHKTDRNDARGLAHLARTGFYKPTHVKSLSAHAVRSLIAARKKLVGPRVTIDNQIRGLVVVFGVRLPRALSPAFKDAALAVSDGVPGLHTALCGLFAAREAILTAVAAIDGDIKKMTRKSKTCQRLMTVPGVGPITALAFAAAIDDPRRFGKSRDVGPYLGLVPQRHQSGEIDYTGSISKRGDVKVRTLLYEAANVMLTRYAAPLKLKSWALAIAARSTMGKARVALARRLAIILHAIMRDQTNFKAT

SEQ ID NO: 462963 - protein, 338 aa, unidentified
MNLSRIGLDLAKQVFQVHGVDRHEHVVCRRQLKRAQVRDFFRQLPPCLVAMEACGSAHYWARELRELGHTVRLIAPQFVKPYVKGDKHDAHDAEAVCEAASRPSMRYVPVKSAEQQAVQSVHRVRSRLVRARTALCNEVRGLLGEFGLIATRRGRAATMVLLETVTATEPASLPAPMGELLRELKDELQTLEARIARLERQIQAHVRGDARIQRLLAVEGIGPISASAVAASAGDARQFRTGRQFAAWLGLVPRQHSTGGQQRLGNISKRGDTYLRTLLIHGARAVVRCCANKTDARSRWLQGLLQRRPANVVAVALANKNARILWALLSRETCYRPG

SEQ ID NO: 462964 - protein, 358 aa, unidentified
MAQIAANTVIGMDIGLHRSWCEARSTATGELLKEKRFPNIPEECRAFVEDLPHPIRLVMEATGNWQYLYECWADLVEEIQMAHPLKTKAIASARIKTDRIDKRTLAHLGMADLVPQAYIPPREVRDLREVLRHRAFLVGLQTKVKNRIHSYCWKLGVAHDGTDLFGKAGLLWLRTVELRAPFQTLLHQDLKVLETLQQEIKQATQAIERLAKDDPQVALLLPIRGIGKYSALLILAEIGDVARFPGPKPLVSFAGLCPSTFQSGKVAYHGHLTKQGSKWLRWILVEAAQRYANAPGRLGARYRRLARKKGSKTARTAVARELLIAIYQCLKHGVRFQEHPPRRVQPNHPITPPGVPGR

SEQ ID NO: 462965 - protein, 344 aa, unidentified
MDYYAGIDVSLEYSSVCVVDASGKVVREARVVSEPEALVGWFGSLGLELARIGLEAGPLSQWLYAAMKQTGLAVELLETRHVSDAFKAMPVKSDRNDARKIAQLMRLGWFRPVHCKSITAQEIRAMLTARKLVQSKLLDLENSLRGILRGFGLKVGKTTRTNFAGRIEELVKGHPNLQTIGQALLRARAVLLAEFNGFEKRVRAMSRLHDKARLLMSTPAVGPIVSLTFACAIDDPSRFTSSKQVGPHFGLTPKKYQSGETDYTGRISKHGDASVREALYEAAHIMLTKPIKSCSGLKSWAMRIARRAGTNKAKVALARKLAVIMLRMLKDNVPFNPAAKPATA

SEQ ID NO: 462966 - protein, 343 aa, unidentified
MQAIATIGLDIAKSVFQVHGVDAAGQVVVRRQLKRRHVLAFFAKLPPSLIGIEACASSHYWARELQAVGHTVRLIPPAYVKPYVKRQKNDAADAEAICEAVTRPNMRFVPIKTVEQQGCLVLHRTRHLLIRQQTATINSIRAHLAEFGIVAPVGRRGVEHLLEVIADANDTRVPEVARACVATLGVQLQQLKTQILELDRRILAWHRSSEASRRLNHIPGVGPLLATALVASIADPKAFRSGRDFSAWIGLVPKQNSSGGKDKLGNISKRGDRYLRSLFTAGALAVIRYAKIHGTKHRPWLVALLARRPTKVAAIALANKLARIAWALMTKGSRYRQPAALRV

SEQ ID NO: 462967 - protein, 371 aa, unidentified
MSDGITHVGLDAHQETIVVAALLPGTQAPVEDRLANAPETVARWVRRLRSRSAGEVVCAYEAGPLGYGLMRQLEGLGVGCMVVAPALSPIKPGDRIKTDRRDARKLAELLRAGLLTPVHAPTPEQEAVRDLCRAREAAKGDEKRVKHRLSKFMLRRGLRWTLGRKMWTRAHLEWLRGRRLEHAADQATLDDHLLALEQLTSRLEALDAKLAAWAGEVPWAEPVGWLRCFRGIDTLTALSVVTELHDWRRFDTPRALMAYLGLVPSEHSSGGKERRGAITRAGNGRLRRLLIEAAWHYRHRPAVGFRLRERRRGQSPAVIAIADRAQHRLHARYQRLLERGKPHNKVVTAVARELVGFLWAALDPQDRRTTA

SEQ ID NO: 462968 - protein, 381 aa, unidentified
MTTLATHNPQDTTTAGPLFVAFELSEKTWKLGFTTGHGQKPRERTVTARHQECVLAEIAQAKHRLGLPDTAPVVSCYEAGREGFWLHRFLQAQGITNQVVDASSIEVNRRRRRAKSDGLDVRKLLSMLMRYHHGERQVWQGVKVPSVEAEDHRHLHRDLETLKQERASTTTRIQGLLSSQGIRLTSLPQLPEQLEALRLWDGSPLPPGLRRRVLRVYAHHTFLSEQIAAVEAERRAQLQTSTEAQSDKVRQLMQLKGMGINGAWLLVMEFFGWRAFTNRREVGGLAGFTPTPYQSGDSARAQGITKAGNRHVRWMTTELAWSWLRLQPDSALSVWFRERFGKGGKRLRRIGIVAVARKLLIALWRFLETGVLPAGAVLKEG

SEQ ID NO: 462969 - protein, 366 aa, unidentified
MPSIPRDDRPDQPDTDDETVILGIDTHKDFHVAFVISAQGQSLGHNIFATTATGYQQLLNWARGFGKLKRAGVEGTSSYGTAVTRVLRAAGVLVLEVNRPDKANRRRRGKTDVIDAETAARAVLSGRATAVAKTGDGTAEVLRMLKMAKDSAIKSRSQAINQLKAVIVRADPALRESLTGLSNARLVRRCAELDCNAPTTSVGAAAYTLRSLARRILALTGEIEDLNTHITAAVATSHPALLDCYGVGPDTAATLLIAAGDNPDRLRSDGSFAALCGVSPIEASSGKTNRRRLNRGGDRQANSALYTIVIARLRWDTTTKSYLARRETDGKTRREAIRCLKRYIARELYRIITEPEPAATALLTAS

SEQ ID NO: 462970 - protein, 401 aa, unidentified
MATVRDNTTRVKRFRELKATLRTDRTRLLVGLDIAQAEHVVHLRHAHTRVVTPALTIPNTTRGFTQLWARIQQAQRATGCREVVCGLEPTGTYHQAVATFLEAQGADVVFLSSSVAYWNRRTQDGTWDKHDRKDAANCADLLEQGKVLFASQPTGPLAELRHLVKLLRRARTELASCKARWRTTLRPALAPAGEALPQRLWAELPAVLQAWERAAPGRPAMPKGRLSLGLATACADLGAQVTAVQARLAGLEATLAPLAERLPAYALLRSIPGVGPTVGAVLLAEIGDIGWYTKFSQLRKLAGLDIVQVQSGQYAGQARISKCGRSLLRWALYHAAVGAARTAVGRARLAAYKAKRRGDRFAGFKAIVELAAKQLRLVWGVWRSGVPYDPTRAGGLRRQVR

SEQ ID NO: 462971 - protein, 347 aa, unidentified
MARLARIGIDTSKSVFQLHGVDEKEQVVLRKQLRRRQLLMFFAKLEPTLVGLEACGASHHWARELQKLGHQVVLIPPQYVKAYVGRNKNDKIDAEAVCEAMSRPKVQERFVPIKSVEQSAAQMLLGVRESLLKRRTQLTNTIRGHAAEFGLVAAKGLDKIEPLLARIADDDSLPALTKEMFAVLGQEYAELEPRIAKIDKKMLAFHRSNEVTRRLMEVPTIGPIGACLLVSKIVDPRAFRSGRRCAAWIGLTPKDHSTAGKQRLGGITRAGDERLRAVLVSGAMACIRHAKNRRSNSPWLIDLLKRKPPKVAAVALANKTARIAWKLMTSGERYDPNRSVARQGLAA

SEQ ID NO: 462972 - protein, 341 aa, unidentified
MSTASALYVGMDLHGDNVFCSIMNAAREPLYDRKFPNDLEQIVEVLAPLRARIRGMAVESTYNWYWLVDGLRANDFGIKLANPARMQENIGLKFANDKTDARFLARQLAMGTLPEGFIYPEETRGVRDLMRRRIRLVQTRTREWLSLECLVARHTGQQMSMGDLQTCEIAKLLEGHPHALNMAQASFRHIAFLDQEILAMEKAVLADLPDRDAYQRLMTVPGIGPVLARTILLETGPIERFPHAANYASYCRAVRSIHTSNGKKKGEGNAKAGNKYLSWAFVEAANHAVRYSPELRAWFQRKQSRSGKRVIAVKALACKLTKACFFMLRDKTEFDVKRLVG

SEQ ID NO: 462973 - protein, 341 aa, unidentified
MKKTTTISIDLAKNVFQVAVFNKHSKLKSNQKMNEKKMALFVAQHPEANICMEACGSAHHWGRRFLKEGHEVYLVPAHIAAKYRSGNKNDPNDVLAIYEAAQRPDSYFVAVRTLEQQDLACQHKLRQGYVKQRTQLANRIRGFGLEYGVKIPKGIGKLRRRLPEALEEAENELTVTARSILRNLLDQLLLLDQLIKEATEALIHQTQQIAACRELVRMPGIGWLGAGALYARLGNGSAFRRGRDASASIGLVPGHSGTGGHNKIMGITKGGDRYLRALIIHGARSAVSNVRDKQDGLSCWIRKQLAVNHMNNTTVALANKLVRMAWAILSSGGQYREPVAQ

SEQ ID NO: 462974 - protein, 432 aa, unidentified
MKAVVERCAGIDVAKKTLNVCVLTGAADLEPEAELGLFGTFNADLDRLRNWLLEKGCQEVVMESRGSYWKPVYAALEGSGIEVQLANGEDVKARRGHKTDWDDCQFLANLLRHGMIRASFIPPQAIRDLRDLTRRRRQLCGAAVSERNRVQKVLEEANVKLGSVLSDVFGVSGQLMLEKLLDGEPDVGAIAELAQRKARQKIPEIRQALEGHRLRDHHRRMLRLSLEHIAFLEGQIGVIDEEVGKLIEREGYQGSFDLVRSVPGVQEITAAALLAETGVDMNVFPSEGQLSSWIGVAPGNRISAGKNKSGATTRGNRWARTTLVECAWAAAAQKNSVLQERFRRLSVKGRKVALIAVAHQLAIILHRTLSSKLPYQESAQPLPDERKRQRLIRHYVRRLGKLGVTVHSLRPDTESHHKTKTGTTIHRHHGEP

SEQ ID NO: 462975 - protein, 355 aa, unidentified
MHSTLIINFICKDMKDLSTLQHFVGCDISKDTLDFALYERGKDYRTFEHIQVPNSPDGFKTMRKWLRTLKVRMKDAVIAMEHTGSYSMALSEWCFGKGITFVMLHPLDVKNYGGTSRNKTDKADSQFIADYAYTMREKLKPSVPESANIKQLRQLRNERQLAVRSRTAYINLLKSMPDNVDKRRIEKIIKEFEAQIKQIESEMNTVISRDKAILANYDLLLSIPGIGLVNAVTTIIATGNFTRFQTARQYAKFCCVAPLSRQSGTSVAKGDHVSKAGHNEIKSVLTEGARSAITHDSQIRAYYERKKSEGKCHGCILNAVKFKLICRMFAVVSRQRPYVDVEAYRSRTVKSADSA

SEQ ID NO: 462976 - protein, 441 aa, unidentified
MQNFIKINDNDNVVVALNAIPQGETVAVEVSGRECRITAREEIPAGHKMAVCDIPAGGEVLKYGYRIGNAKEEIPAGAWIHTHNVGTALGDLLEYSYEPVAAVLHEYGIRVTVINPLFIKQSGGGSIRKVKTDKADAMKIAKYALDNWVDLREYTPMEAIREQLKLCSRQYNLYMKNVVALQNNLISLTDKTFPGVNELFTSPDRADGSQKWIDFVTTFWHCECICLVSEAAFTERYRKWCKRKGYHFSTQKAAELYMDSMGHITTLPRNSNTKLLITNAATELASAKATLAVLRTEMTRLAQQLPEYETVRAMYGVGKTTAVQLMAEIGDVRRFPRRSSIVSFAGVDPAVDDSGKHISKSNPTTKRGSPHLRKTLYQIVCTYLRKAPADEPVYQFLDKKRAEGKPYFVYMTAAQNKFLRIYYARVKECLIAADTKELSAD

SEQ ID NO: 462977 - protein, 387 aa, unidentified
MSGPFPHHFPLFLMARTLSSPPLKYVVGIDLAKDTFVACLGSIDAAQRVHVAGKLAEFANDAAGFAALHRWVVTGQRQAGLPVSYVLEATGCYYEELAYYLDAQQLTVSVLLPQKVRHFALSTEVKSKTDALDARLLCRLGLERALPVWRPLTPALRQLRLLTRERGSLRGQLTQLQNRRHAAQHSFEPDTRALARLAQLEALLAAQVAEIEAQMAQLVAADPVLACKIGHLTSLPGVGLVTAATVVGETNGFALVENERQLASYAGLDVVQRQSGQLARATSISKRGNARLRTALYLPAVSSLRYNPHHQLFYARRRAQAPNGKPGVIAVMRKLLLLTYTLWKKDCPYDPHHGLPTRLEKEVAPTTDRAGATQDEPALVLLEEDQR

SEQ ID NO: 462978 - protein, 400 aa, unidentified
MNELRVAVDVGSRFHQVAIGDGSGRLLDEFQIDHGRAGFEQFFERITRHKASDIRVAMEGYNGWARPLDQQVLAHGWRLYNVNNLKLARYKEIFPAPSKSDAIDTRRMLELFAFDSQRPLGRDVLQEVTVSTSAQRQLKYLTRRRRQWVAERATRLTRLRVDLLSVCPDLLALTKAVDNRWFLRLLTCRDRLTALPRLHANSLASIRGVGAKTLPRIRAWQKIATFGANIDLADTDIVADAAVILALDEQIKALEARIDTLARDCPMATRLRSLPGFGATGTAELSGEIGALQRFGTEASLAVYLGMAPLDHSSGLNHRSKRPKCVNSRCQAALMTCIVRHMACVPESRAYYDRKRAQGKRHNQAVRALGRHLVRVIWRMLNDERDYEIRSESSEQDLKI

SEQ ID NO: 462979 - protein, 398 aa, unidentified
MTESSDYESVQVFIGVDVGKDTHHAVAINRSGKRLFDKALPNDENKLRSLISDLKQHGQILLVVDQPATIGALPVAVARSEGVLVGYLPGLAMRRIADLHAGEAKTDARDAAIIAETARTLPHALRTLKLADEQIAELSMLCGFDDDLAAQTTQASNRIRGLLTQIHPALERVLGPRLDHPAELDLLQRYPSPEKLASLGEKKLAAQLCKLAPRLGKRLAADIAQALAEQTVVVPGTNAAAVVLPRLALQLITLRKQRDEVALEVEQRVLAHPLYPVLTSMPGVGVRTAARLLTEVACRAFASAAHLAAYAGLAPVTRRSGSSIRGEHPSRRGNKALKRALFLSAFAALRDPLSRAYYTRKMSQGKRHNQALIALARRRCDVLFAMMRDGTFYTPQAS

SEQ ID NO: 462980 - protein, 342 aa, unidentified
MAHYVGLDVSLDETSICALDENGNTVWQGKTSSKPEAIAKALSVKAPEAIKIGFETGPLSTWHWHSFKEMGLPVVCLDARHAKAALSMQVNKTDANDAYGLAQIVRTGWYKEVEVKSMDAHLIRALVSARSNLVQLRTKLSTHLRGILKTFGLFVGTTWNGAFEERVRELCFGIVDLESIVEAQLSVWRSVCEQIENLTRQIQAYVRSDQVCRRFMTAPGVGPITAMAFKAVIDDPGRFRKSSSVGAYLGLTPRRYQSGEVDKSGRISKCGDSLLRYYLYEAANVILSRVRKWSKLKAWGAKLSKRIGKRKARVAVARKLAVILHRMWVDNADFKWSDAQPA

SEQ ID NO: 462981 - protein, 316 aa, unidentified
MAEETYIGIDVSKAELVVAVRPSGERMTLANDRAGIKRLVGRLGEIKPQLVVVEATGGLQRQVVAGLWMAGIAVAAVNPSWVRNFAKGRGVRAKTDRKDAELLALYAERERPEARPPADAETQALQELVMRREQLVEMSVAEKQRLHRASGTMRKELRHHIAYLEGRIKELEEDVDKTVRRSDAWRRKSEIVRSVPGFGKGFCAMVLAKVPELGTLNRKQIGALVGVAPMPDDSGSRHGRRIIAGGRFEVRNKLYMCAMVAARSNPVLKQFYERLVARGKPKKLALAAVMRKLIVTLNAMIKTNSLWRPPCPDPGV

SEQ ID NO: 462982 - protein, 421 aa, unidentified
MDFEVKHLICAGLDVHKKTIVAAVCMTDPVTLEAAYKVKSFSTNNSQIAAMRDWLLSYNCHDVCMESTGKYWIPVFNILETHMHVVLTHPKYVKAIKGKKTDKRDAKWIANLFRFDIVKASFIPPADIRALRELSYMRSAEKNRFQNSMTISRIRIDCVLTDPFGKTASSIMDYLLSDVPFDETECAKLIHGRVKASNEEIFDSIRGFEILSEQRFKMSHAKQHMELLSSYMDDIETELFRLSRSYDEVIKRISGIVGFTERSALFVISEIGADMGVFESAKHLCSWAGLTPANNESANKKKSTRCSKAGQYLKPLLIQCALAAVKSKKNPYYAIKYKRLAKRRGRKKAVIAIARMMLTSIYHMILNNEEWKPDDYEAIIHPSKPVKVALTLDNVIQFLGEQGADPETLKLLQQQCAVTPG

SEQ ID NO: 462983 - protein, 351 aa, unidentified
MVIIGIDPHSTTHVAAAVDEHGQLLGSIQVGASPQQLQGLAGWVGGFQGPRLVAVEGARGYGLALTRVLLAAGERVVDVAPALTAAGRRRGRARGKDDRIDAIAVARLARQEPGLPALSLVGLNADLKLLVDARDQLVVEAGRVRNRLHALLLVLAPGYRTSTGALAKRPALRRARRLIERAAPGEAVRARLALAAIARLEALEDECAQLEHEVKTALTPLRPTRLLAICGVGALTAAKLLGETHSVDRFASAAAFAAHTGTAPIPVSSGNTQRHRLSRSGNRQLNRALFTIAMCQARWDPNARAYLARKRSEGKSPAEARRCLKRHLANVVYRAMVADAQALQATPPPTA

SEQ ID NO: 462984 - protein, 344 aa, unidentified
MKTYAALDVSQEATAICVVDESGRVTAEKKLTTCPDVISTWLGKHAAGLVRVGMETGPLAVWLWNELHERGVPIVCLDARHAHAALKMRPNKTDRNDAAGLAQIVRTGWFKQIRIKGRESYEIRSLLTAREVLVRIRVKLENEIRGLLRTFGVLFGKAAGGFARRADEIVTGELEASPSMRLVIETLMQARAAILERIKVLDRQVLAAAKRNPTAQLFMTAPGVGAITALSVASAFDDAARFRRSTSAGAYLGLTPRRYESGEVSRNGHISKHGNSMTRKHLYEAATTLLTRTTAFSTLKAWGLRLAQTSGFKKARVAVARKLAVILHAMWKTNTEFRWSKETA

SEQ ID NO: 462985 - protein, 362 aa, unidentified
MNKIIKSARRMETTKNKPEMTMGIDVGDRFSHLCVVDNEGEVVERDRIRSTEVAFRRYFEGTARLRIALECGTHSPWMSRLLKQLGHQVIVANARKIPTITESESKNDDRDAEQLALMAAFNPKLLSPLEHRSLARQQDLNLIQARAILVKARTMIVNALRGLVKSAGGRLPACSAQSLPTRAPAAVPPALTDVAGPLIEQIARLNLQIDAMDEQIEKLAIKYPEIGTLRSVPGVGPLVAAAYVLTLDRPDAVPSSRSAGAFLGLRPGQSQSGDSDPQKRITRTGNTYLRCLLVQSAQYVLGRFGPDSALRRWGLKLAQSGGKRAKKRAIVAVARKLAVILHSMWRSGQRFELFPQPAQAQA

SEQ ID NO: 462986 - protein, 433 aa, unidentified
MNTPHPYDLVIGLDRSDKKADLSLITTATGQRRSAIIDTAPEALWEWLLALRQEHPQARVGLCLEQPAVHLIAFLEAYEWITLYPINPITLQKYREAFVTSRAKDDAKDADYQADLLLTHHAKLKPWAPEDGATRAVQQRVSHRRAVVDERTALTNRLIALLKSYFPQALVLCGEDLWRPLATAFLLKWPSLQAVQKAKPATLKTFYHLHGSRSAKLMDQRLALVQRAVPVTDQTAVIESFVLRVQLICRQLQLVQRSVAEFDRQIAQAYAVHPDHEIFASLPGAGPVLGPRLLASLGSQRERFRAAAELQHYSGIAPVTKKSGGSCYIHRRYLCPKFHKQSFHEFAKESILWSRWAAAYYLQQRTKGSPHHTAVRALAYKWQRVIFRCWQSRTPYREEIYEAALKKSGSPLVALFDRVELGKSPFKNPVKKS

SEQ ID NO: 462987 - protein, 414 aa, unidentified
MVEETIAWFAGVDWGSAKHQACLLDAQGGIVGEREFPHSGTGLSELADWILSMTGIASAVAVAVEVPHGPVVDVLLDRGFIVHAINPKQLDRLRDRFSIAGAKDDRRDAYVSADGLRTDRHLFRRLHIADPRLIELRAWSRLAEELQEERVRLSNRLHQQLWRYYPQMLKLTDDLTATWLLELWLKAPTPAKAARLRVSAVERLLKQHRIRRVNAEVVLRTLRQPAIKVPDGVAVAAGIHIHSLIVRLQVVSRELNDATRKLDELCTVIGETGAASEERAEHRDVAILRSLPGIGRINLATLLSEASGPLSRRDYQALRTLSGVAPVTKRSGKSHVVVMRYASHVRLRNTVYHWARVATQHDHQSRTRYAALRRRGHSHGRAIRGVADRLLAVACVLLQRQTLFDPHFRQATAS

SEQ ID NO: 462988 - protein, 352 aa, unidentified
MWAGREAVGPLVLDETVSRLGPRPAAHHQPEQLHGAAYTGPRTTGTGTMNIHRHVIGIDVSKHHLDIHDRGARRIANDATAIAGFVAELPQHALVVFEATGAYDNALRQALEAAGRHHARVNPAQARDFARAAGVLAKTDAVDARVLALMGARLDLRHSQPPSPARRQLAQLNQRRDQLVLMRKQEKTRLADAAGLADDLVDHIAWLDQRIAALEQRIQHFVAADPELRQAAHLLQSVPGIGPVTATTLLALMPELGQRRRRAIAALAGLAPINADSGTKRGQRHIRAGRRRVRTALYMAAVTGTRANSRLKTIYNRLRDTGKPPKVALIAIARRILVIANAILRTNTPFHA

SEQ ID NO: 462989 - protein, 468 aa, unidentified
MSTTPTRTLRRREVPIVSKRKVALPPQLKRVNLNAAGIDIGAEEHWTAVPPGRDPEGQDVRRFGAFTGDLCALADWLKRCEIETVAMESTGVYWISLYELLVERGFEVLLVDARQAKNVPGRKSDVLDCQWLQELHTYGLLRGAFRPVDQVCILRNYLRQRSMLVAYASHHIQHMQKALEQMNLKLAHVVSDITGLTGMGIIKAILSGERDPVKLAKLRDPRCKSSEATVARALEGHYREEHLFALQQAVELVDFYQRQISACDRQIEACLQQFEEKSTETPLTTRSRKRRRSGMAFDARSYLYRMTGVDLTQIDSIEANTALTVIGEIGLDMSRWPTEKHFGSWLGLAPGSKISGGKRLSSRTKPSANRAAAALRLAAQSLNQSQSALGAYFRRLKARLGAPKALTAAAYKLARIFYRMLKYGVDQGEAAYEERYRDRLLRNLKRRAAELGFQLTTINSSTGRPALT

SEQ ID NO: 462990 - protein, 334 aa, unidentified
MGKITTAGVDLAKNVFSVHAIDETGAVVFRKSVSRERLLPLIAQWPACLIGLEACSGSHEWARRFRAFGHEVRIMAARFVAPYRRSGKNDGNDAEAICEAVRRPSMRFVPVKSAEQQAVLSLHRVRQGFIEERTATINRIRGLLAEFGAVLPNRADEVRRGAAVVAEPLPGLARHAVADLLSHLDVLDERITAYDRELERLARASEAASRLMTVPGVGPLTALATVASVGEAHEFENGRQFAAWLGLVPRQWSTGGKTRLGRITKRGDAYLRTLLILGARAALQVAARRDDRLSRWAVALKERVGYHKAVVALAAKNARIVWALLAEGTSYRAR

SEQ ID NO: 462991 - protein, 392 aa, unidentified
MYIVGIDIGKNHHEASIVSPEGKQIGRSLRFATTHKGADSLMSFIFNNIGNSSCIFGMEATGHYWYPIYSFLKARGYTIYVINPIQSDSLRKMYIRQTKNDSIDSFLIAEVIRFGQFTTTSMADENILAMRQLCRYRDSVISSRTEIKLRISTIMEQIFPEYEKQFSSLWLSTSMGILEKYLTPENIENAPIDELFEIIKDKSHNKLTMKKAISIREAAADTFGIKIAQDAFSFQLKQLIDRMNFLDKQIEALDCQILEYYEKFDCYLHTIPGIGMIAAATILAEIGDINKFKSSSALVAFAGIDPTVRQSGEFSSTHNHMSKRGSPYLRHTIFLAATTCSFHNSPLNAYYKKKREQGKHHLTATGAVARKLTTVIYAVLRDGKPYEPKKFC

SEQ ID NO: 462992 - protein, 384 aa, unidentified
MTATTRIENGTAEGTTLFVSFELGESTWKLAFTTGRGQKARQKTITGRQQDAVLTEIERAKRRFELPAGCRVVSCYEAGREGFWLHRWLVSRGIESHVVDAASIEVNRRLRRAKTDRLDASRLLALLVRFAEGECSVWSVVHVPSPEDEDRRHLHRELLTAKRDRTRIANRIQGLLANQGVRVDWRKPLPAQLSMLRLWDGSSLPAGLCERLGHEWDRLELLNQQIERLERERREQIREAADPASEKAKRLVALKAIGSNSAWLCVMEFFGWRKFRNRREVGALAGLTPTPYQSGESSREQGIAKSGNRHVRAMAIEIAWGWLRFQPKSQLARWYEERFGRGSSRLRRIGIVALARKILIALWRYLETGVVPEGAELKSAATVR

SEQ ID NO: 462993 - protein, 365 aa, unidentified
MQTIAVAVAESGGEVRSLGVIPNRPESVGRLIRKLGKPEQLRACYEAGPTGYVLYWQLTQLGVKCEVVAPTLIPVKAGDRVKTDRRDAEKLARCYRSGDLTAVWVPDAAHEALRDLVRARLAAKRDELRARNRLSKFLLRHGRRAEVGTKAWTGKYLEWLKAQRFEQVAQQVTLEDYRHEVEHAAARIARLERSIDAAIEALPVKMRAVVEALQSLRGVAQISAVSIMAELGTVSRFERARQLMGYSGAVPWEDSSGERVHRGSISKAGNAHLRRIVVEAAWSYRHRPAIGRSLALRQRHCSPSVRELAWKAQHRLHQRYARLTARGKSKQHAVTAVARELLGFIWAIGVEAERSQDVVQLRRAA

SEQ ID NO: 462994 - protein, 264 aa, unidentified
MYCGIDWHARTLYVCLLDHHGEIRRHRNMPARPETFLKAIAPSRDDIVVAVACMFPWYWLADLWARAGLPCGLGHALSMQAIHGGKAKNDKSDAHKSAVWLRGGMLPQAYGSPAAMRATRDLLRRRMPRRRKRAELLAHIQNTNSQYHLPEMGKKLAYKGNRDGVAERFLAPAVQQRVEVDLALLDHDERRLRDVARTSVQTAKQPNAPALDRRPSIPGIGKMLRLVLLYEMHASTRFPRVQDCVSYCRLVKCAKESAGKRYGT

SEQ ID NO: 462995 - protein, 388 aa, unidentified
MPYRIAGIDVHKRMLAVVVADIEVEGEYQFEQRLFGSNPEQLRLLAEWLIEQPVEEVVMESTAQYWKPVWGVLERYWKPIRQKREDASPMSGTLHLAQALSNRGRRGRKNDFRDAERLLKRLVAQELTLSFVPYAEQRLWRTVMRGKYQLTRDHARLRNRVESMLEEAHIKLSSLVSDLLGVSACTELNPVYRRLLKMALEELQFLEQQIGKLEQEMASLLSQHQDAVQRLAEVPGLGVDSAQQIIAEVGAEAATFASAKNLSSWAGACSGEEESAGVNPNHRSPKGNRHMRRILHQSANAAVKHKGSIFEVVYRRLVPRLGHNQAIGAVAHRLCRLIWLLLHRGVRYEERGPAVNQRSKQQRTARMIRELRRFGYRVEPLTVQLNPA

SEQ ID NO: 462996 - protein, 363 aa, unidentified
MNKIIKQVLGVDVAQKELVVTIGRMHNDWSPELYAHQVFANTHKGFSSLMAWVKKNTEASVPVIFVMEATGVYHESFAYFLDERSQQVCIVLPNKISNYMRTLAINTITDKTAANAICQFGLERKLDTWHMPDPTFKKMKQITRERDQIVAERTLCKNQLHAEMTEVTPNKSSIKRFEERIKLLDKHEKQINDELKLIVNSDVEIKKNVQLMCSIPGIGNLTACTILAETNGFDLIRSKKQLTSYAGLDVREKQSGTSIKGKPSISKKGNRYLRKAMHLPALSAIRHNKRYKAVFARIVQKQGIKMKAAVAIQRKLLELTYILFKTQKPFDVKMFEESIEPIESSELEIKKEVDEIQTTSFAV

SEQ ID NO: 462997 - protein, 331 aa, unidentified
MSNIIGIDVSKASLDCAYLRDPDQKRAKRLSCHNEVSCFAALVAWAEARSGLPVQSLAFIIEPTHIYHEQLVQFLHNTGATVHLVNPGRVRKFAEGIGILSKNDLVDADLLVRYGLMARNLIAWVPMPQEFNDLRSLLNRLDVLERNLRSELNRQEKVGKTMGFHRLEQQSIARSVKRLKAEIMTFKNAIGQCIQSTPSLQHNFYLLCTIPGVGAKTAWVMMVILGSRTFRSAPEVASFLGLNPIEKRSGKSQYRRPRLSKSGSGHYRQQLFFPAMVATRKNPDIQALYERLLAADKTKMCALGAAMRKLVHICYGVVKNQTPYRAQTIQS

SEQ ID NO: 462998 - protein, 421 aa, unidentified
MRKADTGKVKVVKDDTLIVAIDVGMEMNRGYCTTSDGRSTKPFKFDNTREGLDTLWSMIMTSRDRFKCNEVIVGYESTGPYGEPMVHYMMKKPVRVVQVNPMHTKRVKEINDNSPLKTDDKDPRVIADIIKLGRALSIVIPEGDAAYLRRLNNSRERHVRERTALVNQLQQLVFLLFPEFKKVIKDIKCRTPLYLLKKYPTPEAISVLETHVLGEEMRKKSRGKFREHHADMLINLARNTIGIKEGVSGLSMDIRHILVQLEMLKNLIAEIEGEMEIALGRIPYSSKLLSIKGLGVVSVAGIIGEIGDFKKFGTRPEIMKLAGLDLYEISSGKMKGQRRISKRGRSLLRKILYYAAIQTIRKNGILHDYYTRLTDRGMKRMMALVAVSRKLLGIIYAIVRDDSEYSVNFESMKRQVIKKAA

SEQ ID NO: 462999 - protein, 406 aa, unidentified
MLFVGVDWAEAHHDVCVLDTEGRVLGRKRVVDNYVGLGELHALVAEHLGNDESDQVVVGIEKDRGLIVTALIAAGYQVYGINPMASARYRDRHHTSGAKSDPGDAKVLADLVRTDRQNHRQVAGDSALVNAIQVLARAHQNIIWNRQRQVNALRSALKDYYPGALEAFGTDLSHMDAVAVLAVAPTPALGQTLSRAKIVSALKRSGRQRKLDERAAQIQTVLRREQLRQPPLLEDAYGKVTSSVVRTISQMTAEINELEGALSESFEQHPSAKIVRSLPGMGTVLGARVLGEFGDDPNRYCDAQSRKNYAGTSPVTKASGKSRVVLARHSRNRRLADALDRMAFCSLIASPGARHYYDEMRAREKSHQKATRQLANRFVGILHACLERGCLFDEEIAWPTSQDIAA

SEQ ID NO: 463000 - protein, 316 aa, unidentified
MESQEVSFPQIVTVGCGIDVHQAVVVATVRKSDSSYETRSFEAYTSSLKELRDWCKHERVTHVAMESTGVYWKPVSNILEEDFEVILVNARHVKNIPGHKTDKKDSAWLSKLLLGGLLKGSFIPPVEIRDLRDIVRYKKKQVQQVSSESNRLYRILEDANIKLGTVMQVGSVSARKIIADLLEGVKDPIILAKHVHGKTKASKTEIIKALEGNLREHHRFMMKAIQQSIYAKEKLIKELDAQIELMVERYSVEIDLLTTIDGVGKDSAIAIISEIGTDMSRFPNEHHLSSLGGMSPGNNESAGKKKAPRPSRETNI

SEQ ID NO: 463001 - protein, 338 aa, unidentified
MNIVFLGIDLAKNVFQLCGLNQAGKPVYTKRPGRKELLQTLANIPACLIGIEASTGAFYWQREFEKLGHKVKVISPQYVKPFVRGQKNDGNDAQAIAVALMQPTMQFVQPKSPEQQDIQALHRARQRIVNHRTATVCQIRGLLLDRGIPIGSAVSRVRRAIPLILEDAKNGLSSRMRRTIAELYDLFNDLGRRIHFFDKEIETVFRQSEACQRIAKVKGIGPETATAVVAVIGKGTEFKNGRHFAAWLGLVPRQHSSGDRQVLMNMTKKGDKHLRTLFIHGARAVVRVATNNNDGHMNQWVNQLKERRGFNKTTVAVANKNARIIWSMLRNDTEYQVV

SEQ ID NO: 463002 - protein, 349 aa, unidentified
MRKLMAGMDLHSNNVVAGIVDQDGKRIAHQKLDCDLGKIIAFLKPFKKELVKIAVESTFNWYWLVDGLKAASYPVVLANPAKIDQYSGIKHADDKNDAFFLAELCRLEILPTGYIYDPELRPVRDLLRRRLSLVHQRTALMLSFESLFARTTGEKMGLGRLKKLDVPAAQKLYDHPANQLIAGVQMKHIEQLTESIEQIEKVVIKAAKQLPYYAKLQTLPGVGIILGITITMEVGDIKRFKDAGHFASYCRTVDSKCLSNGKKKGENNHKCGNKYLAWAFVEGANFAKRYDEDCRKWYDRKAAKKGTVIATKALACKLAKAAWYLMTQGVDYDRNRIFPELAGALSKRR

SEQ ID NO: 463003 - protein, 366 aa, unidentified
MHSTTVAVDLAKNVFELAVADSEGKIGERLRLNRARFSSFFVHRAPCRVLMEACGSAHYWARRIGTHGHTVQLLPAQYVRQYVRRNKTDRADAAALIEAARCADIQTVPAKSLEQQQVLVLHRLRSQWMCTRQRYLNTLRGLLREFGIAVPLGARLARTRIAHYLAQPPQELPAAVRPLLAQMLSGVKQLEQQIEQVERELTDLSRTDPVVQQLRQIPGIGLLTSTAIRATVGDVQRFPCGRRFASWLGLTPREYSSGERRRLGGISKRGDSYLRTLLVHGARSALLAAHRQQRTGRPLDHLRQWALQCEQERGHNVATVALANRLARIVWATWKQEEPSTVIGPARRSDRRSPSSPQRSCFRSHS

SEQ ID NO: 463004 - protein, 444 aa, unidentified
MLRFVGCDVHKRTAVFTILLEDGPLFATYTVPVTREALTAFAERQLGAEDRLAMEATTNTWAVAGVLRPFVQEIVIGNPLRVRAIAEAKIKTDKVDSRVLAELLRCDYLPMVWQPDKETQRLRRLTHRRAALVSDRTRLKNRLHSILHHTLVPLPDGDLFSKKGIAWLRQVPLAQEEALARDSDLRLLELTELEIAELDELLVREAWQDEKVRLVMSIPGIDYTVAQTCLAAIGDVSRFANAKKLAAYLGLNPSTRESGGHCYHGKITKQGNAHARWLLVQAAQHLGQYRGPVGQTMRKILRRKNRSVAVVACARKLAVLLWHVLSSGEPFRYAPPKSLQAKFSRLRVRATGQRRRGGVAKGTPRSAQYGHGRTRALPSLSQVLVENGLPETAPLAKGERVMLERKKLEGFYRQLQVPSRIEANARRAQVEECEEDAKSELTQS

SEQ ID NO: 463005 - protein, 341 aa, unidentified
MLLIGCDYHPSVQQIAWVNTETGECGERRLAHCAEAEQFYRELKQSGASVRVGIEATGHSRWFERLLAELNFEVWIGDPAQIRAKQVRKQKNDRRDAEHLLKLMLENHFPQLWVPSPENRDVRQLVWHRHRLVQMRTRVMNQLQAMAMNEGIRRKRGLWTQQGRAQLEAFTLPPWTHRRRQELLELLDRFDPSIDQLTKAIEQEAQRRPEVERLQTHPGVGPITALAYVLVLGTPERFACGKQVGSYLGLIPCEDSSADRWRLGHISKQGNALLRYLLVQSAMSAARVEDDWRRKYVHLAMRRHHAIAKVAMARKLAVRLFWMWRRGWDYQQLQQFGSHVG

SEQ ID NO: 463006 - protein, 390 aa, unidentified
MLYLGIDIGKFHHAAALMDQRGKVIATLPSFSQTENGFQKLLALISSQLPPTEELRIGMEATGPYWIPLAEWLKTHGWSPVILNPIKTASLRNYGVRGSKTDNIDSVLIANTLRIEGEQPQPASPKHSDELRHFTRLRADMVKDRTRIALRVTSLLDRLFPELLSSFSKTLSPSCLALLSEASTPSNVLALGEEKLTTLLHKASGGKLGATRAKEIMDKAAVSVGVTSQALEEVLALLLEQINLIDSQLRTLVHRITELYEQANLYFTSIVGVGTLSAATILGEFGSVSKFAQPKQMVAFAGIDPKLRNSGQHQGQVHISKRGSRYLRRALYLACQVAVRNDDYFHSIYQRHRDKGKSHKEAIIAVMNRFIHVLYAIWRDNRPYYPLTSA

SEQ ID NO: 463007 - protein, 374 aa, unidentified
MYGLLPLAGVLRYKVKSIHSNQLLPGVHTMTQCNVIAIDLAKDIFQVCIMTPNGKITFNKAMSRAKLKEWLTKQKLSLVAMESCGGAHYWARFAKSLGHKVMPIPPKQVKPFRTGQKTDANDAIAIAVASRAANIKPARVLTVEEQGLQSVGKMRDLLDKQKLQLSNQVRGLLLEFGIIINKSIKSFKARIPEILEDAENQLSMPMRKSLFQMWALYSRLEDDFQVMNKGLIQLTGQDDDCKRFMKLEGVGPITSMRLKIQLGSGEHFKSSRQVSACIGLTPKQHSSGGKVQLGSVGKSSCDKPLRSCLFLGARAVVSKLKNRPAKTEKERWLKALIERRGANCASMALANKNARTAYALLKNNTDYNPVLIAA

SEQ ID NO: 463008 - protein, 364 aa, unidentified
MENVRFVGLDVHAASIAIAVAEPGRGEPGQLAVIANDTALLVKRLRRLGRVKCCYEAGPTGFCLQRALAAEGIDCVVVAPSLVPTLVGDHVKTDRRDAARLARFLRSGDLTEVNVPDEATEAMRDLERARGDAKKAQLVARHQLGKFLLRHGRRYGGKTAWTVKHLEWIKAQQFEREAQQRVLEDYLRTVGDQTERVDRLTKSILELVETWSLRPLVKALQALRGISVISATVLAAELGDLTRFESAPKLMGYLGLVPSEHSSGEGRRLGRITRAGNGHARRILVEAAWAYRYRPRQSRAITLRSEAVSPEVRRIAWRAQERLCAKYRKLTARGKNKNKTTAAVARELAGFVWAIAHEKKLLTH

SEQ ID NO: 463009 - protein, 364 aa, unidentified
MQEPTHIGLDVRKETIAVAVPRAGTVECDERVIPNTPEALRKLLSRYPDRSLLRTCYEAGPTGYDTQRLITSLGIACDVIAPSLIPRRSGVRVKTDRTDARNLARLHRAGELVAVRVPTPAEEALRDLVRAREDLKNDRRIARQRIRSFLLRYGKRYPAPGSRWSFRFEVWMRALRFDEPASQAAFDHLVGAYFVRDSQLGAVDAQITELALLEPLAEPVARLRAFRGIDTLTAVTLLTETCDFRRFATAGSYMAFTGLTPSEHSSGASRHQSSITKSGNAHIRRVLVEAAWAYRYAPAVRGKLRARQIGQPPEVVAYSWAAQCRLHGTYRRLAAKKGPNKAVVAVARELAGFVWGAMTDNMAV

SEQ ID NO: 463010 - protein, 407 aa, unidentified
MLIIGLDIHRAFAEAVAWEEGRLRRLGRVDMRRDLLAAFAAKLSPNDVGVIEATGNATSAAAVVAPHVKKVGIANPKQVFIVAYAKIKTTIDADVLAQLYASGFLPEVWIADEPTQALRRQVTRRNQIVRQRSRLKSVIQSILHSHLIPSCPHADLCGAKGRTWLIEQVVPQDERLAIDGHLREFDRLGEDLQVIERDLVRSALEDEGVKRLMTIPGVDITVALAMKAAIGDVSRFDDPQKLVTYLGLNPSVRQSGQVRPTMGGSPSRAVVMRAACSSRRPGRPLVLPDRCEPSPCGVRARRGQHVAAVATARKLSVVIWHLLRRARVTRGLDPPCMPRSLRDVELKAGSKAVRGQKGAHAYNIKSHREEERRWVEQAEGAYARLVAGWNPRGPKRVGTDAANEARR

SEQ ID NO: 463011 - protein, 334 aa, unidentified
MSEIKLVGIDLAKNVFQVHAVDGRGVARVRKMLSRAKLLSFLAQLPACTVAMEACAGAHYWGRRIELLGHQVRLIPAQYVKPFVKGNKNDRNDAEAICEAALRPNMRFVPLKSEEQQALMAAQGARELLIGQRTQLVNQIRGRLAEFGIVAPKGIGHVRRLLSEPKLERVPQLLRQVCAQLREGLAWLDEQIRQASQRLERCAQDSPMCRHLMRRDGIGVINAVALSTQIDPLHFRNGRHLAAFVGLVPKEHSSGGKVVRLGISKRGNTQLRTLLIHAARSLVRVAARKRDPFSMWITQLIARRGKHKAIVAAANKLARYVWVDMMQARQMGIA

SEQ ID NO: 463012 - protein, 342 aa, unidentified
MKLFIGLDVSLAKTAVCVVSEHGQIVKEAETESDPEALAHWLDELDGSIAAIGLEAGPLSQWLHRGLTEAGLEAVLMETRQVKGALKAMPIKTDRRDAEGIARLLHLGWFRPVHCKSVSAQETRAVLGARKAIQQNMIALEMSLRGLLRNFGLKVGAISRGRFETRIRELADGNPMLETATAPMLRARATLRQELAALEKQVRQLAQDDPVCHRLMTMPGIGAVVALTFRAAVDDPTRFRSSKRVGPWVGLTPSRNQSGERDLSGGITKAGDVNLRRALCQAATVMMNRGRSTWLRTWGAQLAQRRGRKIAMVALARRIAVILHRIWVDGTTFQSDAAPNPA

SEQ ID NO: 463013 - protein, 343 aa, unidentified
MDYFAGLDVSVKETSVCIVDDAGKIVREARVASEPEALLQVLANNTYRFKRVGLEAGPLSQWLYSVLAEAGLPVICVETRHMRAVLKAQINKTDRNDARGIAQMMRVGLYRPVHVKTLRSQKLRVLLTHRKLLQSKAIAIENDLRATLRNFGLKVGMIGTVKFEARIKELVENVPDLAVLVQPLLIVRQVIREQLGILHRRLLAIVRGDDVCRRLMTIPGVGPVVALTFCVTVDIPARFRNSKAVGAVFGLTPAKYQSGENNRTGAISRCGDEMMRMMLYEAAQSMLVRSAKWSWLKAWAIKIARHRGMKKAIVALARRLAVIMHRMWVDGTEFRWTREVAVA

SEQ ID NO: 463014 - protein, 437 aa, unidentified
MVPHAGGAVEEEKTMDILHERVAGLDVHKNTVVACARIMTGKETTRECRTFATTTDGLLALRAWLSECRCTHVAMEATGVYWTPVWRILSEGDFELIVANAAHIKNVPGRKTDMNDAMWLADLLAFGLIKASFVPTEPMHELRSLTRTRKQLVREQTRHVQRIQKTLAEANIRLDSVISDIMGASGRRIIEAMIAGVRQPHKLADLAGKQIKASPKELYDALHGRLTDHHRFLLDLHLRQWDGLDTTIRTIDLEIDQRIDRMDEVRAAGESPFRTLIGNADTVPGVSAVSAPAILSEIGCDMSRFPSAGHLLAWAGMCPGQNESAGKRKPSRLRKGAPWLKTMLVQCAWAAIRKKGSYYQAQFLRLRHRRGPQKAICAVAASILTAIYHMLKDGTEHHDLGADYFDRRSTETKAKHLVARLTKLGFTVQLQPSAKAA

SEQ ID NO: 463015 - protein, 319 aa, unidentified
MTKPTTLTAGIDTAKDKLDIAVHGRKGTITVANDETGWTQLATYLAKAGVERVGIEATGGYERGVIRALQNAGFTVHMLQPKQVRAFATLHLKRAKNDRIDAAMIAACTDMLGAQNRTPADQRFDALMDHLTFIEQIEEDIARFKTRLEHICDKRLRRIVEADIRRFEKQRAGEIKRLLGALRAHADLAKRFELVLSIPGIGERTALAVVVRMPELGQVSREQAASLAGLAPFVHQSGKRAGESHIGGGRARLRRSLYAAALPAAFRWNPALKALYQRLIGRRKAHTAALVACARKLLVFANSVVARGTPWQESVPARA

SEQ ID NO: 463016 - protein, 416 aa, unidentified
MKIVYPICCGVDVHKRIIVATIAATNQNNITTYSQKSFSTLNPDLYAFRDWLLENQCYDVCMESTGKYWIPVFNILETFVHVILTHPKYVRAIKGKKTDKKDSKWIADLFKFDLVRASFIPPKEVRACRELARYRYKLVCMRSSEKNRYQNCLTMSNIGLANILSDPFGKTTSDVMQYVLSSAVFDEDICKTLIHKSAKKKTDLILASIRGCRIESDQRFKMNVATAHIAFLDDALLRTEAELFVRMQPRYPLVEHIAMLPGITQLSAALILSEIGFDMDVFESAKHLTSWAGLTPANNESAGKKKSVRISRAGQFLKPLLVQCALAAIKDQKEPYFAIKYQRIKKRRGHKKAIIAIARMLLVCIYHMLKTGECFNPSDYAEFQNPMPRRVVLNETNAIDFLREQGYDVAALTKAI

SEQ ID NO: 463017 - protein, 312 aa, unidentified
MAQMVITAGIDVSKAWLDVALWPTKAELRVERNAAGYHRLGAWLSEHGVMRVGLEASGGYEVEVIDALQARGFEVARFNAQRVRLFAKAKGRLAKNDRADARTIAQATAVLLDAAPPQRRRDLEPLVEHLTYRRRLREWIVDCTNQLEHLKDKALRRKLIARRAAWQNELAAHDRTLASLVAQHDEWHDLEQRLRTVPGVGPVLAQTLLALLPELGRLSRRAIASLSGVAPFDDDSGKRAGERHIKGGRAVVREALYMAALAAKRYNPAIAAFANRLAGKKPKVIIVACMRKLLVILNAMLRDGTDWQAKAA

SEQ ID NO: 463018 - protein, 429 aa, unidentified
MKQPFRQAVGIDVSMDKFDVELGIIDSNFQIKSLYKGQFENTHSGINRFFKTMERKKIAQVPLWYNMEATGVYYEELAWLLSREEQLVSVLLPNKAKLYAKSLDTRSKTDKLDAKMLCRFALERELLQWSAPTLIMWTLKKLNRERLSLVKDSTRTVNQRHAMDHAHIVEKSTYENYVRRSNSRIEIYSSQIKEIESQMMNLVKMDDSFFKAVDRITKVKGLGVLTVVGVIVEANGFNNFQNRNQIVSFAGLDIRLNESGKYKGKTTISKHGNSYIRSMLYMPALSAKKHNTVLGPYYEQLAERKKVKKMATIAVMRKLLVLIFSLYRSGQDYNPNHQHDSLKKEDETLEIHRLESSVLQKKEVDKIEENYSNENTEKILQTNANKEKRTDVSEVKSIKKGRGRNKHPSSVDESLSNSSTETLCFALQI

SEQ ID NO: 463019 - protein, 403 aa, unidentified
MNMNAVGIDVSKGKSMVAILRPFGEIVSTPFEVKHTVSGIRSLIEHIKAIDGESRIVMEHTGRYYEPLVRELSQADLFVSAVNPKLIKDFGDNSLRKVKSDKADAVKIARYTLDSWTELRQYSLMDEIRNQLKTMNRQFDFYMKHKTAMKNNLIGVLDQTYPGANTYFDSPAREDGSQKWVDFATTYWHVDCVRKLSLNAFINHYQKWCKRRKYNFSQSKAVEIYEASKEIVSVLPKDDLTKLIIKQAVEQLNMASQTVEQLRTMMNDAASKLPEYPVVMAMKGVGKSLGPQLMAEIGDVSRFTHKGAITAFAGVDPGVNESGSYEQKSVPASKRGSGTLRKTLFQVMDDLIKTKPQDDPVYLFMDKKRSQGKPYYVYMTAGANKFLRIYYGRVKEYLSSLPK

SEQ ID NO: 463020 - protein, 340 aa, unidentified
MPHYVGLDVSQKTTTICVVDEQGQRLWRGVCATDPAAISARLLRYAGVDARVGVETGSMTPWLVHGLRGAGLNVECLDARRVKAALHIRLNKTDENDAEGLAQIMRTGWYRPVHVKSLDAHRARALLGARAQLVGMTTRLSNMIRGVLKTFGLLPGAGRGVRFDQSVEALLEGAPEIALVVRPLLVTWRQLRQQITAFDKAVRQQVKMDPVCRLLMSVPGIGALSSLMYVSTVEDPGRFSRSRAVGAHLGLTPRRYQSGETDRTGRISRCGDGLARTLMYEAATVILYRVKRSLHLKDWAEAIERRSGPGKARVALARKLSVILHSVWRSGEPFRWASPV

SEQ ID NO: 463021 - protein, 312 aa, unidentified
MTKIICGVDVSKARLDAAVSSPSVFASFANDADGIAALAGFCRTHGVELAVMEATGGFERKAFLLLWQAGVASALVNPRNVRCFAEAMGAMEKTDPIDAEMIARFAIAKDIKPMEPPTSAQQRMKALVARLRQVTGDLTVQKQRRSAADDEETLASLDEVIALLKRQSKSLEGEIASMIDDDPLWAKLAETFRSIKGVAGRTVARLMADLPEIGVFDNKAISKLVGLAPLADDSGRRSGQRHIRGGRASVRSILFLVADIARRYDDGLADLHRRLTEAGKKKMVIRVALAHKLLVRLNAKARDARAEFANAT

SEQ ID NO: 463022 - protein, 352 aa, unidentified
MENTITYVAMDTHKKQHKIALHYPCREEIIEFTISNTVRDIRKMVNKIKKQAPGKIEFCYEADVCGFTLKRRIEQLGCRCCVIAPSLVPRKPGDRVKTDRRDARKLLMMYQAGLLTEVHAPNEHQEAARELTRLRETAKDNLKRIRHQLLKLLTRHGYVYTEGRHWTQRHITWLRTVKFAESTLTGVFENYFNEMIYCIGRLENPDKEVGLLANSQEYKEIVGLLCCYHGIDTLTAITIITEIFEFGRFESPRFLMSYLGLTPSEDSSGDKQEKGAITKAGNKRIRRLLNEASWHYRHRYVPSAALKKRRKGQPQWAIEIADAAGRRLSKRHRYLVEKGKMPCKANIAVARV

SEQ ID NO: 463023 - protein, 330 aa, unidentified
MVQIYGIDLASEKFDVNFLNENGRVCHKIVRNTRNQIEKFLETLPDNAWLVAEYTGVYGDLLLYLANIHGVRISYVPGYEIKHSSGLVKGKSDSNDAALIREYGERYIDKLTVTGFPSESIYKLKELYSTRRLLVQQRKQLYTILSGDKHRPMQCEVAVRIKEQMVAELDKALSNIEQEMQKLIDNDESLRKSAEIACSVPGIGKVTATELIIKTDNFKRVATARKCASLAGIAPFPNATGKSDKGNHVSRFGDKELKTLLFMCAQSAATYFEKMHVYKMKKLEVEKKHFFIVMNNIANRLLKILYALIRTGKTYDPLYISRDPRLKLQK

SEQ ID NO: 463024 - protein, 355 aa, unidentified
MASVKYIGLDVHQSTISVAVLSSEGRLVMQSVIATKATAVLDLLKGLRGVLHLTFEEGTYSAWLYDVVVREVARVVVCNPRKNALLKSGNKSDQIDARKLAELLRAGMLSPVYHGEQSTRTLQQLVAGYTALTEDTGRAMRRIKALYRSQAIACAGKRPFGKRHRGEWLARLTDSGQQRRAEWLYQELDAVQVLRREARQAVMVECHKNPAAKLLRTMPFFGPLRAAVLIARVQTPHRFRTKRQFWTYCGLGLETRSSADYVEKDGQIQRRRNPVYIRGLNWNYSHELKNVFKSAATTASAMDGPFRTFYEMRVASGMLPAMARLTLARKMAAIALILWKKGDTFAAEHLKLQAA

SEQ ID NO: 463025 - protein, 348 aa, unidentified
MQVTTLGIDLAKNVFCLHGCDAHGKPVVRKQLLRRQLLSFVANLQPCLVAMEACASAHYWAHEIEKLGHQVRLIAPRFVRPYVKANKNDASDAEAICEAATRPSMRFVAIKSAAQQDVQAVHRVRQQLVKTRTGLANQVRGLLAEHGIVVARGFAPLRRALPVLLEDRDNGLSAVMRELLGEIGERLRFIDDRLRKYDLTIQRLFRQDERCQRVAAVEGVGPVTATALVAAVGNATEFRSGRELAAYLGLVPRHRASGGRTVLLGISKRGDRYLRTLLIHGARSALHRIERHRGPRAIWAARLKLRRGANVAAVALANKNARVLWALLSRGQSYRPAPFFARVPQAGG

SEQ ID NO: 463026 - protein, 319 aa, unidentified
MEAILERAAGLDVHQGSVVACVIISSPGRRPSRETRTFGTMPRDLAALRAWLLELGVTHVGMEGTGVYWRPVHAALEGAFTLIVGNASHMRNVPGRETDVKDAEWIADLVRHGLVRASFVPPPEVRVLRDLVRHRKALAGTLAAERNRTLKLLESAGIKLAGVMSDVFGVSGMLMLEALADGTATPAAMADLAKRRLRRKVDQLALALEGRLAEHQRLLLRLHIRRLGEIGRDLAELEAAIGAAMRPFAAQQALLVTIPGVDALTAAAIIAEIGADMGAFGSARRLAAWAGLCPTNRESAGKRGGAAPARAIPTSRRRW

SEQ ID NO: 463027 - protein, 338 aa, unidentified
MKITTIGLDIAKSVFHAVGVDKAGKLIKKKMLRRKDLLPFVAKIEPCLIVMEACGGASYWAREFEQFGHVVKLIAPQYVVPFRQGNKNDYNDALAIAEAAQRPNMRFVKPKSVEQQDVQLLHRMRERLTKQSTALINQVRGMLAEYGIVITKSKSAFKAQLPDILIDEANTLTTKGRAIFYQLYDEVIDIEKRLKSCDTQVLNETQNNVICQRLQTIPGVGPVTATAIYAAVGDGKDFNNGRHFSAWCGLVPKQHSSGGKDNLLGISKRGNAYLRTLFIHGARAVLRHSGSKSDKLSCWAIQLAERRGFNRACVAVANKLARMSWVIAAREEEFRLAM

SEQ ID NO: 463028 - protein, 456 aa, unidentified
MSCYYLGIDVSKGYADFALLDDAKQLMERTFQLDDTFEGHHALLQYLQTFASQHPEASLFAAVESTGGYENNWYERLKDVGQILPLRVTRLNPAAVKANAEAGMRRNRTDSLSAREVAEYLIAHPEKVRYNETSYPLLRRSWKFIRLLSKQKTQLLNQLDSLLYITMPEILSFCHNGYSRWLLELLKAYPTYQQLRAAGVVGLRALPYVSRRKAERIMQLVQHGIGKSDPLSGQMITFLAEQILQLDSQITLQKKLLAQNYQEAQAEIELLRSFKGIGIFSAVGLLLNIVDIGRFPCAKNLASYFGLHPVLKQSGDGVWRVRMSKKGRIEPRAILFMVTFSAMRYNPVIKATYAKGLEHGLSKMAAMGVCMHKILRIVYGMLKHQTRFDPNVDAAYQAKNHARGNAQKQETDKRRRLQTFDENAPVSRRQHHKRNALRQAGESQANESSQKEPIHS

SEQ ID NO: 463029 - protein, 418 aa, unidentified
MNENLNLVERVIGLDSHPDSFTAAVLRGATPAAALTEKIFNKVPMSRLQVWAKKNTNPQDLMVLEASGNSFHIVRSLAAIDRKALVLESCQLGKLKEAHANNDKISAVRIAKAYLAGTARVVWVPDPQTQERRDLFHIYKKANKRVTQTRNRLLSYLSDNGVRVRKGMRLTQEQGSQQMRQAKEWSACQRQVLEGLLLELAHAEQQRKHWRGLIAQQVLGDPLLLSMVRLCGVRDVVAFALGALIGDIKRFAEPRKLVKYVGLNPAFDDSGEGQWAGGIGGHGRKDLRCLLIEAAQSILRSKDPLARWGKKLLRSKGSISLAVAAIARKLTVAVWYLMMGRWTAVEELDERLSSKISTIITRVGAEGLKQLGKTRKAFREEIHQSLKTGRTYQLKPDKKFGPKPTDKSQTLAEEYGLR

SEQ ID NO: 463030 - protein, 351 aa, unidentified
MMKVLLKQTVGIDVAQNELVVSLGRMDEQINIEVYAYKVFPNTKKGFSSLVSWVNKQTSTGTVVRYVMEATGVYHESLAYYLCSIKKQVSIVLPNKISNYAKTLDIKTITDKSASQAIARFGLERQLEVWQPPLKIFNDLRQLCREREQLVHERTMLKNQLHAESASATSSESSVKRTKKRIALIDLQEKQIKEEINLLIKEDQTLIEKMKIVSSIPGIGNLTAVTIIAETNGFELIKNKRQLVSYAGLDVREKTSGTSVKSKPRISKRGNRNLRKVMHFPALAAIRTDERFRDVFLRLVSNHGVKMKAIVAIQRKLLELTFILWKTDSYYNSDYEDHILRPRLLNKKALN

SEQ ID NO: 463031 - protein, 461 aa, unidentified
MKKPKRRATGRVDQGSKLSVIQSDVAGIDIGSREMFVCGPADEEGRREVRVFATTTQQIQQCVRWLKQQKVRSVAMESTGVYWIPVLEIMESSALEVLLVDTRPLSRVPGRKTDVEDCQWLQTLHSHGLLRGAYRPSEQISELRTIVRQKAVLVRQQADWIRRMHKCLDQMNVRVHHAVKDTQGVTGMAMLRAIVAGEKDPRNLAKLRDPGCQKSETEMIELLTGNWRSDHVFNLKQHMAMYDSAARQIAVYEEEIQRRMQEVTPTGRKDIQAPPLANIEKRKTMKKRDQEGKRQALYRAMGVDLTTIDGIGVETVEVIMSEYGTEMSKFPTEGEFVKHLGLAPHRPVSGGKVLKNKRKKQKGTRTAEVLRNAASSLKHSRSALGAYYRRIARRKDSGVAVFATARKLGELVYRMLRYGQQYVDVGQAEYEKRYEETRIRALKSTANQLGYNLVKQEAVSA

SEQ ID NO: 463032 - protein, 419 aa, unidentified
MDLTDLTSTDTEPASPAPPPGLVAGVDTHQDTHTLAVLTAQGAVIATSSFPADQQGYDDLTAHLDRLGPLMAVGVEGTSSYGAGLTRTLRQAGYDTVEVLRPSRRVRRHHGKSDPIDAIAAARTVLSGDGVSQAKDTTGPAEQLRLLLAARTRLISAATAITNSIHSLLTTAPEPLRERYRRLDTPALITRLARTRPTRTITTPQQAATSALHHMARTHQDLHHRAERLNQQMHHILTTHYPGLLAVYGAGTTVAAQLAVTAGGNPGRIHNEAAFAHLCATAPIPASSGKTTRHRLNPGGDRRANAALHRIALVRLRHDPTTKNYANRRTQEGKTTKEIIRCLKRAIAREVYRALTQPPPTDTTSTLAAHRKRHHLTQTDVAHALNTYPARISDIENHRRPLPQLTHRYHQYLTTLDTQ

SEQ ID NO: 463033 - protein, 341 aa, unidentified
MPKSNTYIGVDLHKKTCYITIMDGEGKIKKQTEIGTKTEAVSRFFKQWSGAKVAVESTMNWLPFYENLENLGCWVVLSNPLQTKAIAAARIKNDKVDSRILADLLRTNLLPTAYIQPREIRDLKEIVRERFHFVEMRTKIKNKIHSVLFKNNISHNFSNLYGQAGRRWLANLKLRAVYRQELDRYLETLDHLNEQIDKISAIIKSTAKLNFDCQLLMTIPGISYYSALMIKAEIGDIRRFKNAAKLCSYAGLIPSTYASANKIRHGRITKQGSKWLRKTIIDAVTSGSRNHNRIAVYYHKLKRKKGTGKAKVAAGRKLCTIIFAILTDQVPFQNFAPTRQR

SEQ ID NO: 463034 - protein, 353 aa, unidentified
MHTHQKSSDAVATIGIDIGKNTFHLVGLDKRGAIVLRIKVSRNQLERRLANVPRCLVGLEAGCGSHHIARQIRVLGHDVRLIPAQYVKPFLKGHKNDYRDAEAIAEAVQRPTMNFVAIKTPEQSDLLSLHRVRSRLVGRRTAVINQIRGFLIERGITVRQGPGPLRKALPEILSSPTEVLSPRMVRLIADLSEDWRRLDERIDAVSAEIETLAENDGGCQRLMTVPGVGPIISSAMVAAIGNGGGFRQGRDFGAWLGLVPKQESTGDRTKLGKISKRGNRYLRTLFVQAAHVVLIRRPAAAMRGLWPWIERAAKRLAHRNLLAIALANKLARIAWAVLARGRDYEPRITINAA

SEQ ID NO: 463035 - protein, 348 aa, unidentified
MTLVGCDLHSRTQQVAVLDTTTGELREQELAHAGDAVEQFYRALRPPVTIGIETTGYTQWFHALMHRLGHTVLVGEAAKIRAMVVRKTKTDRRDARHLLDLLKHNRFPTVWMPDPETRDLRALIAHRVRLVRLRTMVKNSVPAIALNQRLALRSALWTQRGLSQLRALALPPHSRRRRDDSLELLAWITSRIDQLDEQIAGIVDADSRARRLLTHPGVGPLTALTTILVLGPVARFPDAKHVVSYVGLAPAINASADKQHLGKITKQGNALLRWVLGQAASLATRADDDLRRRYFAVLHRRGRPKAKVAVARKLLVRLYIMLRDEVDYAEFRRRGRAARAQSGGVVIT

SEQ ID NO: 463036 - protein, 456 aa, unidentified
MGNDVEEIDANENDEVLERVAAIDVAKASGKVCVRLPGRQSRITRVLDVAATTNAIMGLADELAEMGIERTVVESTSDYWRPFFYLLEARGLLVWLVNALDVKQVPGRPKTDKLDAVWLAKLNERGMLRPSFVPPREIRELRDYTRLRTDLIEERSRHKQRLEKLLEDALIKLSTVATDLFGKSSRAMLEALIAGERDPEVLADLALGKMRPKRLALREALTGRFDEHHAELARMLLDQIDMLSEKIDRLTARVDELVEQIPEAHGHDASDAGGGPSVLERLDEIPSVGPRAAQIILAEVGLDMTQFPTAAHLVSWAKLSPRTIQSGPRTRSGRTGKGNPYLKGALGEAAAAAARTDTFLGERYRRLVRRRGHQRALVAVARSMLVVVWHLLAEHGHDGRNTGTIAPEAGMCLGRDSRSRRPIALDRSAHRRLCITTEPRTIRSRPPALVSVDATL

SEQ ID NO: 463037 - protein, 466 aa, unidentified
MRSWRSRPTSGVQSLNKRTHGSEVHRIALTENRDGSGPVGMLYVGIDVGRRTHMVAAIPRQRMEDGSWERVPARRFSAMGTGYRELSDWLTGSGLEPHQIQVGLEPTGGWYSQTVAAWLARGGYQLSWLQNAALHERRQLMIGKQTKTDALDARLIARLLYERDCLGTQRGFLHRAPRSVDALRLLVRNRTKLVEEQTRYRLQLTAIVDVLFPELKGFFKGSITGKVVRHLLEAYATPERVAAAVPADLYEVVVRKGRARRHAGRMDELQELAAGSAGLVNDIAPILNAQDWLLSQLDVVDIQIANVEDALANALASWPRQELAILSSLPGMTVLRQAVLLSAMGDIASFQSDRQLRKLLGWYPEAKESGTSVFKHRLGQSGNRLARREIWLWVMFLISPKSQATPFRTFYLRLRNRGVPGRTAIGHVAGKLISVLFHCLRSGQPYDVKRHALDLGRGDTRPVLED

SEQ ID NO: 463038 - protein, 457 aa, unidentified
MARVKRSRRRRDMSPIHPHAAAIDIGARMHVAAVGPGRDAEPVRTFGTFTSDLHRLADWFARCGIRTVAMESTGVYWIPVYEILEQRGFEVLLVNARDAKHVPGRKTDVSDAEWLQRLHEYGLLRGSFRPQGEIAALRAYLRQRERLLDYAAAHIQHMQKALTQMNLQIHHVVSDITGVTGMRIIRAMVAGERDPDTLASYRDRRCHASVEAVRQALVGNDREEHVFALAQALELYDVYQAKVAACDKRIEALLKRLKEASAKPAEPLPTPRHTTRQPNAPAFDVREALYAVLGVDLTQIHGLGPYLALKLVSECGTDLSAWPSAKHFTSWLCLAPSNKISGGKVLSSRTRRSGNRAAALLRLAAVTVGRTETALGAFYRRLSARVGKAKAVTATARKIAVLFYNALRHGMDYADPGASFYEERYRRRVLSNLRRRAKSLGYVLQQTDPVPATTVVS

SEQ ID NO: 463039 - protein, 453 aa, unidentified
MAKVARKIKTKQGLRLKIVNPDAAGIDVADGEMQVCVPEDRDGENNRRFDSFTCDLREICAWLKACRITTVAMESTGVYWLNIFLMLQQEGFDVVLANPLQVKNLMDEKTDEADAGWLMLLHSYGMVKPCFQPDNVARQIRNLTRHRSTLITTAGREVQHMQKAMEQMNIKLSTVITDILGKSGMAIIRAIIDGNHNPNSLAQLADGRCRASKDTIAKSLDGTWDDDLLFVLKQSVELYDYYQKKVAECEREIERLMIRYSAQVDVEEAGKLSRSEKHTTYKNAPDIDVEKYGHALWGVNLMAMPGMGAGAILQLIGELGYDFVSKFDTCEKFCKWCNLSPNNKITGGKLISSHIPRRKNPVGQILRQCANTVKSEKSEMGAYFRRMKSKDGHMQAIVATAHKMARILYTMVKTKKEYNPSLVGCNEKELLERKIARTTRQLKKLNEKLEKVA

SEQ ID NO: 463040 - protein, 459 aa, unidentified
MEQALAQRNPSISLKPGKSRAALTITHPNAAGIDIGSASHFVAVPPDRDDEPVREFPSFTVDLNALADWLKACGVDTVAMESTGVYWIPLFELLESRGFTVLLINARHVKNVSGRKSDVLDCQWIQQLMTYGLLRGAFRPADQVCVLRSLWRQRGMLLRNQSRHVQHMQKALTQMNVQLANVISDVAGETGQKILRAIVAGERDGHVMAKMKNARIRASIDEIAKSLQGNWRAEHLFALKQALNGFDFIGTQLAECDREIEQQLQRLQTHEGEPAKGKQRGRARNAPKFDLRTQLFKMCGVDLTRIDGIDVTTALAVVSETGVDMSRFPSAGHFASWLGLCPGTRITGGKVMSGKTKRCANHAAQALRLAAAALRASQSALGAYFRRMCSRMDKPKAVTATAHKLARLIYTMLTKGEEYTDQGQDYYEERYRERVLLQLSQRAQKLGMKLVATEQPQPV

SEQ ID NO: 463041 - protein, 359 aa, unidentified
MYVAGLDAHLKYVTIAVLDRMGQVALETTVSTKEPERLLGALAPYRPLEVVVETCPFWPWLYDLLVPAGIGFHLAHAKQLRAIAVAPQKSDAVDARLLARMLLSGLIPEAYPRPADQRDLLRLLRHRTALVRVRTRLAGRIHSQLHQQRLGLPREQLLRRASRAWLQETAWPRLTVEQRAIVTTHLELMDHLTPLIRALERRIAQTAAGHATAPLLATIPGIGPYRSLLLTAELSPITRFPRAEHLVSYAGLAPVTRSSGGHTYHGSIPQGANRWVRGALVSAIPSHVRYAPTSPVTVAYEQLKARLGWRVARVAAARKLARVVYVMLTRRTPWRGAPAAGDGRDEVQNSHVAPTTSFC

SEQ ID NO: 463042 - protein, 338 aa, unidentified
MKLYGAIDLHSTNNVMVVINEHDQVVYQKRLPNDLSLIAQQLSSYRRSLEGIVVESTYNWYWLVDRLMEKGYRLHLANTAAIQQYNGLKYTDDHSDARWLAHLLRLGVLPEGYIYPKQERAVRDLLRKRGQLVHQRTANLLSIQSLISRTTGNSISAQYIKALNIERVDGVLPNSDLVLALKANLAVMNSADGQIEILEKAVQDRVKLRPQFRFLKTVPGIGPILALTIMLETGQIERFASVGNYASYCRCVGSKKISNGKRKGSGNTKNGNKYLAWAFVEAANFAIRFNSKIKGFYQKKKSKRNAIVAIKAVAHKLCRACYYIIKDQVAFDLTKAFA

SEQ ID NO: 463043 - protein, 343 aa, unidentified
MMNIAVLGIDLGKNSCSVAGLDETGRVVLRRRVSRDGLTRLLAKLPSCTVAMEACCGAHHVGRSAQMQGHRVWLMPPEYVRPYVKAQKNDDRDAEAIAEASTRPTMRFVPLKDQAQLDMQTLHRARERLVTERTALINQMRALLLERGIVLPQRWRSLAAWVDAPLAPGEPDCLGSRIRLLVTDMRAEWAELDRRIAAFDDEFATIARQDEAARRLATVPGIGPINATALVAAVGDASAFGRARGLAAWLGLVPKQATTGGKPKLLGITKRGSRYLRKNLIHGARAVMPRLAATDTRLGHWLRRLLARVHKNTAVVALANKLARIVWAVLARGRMYEAAAAAS

SEQ ID NO: 463044 - protein, 417 aa, unidentified
MGSMKKCCCGVDVHKSFIIAVIAKFENDEVQFTKHVRFSTFTKGLREFKEWLDRNNCCEICMESTGKYYIPVYRIVSDEKFHVDVVHPKYVRAPKGKKNDKRDAKRIADMYMRDHIAEYSIIPPAEILAIRDVARYRRKTINTMTAEKNRMSNCLTVSCIKLDEVLSDTYGKTGKAIIGQIIEQGTCNFDPQPFIDKRVKAPVEEFRQALDGDVTPATLAKMKIIQERLNSLEKQEAELESTMESLSQDFSRQIDLLVSVPGIDTASAMTIISEIGVDMNAFGSVKKFLNWIGLVPQNNESAGKKKSTRIGKGNQWLKPVIVQCANAAKNSKNHPEIRDKYLALKKRRGYGKAIIAIAKRIMTAVYYMLLRDEMYQPYICEDRAPKRGKIHLQSLIDYYVSKGYTIVSDDGEVLELA

SEQ ID NO: 463045 - protein, 343 aa, unidentified
MHVNTIGVDLAKNVFQVHGVDSAGKVVITRQLRRKQVLEFFSKLPGCLVGMEACGTGHHWAREISKLGHTVRLMPPSYVKGYVKRSKNDAADAAAICEAVTRPSMRFVPIKSTDQQALLMLHRTRDLLIRQRTQLINALRAHLAEFGLVAETGREGLAQLGAIITDESKHEALPSAMKQALQAIVDQLAALELQVGALDRAIHAHHRANDMSCRLETVPGIGVIGATAIASTVADPGGFKSGRDFAAWIGLVPRQHSTGGKERLGGISKQGDRYLRRLLVIGATAVVRQARLHPQKHPWIIRLLAKKPAKLVAVAVANKMARIAWAIMAKGGYYRAPELAAAA

SEQ ID NO: 463046 - protein, 371 aa, unidentified
MKSKSNNKNIIAMTTRSKENSFKGKNIYVGIDVHLKSWTATVLSDTLTLKTFRLDPSPEVLCAHLFNNYPEANYFSVYEAGFSGYSVHRRLCEMGVKNIVVNPADVPTTNKEKLRKTDSSDSAKLARSLRAGEIKPIYVPDTISQELRSLSRHLQAITKDKTRIKNRIKGHLRFLGIEIPQRFLRSANWSYDFIDWLKRVCTDTPYGKFVLDSHIRQLEEIRDKKLNLLRYMRAIAKEEPLATRVKLLLSVPGIGEVTSLRIASEVIDIKRFNGHDQLAAFIGIVPMCHKSGDDTKEDNGGITTRANRTLRSAIIEAAWIAAGKDPALTLAFENYCKRMKKTDAIVRIARKIVNRIYFVLKHEMPYVPSTY

SEQ ID NO: 463047 - protein, 317 aa, unidentified
MTATDTFVGIDISKRHLDIALTPGDQTFTCPNTEAGIEKLVRRLQKLNPHTILLEATGGYEILLVAALREADLPACFINPKKVRNFARSLGIAAKTDRLDARVLAAFARRVQPPARPLPTAAQQELKHLMTRRRQLLDMIQMEKNRLDPTPSRRIAQSIQDTIRSLQDQLAALNREIDDFFHQHPLWAELALILTSVLGIGHLTALMLLAYLPELGRLNRKEIASLVGVAPFNRDSGQWRGQRHIEGGRSRLRQALYMATLAATRFNPVIKAHYQCLVDKGKAKKVALVACMRKLLTILNAMVKNQQPWCPAAPQKP

SEQ ID NO: 463048 - protein, 338 aa, unidentified
MYYSGIDQHKLFSVITTVNDDGIIIKQAELKNNDFDILNYFFSLGNQHSATVETTGGWYWLNDLLSSHGINLKLAHAKYVKAIAYAKVKTDKVDSHILAQLLRLNFIPEAYKISDDVRSLRDTLRARLRLSQKRTSCLNFMNRMLEKFNITDPLLLSEFYKLQYQQFDNQEHLLKEQMLTLEKSLYPSLIPNDDIQRLLWVPGIGKMNAFTIYLEVGDINRFADVKHFFSYCRLVPSARNSAGKYKQRASKDGNKYLKGVFSDAAVHALQYYPPIKKYYSSKLRKKKKQVAHAIIAKEIARIVFYVLKDKSNFNNQFKGIKIDKKKSDQWPRITSPVV

SEQ ID NO: 463049 - protein, 334 aa, unidentified
MTTSVNETLVAFDVGAKSHEFVQETAGKAEQGTLASDIRTVRAFLLRLRKDGRRLRVIMEATGIYFLDLALVAHELGAEVVVINPKTAHHFAKGLGLRSKTDAIDARMLLEFLRRMPLTRWEPPAKECLQLRQIGRYLVQLTHESTAAKNRLHALESTEETPKFLREDLRRSIRSLEGRIDRIRAQAIELIGHSESLEPIFLALNTMIGLSDASGVSVLGELCVLPRSLSGRACTSHAGLDVRHHQSGTSVNKPGRISKHGNKYLRRALYMPALVAGTHDPHAVAFKQRLQNRGKKGLQINTAIMRKMLTAAWAIVKNPQPYDGAKLYATIKTG

SEQ ID NO: 463050 - protein, 358 aa, unidentified
MAVNIKHANFKGQNFFVGIDTHKTNWKVTVRTKECELKTFSMNPDPEKLSDYMNRNYPGGTYNSVYEAGFSGYWTHRELISRNFYNVIVNPADVPSTNKERDRKSDPIDSRKLSRELANSSLSSIYIPTIQQEALRSVHRSYRRISRHVTRIKNTIKAFLHFIGVKMPSEFDGTCWSNNFIFFLSTVECPDPIHRTNLTALLGEFKVARNNKLNSLRLIRTLSKDLPIVTLLQSVPGIGLLTAFALYVEIIDIHRFRIFDQLASYVGLVPSVQSSDKTVVISGMSFRHNKYLRPALIESAWVAIRNDPALLHSYKNLLRKMKPSEAIVRIAKKLLNRIRYVWINQKGYVKGIVEIEKV

SEQ ID NO: 463051 - protein, 420 aa, unidentified
MEVVHARCAGLDVHKKTVVACVLRSGPGGVVERQARTFSTMLGALEVLAAWLTEAGVTHVVLEATGVYWKPVYNVLEGEGRWTVLVVNPEHVKAISGRKTDRADAERLAFLVRHDLLQGSFIPARAQRELRELTRARTALIRERARAVQRLEKVLEGANIKLAAVVSDLLGVSGQKMLDAALQGVTDPDELAGLAHPRLQPKRDLLVEALRGQLSRPLRFLVQQHLDHWRELDLRISAFDTEIAEQLRPFEELLTRLDAIPGVGQRTAEVIVTEVGTDVDTFPSARHLAAWAGVSPGNRQSGGRRRAARTRHGNPWLKAALTEAAWAASRCHQGYLPAQYRRLAGRRGRKRALVAVAHSLLTIIYHLLANGSEYCDLGTHYFVERDRARAEQRALTTLRALGYQVTLTAQPPTDPVPEVA

SEQ ID NO: 463052 - protein, 387 aa, unidentified
MYFVGIDVGKRHHQAVVVDEQGERLGDAIGLSNTRSGVRSLVERLEDLGEPVRVALESSGQYWLCLYDQLTSRGYDVAVINPLQINAYRRTGIRKAKTDPIDAFWIADLLRINRARPNQIPEAVRLQLRELSRFRFSLVDRIGDLKRKVLSVLDRVFPEYETLFSSVFLKSSRRLLEEACSANEFADFDLSELTRILRQASRGRFSERKAQEIIDQAKSSIGISSLADAAHVELQCLLQQIRFLEDQIDLIDDHLAVLLKEADQYLTTIPGIGVVLGATILGEIGDVNRFPELENLVAYAGIDPTVHESGQFGATEAHMSKRGSPYLRRALWLAANIARQHDPDLKAYYHRKRQEGKHHNTVLGALCRKLLARIYVILQEERPYVVR

SEQ ID NO: 463053 - protein, 342 aa, unidentified
MHAVGIDSHKATLAACAVDEIGQPVAERTFANDPAGFRALAAWLGELGEIGRIGLEGSAGYGAAAARCLLGAGQLAVEVPPQLSHRERLRTRRAGKSDPGDALAIARVTLREAELPPVRLPDSSRELQLLVEARDDLVAEATRIRNRLHADLVVLVPGYSTAAANLVAASHRRTAARLLRRLPGVQAELARDRLARLETVVRETDAYERRIEGLVADHPLRSLPGAGALVTAKIIGEAGDVRRFRSADAFAMLAGVAPIPASSGQVQRMRLNRGGNRQLNRALYSIAFAQIRHHPPARAFMARKRAEGKSWREALRALKRHLARIVYRLLCQPLVSAAQAGA

SEQ ID NO: 463054 - protein, 343 aa, unidentified
MKYIGLDLHKKSIFATVLGEDGKILSRTKIGPNTRDICYYLKSQGKRDELSVAMEASYNWPYYYRAAEEAADTIVLAHPLKTRIIGEAKIKTDKIDSKVLAYMLKSDMLPRAYVPRRDTMENKMLLRARISLVRMRTQIKNKIHAIVDRNRDSYCGLENLTDTFGKTGKHILRDTKICPTDHKILTGYLDLMDEIDKKIKDIESQIDKRSLKDRDIELLKTIPGIGTFTAFLVKSEIDDISRFASKGKLSSYAGLIPSTHGSGERLYHGRIVKQGNKFLRWALTEAAQTSIRCSEYFRYHYSKVRSRKNANSATIAVARRMAEVIYVMLKGGREYIEKPVDIK

SEQ ID NO: 463055 - protein, 370 aa, unidentified
MLDTTTFVGLDVHARSIKAVSLDVMTGEVRCATFGYDAGAVAEWVRSVDPKARCVYESGVTGFDLQKRLSGLGVDCVVGAVSKMIKPSADRRRKNDRNDAEFLARMLSVGNVVEVWVPDDECEAARDLTRALEDARDDLSRSKQRLSKFLLRHGLAFDERTPTGRRKGNWTRAHWSWIESIRFAEGADNDVLAYYVDAVRRAAEEKARLEGLVEAEARKPRWRKRVDSLRCLKGVDTASAADLVFEAGEFSRFRNARSFAAWVGLTPSEHSSGESDRRGAITKAGNKHLRKTLVEAAWHYLTCSGRPKDLARGQAPDRGARRHAAKGVRRLVERREALLARGVHGNKANVATARELACWVWAVGLMAEEA

SEQ ID NO: 463056 - protein, 352 aa, unidentified
MAATAQSAIAVIGIDIGKNSFHVVGLDGRGAIVLRQKWSRGQVEARFANMSPCLIGMEACVGAHHLSRKLKALGHDARLMPARYVRPYSKGQKNDFRDAEAIAEAVQRPTMKFVVTKTADQLDLQALHRVRERLVSQRTGIINQIRAFLLERGIAVRQGQRFLRVELPRILATPPDVLSPRMVRVIEGLASDWHRLDERIEGFSSEIEELAKRDAGCERLMSIPGIGPIISSAMVAAIGTGDSFSKGRDFAAWLGLVPRQISTGDRTILGKISKRGNRYLRVLFVQAAWVVLVKVKPTRWEGHGLRPWIEAAKKRLHHNVLAIALANKLARIAWSVLAHGRAFETNKLLAAA

SEQ ID NO: 463057 - protein, 359 aa, unidentified
MNKDIVLTVDYHHRNMEIRWLDCAAGEERCFKRPTSVGSIQRVLSAAGRAAAASGGRVVWIMESTTGWVRVKELVGQQARFLLANVLQMPLPPKARRRKTDKIDTARIQREYLAGHLPLAYQPSGALRQVRRLVDARQDLIERRTTLRNWVWHYLSHETWQGVTNLWSGRGMERLRKLALPRQDRLVLDLKLAELERIEELLARVDEELMAVYRQSGQAQRLDEVRGIAPLTAVSMLGYIGPIERFKTSEELISYAGLAPGVHQSDGRCYGTRIGGGGTHSRLRYFVMQSTRWLKEIDRYRPSHQRVLARRGKKVARVVVARMFLRSVHRMLRTGQAFDARPEAKDTTVVREDTATTAA

SEQ ID NO: 463058 - protein, 370 aa, unidentified
MHQSSTLYIGLDVHKESIAVAYVAKADHAEGVSLGNIGTRQCDIDHLIRKMQSKSTHLVFVSEAGPCGDWLYRYLTTKGHICWGVAPSLIPKKPGDRVKTNRRDAIKLARLMRSGDLTPVYVPQVEDEAIRDLCRAREDAIRDLQTAKLRLKAFLLRHDIRYTGQATWSPAHLRWLSDVVCPTPAQQSVFHEYVRAITDHTERLARLEQELTEHGQTWRLAPVVDALQALRGVPCTVAVTTVAELGDLTRFANPRQLLHYLGLTPSEYSTGERRQQGGITKTGNSHARRALVEGAWAYRYPAKVSRHLPLRLEKVSKPIQDSSWQAQIRRCKRYRQLSARGKHANQVVVAIARELRACMWAIAQEVPLTP

SEQ ID NO: 463059 - protein, 387 aa, unidentified
MTKNKGRVVGLDVHPDSFAGAVVQGRDPASAMVLRTSTRVELERLEEWARRHTCTEDTLVLEASGNAFAVAARLRAIDREVEILDSHHAGKVGKVYCANDRVDAVKIARIYLSALSPIVWQPDQKTLERREIFSAYQAVVKESTQAKQQLRSMLNEHCVRLEKGFRLCHPQAIARLLKLREWTPARRMLLQQLHGSLVAARARRTLLRRHMAQEIVAEEALLRLTRLCGINLITLYGVVAAVGDVRRFTQSKKLVAYLGLNPSVSQSGNFQGSGALKRHGRGALRALLIQSGKKLLEVNNPLQKWGLAVAARRGRNKAAVAVARKLCVALWHVMMGHAIGTLERLDTLQTKLSKFATEIGPAALIAFGYHNKADFVEKKLYVLRSYP

SEQ ID NO: 463060 - protein, 342 aa, unidentified
MLYVGIDVAKNKHDVTALNVPGKTVLKPLTFSNNKAGFELLDLSLRQLNQDCLIALENTGHYAFNLLNFLHEQGYKVYTYNPLLIKKFAKSLSLRKTKTDKKDAHGIALKLLSDPNREQFQHDNRQVELKILARHIHRLKKKQSDWKVQYTRCLDIIFPELDKIVGKHSEYTYQLLTRYPNPQKRLEAGFDKLIEIKRLTASKIQDILSVAPRSIGTTSPAREFEIIENIKHYKRLIDKAEKCVNDLMAEFNSVITTVTGIGNRLGAVILAEIQNIHAFDNPAQLQAFAGLDSSIYQSGQIDLAGRMVKRGSPHLRWALIQAAKACARFSPAFKAYLKTKLE

SEQ ID NO: 463061 - protein, 309 aa, unidentified
MDSIVVGIDVAKDRLDVALRPSGEVFVVERNAGGLELLVQRLKPLAPSLVVLEATGGFETVAAAALAAAGLPVVVVNPAQVRAFAKAIGQRAKTDAIDAAVIAHFAEATKPEPRPLADEATRLFADLVARRRQIVEMIGAERQREKRATTRIKKSIARLIKALEKELASVNSDIDDAVRGSPAWRDKEDLLASVPGIGPIIARTLIADLPELGSLDRKKIAALAGLAPFTRQSGQWQGRSFIGGGRGSVRTALFMGAMAARRHNPILKAFFGRLVAAGKPKMVALIAVARKLLTILNAILRDKRPWQNA

SEQ ID NO: 463062 - protein, 254 aa, unidentified
MANLGIDVAKKTFDVALLKNEKYKSKSSFDNKPSGFIALLAWMKQREQGEIHVCLEATGAYGDQLAKFLFENGYTVSVVNPSRVKAFGEAELLRNKNDKIDAKLLARFCEKMKPTAWQPDPPEIEHLRMLGRRRDALVSMRTQEVNRLGNPDRSVNESIEKHVGYLNQEIEQITQSIKNHINGNDDLKKKRDLLDSIKGVGDVVIEAILSETNGFARFERIEQVVAFMGLSPKEKTSALQLKEGLHCAKLAALG

SEQ ID NO: 463063 - protein, 415 aa, unidentified
MLKIVYPICCGIDVHKTFVEATIAATDKTSITTYKTQRFSAFTKDLKSLAQWLSDNNCLPVCMESTGKYWIPVYNILEPSCRITLAHPKYVKAIRGKKTDKKDSIWIADLFKHDLVPGSFIPEKQIRDLREILRYRYKLVCFAASEKNRMQNSLTVSNIQLASVVSDTFGKSAQAIIAHLLANPGDTAFDFRPLLHGSMRKNEEQIALAIEGTITPVQASKIHTCQQHVDQLSQYIEHLEALADALAIPFEAQLRILESVPGISHVSALVILSEIGSDMTQFKSAKHLTSWAGLAPSNDQSAGKKKSTKISRAGVYIKPVLVQYALAAISDKSFPHYRQRYESLKHRRGHKKALIAIARMMLTAIFVMLTNGELFNPDMYAEALRKPAYILSPELQLAHLAKRLGYSVVKVPDSV

SEQ ID NO: 463064 - protein, 408 aa, unidentified
MEIEAINRRVIGLDIHQAQITACALFEDGQGGLRKEHRQFGAFKRDRRALAEWCSVIEPAEVVMESTGIYWKSPYAALEKVGIRAKVVNARHVKNVPGRKTDIGDAEWLAMLSRAGLLRGSFVPEADHRELRLVSRQRQKLVGILASEKNRLHKVLTDSGIRLGVVVSDLHGQSARAMVKALIEGKPPEEVIQLASRRLKASREEMMDALQGELTPTHRFVMDELIQHIEDIEARIRRFDQKLLEGLSAAEDALRVLQTIPGVDRIGAAMLLVEIGTDMSVWGNEERLASWVGICPGNNESAGKRKSGRVRKGNPYVRRLLCEFANAASRTESAFKAKFQGLLIRRGRKRSIVAIAHKILRTIFFMLKRGQHYRDTTVNYEEMSVKRNAARWIKKLTEFGFLPPTQTA

SEQ ID NO: 463065 - protein, 322 aa, unidentified
MSKPSIVCAGIDTGKYKLDVALNGSRQQLQIDNTTDGHAALSSWLKRHKVERVGIEASGGYERNVVTRLRGDKFVVVVFQPAQVRAYAGFLLQRAKNDKIDAALIAACTAATKKIHAPPDPRLAPLAERMTAIDQLTDEIAGFKNYREGSRDPRMRQLWKEQIAHFNKLLRAELKELVAAIRQHRDLAERLDLIESVDGVGLKTAVAILVRMPEIGSVTREQAASLVGLAPFDDDSGMHAGIRHIAGGRERLRGSLYKASLSAAFHWNPQLTALYQRLIAAGKLHKVALIACARKLLIFVNTVVERGTPWVSSRSPAVRAAA

SEQ ID NO: 463066 - protein, 347 aa, unidentified
MKRIAVDLAKSVYQVAESVQVGRVDRRRRLDSGAFARYVQEQLEPVEWVMEACGTAHHWGRLMQERGHRVVLLHPRYVRPYRRRNKTDRNDCDAILEVARCQGIRPVPVKSVPQQQVQQLHKLREGWKKSLVQRINLLRGILREAGVEAPNGIKPLLRHACELIERPEVQTLRGALQVVLAEINLYEQSMRECEAQLARWHADDEIAHKLDEVSGIGLLTASALKTAVGKPERFASGRHLSPWLGMTPNEYSSDERRRLGRISCKGNVYVRTLFIHGARAALLAAKRCRTRTPERLTQLQRWALDTADRIGHNKAAVALANKLVRICWAVWCHERRFSGNWHSTKPA

SEQ ID NO: 463067 - protein, 350 aa, unidentified
MENAALIGLDLGKNVIHLHGQDRAGQQVFRKKVARTQLLKFCAALPPCTVGMEACGGAHFIARELAALGHQVKLVSPRFVRPFVKSSKSDFVDAEAVCEAVSRPSMRFVAPKSPSQQTLSALHRVRQTLLKDRVRTGNQIYAFLLEFGVSLPPRSNLAKHLPSVLASQSMPPSMVRLLTHLQAHFVYLQAQIAVVEKELSSELAADELGQRLLTIPGIGPITASALAGELGDGRQFASGRDFAAWLGLVPRQRSTGGKTTLLGIGPGTGKPLHTLLILCAHSYMRSVHRKTGPLAEWVRAVKLRRATNIVACALANKLARIAWAIASQHSRFEPEPMSRRLPETNSSSAP

SEQ ID NO: 463068 - protein, 399 aa, unidentified
MIYVGIDIAKLNHFASAISSDGEELIKPFKFTNDNDGFQLLISKLESFDKNSLIIGLESTAHYGDNLVRYLVAKNYKVCVLNPIKASTMRKNNIRKTKTDKVDTYIICKTLMMQESLRFVTFYDLDLMDLKALGRFRQKTIKQRTRLKIQLTSYVDEIFPELQYFFKSGLHQKSVYALLREAPTPEAIASMHMTHLAHLLKVNSHGRFDKEMAQQLRVLAQKSVGASDSSLSIQVTHTIQQIELLDSQLERVEAEMTEIMKFNDSVIMTIPGIGYINGGMILCEIGDIHRFSSPNKLLAYAGLNPSVYQSGNFQAKKTRMSKRGSKVLRYALVNAAHNVVKNNATFKTYYDAKMAEGRTHYNALGHCAGKLVRIIWKMMTTTWNLTSIKRSGYLHHRFV

SEQ ID NO: 463069 - protein, 335 aa, unidentified
MEHYVGLDVSLKQTSICVVNQAGSVLREGVVDSDPDAIGAFVSSNAPGVVRIGLETGPTATWLWTELKRLGLPVICIDARHAKAVLKMQINKSDRNDAAGIARIMQTGWFKEVRVKDIDSHSVRALLASRALLVKIKRDLENQIRGLLKNLGLVIGRAKFNVFAVRAEELIEDRPELMAAVRPLLEARKAIEQQVGDLDRKVLKLARDDVQVRRFMTAPGVGPITALCFKATIDDPTRFKRSRSVGAYVGLTTRRHASGEVDWSGRISKCGDAMLRTYLFEAANVLLTRVPKWSALKAWGIRLAKRNGLRKAKVAVARKLAVILHRMWVDRTEFN

SEQ ID NO: 463070 - protein, 423 aa, unidentified
MDILYERVAGLDVHKDTVVGCVRIAAGGQTQRECRTFATTTEGLTALAAWLEESGCTHVAMEATGVYWMPVWKILGQGDFELIVANAAHIKNVPGRKTDMNDAMWIADLLACGLIKASFIPPEETQELRSLTRTRKQLVREQTRHAQRIQKTLAEANIRLDSVLSDPMGASGRRILEAMIAGVRQPGKLAELASKQIKATPKELYDALHGRLTDHHRFLLDLHLRQWDGLDAAIRNIDREIGQRINRMEAQIGTEKAPFRALIDLLHTAPGVSTVAAPAILSEIGHDMSRFATAGHLLAWAGMCPGHDESAGKRRSSRLRKGAPWLKTMLVQCAWAAKRKKGSYYRAQFFRLQSRRGPQKAICAVAASLLTAIYHMLKYGVAHRDLGDAHFDSRPPDLKAKRLVAQLAKLGFAVQLQPLTQAA

SEQ ID NO: 463071 - protein, 375 aa, unidentified
MGEITRALIARVGVDLAKRVIQVHAVDAAGRRVVSRAFKREQFIAWCVQLPAGCLVAMEACSSAHHWARKLRVLGLDARLIAANFVSPYRMQGKSGKNDATDAAAICEAASRPSMRFVPVKTCEQQGVMSLHRVREGLKEERTGCINRIRGVLAEFGLVFGQGPKLLRAELADVIEDASNELSAMARRVLQRAFDHWRELDEHMRWCDRQVGQHVRTSAAAQRAAKITGIGELGASALTAGVGDFNQFKGGHQFGAWLGIVPSQNSSGGKTSLGRITKRGDDYLRTLLIQGAKAAVMSAGKRDDPISRWLVQLVARVGWQKACVAMANKNARILWAVMTRDKGFDPNHVSVKPQAKHSPRQPVATPPSGPAACAA

SEQ ID NO: 463072 - protein, 422 aa, unidentified
MLEETQDEQEIIQRVAALDIGKAELVCCVRVPDPKGGSRRVQEVKTYSTMTRSLQVMADRLLDLGVTRVVMEATSDYWKPPFYLLEAHGFEAWVVNAKDVKNLPGRPKTDRLDAVWLCKVAERQMLRPSFIPPSPIRRLRDLTRYRVALVSDQTREKNRVEKLLEDAQIKLSVVATDIFGVSGRDMMAAMIAGERNPQVLAQMARARMRTKIPQLEEAFVGYFTDHHRFLLAKMLARIDALNADIADVETQIEAQIAPFASAVARLDEIPGVGATTAAVIIAEVGVDMTRFPTPAHLSSWARFAPGVRESAGRKKGTGSTGHGDRYLARALGEAAVGASKTNTFLGERYRRIARRRGKKKAIVAVGRSILVIIWHLLGDDTARFNDLGPGYYDSRINPEHKKRNHIRELEALGYKVTLQPAA

SEQ ID NO: 463073 - protein, 452 aa, unidentified
MAEEPVEIDAEEHEQIVERVAAIDVAKASGELCTRVPHASIPGKRVTKVWSVAATTNAITALAEQLARERIERVVVESTSDYWRPFVYLLQARGLTVWLVNARDVKQVPGRPKTDKLDSVWLAKLNERGMLRPSFVPPAEIRRLRDYTRLRLDLTEERSRHAQRLEKLLEDALIKLSSVASDILGVSGRAMIEALIAGQRDPQLLAELARGRMRVKRAALVEALTGRFDDHHAELARMLLDQIDALSAKIDALTLRIEALIAQIPAAQAPAVDETRGGEGDDPATAPLAAVARLDEITGIGVHTAQVLIAELGLDMRQFPTPGQLVSWAKLSPRTIQSGARSRSGKTGKGNRYLRGALGEAATAAAKTNTFLGERYRRLVKRRGKLKALVAIARSILVIVWHLLADPAAHYRDLGSDFYAKRIDKNRRQRHLIRQLEALGYTVTLEALPMAA

SEQ ID NO: 463074 - protein, 359 aa, unidentified
MRVVAGVDCHKTSHTVVFLDAVGQIVEQLSIPTTEEGYERALSAGERLGCSEWGLEGAGCYGLAFAVFAGARSVQVLEVPGILTKRHRRHGSHRGKSDDNDARAIAEVVLREAGRLPRFHPAVMQRALRLRYDRRDRFVRERTRAANRLRMAAVLIGVVTLPRDVTSTKAARRLATLAIRFGEEVTLHQAVAAVVEDLQDAAEEIIRLNEKIRVVEAKLRALSREVAGDLHSVHGVSTVVAAGLIGHAGDMGNYRNAAAFAAKCGAAPVPCSSGRHVAVRLNTGGDRQLNRLLHIIAMAQVCAKAHPGRHYYQRKRTEGKTHRAAMRCLKRQLATVVYYRLCAVQRLVSTGHAELADVA

SEQ ID NO: 463075 - protein, 371 aa, unidentified
MHDTIFVGMDVHKGTISVAVADGARGGEVRHLGNFLNRADHVGKLVERLSKTGGRRLRFCYEAGPCGYGLHRQITDLGHECAVVAPSLIPVKAGDRIKTDRRDAVMLAKLHRADELTAVWIPDAAHEAMRDLIRARATAVKVLGKARQHLQGFLLRHGRIYAGKKGWTLPYRRWLTTLRFDHPAQQIVLQDYIHSVHDAEERIARLTKQIEELVPNWSMAPVVEAFQAMRGVAFVSAVTVVAEVGDFTRFDNPRQLMAYLGLTPSEHSSGTAIRRGGITKAGNALARRVLIEGAWTYRMQARVSRKLHDRLEGLPQIVRDIAWKAQVRLCARYRRLAATGKAKVVVTTAIAREMVGFLWAIARQAQVGSAA

SEQ ID NO: 463076 - protein, 344 aa, unidentified
MEHFAGLDVSVKDTSVCIVDDTGKIVREVKVASEPEALLAVLKNPAYHFKRVGLEAGPLSQWLYSALAGAGLPVICVETRHMRAVLKAQINKTDRNDARGMAQMMRVGLYRPVHVKTLRSQKLRMLLTHRKLLQSKAIAIDNDLRGTLRNFGLKVGVVGTVRFEARIRKLVENLPDLAALIEPLLIVRRTLREQFCILHRRLLAIVRDDEVCRRLMTAPGVGPVVSLTYRATVDVPARFRKSKSVGAVFGLTCAKYQSGEVDWNGRISRCGDEMMRVMLYEAAQSMMRSKKWSWLKAWAMQVARRCGMKKAIVALARRLAVIMHRMWVDGTEFRWTREPAAAAA

SEQ ID NO: 463077 - protein, 343 aa, unidentified
MEYYAGIDVSLKESSVCVVDSAGKIVCEIKVASEPEALVRYFDALGLPVGRIGLEAGPLSQWLHAGLIAAGREVVLLETRHVKAALSAMTVKTDRKDARGIAQLLRMGWYRPVHAKSAPCKDIRALLVGRKLLQGKLLDVELSIRGILRGYGLKVGEVSRGRFEARIRELTAGHAILEAVIGAMLAARMALWNEFTRLHREMLKIARADMVCRRLMTTPGVGALVALTYRSAVDDPSRFGKSAATGAYFGLTPKKYQSGETDRDGGVSKVGDGMVRTALFEAAHIMLTRATRFSSLKRWALGVAQRRGMKRAKVALARKLGVVLHRMWVDKTDFRWTNAVAAA

SEQ ID NO: 463078 - protein, 311 aa, unidentified
MNDTIGIDISKETLDAYWLSKRQHKQCSNTKMGLRLLIRWVQKAKVSLVVFEATGVYHRLLEVSLAVHDLPFARVNPRQARRFAEGTGTLAKTDRVDAAMLARMGSLLELKADKPKSETLHNLKELETARQALIKDRTAARARENIANYPLLKKQIGRRLQQIERDLARVDAAIEAIITADSTLSQKADILISIPGIAKITAYAMLIEMPELGSLSGKQAASLAGLAPISRQSGKWQGKERIQGGRAVLRKAIYLPAVVATRFNPDMKAKYHELIANGKCKKLAITAVMRKLVVMANALLRDGRKWTETRA

SEQ ID NO: 463079 - protein, 419 aa, unidentified
MKPLSDEFTAFIGIDWADKKHDICLQDGHSDRREFSRIEHKVDAIDQWAVSMRQRFGGPIAVALELTKGPLVYALQKYDFFVLFPINPATLAKYREAFKPSRAKDDPTDAEHALQLLMHHRDRLTALNPQSVPMRTLLHLVEQRRRVVDDKTRFTNRLGYALKQYFPQALDWFEHTDTIVFCDFLTRWPTLLQVKRARAASVKAFFWSHNVRYVNVINERIQAIKLARPLTQDVAVITAYRLQALVLVDQLRVTLRAIDRFDVQIAEIAPTLPDYALFKSLPGAGTHLTPRLLVAFGEQRERFATAAEIQKYSGVAPVTERSGNKCWIHWRWQCPTFLRQTFVEWAAQTINKSFWAGAFYRQQRDKGSSHQAAVRALAFKWLRILYRCWQTRTPYDESTYLNALKKRGSPLPNQLGTQT

SEQ ID NO: 463080 - protein, 438 aa, unidentified
MRKKKNKASKRVHFQSLPLINPNAAGIDVGAKEHVVAVPCDRDLQPVRTFQAFTPDLHELAAWLKRCGIETVALESTGIYWLSLYEVLEQHGLEVRVVNARHVKHVPGRTKTDVVDCQWIQKLHSFGLLNGSFRPDQQIRKLRTYMRLRDNLVVERTQAIHHMQKALFEMNVQLSNVISDVVGETGLRIIEAILAGERDPEQLAALCSTRIKASRQTVAKSLHANWDEALLFCLKTAVETYRFSENKIQDCDHCIGSVLAQFETRAQLPNARQNLQSQLHRVCGVDLTKIPGIKEQAAQIIISEVGLDMNPWKTEKQFASFLGLCPNNLITGGKVFRRATRKVYNRAADTLRLCAQSLTHSKSALGAKYRRLRARLGAPKAIVAMAHHLARLVYRMLRYGENYVEKGIEHYEQKFRLQRIKWLKKEAKSLNLQLVAAQ

SEQ ID NO: 463081 - protein, 386 aa, unidentified
MQKLNDLSRSLTALEPNGTLIAVIEMSLSSWLVAGIVPGVERQPLKKLAVDESALLKLLHRWREEAEKAGRRIERIAVAFEAGRDGFWLARWLKARGIEAYVIHASSVAVSREHRRAKTDRLDIELLKRSFLGWLRGERDHCKMVEIPTMQDEDAKRPNREHDSLIGERSRIVNRMKAALVRLGIRGFNPKLKRATTRLDGLHTPEGEPIPPNALAELRRDMERRRLVNNQIRQIEEERLERIEQAPCDGAHVMVRLLARVMGVGIETADMLVHEVLSRNMRDRRAVARYAGLTGSPDESGRKRREKGLARSGNVRVRRGMIQLAWRFLLHQKNSALTKWFRSRTENARGTRKPMIVALARKLLIALWRLVREGIVPDGVVLRAAQ

SEQ ID NO: 463082 - protein, 374 aa, unidentified
MSDHSEVYVAFDTSKLRHAVAIAEAGRTGEVRFVGEIEASEAATVKLVRKLAARYRRLTFCYEAGPTGYELYRLIRHLGHDCVVAAPSLIPRRPGERVKTNRRDAVSLARLLRAGELTAVWVPDARHEAMRDLTRAREAAVEDLGAKRRQVLSLLLRLGRHYPGRRTWTHAHMLWLAAQKIEHAEQRIAFEEMLLAIREAQARVARLEQAIRAAVPDWSLAEAVTALMALRGFDLVSASALLAELGDLSRFQTPRELMGYLGLVPGEHSSGDKVKRAGITKAGNRRARRILVECSWSYRHPPRLGKKKRAKMDAAPAAVQEIAWKAQSRLCARFRALVSKGKQPTVAVTAVARELSGFVWAVSRETARSATPVS

SEQ ID NO: 463083 - protein, 433 aa, unidentified
MHDAEDEPLFAERVAGLDIAKAGVDAAVRVPSDSSPGRRQQETRNFGTTRRELLALADWLRSWGVTKVGMEATGDYWKPVFFLLEAQGFDCDLYNAAQVKALPGRPKTDRADSIWLARITERGMISSSFVPPEPVRRLRIHTRYRRHLTQARTAEKQRVEKLLEDGHLKLSSVISDIHGVSGRDMLDALVAGQRDPGALAQLARGRMRGKIRRIEEALDCSFFTSEHAGVLAMMLAAIDHYTAQIEELTARIEVLMEPWAHQAGQLDEIDGIGMICAQDIIAEIGTDMTAFPTAAHLVSWARWSPRVRQSAGKRKGTSATGRGNPYLGAALGEAAAGAGRTQSFLGARYRRLTRRMPKKKALVATGSSMLTIIHALLSDPGATYRDLGADYHEQRTNARRQARSHIHSLERLGYTVTIQAVSPGTADPLTAAG

SEQ ID NO: 463084 - protein, 387 aa, unidentified
MKDSIAWVGLDVHDDSIAVAVAPLGAEPYGFGTFEPGAAALGRLLRRLEPKATELLFAYEAGPFGYGLLRRLQERGHGCVVVAPSRIPREPGRRVKTDRRDALALASLLRNGALTPVWVPDPHLEAVRDLVRCREQAKSDQTRARHRLGSMLRRYGRRFPGRSHWSQAHWRWIEQQDWQEREQRQVFDHYITCVQEARVRLESLERQMRASLEGWSLQRLVVALMALRGVRLVTAMTLAAELGDLRRFEKAGQLMSFVGLTPGVHASGKHTRRGSITKSGNAHVRRVLVESAQSYRYAPGLRGELKRRAARAPEAAQQIAWRAQQRLHGRYRDLTSRQMMKQKILVALARELLGFVWAIGQEIELPAPSGPCAGNRDVTDARLAGVA

SEQ ID NO: 463085 - protein, 400 aa, unidentified
MTESLIVGIDPGRYGHGVVVLRPEGEEVLRERVANEAAAIEALVGRVVELAGGPGRALWVIEADGGDGVVLIGELLARDELVATLTPTEVAARRKGRRQVHKSDLIDAELCARIGREEQATLRRLVAVPEAVAEVRVLARYQEGLIRDRTRLINRLRFLLSQYWPEFLAARAFAALDGDAVTALLVELPTPSAVRSKTPLELAGFLAAQRYRRRPLERAEQILAVAQVGTRPQEAVYGRLVAEVADELRALKQRIEALDVEIRDRFLLQPEAPIILSLPGMSHRTGPRFLADVGALARFGSPDALAAYAGLTPTLWQSGRSSGTHFLSRRCNLHLRQACWSAALGSLKTPASRRFYDRKRSEGKSHHQAVIALARTQLRVLWTMLRAGTLFSAERALEAA

SEQ ID NO: 463086 - protein, 450 aa, unidentified
MGNASGVSRGDRNRNARLARLRSLVPVTNAIVGIDLADAKQMVVVTDHDSKVLARKTFRCRAWDLGAALGWAAERAAAKGFSGVTVACEPTGHRWRVLGQLAADRSMPFVCVQPMLSSWARRSEDLTSDKTDEKDAVLIARLTAQLRCYVPEPVDETWGRLRHLGARREQLIVEMVSQIQQMRALLECVWPAALDTAKQPFRSKTWVAAMSAICERDGGDLDRTRRLGPARFEQAVRREILKRGGQKPSLRIARRLFAALTDPTGVIAHRPGALERVAFLLVDWHTAGDKLTDTEARMISVLGELKLTALATSIPGLSPVGAAAILAETGDPNRFASGRALVKHAGLAPREKLSGTFVGRTKLTGAGRPGLRLAAWRAVWGTQRGNTVYAARYRHLTSREQNKLTATQAQTVIAAAILRQLHAVITTGQAWDPDIATHGTGHRKQMPIAA

SEQ ID NO: 463087 - protein, 416 aa, unidentified
MKKGQNTRGYERYMALDIHREYLLVGAQNEEQDWVLTPRRVSIEKFSEWAKKNIRSGDIVVLETTTNVWTIYDIVAPLASRTLVANAAEVKEIANARVKTDKEDIKKLLKLLIGGIVPEVWVPPMHVRELRAFISYRGRLVKTSAMIRNRLQSLLHKHNLKMSETGLLDQAWWEAQKDISPLEKMQIRQELALLKEVEKLKTAVDEELQRQSTGALWGKPALQLMQLPGVGYIVAMTVLSAIGDISRFESAKKLVGYAGIGAGVHDSGKTHKDKKITKKGRRELRWAMVEAAWRAVGMFPFWKAEYEKYLSRLRKKNQAIVVIARKLLVAIWHVLSKEETDEHASEEDLAYKMLLLSWSLKEDTRMGLTYKQFAKYALMQLGVETDITRFVRRDVPRRLAPKEEVLARMTELGLTA

SEQ ID NO: 463088 - protein, 364 aa, unidentified
MEAPVKRHRTSVGLDVHARSVVGCALDGETGEVFERRLTPDYREMLDWLRSLPGRVVVTYEAGPTGFGLARFLIAAGMACLVAAPSKLQRASGDRVKTDARDAAHLARLLHLGQIVEVAIPSAGQEAARDLVRAREDCRGDLMSARHRVSKLLLRQGVVYSGGRTWTGKHQVWLRTQRFDAMPLQLAFDTALDTMLATVDRRNRLDEAIAELAADSAYTPVVTRLGCLRGVSTLTAFGLAVEIGDWDRLTGRSIGAYLGLVPTEYSSGNSRSQGSITKTGNGHARRLLIEAAWHHRQPYRPGVDLRRRWDAASPAARARGQVANRRLHHRWEVFDARKKRPVVANTAIARELAGWCWSLAVLDT

SEQ ID NO: 463089 - protein, 566 aa, unidentified
MNQNLQTHLGVGIDTARYGHHVSFMDEHKRTASKGFHFSENADGYEKLRKTIEQLIAKHPQALLHIHIDAAGQYAENLIQWLHQQSWPVVISVGQPARNKAYRKVHYDKRKADPVESLACARFAVVERPAAMHRPAVEFSALRDAVAQMESSASARTALVNQLHNMLARAFPELATLVADIASVSILKLLEKYPTAERLAAARLETLCKMPHIDEELAAKLHQAAKASTASLQNETSELLIKQKVQAIVAERKNQADIGKIVQNAVENLPDGPHRRLRTICGIGPQTEAALIAKIINIERFRSASALIGYFGIFPEEVDVSGVNKDGTPKTGKAFQMSRKGNDLVRRLLYTATQNAVRFNPPIRALFARLMANGKEYKTAIGHCMAKLLRQVYGVWTTDCDYDPEYESRNQASQEQLAQEEAKPAQEETKSVAGHSQEHVPSRKVVTATLSNIPAKRRPLNFAKLREQVSMSQVLELLDWTPTRSSRGTLRGGCPMHCTEAKNDSSFAVNEAQKAFCCHRCGAQGNALDLWATSQNLTLLDAAWDLIKRLRIDPPLLQTEKENCLV

SEQ ID NO: 463090 - protein, 346 aa, unidentified
MKTICLDVHSDWSQLVAADPNGVVFLETQVETRPEPLRRLIGGIPGPKRVLFEEGPLSALIHDALDGIVQEIVSCDSTRNALIARAEDSNDARDARRLITLDRAGAVHPVYIPHEPYRTLRSLLSHDRELAKTINGVKNRIKALFRREGISARGVGVFKPDGRKTATEQIGSPAMQWQLKSLYDQLNLLTRQRQRAHRLSARQGRGLPVVKRLQSTPGVGPITAQTLVAWIVTPQRFKSRSALASYAGLGIGQGFTNWRPVGHARASKRGQRAVKRVLFLAANAAIKGSNALARRYRARLAAGWPHRKAMRDIARKILLISQALWISGKEYQDDQVNVPDTPGQAE

SEQ ID NO: 463091 - protein, 441 aa, unidentified
MKTHEMKIVNSNAAGIDVGSKSHYVGVGQNLTDVKEFGVYSSDHQSMIDYLSENRITTIAMESTGSYWQTLFFALQKAGFEVLLVSGHQTKNLRAKTDVKDCQWIQKLHSLGLLRGCFLPDEPTNRLRILHRHRHSLVEESAKMTNKMQKALRLMNLRLDVVLSDITGKSGIAIIKAILSGERNGNALAQLADNRVRKSKAQITDALQGQWSDEHIYELQDCFELYELLQTKIQCCDQRITTLLEGYTEDVVFDPKQIHLTKKQVKGKNQPRFDLTTLSYKYYGVDLFAIEGISMNTVLTLITEIGQGIYKFKTAKQFASFLRLTPNNRVSGGKIISSRTKKGSNKFALALRNAANTIDRKKEGNLMLFFKRIAYRKGRAAAITATARKLAVIIWNMIVKKQPYNPINQIDYKESIKAKAIKSIQKRMKKLGITNTQLSTT

SEQ ID NO: 463092 - protein, 359 aa, unidentified
MKPMLAGTVEFVIGVDTHRDSHTAAILQAATGGVIEQLTVPTDAFGYRRLKAFADQHAAGARVWAIEGTGSYGAGLTSALLEHGEWVVEIDRPARPARRDGAKSDELDAVRAAREALSREHLAAPRARGDREALRVLMAARQGAVVARTKAIGQLKALIVNAPQALRDQLRRSSTDEQLQRCARLRTLPSHSIEHRATIRALRGTARRALALEAEAAEYETELEQLVVAICPVLLEQPGIGTITAAQFLISWSHAGRVRSEAAFASLGGAAPIPASSGATVRHRLNRSGDRQLNRALHTVTLSRLRIHGPTKAYAARRTHEGKSPRDIKRCLKRAIAREVYRLMNAHAAAVARNLPMTA

SEQ ID NO: 463093 - protein, 473 aa, unidentified
MSTSKQPASTGGSGPRIAQSKRGSHKKEGGQAVFQPNAAGIDIGAREIYIAVPADRDNDPVRKCGTFTSDLDEMAEWLVSCGITTVAMESTGVYWIPVYDAVERHGIEPCLVNPRNVKNVPGKRTDFHECQWIQHLHSLGLLHAAFRPESQVCAVRSLMRHRNDLVQMASQHVQHMQKALTQMNLQFQHVISDLTGLTGLAIVDAILAGERDPAVLAKLRDPRIKADQETIRKSLEGNWRIEHLLVLKQRLSLYRSYRDQIHECDKEIEKLVAAFAPQVDPAAKPLPEDRKKRQRQRKKKSGSPDFDMRTEAYKLFGVDLTQIPGLMTLVFMLFSEVGRDMTRWPTAGHFVSWLGLCPDNDISGGKVLWRGARRTKNRAGTLFRMAASSLYREQSPIGDYLRRMKAKLGPAAGTTATAHKIAIIFYTMVKNQVEYDASLWAKRDLMREKRLEARLHKQAAQRGYKLVPLEAAA

SEQ ID NO: 463094 - protein, 357 aa, unidentified
MTTQERQRTLFVGIDVHKDTHTAVGVSPFGEKFFEITVGNYKKDFEVLTDKVKEMSKTLSPYFGLEDCHGYGERLSTYLYENGHHVLAVPSIMVDRARQKATHPEKSDSLDALGVAKVMMQNMDSLPPYTISEDSKKAKQIKELSMDREYLVDERTRLKNHLHTVLHRIWNTEYKDMYKDPFSLKALRYWSKSKPKCDPFLLRSMKKKVKRLLDVHYEIIDLEKEMETLIDGDYTVQTAPGCGVTIAGMIIGEIGDINRFHSPGALAKYAGCAPRECSSGKTQRHRKTRSGNRRLNCAFHRMALSQISRSGNEKAKAYFKRKVSEGKSKSQALVCLRRQMVNIVWCMLKNKIVYRIA

SEQ ID NO: 463095 - protein, 340 aa, unidentified
MGEVTTVGFDLAKNVFQIHGIDAEGSTVLRKQLRRAQVLAFFSKLPRCVAGMEACATAHYWARELRELGHEVRLMPAQYVKAYVKRNKNDAADAEAICEAVMRPTMRFVPVKTADQQAAVLLHRGRERLVRQRTMLANALRAHLAEFGVIAPQGLRNISKLIAIIRDENDARLPDLARQVLQVLATQMEQLEGAIAALEQQLMAWHKSNPVSQRLATIPGIGPIIATAIAAAVAEPSGFRSGREFAAWLGLVPRQNSTGGKTRLGRISKRGNQYLRRLLINGASANLLRSKATNADPWVIGLRRRRPSLVVAVALANKTARIAWAVMHRQKDYQRMAAAA

SEQ ID NO: 463096 - protein, 359 aa, unidentified
MQTQKTGLDFKGQNIFVGIDVHLKSWTVTILTEQLTHKTFTQPSSTEILCNYLKSNFPGGDYNSVYEAGFSGFWTHYKLKKMGINSIVINPADVPTSQKEQLQKDDPTDSRKLARSLRSGDLKGIYIPSMETLNDRSLVRMRSTLVKDMTRFKQRVKSFLYFYGIAYPPEFENSGTHWSNRFMKWLNEVSLQQESGTQALKILLQEVDGQRKLLLEVLRKIRLLSHSERYAKNVALLRTISGIGLITAITFLTETETIERFENTDHLAGFVGLVPNYHSSGEKSNNGEMTFRGNNLLRSYLIENSWIAVRHDPAMMMSYQNYIKRMEANKAIVRIARKMLNRIYFVLKSKKEYVPGVVK

SEQ ID NO: 463097 - protein, 403 aa, unidentified
MNNVAGIDVSKGKSMVSVLRPFGEVVAKPFSIGHTGSELKELADYLKSLDGETRVVMEHTGRYYEPVARFLHEEGVFVSAVNPKLIKDYGNNTLRKVKTDKADARKIARYGLDNWAELRQHTPMDTIRMQLKTLNRQQSLYTKTKTMMKNNLIALLDQTYPGVNALFDSPVREDGSQKWVDFATAFWHVDCVRNMSLTAFAERYRKWCKRHGYNFSQSKAVEVHAGAQDLIAMLPRDALTKTMVRQAIDALNAISASMERLKAEMQALAAQLPEYPVVMAMHGVGDSLGPQLMAELGDVTRFTHRNAITAFAGVDPGADQSGTHEAKSTRVSKSGAPELRRALFLVMDCLLKTQPQDDPVYRFMDKKRAEGKPYLVYMTAGANKFLRIYYGRVKEYLASLEGN

SEQ ID NO: 463098 - protein, 355 aa, unidentified
MEGAKYIGMDVHKDSISIAVLNSSGKLVMESIIETKAITILEFVHGLRGSLHLTFEEGTWAAWLYDLLKPHVTKLVVCDPRRNGYLKQGSKSDRIDARKLAELLYSNMLRPVYHGEHGVRPLKELARSYLTITKDQARVMTRVKAVYRSWAIPCAGKQVYGQRHRLEWLGKIQEAGVRRRAEFYYVQLDALRSLRLVVRRELLLESRKHDASKLLSQIPSIGPIRAALLIALLQTPDRFRTKRQLWAYSGLAIETHDSAENQYVNGQLQRSRKQASIRGLNQNHNPDLKNLFKSASAVAAVKAGPFQKFYAALIGKGIKPEMARLTLARKIAAITLIVWKRGVSFDARYLNPQTA

SEQ ID NO: 463099 - protein, 358 aa, unidentified
MRIIGCDLHARQQTIAMLDSDTGELEEKTLEHEGDTVREFYSALPGPILVGIEATGSMQWFLEMMEELGIECRVGHPAKIRKAETRKQKHDRRDARLLLTLLAENRFPTIWMPSTEQRDLRTLLRHRHQWVRLRSRVQHTLQSMALNHGLRRGHSLWSRAGQHALRALPLAPHAGERRKALMTLYPCLQESIDELDRQVSQQVDRHPPARRLMTHPGVGPITALATEVFLGDPLRFIDGKAVASYIGMIPSEHSSGGRQRLGAMSKQGNTLLRYLWCEAAMHAVERDPELKRFYRRKLVQKGLGKARVAAARKLGIRLWIMLRDQIDYQEFCRRGQARQESGSVRAGMPAINSGPAEA

SEQ ID NO: 463100 - protein, 348 aa, unidentified
MAIVGGFDIHRRQVTFDYLDTVSGQVRRGRIDPACRQALRAWLARLAGCDDVTFAVEGCTGWRLVAGELQRAGITALLAEPAGTAHQRGPKKRAKTGKADARHLRALVAEGRVPVSWIPPEQARELRVLLQLYRDLREEHTAWAQRIHATLFHQGVPGLAGRLADPQVRARLQAHGAEVGLSPAGAQAVQVALRRMDDLEAALTPVHAQITAFARRQPGCKALATELYGAGPLVAAIVWAFLGDTRRFSSSAQAVRHTGLDVTVYSCDDKRTPGHLSHQGPPILRWALFEAGHQGSRASSPGHLYYTDVAARIDANRAALSVARKLARRSHHILRRPGDAAYAPLPGW

SEQ ID NO: 463101 - protein, 427 aa, unidentified
MEQEQLNRVERFRQFRKQIRGSEQYLVVGIDIAKSKHHATFATTKGRIGHRGLFFENTASGFEHLLTQAQFYQDRDGFQQIVFGLEPTSVYQKPLAEFLIQQGFLVVYVTNEAIKDNRRTMDGRWDKHDRKDSANVAELVGQGKCQYYDLPNMHLRDIRNLLLLRKRLKKQLHGCRIRIRNNLVAQYFPELDGLWHQCEGENLAIVRWCLSPAKIHGLRFEDFFQMVTSGTKGVRQYQRLRQIWEMAPYSIGCRAGQGLELEAQVMVGLVEYIRKQLDQVQKMIEELCRSFVEYEYLLSIPGFGTYVSAVVLAAIGNPLRFNKASELIRLAGFDLSAKRSGKTSCSAVPVISKKGKADLRYALYQAALVASSRTPRFKAYYHRVLEGRQREKGIRTKMRVKLAVKLLVIAWTLMKKREYFDPDYIKI

SEQ ID NO: 463102 - protein, 351 aa, unidentified
MSLVVLGVDPHKQSHTATALAAGSQQQLGSLRIPASPAGYEQLLGWARQFPQRRWAIENARGLGCHLTQWLLARGETVQDVRTTATARVRELSRGRGPVTDVLDAAAAAGIAALQGDTAQLQPDDTTVVLAVLEERRSNLVGQRTRSVNQLHAVLRELVTGGAPRKLSADKAATLLRAVRPLTAADRARKQVAWDLVAEIRGLDRQLAVINKRLHDTVTALGSRLPETVGVGPVIAGRLLGRTGRASRFPTAAHFASYTGAAPLEVASGEHARHRLSRAGDRQLNHALHLIALAQVRSPACPGYHYFRRKLAEGKTTREALRCLKRRIADHVWRVMLADEQARDRRRLQAS

SEQ ID NO: 463103 - protein, 345 aa, unidentified
MVVLGADLHKRSHTIVVIDATGRQLAEKTIAATDAGHLELRHWAAQWPERLWGLEDCRHLSRRLDAELVRAGESVVRVSPKLMAGARRSGREPGKSDPIDALAVARAVLREPDLPVATLDGPDRQVRLLVDHREDLVGERTRHEQRLRWFLVELAIADPAPPSLGRAVVQDTLASALAGRIEPVARFARELLGRIVELSATIRALEHEIEIHVRTSAPTLLALPGRGALTAAKIIGEAAGISRFRSKEAFARHNGSAPVPVWSGNVVRHRLNRGGNRQLNVALHRIAITQVRPVGPGKTYLDHRQALGDPRTEAIRALRRRLSDEVFRRLRADEAAGSTGQAAAA

SEQ ID NO: 463104 - protein, 426 aa, unidentified
MRFIGLDVHKDFCEVAVVEGDACWSGPRVRSTPEDLEVFAQSLGPKDQVVLEATGGALAIARILEPHVGRVLMANPMAVRAIATAKAKTDRLDARTLAKLLAAGFVPGVWISDERTRLLRRLVSRHAHLVRQRTRAKNEVHAVLQRTLAGRPPVSDLFGKRGRAWLGAQDLPADERQTVEASLRHIDFLDGELRLVDRTMAIQVLCWPEVRWIMTIPGMGAVAAAGVMAAMGDVRRFPTSRHLVGYLGLDARVRQSGSGPARHGRISKQGSAEARHLLVEAAWAAMRTPGPLRAFGERIRARRGANIATVAVARKLAVLCWHLLTREEDYAFGQPSLVREKIRRLELAAGAPNRNGYRNPVRVFATPAQRRLEREVGDQAEKAYRRFVKDFRSSGKKGAGATTGARISAARKGQAARQEQAPDPAL

SEQ ID NO: 463105 - protein, 313 aa, unidentified
MKEAERVYAGVDISKSSLDAAVSRGGEVMSFKNSDEGIAGLVSYFKGFTLELVVMEATGGLEKMVAASLTEAGIAAVVINPRQARDYAKAMGLLAKTDTLDARTLARFARDIRPHVRPMPDETTLKIKAAMARRRQVMGMITAEKNRLHGTDLSVRPLIEAHIVWLSGQLKEIDRNLDSQIKNSPIWQAREKLLRSVPGVGPVLSRTLMGLLCELGEMNRKQAAAQVGVAPYNRDSGTLRGKRAIQGGRTAIRSPLYMGALVATKCNPVISAYYQHLLDVGKSKKVALTACMRKLITILNAILRDNRPWQYAG

SEQ ID NO: 463106 - protein, 370 aa, unidentified
MKRKVYVGMDVHKETIQIAILPSNTKALVKEQQIKHEEGQIKKFIQKLKSEGTEIHCCYEAGVTGYPLYRYLKTLGVNCTIVAPGKIPRQNSDKIKTDKRDAIKLARLLRSGELESIHVPSEEDEAVRDYLRSRDSLRLDLGRNRQRLMKFLLRKGITYSTTKYWTASHYKWLNNLHFENEILQATFNDYYSRVRVQEENLKAMDQKIREIAESEPYREKVGILRCFRGVDYLTAMFLLSEVNDFKRFKTAGSFMSFLGLVPGEYSSGPRRKQTSITKTGSPRLRRILVEAAWQHRFPGTGSKVVVARRVGQSALVVSLAEKASLRLHKKFKSMQLRGKNSSGNDNRRLKGIIRVSLGSYELGCLNWSNM

SEQ ID NO: 463107 - protein, 351 aa, unidentified
MPATSQIAIAVVGIDIGKNSFHIVGLDDRGAIVLRQKWSRGQVEARFANMSPCLIGMEACVGAHHLSRKLMALRHDARLMPAKYVRPYSKGQKNDFRDAEAIAEAVQRPTMKFVATKTADQLDLQAQHRVRERLVSQRTGIINQIRAFLLERGIAVRQGQRFLRAELPRILATPPDVLSPRMVRVIEDLASDWRRLDERIEGLSGEIEELAKRDAGCERLMSVPGIGPIISSAMVAAIGTGDGFSKGRDFAAWLGLVPKQISTGDRTILGGISKRGNRYLRVLFVQAAWVVLVKVKPNRWDGHGLKPWIEAAKRRLHRNVLVIALANKLARIAWSVLARGRAFEASKLQAA

SEQ ID NO: 463108 - protein, 364 aa, unidentified
MNKCHLNTELSSHEGTRCQFNGGRCTIKLGIDVHQDFYVVAEQVGGTNPKPPQRFQKQAFLHWAAKLKQSGAEVYAVYEACGFGFSLQRQLSALGINCYVVCPQKLDERNKRVKTDGLDAKALCLKLDRFVQGNRDALAIARVPTEKEERSRAIHRHRQQLVGARKRLEAQGRSLMVNHGLEPVQNWWKPRTFAVLPVPQWMRELLANSQPILVALQQKIAALTVQLQSAAAPNQPRGLGKMTSVVIDREIGNWHRFNNRRQIASYTGLCPGEYSSGNTRLQSCVTKHGNPRLRAALVELAWRLVRFQPNYKPVRKWRQILAKGALATGAARKKAIVAVARQLAVDLWRVRTGRCKPEVLGLVS

SEQ ID NO: 463109 - protein, 345 aa, unidentified
MWYCGMDVHSRLTAFHLLDAAGLTLRHGTLPTTEESVGEFCRGLGKATHVFLEASTASAWFARNVDANGHRVTVVDPNRIRAISNSPKKTDANDAATLASLGRAGLLAPVHVRSETTDRFRHVLTARHAMVRARGDLIRVARAVMRSEGHLLPDADGDDFAKRLVETWGIPEGQEKAVWPLAQAIDKITAEIKFAEEEIELVAQANEASMKLLTGIPGVGRLVATSFMALMESASRFTKASQVAAYLGLAPWVDESAGKRKESGITKRGNRATRALLVQAAWAHVRSKMDTALKQWHRKLEKRVGKKKAITALARKLGELMWTMWLKGKAYQPFPPTSRRAPAPT

SEQ ID NO: 463110 - protein, 364 aa, unidentified
MNNELYLELSSLEETRCQFNGGSCAIKMGIDVHQDFYVVVMQEGGANPKPPQRFSKEAFLQWAAKLKEKSGAEIYAVYEACGFGFGLQRKLTALGIHCYVVCPQKLDELAKRVKTDGLDAKALCLRLDRFVQGNRHALALVRVPSEEEEQQGALHRQREQLVKVRKVLEAQGRSLMVNHGIEPVQQWWKERAFAALDVPVWMKALLANNQPILLALQRKIAQLTLQLENAAAGEPPRGLGKMTSVVIDREIGNWRRFNNRRQIASYTGLCPSEYSSGGKRLQSCVTKHGNPRLRAALVELAWRMVRFQPNYRAVRKWKARLSKGQLTTGAARKKAVVALARQLAVDLWRVRTGRLTQKQLGLEI

SEQ ID NO: 463111 - protein, 427 aa, unidentified
MDYTQNAKIAQVTEKTLIIGVDVGSETHYARAFNWRGQEFSKKAFSFGNDLSGYLAFVKWLDAYRQSMDAEKIMVGCEPTGHYWFNFARYVKQSSMTLVLVNPYHVKQTKELDDNSPTKNDRKDPKTIAKLVSEGRYTFPYMPEGIYADLRQAVSSRDRIVKELNASTNRIQRWLQIYFPEFLKVYNKFSAESALLVLETVPYPADIIALGAEGVNQIWREHKLRAVGMKRATTLVEAAQKSVGMDGGISAKLDLQMLLEDFRRKQEQLKRITEVLEAETRKVPHIEKLLAIKGVGLITVAGFLAEVGDVGRFDSPKQIQKLAGLELKENSSGKHKGQSSISRRGRKKLRKILFQAVLPLIRSNDEFREVYHYYTTRQKNPLKGKQAIVAVGCKLIRVFYAILTHGVDYDANRLRTNIIRPQEQQAA

SEQ ID NO: 463112 - protein, 377 aa, unidentified
MEYIAFDSHKRYTFASVEEQTSNVLSTGRINHSRGAITEFLSEWKPGTEVAVETIGNWYWIVDEIEVAGMVPRLVHARRAKMMLASVNKTDKLDCFGLNRLQRTGTLPTVWIPPAEIRDLRDLPRTRMVLTRQRGRLKNRIHATLAKYGITIEGASDAFGRKGMQELEAKLVLLPPHSRFCVERILEQLEAVQVQIELLEGRMKNAFRTNREIELLQTLPGVGFILAVVILLEVGEISRFPAASRLASCAGTTPRVHASGDKMRYGRLRPDVNRYLKWAFVEAANVICVNHRRFPIRHIDRLYIKIRQRRGHHKAVGAVARHLAEATYWIFMKGESYREPQQHAVSSTKGQARTSTEPIGKARKVIATPLRDIIMPQ

SEQ ID NO: 463113 - protein, 332 aa, unidentified
MLYKNYVGIDVSKLSIDAFIRESRIHRQFNNEESGFKQFIRWIKEHIGEGLESLLICFEHTGLYSLSLALFLEREHITYAMVPALDIKRSLGITRGKNDQIDAKRIAEFAYRFNDRVMPTSLPAEDIRKLHSLLAMRDKMMRNMGGYITSRNELFRVIPDRKLPVLTSVYENIISTLKNEVHELEREIRSIIMANKELKTTFELITTVKGIGFIVASFLIVYTCNFTRFENWRKFACYSGIAPFEYQSGTSVHARTQVSSIANQQMKRLLHLAAMTAIHFDAELHNYYVRRQSEGKSKMATINIVRNKLIARVFAIVKRGTPFVDIQKYAYW

SEQ ID NO: 463114 - protein, 338 aa, unidentified
MRVPGDTVISNREEHSVAKPVVPYTIGVDVAKDTLEIYHWDSGQRESIANTARSIRAWLRRLPAQSELALEATGGYHEPLLERALQAESVVYLLNAQQLAAYRTATGGRAKTDASDAELLARFVDRERARLRPQRWIALEQRRLRRLLKRRALLVNMRARLQQSREVTPELKGEFSTLIAGVRRMIAKVEQQMRALVRQLGWAQELQLCMSIPGVGPLSAIALLESYRRGAFESIDAFIAFLGLDVRVRDSGRYTGRRKLTKKGDPENRRLLFNAANSAKQCSAPHAAYYARLRARGLSATAATMALGRKLARQAYGVLHSATPYRTPNQAEGGCMAP

SEQ ID NO: 463115 - protein, 412 aa, unidentified
MEGETVIAGVDTHKDVHVLCLLDGLGRKIWSGSFGADPEGYDRLAEAIGDPGSCMVVGVEGTASYGAGLTRRLVELGYNVVEVLRPKRDKVRPGEGKSDPLDAERAARKAASGRGCSVPKSQDGWVEAVRQLYVARRLAVATSTSCVACAKSMLTTAPSALRERFRGRERPKDLMPLPARGRKAGDALEESVLASLRSVAAVWKEARSQVESLDERIRALLEANAPALLGVEGCGTTTAAALVVAAGDNPGRLKGEAAFSMMCGASPISASSGKTDRHRLNRGGNRQANWALYEIAIKRMAYDERTRRYVARRTSEGKSRREAVRCLKRYIAREVYHVLMDPNPDGAAPEGPELAKMRKAMRVTQKKAAAELGLSAATLGHLERGKRRSTKLERRYYELLCELERTLPQTAS

SEQ ID NO: 463116 - protein, 348 aa, unidentified
MIIIGVDFHPEFQQIASVDTDTGEIQEKRLAHREEAEKFYRSLAGQKVRVGMEASGHARWFERLLAELNFELWIGDAAVIRTKRVRKQKTDRQDAQLILQLMLENRFPQIWVPSWENRDLRQLLWHRHRMVQARTRIMNQLQAVALNEGLRCKKRLWREHGREQLESFRLAPWASRRRRDLLELMDRLNPTIAELTQAIEQEVEKCPEAQRLRTHPGVGALTALAFVLIIGQAERFQCGKQVASYLGLVPLEDSSGSRRRLGHITKQGSSILRFLLVEAAQVTVRSLPEWRSKYLHLMMRRGRKIAKVAIARRLAVRLYWMMRQGWDYQQWIKFGSHAGESGNRHGVQ

SEQ ID NO: 463117 - protein, 416 aa, unidentified
MTKTLYVGIDVASRSNTAQWMDPTGQALGKPWTFPNTLPGAQALETRVAEVLRQGAYEHVKIGLEATAFYDWHLADALAASALLRPWHPEVYRLNALRVARFRKAADEPDKTDRVDAAVIADFLRVGRNLPAPHVSGDPYLPLKRLTRYRFHLVGTLVRETSHFLTHLFLQCSGLAQANPLGRPLGATGCALIEAFPSVEALATLPVEELVTFLVQQGKNRFPDPAQMAQRVQQAARESYRLRPELARSEHFILANLIRTIRALKASLKEINKAIAEELAAFPNTLTTLPGVGPVLAAGILAELGDIRRFASDDQVAKLAGLVWKRHQSGQFEAQDRRMITSANKYLRYYLVEAANALRMHDASYRAFYEAKYQEVPKHQHKRALVLTARKLVRLVYALLTRGQIYRPAAVQPAGR

SEQ ID NO: 463118 - protein, 433 aa, unidentified
MPSLPIILLNVSVLKGVPMALKIVYKICCGIDIHKNFVVACIAKTDMQGVTTYERHHFSTYTKGLKQLLKWLLDRNCKDVCMESTGKYWIPVYNVLEHDCSIVLAHPKYVKAIRGKKTDKKDAKWIADLFKHDLVAGSFMPPADIRQLRDLMRYRFKLTCFKSSEKNRYQNCLTVSNIQLASVVSDTFGKSSQKIIAKILENPDDTSFDIGPLIHGSMKDKLPELELAIDGYITPEQAAKLKIIKEHFDNLEARKAELEELILALANPYQQEISIILTAPGFKNTFTAIGIISEIGTNMEAFPSAKHLCSWAGLTPTNNESAGKKKSVRVSKAGCYIKPLLVQCANAAIKSKKHPEIRGRYLRIKKRRGHKKAIIAIARMLLTALYHMLKNGENYNSDLYQKSDILPITREITVEQAILMAQFQGYRIKSATD

SEQ ID NO: 463119 - protein, 344 aa, unidentified
MTYYAALDVSLRTVNICVIDDQGEIQAETKLDSEVTDIIAYLDDLDLEVTSIGLEAGTLCQYLTYGLQSAGFEVVCMEARQVKAALSAMRNKTDKNDARGIAQLLRSGWYSQVHIKSMASHRIRALLSSRKAVLCKCIDLEQEVRGLFKVFGIKLPPKLGHGAFDAAVRGIIETDATLSHALLPLLDARLALYHYFRELDNRTRNMAHADPVCQRLMSAPGVGFITALTYKAGVDDPARFKRSRTVAAHFGLTPRRFQSGEIDIDGHISRCGDQDVRCTLYTAANALMTRSSRWSSLKAWGMHKAKTRGHRRAVIAVARKLAVILHRMWVDDTQFNWGMEDARS

SEQ ID NO: 463120 - protein, 360 aa, unidentified
MRIIGCDLHARQQSVAMLDTETGEVVNRTLMHEGNAVREFYSELPRPVLVGIEAIGPMQWFLDLLEKLGIECQVGDAAKIRAAEPRKQKHDRRDAELILKLLVENRFPAIWRPSQELLDLRALLLHRHHWVRLRTQVQNALQAIALANGLRRGPGLWSYDGQAKIAFLPLAPHASYRRSMLQTLYRKMDEEIEQLSAQVAEQAEQRAGARILMTHPGVGPVTALATEVFLGDPQRFADGKALASYVGLIPREYSSGAHQRLGALTKQGSPFLRFLWNEAAAHAVRRDPELQRFYRRKLVQKGLGKSRVAAARKLGIRLWIMLRDQIDYEEFCRRGQKQSGAVCAGVLEVGNGANRHRPVD

SEQ ID NO: 463121 - protein, 358 aa, unidentified
MAQISMTELESVRVTVGVDTHKDAHVARAKDELGRRLGQITVPASVSGYGDLLAWARSFGEIGRFGVEGTGCYGAGLTRYLRGRGAVVVEVIRPNRQARRRNGKSDPADADAAAMAVLSGEASGRPKAGDGAVEMIRVLRIARATAIRARTQAINALHALVVTAPEDLREDIRGLSGPKLVRTCAAFRPGSPVGPTDATKLALRSLAKRTVALKKEVQILDRELERLTADASPALLGIFGAGPETAGALLVAAGDNPERLRSEAAFAKLCGVSPVEASSGKTTRHRLNRGGDRHANAALYRIVLVRLRQRHQPTIDYVARRTAEGKSKREIIRCLKRYVAREVYRVLTEGHATTSSAA

SEQ ID NO: 463122 - protein, 412 aa, unidentified
MDVLYERCCGIDVHKKTVVACLITPGANGAPTKETRTYGTMTGDLLELMDWLVDAGCTHVAMESTGVFWKAPYNLMEGVLEVYVVNAAHIKTVPGRKTDVKDAEWIADLLRHGLLRPSFIPDRPQRALRELTRYRTSLLQERSAEVNRLQKTLEGANIKLAGVATDIMGKSGRDMLAALVAGRTDAAALAQLARGKMREKLPQLEKALRGQFGPHQRFLVAQQLAHIDGLDDIIDRVSAEIAERVRPFEEAIVQVDTVTGIGRRTAEVLVAEVGTDLARFPTPRHLASWAGLCPGNNESAGKRHGGKTRKGSPWLRAALVEAAKAAGRSKKTYLGAQYRRIAARRGAKRAAVAVAHSILVIVYHILTKHETYHDLGVTYFDERDRQAVERRLVKRLQALGYDVSLQPAVPAA

SEQ ID NO: 463123 - protein, 372 aa, unidentified
MTEITRAQIVRVGVDIAKLVIQVHAVDGAGRRVAARAIKREQFVGWCAQLPAGCVVAMEACGGAHHWARQLRAMGLDARLIAAGFVTPYRMQGSGGKNDANDAAAICEAASRPTMRFVPVKTPAQQGLMSLHRLREGYKEERTACINRIRGVLAEFGLVFAKSAKALRAELADTLEDASNELSGTARMALQEAFEHWRVLDDRLRWCDRQVGEHVRSSAAAQRAASITGIGALTASASTASVGDFGQFRNGGQFGAWLGLVPRQNSSGGKTVLGRITRRGDDYLRTLFIQGAKSALMSAHKRSDPISRWVLELKERVGWQKACVALANKNARILWAVMTREAGFDAAHVSVKPAAKAKPAQGSAPDVPALCA

SEQ ID NO: 463124 - protein, 403 aa, unidentified
MNNVAGIDVSKGKSMVSVLRPFGEVVAKPFSIGHTGSELKELADYLKSLDGETRVVMEHTGRYYEPVARFLHEEGVFVSAVNPKLIKDYGNNTLRKVKTDKADARKIARYGLDNWAELRQHTPMDTIRMQLKTLNRQQSLYAKTKTMMKNNLIALLDQTYPGVNALFDSPVREDGSQKWVDFATTFWHVDCVRNMSLTAFAERYRKWCKRHGYNFSQSKAVEVHTGAQDLIAMLPRDALTKTMVRQAIDALNAVSASLERLKAEMQALAAQLPEYPVVMAMHGVGDSLGPQLMAELGDVTRFTHRNAITAFAGVDPGADQSGTHEAKSTRVSKSGAPELRRALFLVMDCLLKTQPQDDPVYRFMDKKRAEGKPYLVYMTAGANKFLRIYYGRVKEYLASLEGN

SEQ ID NO: 463125 - protein, 337 aa, unidentified
MDRQYVGIDFHRRRSVIVRLSGSGERLGLHRIVNEPFELAKVIALCGEAPQVVIEATYGWYWAVDLLQELGAVVHLANPRALNWGDRRVKNDVNDATDLADMLRLNRLAEAWIAPPALRELRELVRYRAKLVQLRSGLKAQVHAVMAKEGALPVVSDMFGPAGMRQLDQLELAAPFARRVRSLRDLIARYDREIIGLERDIHQHLKSHRGYQAVQAINGIGRVSAAVLVAEIGDVSRFPTAAHLCSWVGLTPKHRESDLKTRRGRISKQGSRLVRATLIEGISRYHGGPVLAGQYHQLAKRRGRNKARVALARKVLTLVYYGLRDGEIRCLAQADAA

SEQ ID NO: 463126 - protein, 371 aa, unidentified
MESIIYVGMDVHKDSYSICCYKADEDRFYYEKKVNAESKRVLKYLESVNKEFGEDCLLMCGYEAGPTGFGLYRDLIKAGYICVVIAPTSLKHSSNHKIKNDKVDARFLAKTLFTKDYSSVHVTTEHEEAIKEYCRMRLSLKKELTRAKLVLQSFLLRHDKKFTEGNTWTLKYRDWLNKIHFEEDYLNEALNEYMISVNTYEARIKAIENRLKQISLDPAVKDKVDKLVCFCGIETVSAVTIISKVGDFNRFEKAYHFSNYLGLTCGEKSSGQKEKHLGITKSGDRELRCLLSECAKSIKKTSIKGKKSKRLLDRQKEKDPKVIAYADKCRYRLRSKIAYLELRGKSANVATTAAARELACFIWGMMTDHIA

SEQ ID NO: 463127 - protein, 343 aa, unidentified
MQVIIGVDPHKASHTAVAIDAKECQLSAKKVRATRAQVSQLLEWAEPFPTRTWAIEGADGMGYLLAQQLVATGEHVLNVPATLASRIRLLGTGHSSKNDPNDALSVAVAALRTSGLRQVRPVGHGEVLRLLAKRNSDIGRQRCRVVSRMHALLLELDAGGIAKEIKASDVDRFLAAVQPTTPAEQIRYDVALELLADIRRLDEQLKTSHKRIATAVAASGTTVTDIFGIGPVIAAMLIGYTGDITAFANRDRYAAYNGTAPVEFSSGGRTVHRLSTRGNRNLNHALHLAAICQIRHAHSDGRAYFDRRIAEGKTKKEAIRALKRQISNSVYRQLVADTACTRG

SEQ ID NO: 463128 - protein, 404 aa, unidentified
MHYYVGLDLGDKQHSVAVMNEKYTLVHESTVKNDQVGLETLIAVLQSWRDVHLIAEQPNGLFVENLVALGYDVWHIPPKVAHHRQVGESKDDRRDARLLAQLLCSRDVYSRPVALSSPEARAVAQLMHAYEHLQSVQLAMSGQLRATLKRYYPIATQLFSRLHQPLTLAFLEAYPTPEAAQAASLEELATFFKEQSYRYMERVPTIYAQLQSPQLKAAVTSGYETMVQAWIACLHEMNQSLKQIKKQIVAACQAHPEYTWWRALPGVGLLTAARLITYIGDNRDRFPTPESLQMLAGTAPVTRQSGKKKVVSFRLGCDRALRRAATDLARLSVAKSIWARDYFEQQRAKGHDVSRAYRALANRWLKIIWTIWQRREAYDEAKHIANRERHLMAHSPSSILQKSA

SEQ ID NO: 463129 - protein, 343 aa, unidentified
MNDTIYDHYIAIDWSIKNMAIARMTKKSNKITAIDVPSDIEDLQAYLKNLRGTKILTIEETTTSQWLYTEFKEYVDRVFICDPNRNKLLSEGPKTDKIDATKLVRLLKAGLMKEVYHSTDKFLYLRRIVSGYEDLVKAGVRVKNQRYSLLRACGKSGNEKIGSTLDSQGEQFVLECLDRQIDAYEDEKEGYEKEFERLARKNLEIKHQKSLPGIGAINAVKIVARVVAPHRFPDKGHYLSYAGLIKLEKISGGRSYGKKNPRYSRQLKSVYKSGVLAAIGGNNPVNDYYQYLLQEKNYPEHNARQKACRRLATLSLGVFKSGKKYQPFRRNDVKGSKESTSGL

SEQ ID NO: 463130 - protein, 407 aa, unidentified
MAKVIIGVDPHKLSATIEVVDSHETLLGSGRFSTDQPGYTAMRSYAKTWPERVWAVEGSNGAGRPLAQRLLEAGEHVVDVPAKLAARVRLFDTGHNRKTDALDAHSIAIVAVRTKTLRVLRTDGELEALRMLCDRREELTRLRVQTVNRLHRLLAELVPGKAKKDLTALQAKAILATVRPRDIAGKTRRKIAAAELADLLTVEAKMKKATAELKVLVKARGSRLMDLHGVGPVVAARTLADVGDIARFADRNRFASWTGTAPLDASSGEQNRHRLSRAGNRRMNHMIHIAAVSQIRLDTDGRAYYRRKQAAGKTKLEALRCLKRRISDALYRQLLADAEQAQLLCAAEPVDTGPGGHCGASQESSAVDLPPHIDTSDQPLPGPATQTLQPAGPTGKTSQPRTPQTTG

SEQ ID NO: 463131 - protein, 355 aa, unidentified
MISIKYIGMDVHKESISIAVLNVAGKVVMESVIETKASMILQFIDGLRGDVQVTFEEGTSAAWLYDLLKPHVSKLVVCDPRKNKSMREGNQNDKIDARRLAELLRLDHLTPVYHGEHGLRALKELVRSYLTITKDLARVKSRVKAIYRSWAIPCTGKQVYAQCHRAEWLGKINEPGVRQRAELYYQQLDALRVLRLGARRDLLAESKKQKAWKRLCEIPSLGPIRAAVLLGILQTPHRFRSKRQLWNYGGLAIEMHSSADHRWVDGQLQRSRKNVLVRGLNRNCNHDLKNLFKGAAAVASRKPGPFERFYAALVAKGMRPEMARLTLARKIATIVLIVWKTGVCFDAQYLKPQTA

SEQ ID NO: 463132 - protein, 317 aa, unidentified
MQILLNMGIDVAKDELVIACAEDASLARTIPNQRAAIGAWLRTLPAASRIGLEATGRYHELLADLAHRLGFAVFVLNPKDTRHYARAVGMRAKTDRVDAALIARLLAHEHAHLHAYTPVSIAQRRMDRLLKRRLQLGKIKVALKQSLQDLTGLSPQIKDLMVKLDALIDAVETQLVALHHACPARAHAQARLQSIVGVGPLVGAGLAAALERIPFKNADAFVAFTGLDPRPQDSGHKVGRRRLSKRGPSTLRRLLFNAAMSASRTKTWKPIYDHYRSRGLPTTAALVVIARKIARTAWSIYHHNTTFSPDRLTQALT

SEQ ID NO: 463133 - protein, 315 aa, unidentified
MDNVTTVGIDLAKSVFSLHGVDGAGKVVLRRTVSRAKFVELVARLPPCLVAMEACGGAHEWGRRFVQFGHEVRLIAPRFVTPYRKSGKNDGNDAEAICEAALRPNMRFVAIKTLEQQSQLTLHRVRMGFVEERTATINRLRGLLAEFGHVIPLRPIEVRRQAPAMIEQLPALAARSASGLLEHIRLLEERIREYEREIENHARTDVLAQRAQQRAGIGPITASAIVTTMGDPAAFKNGRQFAAWLGLVPRQFSTGGKPRLGRITKRGDTYLRRLLVMGARSVLLHAPQRKDPLSRWALALRKRLAKSSTEPRWLT

SEQ ID NO: 463134 - protein, 448 aa, unidentified
MTQRNRSSTRAAPLALTHPNAAGIDIGSASHFVAVPPDRDDEPVREFRSFTADLERLADWLGECGIDTVAMESTGVYWIALFELLDARGFEVLLVNARHVKNVSGRKSDVLDCQWLQQLMSYGLLRGAFRPGDAVCALRALVRQRAAILRTQSRTVQHMQKALVQMNIQLATVIADVAGASGQAILRAIVAGERDGHALAALADVRVKAGADEIAASLQGHWRGEHLFALKQALAAFDFCGTQLAECDAEIEAQLAALQATEAEPAKGKKRSKARNAPKFDLRSRLFKMCEVDLTRIDGIDVSTALVVVSEVGADMSKFPSDKHFASWLGLCPGTKITGGKVMSGKTARVANRASQALKLAAAALRTSQSALGAYYRRLCARMDKPKAVTAAAHKLARLIYAMLTKGEEYTDRGQAYYEERYRQRVVANLNRRAQQLGLQVVPVAAPA

SEQ ID NO: 463135 - protein, 351 aa, unidentified
MHYVGLDVHARRSSLCILDSCGRPVKRLEVRGPWPKLLAQVAAQVPRPFAVCFEASCGYGYLHERLSALAGRVAVAHPGRLRLIFRSKRKHDRADAEKLATLLYLDQVPGVHVPAAGVRAWRGLVELRRKLVGRRTAVKAQLRALLRSAGACDAPAGKALWSKRGLKWLAAVALSAEADALRRDLLLEELGQAEARLARVTAELDKRAAAHPGVALLRTIPGVGPRTAEAFVAYVDDVRRFARTRQVGCYLGLVPCQDSSAGRDRLGHITGDGPATVRMLLCEAAWQAVRRSPSMRAFFERVTHGEPGRKKIALVAAAHKLARAMAAMLRTGEAWREQEQEQEQEQEQEPA

SEQ ID NO: 463136 - protein, 344 aa, unidentified
MKFFTGIDVSLRSVSICVVDEAGEVRYEAKVAAEVEVIVGTLRRFSAEIRQVGFEAGTLTQYLTYGLSAAGYEVICMEARQVAASLAAMRNKTDRNDARGLAQILRTGWFRTVHVKSVESHQVRALLASRKMILTKCIDIENEVRGLLKVFGVRLPARVGHGGFDDLVRPRVTALPDVAKCLLPLLDARSMLYRTYLQLDTAVRGLARQDPVCQRLMTVPGVGPVTSLTFKAAVDEPHRFRSSRNVAAHFGLTPRRYQSGEMDNPGRISKAGDPGVRLALYGAAHALMTRSDAWSVLKAWGLRLAKVRGHRRAVIAVARKLAVILHRMWIDGTDFRAARLEVAA

SEQ ID NO: 463137 - protein, 339 aa, unidentified
MDHDIKILGIDLGKNWFHLSGLDKHGKRVYRKKLNRNQMAVLAQTLPVCRVAMESCPGSQFWGRRFAEAGHDIRIIPGQFVKPFLKGGKNDFNDSLAIAEASGRPNMHCVGLKNQEQLELQAIHRVRSRLITERTAIINQMRALLLEHGIVCELFERKLPEILEDAENGLSFRLRSLIDHLRRRWRALDEEVDEMTSLLTTHSRESETCQRICDVPGVGPIVASAMIVAVGNAKAFNTGRDMAAWLGLVPRQHTTGGKPKLGSITKRGNVQLRTLVVQGAKSLMIHMDREATAIGRWLGQLEKRVHRHVAVIALANKITRICWKLLSTGESYAARQVAM

SEQ ID NO: 463138 - protein, 386 aa, unidentified
MRAVCGLDVHKDSVFLCILCETGEIFEKVYGVLTHELQSMCRDMKSRGVTEVSMESTSVYWIPIWRVLEPHFRLKLVNPYFIRQLPGRKSDVKDAQWIAECTLKDLVRGSFVPPERIQQLRQYDRRIFDLDAEIVRKLSKLDAVMQRCNIRLSNYVSNTDTKSYKEVVRKLCEGVTAPEELIKEIYSRIINRHGRETILAALTGVVSDAEKDAMRQLRDELDLAEKHKQECQDRMLHICKTYYPDELKRLMTIPGIRERAATSLIAEIGVDMTKFPTAAHLASWSGLKPRNDESNKKIKSRRITHGNVFLRKTIIECAWGASRTKDCFFSRFSFHQTQVRKKNKMKVLVAVARKLLIAVWHVLHDETDYKDFGANDCDTSAVENNG

SEQ ID NO: 463139 - protein, 418 aa, unidentified
MTKSHLLGLDIADKSAVAQLERADGSKCWRGLLSTDQVGWKHLEKTLAENEASFSELFVVIEATGVHHFAWAERLTRAGAEVYVLNPLLAARLESSANALRGHKTDHVDVAKLCEVGRLHTGQFGRFHYQSRPAQQGLKQLDHARGRLRQTLTNLKKSVKSHLGLVFPALLRAKIGTDTARAAAILAKAPTAGAWRALPEPERKKLAGAKQADLDQACAETLADEALAQACVPAVRALLAAQRDIAVKLHECEAVIQARLPQQRVALIASLPGFGGRTAAVMSTYLPPTFEGWGTRKKIAARLQAMFGFDPRLRQSGNWIGHVKISRRGIRTARTALFQAAFCSLGVDEENTGYYKRLREIEKKDHKEAMVDLMRKQLRRLVAVLSNDRPFQPRPSLPRDSATLRRMRPPAPQSSTAA

SEQ ID NO: 463140 - protein, 431 aa, unidentified
MTNRLQVGIDFSLKRADFCLLFPDGQPLEVHRAFANSPMGFRSAKQLLLEALEAYPFDGLDVSGEATGYFWLPFFLQLAADPELEPHDLNLYLLNPRWVHWFKKCFSEDDKCDQKDPFYIAERTRTRSPQVTWSPQMETLPLRFYTRARFHLVQNLAREKCYFSAFLFLKAGAYRRIKPFSDVFGVTSRLVLGQHATLDELAAIPVETLADQLFQLSGHHLSDPLKNAHKLQRAVAESFPLPPALALPVQRILEITLDHIHYLETQIARVEQWITTEVQASPAISKLTTIPGVGPVFSSGIGAEVGGTQRFLQGTKWDKKRKRYRPKNLRDAEDAVAKIAGLWWPRKGSGDFEAEDRRMAKSGNRYLRYYLIQAANKMRQHIPDYAAFYARKYREAAKHHHKRALVLTARKSVGLFVGLLHRNEAYRSKEA

SEQ ID NO: 463141 - protein, 351 aa, unidentified
MPHKLNSAIAVIGIDIGKNSFHVVGHDKRGALMLRQKWSRGQVEARLANLPPCLIGMEACVGAHHLSRKLQMLGHDARLMPAKYVRPYSKGQKNDFRDAEAITEAVQRPTMKFVATKTAEQLDLQALHRVRERLVSQRTGIINQIRAFLLERGVAVRQGLRFLRNELPHILAAPCDALSPRMLRVIEDLAGDWRRLDERIEGLSGEIEARARQDKGCERLMTVPGIGPIISSAMVAAIGTGDAFSKGRDFGAWLGLVPKQISTGDRTILGSISKRGNRYLRALFVQAAWVVLVKVGPKHWARYGLKSWIEAAKKRLHHNVLAIALANKLARIAWSVLAHGRTFEASKIQAA

SEQ ID NO: 463142 - protein, 404 aa, unidentified
MEVVYERCCGLDVHRNMVVACLSIIEAGQRRKEIRTFRTITKELLSMRQWLLSEGCSHVGMESTGVLLRPIYEGYFELVLVNAAHMRQVPGRKTDVQDADWLADLLQHGLLTPSFVPDQPQQDLRDLTRLRVHLVQDRAQVINRILKVLQQGGIKLSGVLSDVVGVSGRAILQALCEGERDPERLALLVHKSVAHKHVQLVEALTGDLRSHHLFLLRELLSLLEGMERSIKHIEIEIEQRLQAEEEKLERLEQITEVSRHTLHLLCAEVGVDLSRFPDAAHLASWAGICPGQKESAGKRQSGRTRPANPYVKAALVQAAHTTVRTQTYLGEQYRRLSKRRGAKRAAVAVGHSILIIFYHMMITGEPYHEKGMDYFHHRDSGKGERQLVRRLEKLGYQVTTPPAA

SEQ ID NO: 463143 - protein, 391 aa, unidentified
MICVGIDIAKDKHDCCILDSDGTVRADCFTIPNNMDGFKQLLQTIRNCTKKSGKIKVGLEATGHYSYNILGFLLDNGLPTYVINPLHTNLYRKSLSLRKTKTDRVDARTIATMLLSDVDLKSYTDIAYHNEELKSLTRYRFEKVRERAKLKQSVSRLVTILFPELEKLVPSLHGASVYALLSEYPGAKQISEVHLTKLTNLLVTASKGHYGKEKATLIRETARASIGSVMPAKSLELKHTIKLIQELTSEINEIEDSIQKIIDELNPPILSIPGMGVNSAAVILAEIGDFSNFSSPDKILAYAGCSPSTYQSGKLTNCYAHMEKRGSRYLRHALYNATKYVCYWNPVFAEYLAKKRAEGKHYNVALSHAMKKLVRLIYALQKSGKTYLTAA

SEQ ID NO: 463144 - protein, 398 aa, unidentified
MTESSDCESVQVFIGIDVGKDTHHAVAINRSGKRLFDKALPNDENKLRSLISDLKQHGQILLVVDQPATIGALPVAVARSEGVLVGYLPGLAMRRIADLHAGEAKTDARDAAIIAEAARTLPHALRTLKLADEQIAELSMLCGFDDDLAAQTTQASNRIRGLLTQIHPALERVLGPRLEHPAVLDLLQRYPSPEKLASLGEKKLAAQLCKLAPRLGKRLAADIAQALAEQTVVVPGTNAAAVVLPRLALQLITLRKQRDEVALEVEQRVLAHPLYPVLTSMPGVGVRTAARLLTEVACRAFASAAHLAAYAGLAPVTRRAGSSIRGEHPSRRGNKALKRALFLSAFAALRDPLSRAYYTRKMSQGKRHNQVLIALARRRCDVLFAMMRDGTFYTPQGS

SEQ ID NO: 463145 - protein, 394 aa, unidentified
MFLVGIDVGKLSHMFCIMDSSNGEILVSPVSFKNNKQGFDFLMGNIKLYPKDKLLIGMEDTGHYHFNLLKFLLDSGYTVALINPITTDLTRKMQLNPTKDDNLDTMTICDVLASSPRKKGYRISKINNFEFYEQKRLTREHHDLKEQLNVYANKLQKCIDIVFPEYNSLFKSKYGTVYMKVLKAFGSADSIAHADIRNIRKCFETNRNGRTISLTPEKLKEAAKHSIGFPSKAEVIEIRHLIDLIELIKEQINDVDIKIEEFSTQLNSPILTIPGISHFSGTSILAELGDLRNYSKASQIIKFAGVSPYKHQSSQYEAQHTAITKKGSRYLRKTLYQVILPVIRYNPVFNKYYHLKLSQGKGHRCAQGHCVRKLLRIIYHLVITNQPFDSTLLK

SEQ ID NO: 463146 - protein, 408 aa, unidentified
MQVLYPRCAGLDVHKDQVVACMRWIEGREVRHEVRRFATSTRGLLELASWLEESDCTHVGMEATGVYWKPVWHVLDGRFELVLANAAHIRNVPGRKSDVNDAVWIADLLAHGLIRASFVPPQPIQELRDLTRTRRQLVREIVQHTQRLQRVLEDANVKLDSVVSDVIGASGRRIVRALIEGETDAERLAQLGSGRLRCSRQELAEALRGSVTEHHRFLLRQHLRTIEQLEQTVVEFEGRIEGVLEPFRAEIKRLTGIPGISTTAAQILLAEIGPDMSVFPSVGHLLSWAGLCPRLDESAGKHRSTRLRKGAPWLKPVLVQCAWAAGRTKNTYLQAQFLRLKARRGPRKAAVAVAASILTAAYHMLRDGVDYHDLGPAHLTRKDQSRVAARLARRIRELGYEVEIRPAA

SEQ ID NO: 463147 - protein, 340 aa, unidentified
MKEFIRIGVDIGKNVFHVHALESEDGRAVTRKLNRAGMRKFFASIAPSIVGMEACGSAHYWGRELKGLGHDVRLMPPAYVKAYVQRGKNDAIDAAAACEAMARPKMRFVAIKSEAQQATLMAHKTRDLLVKQRTMLVNSLRGSLAEFGLVAAKGIERVEELIAKAAEANLPEMARLSAQALIEQLERLDAAIADLAKRIVKAHGRDEQVGLLKEVPGIRDMFATQVAASVSDPNAFKSGRDFSAWLGLTPRQETTGGKTKLGPITKKGNRALRRLLVLGATSLLKVSHLHKGAVGDWLKAIKARKPFKVAAVALANKLARIVWAIMTRGEAFRAEAFARV

SEQ ID NO: 463148 - protein, 427 aa, unidentified
MAYRVAAIDVHKKMLAIVVADVAGEGEYQFERRKFGATPAQLHLLAQWLVQQEVEEVVMESTAQYWKPVWGALERFWKPERQKREGAPKMSGTLHLCQAKSNRGPRGRKNDFGDGERMIKRLVAQELVLSFVPDPEQRLWRTVTRRKCQLTRDKVRFQNQLESLLEQAHIKLSSWVSDLLGLSARRMLKALAEGETDPAALAALADSRLRATPEQLRDALGACTQLHGVYRRLLKMALEELKMMEEQIEQLDREALGLLQQHQDTVKRVAEVPGFGVDSAVQMIAEVGAEAAKFDSEKALSSWVGVCPGDEESAGESQSTRSPKGNRNMRRLLNQAAHAAIKVKGSIFDVTFRRLLPRLGYKQAIWAIAHRLCRLLWMILHKGVRYEERGPAVSAKSKRTRTARMIRELQKLGYHVEGAPLPAGNPA

SEQ ID NO: 463149 - protein, 372 aa, unidentified
MNYNTVYVGMDVHKESFTLCAYTIDAEKGSHFQRTEADYKNVLKYLEFLRTVYGNDANFICGYEAGCLGYTLYHQLTEHDVNCVILAPTTMLEQRSKRRIKTDRRDAEIIGKCLAQHNYSPVHIPTATDEETKEFLRMRDDHKLALKKVKQQILAFCLRHNYRYDGNSHWTAAHIKWLKSLKPEALYKEILDEYLLTYTTLSDKVERLDKRIEELASKDEYRESVKKLCCFIGIKTHTALSVLVEVGDFQRFASAQNFASYLGLVPGEDSSGDGQTRLGITKAGNRHVRMLLTEASQCYARGQIGFKSKELKSRQAGNSPQVIAYADKANERLRRRYYKMVLGKSKKPNVAKTAIARELACFMWGMMTDHVA

SEQ ID NO: 463150 - protein, 350 aa, unidentified
MIIIGADYHPGFQQIAFVDTETGDCGEQRLEHCEGAEKFYRDLATQGKKVRVGMEASGHARWFERLLPELNIELWVGDAAVIRAKRGRKAKTDRQDALHILNLLLKDDFPKIWVPSWENRDMRQLLWHRHRMVQVRTRIMNQLQAVALNEGLRCKKKLWREHGREQLETFRLAPWASRRREDLLQLLDRLNPTIAELTQAIEREAETSPPARLLMTHPGVGPLTALAFVLIIGKAERFRCGKQISCYLGLVPLEESSGERRRLGHITKQGNSLLRFLLVEAAQATTRTIPEWRRKYMHLMMRRGRKIAKVAMARKLAMRLFWMMRQGWNYQQVMKFGSHVGQPGNRHGVQ

SEQ ID NO: 463151 - protein, 391 aa, unidentified
MSMYFIGIDISKYKHDCCIISAADQKVVSKVTIKNNKAGFNELLTIIHSLANPADIRIGFESTAHYALNLELFLENSLLTFMEVNPVLISEYKKSKTLRRTKTDSVDCESIARWLMTVEYKPHSKGFYHAYSLKSLTRLRDKLIRQRSFYLVKITNVLDHTFPEFKPFFNERLSKTALYLLENYGSAEKMARMNSASYEKLRSVSRGKFSPQQFLRLKELASNTVGVNNSIFDVELNSLLSLYKSLVKEIDTIEKEINKLIEEVHPHYMSVPGIGPLSAAVIYSEYGDISNFTNPGQMLAFAGIEPGINESGTESHGGKMVKRGSSQLRYTLINCCLPLIRFDMTFATYYAKKRGEGKPHRVVITHVAKKLIRVIYALESQDIDFNAQKLR

SEQ ID NO: 463152 - protein, 318 aa, unidentified
MSTASFVGLDVAKAQLDVAVRPSSEGWSSTNDEAGIAQLVGRLQALRPTLIVAEATGGFEHAAIAALAAVGLPVVVANPRQVRDFARATGQLAKTDQLDAGILALFAERVRPAPRPLPDAAAQLLDALLTRRRQLLEMLVAEQNRLGFAPKPLHRSIRQHIHWLERQLDDVTTELARQIEQSPVWRAKDDLLQSVPGVGPIVSATLLGELPELGTLSHKQIAALVGVAPLARDSGTLRGKRMVWGGRASVRTALYLAALSGRRWNPQLRVFYERLRAAGKPTKVALIACARKLLTILNAMLRSNTRWQPLAPSAQHSC

SEQ ID NO: 463153 - protein, 336 aa, unidentified
MQHFIGCDVHTRNQVVAWIEEETGEIRKRRLEHEGQEVKEFYAQFPPGTVVGIEATFPAYWFERLMGELGHELWVGDAARIRASEVRYQKTDARDAEGILDLLRSGRFPRLWVPSLDERDLRQLLVHRMKQVRARTQVKNQLQALAISQGVCRKRKLWSAKGRAELEKLVLLPWAARRRKELLEWLDRLDEQVRELDRAVEEAGRARPEVALLRTHPGVGMVVGLAFVLSVGPVERFSNRRKLVSYWGLNPREDSSAGRQRLGSISKQGNTMMRWLLIEAAQTAARLDPQLRRTYQRLKRQRNSGDDALAADRGSADGGAAGSAVAPHLSTFEAPA

SEQ ID NO: 463154 - protein, 344 aa, unidentified
MEYFAGLDVSVKDTSVCIVDDAGKIVREVKVASEPDALLGVLRSPRYQFKRIGLEAGPLSQWLFSALGEADLPVICVETRHMRAVLKAQINKTDRNDARGIAQMMRVGLFRPVHVKTLRSQKLRMLLTHRKLLQSKAIAIENDLRATLRNFGLKVGMVGTAKFETRIKELVENLPDLILLVEPLLVVRRVLREQLSVLHRRLLAVVRDDEVCRRLMTVPGVGPVVALTYRATVDVPARFRKSKSVGAVFGLTSARDQSGERDHPGAISRCGDEMMRTTLYEAAQIVLMQSAKWSWLKAWAMKIARHRGRKKAIVALARRLAVIMHRIWVDGTEFRWTREKAAAA

SEQ ID NO: 463155 - protein, 314 aa, unidentified
MPQDRPIVGIDVSKDRLDVHIVPGDRRCSRPNTVEGRRALIADLRRLAPAQIAFEATGGYEQPLCDALLAAGLPMRRCNALQVRRFGQACGTLAKDDPIDAALIARFAGTVSAEIVPPRPEDRRLAELESYRRDIVRCLTRLKAQRDRVSGAVRDLHQRRLKQAEADLREIDARIRQVVRADARLARRHDLISSIPGIGTTLTTTLLACVPEWGAISSRKITALIGVAPYLDRSGRTDNRRHIKAGRRHARSALYMAALCALRYNPVWKAFYDGLVRNGKPGKVALTALMRKIAITINIMIAKEIPWAPPTRPA

SEQ ID NO: 463156 - protein, 413 aa, unidentified
MLKIVYPICCGMDIHKSFLVACIATTNEHGVTSYKSKRFSTFTGDLRRLAAWLSENNCNDVCMESTGKYWIPVYNILESSCQIVLAHPKYVKAIRGKKTDKKDAKWIADIFKHDLVSGSFIPPADIRQLRDLVRYRWKLTSFTTGEKNRAQNCLTVSNIKLDDVFSDVFGKAASAITTRLLESNEPFDVTPYLTKGIKASVEDIQNAVDGKMCAEQAEKLRIIRSHMDNLELCKMNLESLILFVVEKYLPQLNLVLTVPGIQTFSSIAVIGEIGVDMSVFPTSKHLCSWAGLTPQNNESAGKKKTTRVSRAGAYIKPLLVQCANAAVKSNKHPEIKNRYLSLKKRRGHKKAILAIARMLLTAIYNILKKSEPYNPTLYRKANLPPAHREVSVDQAIFILQRQGYLITAPALSA

SEQ ID NO: 463157 - protein, 341 aa, unidentified
MEKVTTIGLDIAKQVFQVHGVNGAGAIVCRRRLRRDDVVGFFKALPPCLIGIEACATGHHWARVLMALGHEARLMPASYVKPYVKRQKNDATDAEAICEAVTRPTMRFVPVKSEEQQSVLMLHRVRELLIRQRTMLVNALRGHLAEFGIVTRQGIAGVGKLIALVEDGDHDVIPPLARSALLLLVGQLREVHEKVSEMDRQIHAWHRSNELSRRLETIPGIGPITASAIAATVTDASLFKSGRQLAAWIGLVPRQNSSGGKDRLGRISKQGDPYLRRFLVVGAHAVLRFSRNGKTAPTRWAAELLAKKPYNIVAVALANKMARIVWALMATGRRFEAAPAL

SEQ ID NO: 463158 - protein, 357 aa, unidentified
MRIIGCDLHTRQETMAMVDTETGEVVEKTLQHEGEKVREFYSALPRPVQVGIEATGSMLWFLNLMEELGIDSQVGHPAKIRAAEPRKQKHDRRDADLLLKLLMENRFPSIWMPSKELRDLRALLWHRHQWVRTRTRVQNALQAIALTNGLRRGKSLWSQEGQHAIASLPLGPHTAHRRTALQALYRELDADINALDKRVLEQALERPEARRLMTHPGVGPVTALATDVFLGDPVRFEDAKALASYVGMIPSEYSSAGRQRLGGLSKQGNPLLRFLWCEAAVHAVRRDPLLQRFYRRKLVQKGMGKARVAVARKLGIRLYIMLRDQIDYEEFCRRGQMRQKSGAARAGIPEVGYGPSL

SEQ ID NO: 463159 - protein, 422 aa, unidentified
MLEETQDTEEIIARVAALDIGKAELVCCVRVPSAQGSGKRRQEVRTYPTMTRSLLVLADRLGELGVTRVVMEATSDYWKSPFYLLEAHGFEVWLVNAKDVKHLPGRPKTDKLDAVWLCKVAERQMLRPSFVPPPPIRRLRDLTRYRADLVAARTAEKNRVEKLLEDAQIKLSVVASDIFGVSGRAMLAALIAGERDPKVLAQLARRRLRAKLSQLEEAFHGRFSDHHAFLLDTMLGRIDQASADIAVLEAHIEAEIAPFQAAADRLDEITGVGRAAAQVLIAELGTDMGRFPTAGHLVSWARFAPGVKESAGKKKGKATTGHGNPYLARVLGEAAAAAGKTNTFLGERYRRIARRRGAKKAIVAVGRSIMIIIWHLLSDPDAHFHDLGPGFYDTRIDTDRRKRNHVRQLEALGYTVTLQPAA

SEQ ID NO: 463160 - protein, 438 aa, unidentified
MSNKVIFNLDDLFISVGIDVGADFSWMSIALPNQQFVGKPYKILHNSIDSLTTAVSKIKEAEELYSLESRIFLESTGIYHYPLFCYLRDKGFNCSVINPIITKNSTNINIRKVHNDRFDSKKAALVGLKPDLKVSLMPSDLALNCRNLCREYYDLMDNRSAYVNKLQGELRMAFPQYLGIFSKVTINTSLTLLETYTSPSAFLEADKQEIIDIIKSTARFGLTYAQNKYNAIIQAATDANQFGYIIDSNIKRIRLYISFIRKYDEEINNILESLHELVDANEDADFVKQIHLIETFKGAGFLSAVSIMGEIGDFSAFSKPKQLFAYFGLDPAVKQSGKFEGTKVQMSKRGSAIARRVIHTLTLQSISISRNGEAKNPVLREYYLKKCDSKPKLVAMGAVSHKVCNMIFAILRDNKSFEIITPQEHIKQYNASKCDMAA

SEQ ID NO: 463161 - protein, 452 aa, unidentified
MEEKAISMEIVNSHAAGIDVGSRSHWVAVGQQEHDVREFGVFNEDLFIMAEWLKGNQVKTIAMESTGTYWQNLYAVLIARGFHVILCNGKFTKNIKGKKTDVKDCQWIQKLHSLGLLTGSFLPDGNTEQLRTYCRQRANLLHLAASTSKKMQKYLSLLNLRLDVVVNDICGLTGLNIIRAICAGETKSEKLASLRHANCRKSEVEIAKALQSNGRKDYLFALNQELDTYDHLQKKIAECDTMIDQMLNEIIDNDENKKQHLIESKPYKRINKNTPKDIDLNLKAYQMFEGTDLLAIEGMSYSTILTLMSEVGIDGIRKFPSAKHFTSWLRLAPNNKVSGGKVLSSKVPKGSNRLKIALRNAANAIGNLKDSTPLRDFFQKINFRKGRVSAISATARKLAVIIWNMVVKNVPYLNPEGYLFLDQKRKLGIVKRIQKQMNKFALTINDLDIETN

SEQ ID NO: 463162 - protein, 361 aa, unidentified
MTRSSKYVGLDVHQATTVSTVRDDAGRVLARTVVPTEAEALREFFRGMRGPIHVALEEGTQAQWLHDLLVPVVHRVVVCDRRGKSRQGNKGDQPDADELSDLLRCGRLRAVYHETGDRAMLKELARTYTNLVEDSTRVMQRLKALFRARGIRTSGRSVYQREQRADWLRQLPDAGVRFRATVLYQELELLQELRPNAKAAMLTEARRDSAWRVLRTIPYLGPVRVAMLLATVQTPWRFRTKRNLWAYAGLAVVTHTTAEYELDGQRRVRRRRRAPLTRGLNRNHNRVMKDVFKAAATAAATRVGPLQDWYHGLLTRGMREELARVTLARKLAAITLHLWKRGERFDPTQLTVQAVHAHQAR

SEQ ID NO: 463163 - protein, 406 aa, unidentified
MDLVYSHVCGLDVHKKNVVACIITPEGKEISTFSTMTDDLIALKEFIKAKGCSVVAMESTGSYWKPIYNLLELESIKILLVNAKHIKNVPGRKTDVKDAEWIASLLQHGLLQGSFVPDREQRELRELVRYRKSLIEEKSRELNRIQKVLEGANIKLSSVVSDINGASSRSILEAIINGEDNPETLAELSQGKLKNKMDELKGALKGLINHHQRMLLEIQLRHIDYLDKEIAKLDEEIKNRMLPFEKDLALLDTIPGVGRRTAEQIIAEIGTNMEQFPSAAHLCSWAGLCPGHNESAGKQKSARTRKGNQKLRSSLIEAARAASRAKDTYLSSQYHRIAARRGANRAAVAVAHSILIIVYHILKRKQPYIELGPTYYEEKKRNMIIRQSVKKLESLGLKVTVESAVS

SEQ ID NO: 463164 - protein, 349 aa, unidentified
MTLVGCDLHTRQQQVAVLDTETGEMDERQLSHTGDAVEQFYRALPGPVTVGIESTGYALWFHELMQRLGHTLLVGEAAKIRAMVVRKTKTDRRDALHLLDLLKHERFPLVWIPDPATRDLRALVTHRMRLVRMRTMVKNGLHAIAMNRRLTLGPSLWSQRGLAQLQGLALAPHTTQRRDESLQLLTWLTARIEALDDRVAAAAQADPGARLLLSHPGVGPLTALTTVVVLGPVARFPDSKHVVSYTGLAPAVHASADTCRLGQITKQGSPLLRFVLGQAGLIAAHAEVDLKRHYRTLLRRRGRPKAIVAIARKLLVRLYIMLRDQIDYEEFRRRGRTPRGQEVPPPALA

SEQ ID NO: 463165 - protein, 336 aa, unidentified
MNYCGIDLASKASAICVMDEMGAILREDEIPTDADGFRTRLGGVEAMKCVVEASPLAEWAVQTLEGLGHEAVIIDARRAKAVVCTKKKTDRANARDLANMARTGWYTAVHRKTETARELRTWLTARAGLVETSNALNARIRGLLRAHGIKLGNVAEREFEMKVQAQVKEHLPNLAAAFMPLLELWRQAIDAAEALRKEIAAHTKQDAVCQRLMSVPGVGPLTAAAYVATIDDPQRFKRSDQVSAYLGLVPSVYQSGDIDYRGRVTKEGDGLLRWLLVEAAHNLLSHTRRDCALKRWGERLQEHKGTGKARVAVARKLAVILHRLWITGGTFDWQRV

SEQ ID NO: 463166 - protein, 343 aa, unidentified
MAKDTLVAVDLAKSVFELAVSHHPGQVARQKRYSRQQFPLALAQLPQATVVMEACGSAHYWARRVQALGHKAVLLPPHAVRPYVRRNKTDRNDTKGMLEAYRNDEIRPVPVKSVAQQTLASLHRLRSGWLAERTARINTLRGLLREFGIVIPLGAHHAVPSAWAHIEDAESEIPDPLRPALAEICSEIRELERRVKMIERQLAALATQTPAVARLMTIPGVGLIIATALVAFVGDIQRFPSGRHFASYLGLTPRESSSGLRRRLGAISKRGDVYLRTLLIHGARAVLLAATRRAPDRLRTWALAKQSARGHNKAATALANKLARIIWAVWKHDRPFHSVPHLA

SEQ ID NO: 463167 - protein, 413 aa, unidentified
MVRSGGGWLEIFCGIDWSETAHDVAVVDETGRLLARRRIADDAAGFTALTELLAGYAGRPERVDVAIETGRGLLVAALRAAGHRVFAINPKAVDRYRDRHGVAGAKSDPGDARVLADILRTDRDRHRPLPADSDLAAAVGVLARAHQDAVWARVQDANRLRSLLREFFPAALTAFADLTTNTALAVLAAAPTPTAAARLSRANLTDLLRVAGRGTRPTEAARLAEIFTVDQLRQPPVVEAAMGQAVRAIVRTLTAANQSISDLEAALAAAFDQHPDGEILRSLPGLGPILAARVLSEFGDDPTRFPDPASRRAYAGTAPITRASGRSRVVLARHVRNKRLADACYLWAFAALNRSPGARAYYDTRCAAGDRHNAALRRLASKLLGQLHHCLTTSRPYDEALAWPQPDTTPAAA

SEQ ID NO: 463168 - protein, 476 aa, unidentified
MKAKLSAASNPTGKNIRPAKKLPVVHPHSAGIDVGATEHSVCVPEDAVPAGESAVRQFRAFTGDLDQLVEWMQRCKVETVAMESTGVYWIPVYQKLERAGLEVVLVNARHLKRVPGRKTDILDCQWLQQMHSYGLLNGSFRPSDDICVLRTFLRHRGNLVAASAQQVLHMQRALDQMNIHLHHVVSDLDGDTGLAILDAILAGERDPTELVKLRHPRISKSTVAEMEAALKGDWREEHLFVLKQALETYRHLQGQIAESDVEMQKALELVSVNPATVPESERPKNPAANAEAAPKKPKKRTRGNAPRQDLSAQLRHVCGVDLTRIVGFNVLSVLIMISEIGVDMSRWRNAKAFSAWLGLCPGNKISGGKVLSSHTAHVANRVAILLRTLAPTVGRTDTWLGAYHRRMKARLGPPAANTATARKLATLVYHLLKYREEYIDVDRVAYEQKFRRQRLSRLRRQAEELGCEIIPKEASA

SEQ ID NO: 463169 - protein, 351 aa, unidentified
MSIIGGLDVHRGQITYDWVDHDSGEARRGRIAPATRAALRAWLGELPCPDGAFAVEGCTGWRFVVEELQAAGLVAHLAEPAETSSLRGPKRRAKTDRADARLLRELLEQGRLPGSWIPPAWILDLRTTVRLRKRLIDQRTAWQQRIHAALFHHGLPRPTQELLSRGTRAWLEQAPLPPASRQALAVALRQIDHLDAELDPIDRWLRTLARRQPGCRALIAAHYGIGAITAPTILAELGDARRFGGGDQVVRATGLDITVYASDGKRSPGHLSRQGPEVLRWALFEAAKAAARPSSPDYAYYQQVKARQGGNRASLAVARKLARRVRHTLGALGDAALAPVDGLPLILSEAA

SEQ ID NO: 463170 - protein, 333 aa, unidentified
MTDTTTHAPLPVPPAPVYVGIDVAQDKLDLARTDADAVPAFANDPAGVAAVVDLLSSIRPAVIVVEATGGLERPLLDALLEAGLPAALVHPGRVRYFAKGLGILAKTDRIDARVLAQFARLAAPRLTQRRSANQAELAALVVCRRQLTLARAEQANRRRATASKAALRSIDAVLATLDKQVESLDKQIRELLDADDDFKHLDGLLRSVPGVGPVLSATLAAELRELGQTDRRQVGALVGVAPFNCDSGKLKGRRAIRGGRTAVRCVLYMATLAAMRSNPIIQTFARRLKQAGKLNKVVIVACMRKLLALLNAMLRDNLTWDELDVVKKLAPNP

SEQ ID NO: 463171 - protein, 374 aa, unidentified
MSDLSEAFVAFDTSKLRNAVAIADPGRVGEVRFLGEIENTGTATARLVKKLAAKYQRLTFCYEAGPTGYGLYRQIKSLGHECIVVAPSLIPKKAGDRVKTNRRDAVNLAKLLRAGELTAVWVPDRHHEAMRDLTRAREAAVMDLRSQRQQISAFLLRQGLHYPGKTTWTKSHMSWLASQKLAYGEQRLAFEEMMLAARQAQERLDRLEQAIRTAVPDWSLAEVVTALMAMRGIDLISAAGFLAEIGDLSRFRTPSELMAYLGLVPSEDSTGDTIKRGPITKAGNRRARRILVESSWSYQHPPRVGKEKQEKVAAAPRAVREIAWKAQCRLSGRYRALIRRGKLKTVAVTAVARELAGFIWAISREVTTARVAAK

SEQ ID NO: 463172 - protein, 391 aa, unidentified
MERVWAGIDAGKEFHWAHVLDASGEKLLSRKVTNDEADLSSLINEALSFAEEVVWAIDQPGGGATLLLGLLWERGQRVLYMPGFTVDRSREIYPGESKTDARDAHVIADQARMRPNLEELTAEEGELAELQILLARRRDLVTDQTRSINRLRDALLSSFPALERALDLTQQGALILVRHYQTPAAIRRMGKKRLTDFLGKRSVRGAEALANKALTAANSQSVTLPAEEVTARIVAELAGEVLALKESIGTLDGELRERFFARPEAEILTSLPGVGVTLGAEFLVAAGDLCSFESADKLAAYAGLVPVAHDSGKRTGNDKRMRGGNKALKYVFYQSAFASLRSCPQSRVFYDRKRAEGKKHIQALIALARRRVNVLWAMLRDGTTFEASSTS

SEQ ID NO: 463173 - protein, 392 aa, unidentified
MFYIGIDIAKRSHQAAVTDVSGNIIVKPFNFKNSATGYDQFLSVLQNNSLSKESCVIGMESTGHYWYPLYFFLVEHKFTVKVFNPIQTAAFREITIRKVKNDNLDSIMIADFTRFGRYSETYIPSENMLALKNLSRFRLSVCDICGSLKKRTIVLLDLVFPEYATVFCDTFGSTSKQLLEKYSTPDEFSEISTTKLANFILKASRGRNGREKAELIKAAAQNSVGISYAIDTFSFEIKQLIEQIEFMENQLSEIDAEMAKLLSTSEYSVITTISGIGPTLGSIIVSEIADIERFETSSKLVAYAGLDASVKQSGEFNSTQNKISKRGSPYLRRALWMAAFMSLQCDPALYDYYSRLRARGKSHRLATTAVARKLCIIVWAIMKSKQPYSPHI

SEQ ID NO: 463174 - protein, 426 aa, unidentified
MKYTQNERIMQITEKTLIIGIDVGSEKHHARAFNFRGVEYGKLLIFHNDAEGFTMLEDWIRKLAEQNGFKDVTVGMEPTGHYWFNLGEHIKGKGMRIVLVNPHHVKKSKELDDNNPSKTDRKDPKTIAMLVKDGRYMEPYIPEGIYKELRTLMESRWRITKELFAIKNRIRRWISIYYPEFTKVFVDWEGKAAMLILKECPTPAKVIEKGIDGIIAIWKEHKIRAVGRKRAVMLLEMARLSIGTKEGMISAENELQMLLEDYESKKRQYEKTMELVERLAREIPGFEEMLEIKGVGLVTAAGFIAEIGDVSRFSHPKQIQKLAGLSLKENSSGKHKGKTTICKRGRKRLRYYLTFGMMPLLSKNEEFKALHEYYTSRKENPLKKMQSLVALSNKLIRIFYVILTKNVAYDPQKMMSDIRRTGVKAA

SEQ ID NO: 463175 - protein, 346 aa, unidentified
MLYVGLDLSRRRLDFDVLLPDGGRLERGAVPPDVDGLASLVQRLDDANQPVCAAIESMSGARFVHDQLELAGWDVRIADAFKVKGLAPLACKTDKIDSWVLAELGRLSLVPEIWLPDPTVRAERERARFRLHLVRHRTALKNRVHSTLITHGVPNPTSDLFGTSGRELLARLCLPEPWRSTRQASLALIDLLDAEISGIERELRALGVEHRYIPLLITCPGIAWVLAFTITSELGDISRFPTPTKFVGYTGLCPKVDQSGERDWRGPLRKNGPNYLRWALVEAAHTALRHPSYQPTLARQTARHGRKRGRKIAAIEVGRKLAEAIWYMLSRNQPFAPAGAKQVLTA

SEQ ID NO: 463176 - protein, 436 aa, unidentified
MIPAVLTHCAGIDIGKRALAVCLMVGPAEGEPKVELREFSTFTADLEAMKEWLVQAGCTHVIMESTGPYWKPVFNVLETSLVVCLANAEDVKGRKGHKTDRRDAKWLAHLLRHNMVRASFVPPRPIRELRDLTRRRKQLLGDATSERNRVQKTLEDANVKLGSVLSDVFGVSGQRMLEALFEGHGSVQEIAEMARHKARQKIPQIISSLTGHRLTDHHRFMIRMSLEHLRMLEGQILVVDEEVVKRIDSLGLNRLLDLLQTIPGLGHDSAVAILAEVGPDVNQFPTAKHLSSWAGVCPGNKKSAGKDFRGHTTRGNRWLRSTLTECAWAVSRSKKSPLRDKFWRWAVSGKKKAVIAVAHGLLLQVYQVLQTQQPLAQASSPLLDEKRRQRIIRHHLRCLGRLGISTGPKRIYTDGTVPRRGRPPSKAQNSSPGARS

SEQ ID NO: 463177 - protein, 349 aa, unidentified
MRSPSRAKFLERESQIYILAEGGEIIEQRIRTEPERFAAVLGTRPRARILIEASTDSEWVARCLEALGHEVIVADPNFAPMYATRSRKVKTDRRDARALAEACLLGAYRRAHRLSDPQRHVRGRLGVRDALVQTRTRYISLIRALLRQQGYRVPSGSAEGFIQRVQALPLPGRLRSVIAPLLAVMRHLNRQLAYSDATIEHLAVQDPRVPRLRSVPNIGPVTAAAFIATVDDAQRFHRAHHLEAYLGLVPRESSSGDTQRRGPITKVGHSHTRWLLIQAALSILRRRPPAAEALWTWALRIAARRGKHVAIVALARRLAGILYALLRDGTVYTPRPARHHPDPVAALPT

SEQ ID NO: 463178 - protein, 355 aa, unidentified
MERYIGIDVHAASCTLAVISEKGRKLKDFPVETNGQALVEAIRMIAGHKHLVIEEGLQSAWLYETLNPHVDELVVAGITTSRGPKSDKRDAYGLAEKLRVGNLDKHVFKAPRQFTQLREFSRTHMTLVGDVVRAQARIKSVYRSRGVMVTGVDVYSSRRRNEWLKQLPSTTQLRATRLYDHLDFLLEQKKQAEADLLREGKKHPIVKILETAPGFGPIRAARLVPIVITPHRFRTKRQFWSYCGLGIVTRSSSDWVQTTDGAWIKARVPQTRGLSRQHNHFLKSIFKGAATTVITQRNKDPIHARYERLLDGGTKPTLAKLSLARMIAATVLRMWKNEEEYDPGRAGLLATTRKG

SEQ ID NO: 463179 - protein, 316 aa, unidentified
MYLGIDVSKLTIDCCLIADGQNHQKKFQNNKGGFEQLTKWLQSHKVSDKLHCVCEATGTYYEALAEYLYLRYTITVENPRKIKGYAIAELQRSKTDTQDANLIAQYCQDRKHKLKAWQPPAKEQKQLQEIARYLDHLKQQRATEKAKQHEAPDYIKSHIQTTISNLTAQILTVKKQLLQFYKDNPSYNNLRKRLKTITGIGEQATAVLLSTYKRHEFKNSKQFTAYLGLDPRKYQSGTSVNGKSRISKIGSSEIRKSLYMPAVVAYRCNAFPEFVGRLKNKGKHIKLILIAIMRKLAVIAFTLLKNGQDFKVERYK

SEQ ID NO: 463180 - protein, 430 aa, unidentified
MKSNTQNAKIEAITEKTLVLGIDVGSETHYARAFDYRGIEYSKKPFKFSNTEAGFVTFKEWILDLKERHEKDKVVPGMEPTGHYWFNLGKFLQDNEMKPVLVNPHHVKKSKELDDNNPTKNDRKDPKVIAGLVREGRYMIPYLPDGVYADLRTASNIRFQLQAELTRIQNRISRWFNIYFPEYKTVYGKPDAKSGMLILKAAPLPEDILTLGIDGVNQIWRDAKLRAVGKARAKTLIEAAEHSVGSKEGAVSARMEIRMLLEDYESRNIRFQEVMTLIEGLVKQIPMAEKLLEIKGVGIKTVSGFLAEVGDISRFNTPKELQKLAGLALVENSLGKHKGETTISRRGRKRLRYLLFEVAMSLVSKNQEFRELHNYYTTRRLNPLKKMQSLMAIAAKLIRVFYAMLTKGVDYDPKKMVSDIKRPAVYLQAA

SEQ ID NO: 463181 - protein, 377 aa, unidentified
MTSTDAATEARETVYVAIELSKKTWVLGIAHPDRDRPSIHRVSGGNIAELVSRLRVAARNNRRILVCYEVGYDGFWLARALAKMGIECRVLDPASIQVNRRARRVKTDRIDVLALLRALIATDRGERHVCAIVRVPSVEEEDARRSHRERQRLVRERTGHINRIKGLLFAQGIRDIKPKLRRSRIDFAALETAEGHPLPDRLRRELEREYARLSLIATQLREVEKERDTADAQDPVVEQRRQLLVALHGVGATSAAILAREVFARSFASRRQLGSYLGLTPSAYDSGSTTRCQGISKAGNSWARRILIEVAWLWQKYQPASPLSIWYIQRTAGQSSRIRRIMLIALARKLAISLWRYVETGLVPEGVAIAKAKLRPA

SEQ ID NO: 463182 - protein, 411 aa, unidentified
MEIVHPRCCGLDVHKKTVVACALISQPDGLIERHVRTFKTMTGDLLALADWLSSLGVTHVALESTGVYWRPVFNVLEDESRTLLLVNPQHMRAVPGKKTDVRDSEWLADLLRHGLLQASFIPPAPIRAIRELTRYRKTLVQERTDEINRLQKTLEGANIKLASVASDVLGTSSRAMLTALLDGERDPDVMADLAKGRLRNKLPELRQALASRIQPHHMVLVGQILAHIDYLEQAVTQMENEIERSLAPFLQALELLQTIPAIKSVAASAILAEIGTDMSRFPSAGHLASWAGLCPSNKQSAGKRLKGPLNRGNVWLRAIMGEVAWNAMKMRDSYFHAQFNRVARRRGRQKAVIAVAHSVLVVIYHVLRTGRPYTELGANYFDQLDATRVERHHVHRLEQLGYTVTLTPATA

SEQ ID NO: 463183 - protein, 338 aa, unidentified
MKAVARIGLDIAKNTFQVHGVNAHGAVVMRKQLSRGEVLRFFANVPACVVGIEACAGSHYWARELKGLGHDARLMAGQFVAPYRKSGKNDANDAEAICEAVGRPNMRFVPIKNEEAQAVLTVHRARQLLVSERTALANQIRGLLGEFGIVMAAGLAPLRRRLAQIGAGQQTLPVLARETVGELHDRLRLFDACISQYDRKIEVIARGSEPARRLMRVEGIGPVTSTALVASIGDARAFTKGRQFAAWLGLTPSQHSSGGKSRLGHISKRGNVDLRTLLIHGARSVLQFTSKKTDRKSVWVEALKARSGTNVAAVALAAKQARIIWALLSRGTEYQPAT

SEQ ID NO: 463184 - protein, 443 aa, unidentified
MPECVLERVWEYAPFEDFYLPISGLAIVMEKQRNKVCGADIHKKFLVATILSRDGTKITKRFGMTLDDLLEFRAWVMENQCEQVAVESTGVYWIPIHAVLENAVDLIVANAYKIKHIPGRKSDLIDSEWIAELCLNGMIEPSRIFPKDDRELRRLTRAREGYVNDMTREKNKIHHALESCGIKLSSVLADVFGKSGRYLLNCLLKGVEPEEMIEGIPVKSVKIKADQIREAVKGSLETTQIILIRGGLEQMGSIQRRIDELEREIKNRIASRREDLRIAMSIPGIGFTSAATILAEVGDFNDFDKAEQLAAWSGLVPTVYQSADKLITGSITKHGSRHIRRILVEVAQAISRSNKGKLKRFFRRVQAKKGYNVATVALARKVLCILYHLLINREMYQEDDVIKTKTVYVNSSSLTTKLGFEEMIQILTKAGYEIRKNASGTGG

SEQ ID NO: 463185 - protein, 368 aa, unidentified
MGKSINWIGIDDHADKLTICLLVGDEKTAAKEWEIAPTDAGLRHLIRWIKGLGGEARCVYEAGPCGYNLYRSLSSKGINCSVAAPSLTPRKPGDRVKTNRRDARKLAELFRAGVLTTIVVPNQRQESVRDLLRARDDVRKNVMSARHRLGKFLLRHGLRFRDGRSWGQQHWRWIRSTVMNEACEQIVLGHYINALEASLEQLRLLDEQVIEVAQEQDYAPMVAKLCTLRGIDVLSAMTILAELGDFRRFASAPQLMAAVGLVPSEYSTGEKTIRFSITKTGNAHARHILLQAAWHYQHAPREGVTLRSRRRGQPPHVVAIARKAEQRLHRKYRRMIARGKRSTVAATAVARELTGFVWALGQPISREV

SEQ ID NO: 463186 - protein, 419 aa, unidentified
MAFKIFRKNCCGLDVHKTWIYGCIGITDTNGRTEYKRARFSSFSKGLRDLAGWLAKYGCTEVCMESTGKYWIPVFNILEKSCLVTLAHPKYTKPQRGNKTDRKDAKWICDLFMCDMIKPSFIPPLDIRQLRDLMRYRMKLTNMLTSEKNRALNCLTVSNLKLDDVFSDVFGKSSRSIISYILEHPGETFDVTPFVDRRCKHPIEEIQAAVDGAISREQAAKLKECLQHMDEISAHKKNVEKEILRLAEPYSIQLALIRTAPGISGDPMTAIAILSEIGADMSVFPSAKNLVSWAGCCPRNDQSNGKVKSTRISRAGAYLKPILVQIANAVIKSDKYPECKERYRRLKARRGHKKAIIAICRMLLTAIWNILSKLEPYSAAGYIADKLTEHSVVITQAQGLALLRKRGYIFKDDLAADSG

SEQ ID NO: 463187 - protein, 454 aa, unidentified
MIAAVVERCAGIDVGKRFLKVCVMVGPLSEEPRFEIRKVDCTSTGLEDLRRWLKSEGVTHVVMESTGPYWVPVFNVLEGDVKVVLANPVEVKNRKGHKTDAQDSWWLAHLLRHGMIRASFIPEKATRDLRELTRRRKKLVGQVAQERNRVQKQLEYGNVKLGNELSDVFGLSGQLMLKALVDEKRTAEQIAELAQGSLKKKKPAIVEAVRGQRLSETQKEMIRSSMRHMTFLELEIEQLDGLVAGLIRESGQQKPYELLQTIPGIKEEAAGNLLAETGSDMKQFPDAGHLSSWGGVCPGNNESAGKHKSRHTTQGNPWFRATLTECAWSASRTKGSAFEAKYNSLKPKIGHQQALVAVAHLLSHAIYYVLSRGEAYRETTPKELNEIQRRRIIRHHTRRLRRLGCWLSAEKLTPLQQWYATHCIPNMDPPQPKRRGRKKGQLQDGASQRGAVNG

SEQ ID NO: 463188 - protein, 341 aa, unidentified
MSEVRTIGLDLAKNIFQVHGADASGAVVFRKQLRRGQVLKFFGSLPRCLVAMEACGSSHFWAREIGRLGHEVRMIPPAYVKPFVKRQKNDMADAEAICEAVQRPTMRFVAIKNEETQGAAVMLRARDLLIRQRTQTINALRGHLAEFGEVAAKGSTYASKLIAMVDDPQTALPKTARTALRYLTAILSQLNDQIRTLDAQIMRRAREDETARRLMTIPGIGPLIATALVALAPSPETFKRGRDFAAWLGLVPRQHSTGGKQRLGSTTKMGERSLRRLLIMGANSELVWRTRKGATPGTWLAKMLAHKPPMLVRVALANKMARIVWAIMAKGGIYRAPVAAA

SEQ ID NO: 463189 - protein, 367 aa, unidentified
MDTLEVVPQRFIGLDIHKNYFVATGVNSNKEQILGPQRVPNARLEAWAERELCPTDAVVLEMTTNTWKVVDTLEPFAYSVTVVHPPHVHLITRAQVMTDKKASLILAQLHAAGLLPPIWIPPTEVRYLRALIAQRWKMVRLGTQTKCRLQSVIHKYHLEPPPKSDPYTPQIRTWWESLPLEPLEHFRLQSDLDTVAFAQQQKERLETCLARHAARDERVPLLTQIPGIGFINALTILAAVGEIGRFPSANKLVGYAGLGTKVHDSGITHWRGRITKMGRRDLRRAMVEAVQSAVRHHDYWKAEFQRLCGQTAKKKAKVAIARKFILCPGLQAESQESTRWYDCLTVHSPPSGQVGYRSRIDSHSLGQ

SEQ ID NO: 463190 - protein, 340 aa, unidentified
MNTMTLLGIDIGKHSFHLHGQDAKGHQVLRKKTNRGQLLSTLAQVPSCTVVMESCGGAHWLARQIGALGHEVKLIAPQYVKPFVKGNKNDFIDAEAICEAASRPAMRFCSIKTAEQQTLSALHRVRKSLIGQRTVATNQIHGFLLEFGISLPIGAAALHRVPALLDDPQHPVPLRLKGVVMRLHHQIQQLNDEIKDIESDLKQQLKEDDAGSRLQSIPGIGPITASAVLADVGDASNYRSGRDFAASLGLVPRQYSTGGKTVLLGISKRGDKHIRQLLVQGARSIMQHIDKREDALGPWVRELLTRRHSNVVACALANKLARIVWAVLAKGGQYDPHPNA

SEQ ID NO: 463191 - protein, 344 aa, unidentified
MRIATIGLDIAKTVFQLHGVDAAGQVVVRQRLTRRRVLAFFEKAEPCLVGIEACSTSHYWARELMARGHEVRLMPAQYVKPYVKRGKNDAADAEAICEAVTRPTMRFVPVKTPEQQSVMMLHRVRLMLNRQRTQLSNSIRAHLSEFGIVASIGRRGVDQLLAIVADQKDTRVPPEARLCLQMLAAQLAVVKAQILESDRRVRASARQTELGRRLMEVPGVGPLLASALIATISDPAAFKTGRNLAAWIGLVPKQNSSGGKERLGSISKAGNRYLRQMLVVGAMAVIRYAERHGTRRPWLVQLMQRRSTKVAAVALANKMARIIWALMTTGERYREPVAAAVMAA

SEQ ID NO: 463192 - protein, 351 aa, unidentified
MSTNAAKQTVTTIGIDIGKNTFHLIGLDKRGEIVLRQKFSRGQVEVRLANMPPCLIGMEACVGAHHLSRKLLALGHDAKLIPGQFVKPFLKSHKNDFRDAEAVAEAVQRPTMRFVPTKSVEQLDLQALHRVRARLVSHRTAVVNQIRAFLLERGVAVRQGIRFLRHSLPDILANRGDVLTPRMAHMIEDLAQDCHRLDTRIDNVTEEIEALVKRDEACERLMTVPGIGPIISSATVATIGDGSAFRRGRDFGAWLGLVPRQISTGDRTILGRISKRGNSYLRMLFVQAARVILLRPANWHKYSFGRWLEAAVKRMHHNVVAAALANKLSRIAWSVLYHGRGYEARVGAQAA

SEQ ID NO: 463193 - protein, 415 aa, unidentified
MRQSHIEDTMGRTARVAFSAPVTKPMERPMPKANDCSRSTTVFDQNSTLIAVIEMSLSSWLVAGAVPGVERHPLKKLDVDEDALLKLLLRWRDEAVKAGRKIERIAVAFEAGRDGFWLARWLLARGVEAHVIHPTSVAVSREHRRAKTDRLDTELLKRVFLGWLRGEPDHCSMSAIPTLEQEDAKRPNRERETLVGERTRIVNRMKACLIRLGIRSFKPTLRKAPERLEALRTPEGAPLPPNTQAEMRRDMARLRFVENQIKEIEAARMQKLEQAPAEGPHAMIRLLARVIGVGVETADMLVNEILSRNLRDQKAVARYAGLTGSPDESGKRSREKGLSRVGNARVRRGMIQLAWRFLMFQKESALAQWYHGVTKDARGATRKTMIVALARKLLIALWRMVTIGEVPEGVVMRTA

SEQ ID NO: 463194 - protein, 369 aa, unidentified
MKQSIMYIGLDVHKNSIAVALAEEGRESEVRYFGTIGGDMAALDKVVRKLVSLGKSLRFVYEAGPCGYEIYRHLTRQGFDCAVVAPSLIPKKSGNRIKNDRRDAEMLARLHRAGELTAIHVPHIEDEAMRDLCRAREDAKSAERKARQHLSAFLLRSGYRYDGKTAWSKAHWRWISDIKMPHSAQQITLQEYVDAVRSCLERVDRLTGQIRQLSGVWRLGPVVEALQALRGVSLIVAATTVAELGDLSRFNHPRQLMAYLGLVPSEHSSGESTKRGGITKAGNSHARRMLVEASWSYRFPARVSRRLRDRQESLPQCVWEIAWKAQVRLCARYQRLIAKGKQSQVAVTAVARELAGFMWAITKTISVPA

SEQ ID NO: 463195 - protein, 322 aa, unidentified
MSLPALGIDISKEKFDVVLLLQDETLRKSFTNNQKGFKQLQDWLKKKSIQTVHACMEATSHYGDELALFLYKQEHQVSVVNPARIKGHAQSKMVRNKTDASDAFLIADFCATQKPGIWTPPSEEVRHLQALLRRLETLQKMKQMEENRLESLSKEKEILCSIKRIISSLNKEIERVKKAISSHIDNNPRLKKEHELLTTIPGIATTTAAWLLGEIELHNFKSAKEVAAFAGLSPKRNQSGSSLNGKTRVCKIGNKRLRKILYMPAIVAKRFNPIVKDFCLRLEERGKQKMQIVCAAMRKLIHIAFGVVKFSKPFDPTLAFSS

SEQ ID NO: 463196 - protein, 332 aa, unidentified
MDNIGLDLHQRETQLCLLTDAGELIEQRIATTGERFTAVLGPRPRSRILLEASTESEWVARHLERLGHEVIIADPGYAPMYATRSRRVKTDRRDARTLAEACRLGAYRAVHRASDAQRHVRAELAVRDALVRTRTRYVAVIKALVRRDGFRLAQGEPALTAELGPLLALLAPLNQQIAAADERLTLLATRDPVVQRLTSAPGIGPVTATAFVATLDQVERFATAHRVEAYLGLGPSERSSGERQHRGRITKQGNTRMRWLLVEAAWRILRSPRPEAAALRAWAEQIAVRRGKRVAVVALARRLAGVLYALWRDGSTYRGARPHPAEGSAAAA

SEQ ID NO: 463197 - protein, 345 aa, unidentified
MPIVGGLDIHRKQITFDYLDTVTGEVRRGQIAPADREHLRAWLARFAGHGDVAFAVEGCTGWRYVTRELAAAGIAAHLGEPADTAALRGRKRHAKTDKTDSAHLRRLLAEGRLPECWIPPEHILEYRALLETYHDLRREHTAWVQRIHAVFFHQGAPPLGEGVLRTEAGLARLRAAAAAHLSAAGQQQVATALDMLAATEARMGPLRHQLRQAAAHLMGAKVLAERLYGVGPVTGLALTCWLAGAGRFSSSRKAVRFTGLDITVHSSDRKGPLGRLSRQGPPVLRWAVYEAGKTHARAAAPDHGYYAAVKDRSNGKRAALSEARKIVRQACHILAELGDDALTAA

SEQ ID NO: 463198 - protein, 421 aa, unidentified
MNFINQEVFQVNAVGIDVSKGKSTVAILRPMGEVVQTPVDVPHDAVSLERLAYQILSLGENTRVVMEATGRYHEPVAIELHDRGIFVSVVNPLAIHGYCSGGTVRKVKNDQKDSLKIAKFALDHWVDLREYTPMDAVRQQLKIFSRQYNLYMKSRVALQSNLISLTDKVFPGVNEIFTSPERSDGHLKWVDFVTTFWHCECISLVSENAFTERYKKWCKRMGYKFSAAKVSDIYIDSLGHIVTLPKNNNTKLLIQTAAKELTAMNELLAVVKAEMIRLAKELPEYETVHAMFGVGELLAAQLMAEIGDIRNYPRRSSLVGFAGVDPEVNQSGKMNSESNPSTKRGSPHLRKTLFQLMTVYLRLSPADEAVYQFLDKKRSEGKPYYVYMTAGANKFLRIYYARVKECMAKLETPAEIAEENG

SEQ ID NO: 463199 - protein, 355 aa, unidentified
MSDVKFIGLDVHKTSISAAVLNESGQQVMKAVFMTNAAAVLAFVRGVSGTLRVTFEEGTHAAWLHSLLQSQVGEVLVCNPRKNALLKSGNKSDQIDARKLADLLRSNLLTPVFHDDSRTLTLKELGRTYRAVTDDTTRVMRRLKALYRSQAIDCNGKKLYTRGRREQWLNQLLQAGQRYRAQRMFEQFDSLQTMRRQIRSDLIQEGHKHAATAILSSIPFVGPIRSALLIARVQTPFRFRSKRQFWAYCGLALETRSSADHQMIDGELRRKSKPVFIRGLNLNHNPDLKNIFKSAATTASACPGPFRDFYENLLGKGMKPEMARLTLARKIAAISLIVWKKGERFDPEQLKAQAA

SEQ ID NO: 463200 - protein, 319 aa, unidentified
MTPTKVYVGIDVAKSRLDVAVWPTGEHRTLANDTTDIDKLTTWLQAQQPCLIVLEATGGYERAVLASLGTAGLPVAAVNPRQVRDFARAIGRLAKTDTLDAAVLARFAEAVRPLPRPLPDAQAELLRALVTRRRQVVEMLTAERQRLASAQPPVQELIEAHITGLEQELAHLEEDLGRTLRQSPLWRARERLLRSVPGVGPTVAAVLLAEMPELGRLDRRQAAALVGVAPLNRDSGQYRGRRSVWGGRARVRATLYMAALVATRWNPVVKNCYQRLLASGKAKKVALVACMRKLLTILNAMLRDGTAWQQVPAAHAIPA

SEQ ID NO: 463201 - protein, 392 aa, unidentified
MLIVGIDIAKRSHEAALVRESGEVIGKTFKFANSCAGFNLLTRRIAEAAPDEDVEIGMEATGHYWLPLYARLRKEGYRVHVINAVQSDALRGLYIRQAKTDSRDAFIIAEVIRFGRYAETSTSPEDLYALRELSRHRFYVVDCVSDLKRKVIALLDQVFPEYETLFSDMFGVTSSELLLTYTTPEDILAVDTDKLCQLLNTASRGRLGQAKAEEIKNAAANSFGMLLASDSIGLLIRQYIEQIRFVETQIAEIERAIERLMVSFDTQLTTITGIGPTLAAAILSEIGDIKRFESPAKLAAFAGIDPTTKQSGEFVGTQSKMSKRGSPYLRRAIWLASAIAAFRDPAIMVLYQRKRAEGKHHNTAIGHVCRKMISIIFAVLRDNKPYIPHISG

SEQ ID NO: 463202 - protein, 336 aa, unidentified
MQINRVALDLAKQLIQVHAVDLSGKVLVRKPLRRTQLLPFFRELVPCEVGMEACSGAHHWARQLQAMGHRVRLLPPQYVKPFVLGQKNDANDAAAICAAMSRPEIPAVTVKTIAQQDRQALHRIRSARVAQRTALVNQTRGLLAEYGLVVGRGRGTLRQAIPELLEDAENGLSLDFRQLLAELYDELVVLDARVEQLTGRIEQQVRQEPDTQRLMQIPGIGPLTASALVAAIGDATQFRNGRQLAAFLGLVPRQHSSGGKARLLGIHKRGDSYLRQLLVHGARSVLRTAANKPDDRSRWLVNLSTRKHRNTATVAQANKTARIAWAVLARNEPYRP

SEQ ID NO: 463203 - protein, 352 aa, unidentified
MRYYIGDDAHKKYSIFRMVDEKGQVSSPERVEHDKALYRKYLSTLPPGSPIAIESVGNWYWMIQTMEEAGHQPILVHPRKAKLLMGLINKTDKLDAKGLAMLNLNGSLPQVWIPPAELRDQRELSRMRMALVDVRTKFKNRIHATLAKYAITIEGVSDIFGQRGRILVEAALKELPAETQQSVREQLLLLDHVSGQIEQVEKHIREVVRVTPMMQLIKTLPGVGDILAIVIALEIGTVERFCNAEHLASYSGTVPRVISSGGKTHFGRVRPDVNRYLKWAYIEAANCVALQQKQLRGRHVVELLQRLQKQKGYPKAAVAVSRHLAEATYCMLKHNEPYREPNLKKTVLSSQG

SEQ ID NO: 463204 - protein, 387 aa, unidentified
MPQPNDLSRSLVALDQNSTIIAVIEMSQSSWLVGGVLPGIERQPRKKLEPSPERLLALLHRWRDEAVRAGRTITRIAVAFEAGRDGFWLARWLEARGVEVHVIHPSSVAVSREHRRAKTDRLDTELLKRSFLGWLRGERGHCSMARVPTMLEEDAKRPNRERECLVGERTRIVNRMKGTLARLGIRTFKPTLRKAAERLATLHTPEGSPLPPNVSAELQHDMARLSLLISQIREIENARQERLEQEPETGPHAMVRLLARIVGVGIETADMLVNEVLSRRMRDRKAVARYAGLTGSPDESGTKRREQGLARAGNARVRRGMIQLAWRFLLFQKESALALWYRARTADSRLGTRKTMIVALARKLLIALWRLVTTGETLEGVILRPAG

SEQ ID NO: 463205 - protein, 338 aa, unidentified
MAIVTVGIDTAKSVFAVHGVDEAGKVQLRQPKVARSKLNALIASLPPCTIGMEACTGAHHWARQFQAHGHQVRLMAPKLVSPYRMSGKRGKNDAADAAATCEAVGRSNMRFVPVKSEEQQSRLMVHRARQGFVTARTATINRIRGLLAEFGVVLPLKAEVVRRQAAAELDNLPGYANLVIGDLLSEVHHLDERIRQYDVHIRAMARQCTAAQQLMRLMGVGEVTATAIVASVGNAREFDSGRQFAAWLGLVPGQYSSGGKTRLGGITKAGDAYLRGLLVIGARAVLNAAKSKTDSLSRWAVQLEQRRGYWKAVVAIAAKNARMAWAALTKAEAFKLPA

SEQ ID NO: 463206 - protein, 370 aa, unidentified
MSQYRKFVGLDVHKDSVSIAVAEEGREEARFLGHVSSDLSRLKRKLASLGEPQEIEVCYEAGPTGYGLYRKLVALGYSVQVIAPSKTPRTAADRVKTGRRDALRLAHFLRSGDLSAIRVPTAKEEAMRNLLRTREDAKKAEKTARRQLGSFLLRSGRVWSGRSNWTIAHMQWIGSQAFEHEGDVITLSDYLAEVRRLTERVKDLTTSIEEHCRELEAYSLIENLQAFRGIKTLLATWITVEIGDFRRFPNAKHFMSFLGLTPSEWSSGATVSRGSITKAGNVRLRSLLMQAAWAYRFKPRVEGHLRRRSQAASDETRQTAWRAQKRLHAKYYRLTSAGKPKNKALVAVARELAGFIWSVGRKEQPQTITV

SEQ ID NO: 463207 - protein, 342 aa, unidentified
METKRHIGIDLHRNCFTVCVRLENGRNYLSEWKLEDLPRFTQKLRAGDEIAVEMTGNTRFFHAAVAPHVARVVAVDPNQFKVISQSVKKTDPNDARNLALYLAKDLLPEVRMKEKTEAQIASLTQTRDTLVKLRTALKNKINNILAAHGINLAKEALSSEKALAGVLEMHFDEMVELELQVIVEQIRGLNQSIGKLEQTIRDRGRKLKGHPNLTSIKGIGNLGASILLSVIGDIDDFADEGKLAAYFGIVPRVQNSNETERSGHITKRGSKLGRTTLVQCALVAKRYSPYLARYYEHIKSRKGGGKAIIALARKFLGIIYRTLKNGWIFEDFPNFVLAEATS

SEQ ID NO: 463208 - protein, 355 aa, unidentified
MDSKKYIGMDVHKESISIAVMNGAGKIVMECVIETKASMILQFIDGLRGDLQVTFEEGTSAAWLYDLLKPHVTKLLACDPRKNASMREGNQSDKIDARRLAELLRLNHLNPVYHGEHGLRSLKELVRSYLTITKDLGRVMSRVKAIYRSWAIPCTGKQVYAPRHRAEWLGKIGEPGVRRRAEFYYQQLDALRTVRQEVRRELLAEGKKHKAWKRLCQIPSIGPIRSAVLLGILQTPHRFRTKRQLWTYSGFGIETQSSADHRSVDGQLERAKKQISIRGLNRNCNHDLKNLFKGAAIVASSKPGPFQEFYTALLTKGIRPEMARLTLARKIATIVLIVWKRGACFDAQHLKPQTA

SEQ ID NO: 463209 - protein, 506 aa, unidentified
MKVQASKPTFTIDYNPIGQYGSNICRQDIGRKRPYRSLLRQRYWAWSFTSKLITMAKVAKRKQTSKGLRLEVVNPNAAGIDISPKEMQVCVPSDRDGECNRTFGVYTEDLHYIAEWLKACCIDTVAMESTGIYWLPVFRILKESGFDVILVNASDVKNFSGRKTDASDAEWLMMLHSYGLLKPCFQPENIARTMRNLVRHRDNLIRSASREVLHLQKAMEQMNLKLDNVFSDILGKSGQSVIKAILNGERDPKVLSDLADPRCRTSKEEIEKSLQATWDEEHLFEMRQSDSLYQFYQQLIAECDAKINEIAMQYSATVDAPKTELLRSGKYNAKKNRIGFDVEKVAFELWGVNVMRIPGMSRGALLRLVGELGAGFTTKFVDVKHFVSWANLVPNNKISGGALLSSKVPKKKNPVGIIFRQAANTLKAAKNPLGNYFRHMRAKGGHLQAMVATGKKLASIFYCMVQRKIEYNEKVYCNHRKQELQNKVAYLHKRLQRMESELANCG

SEQ ID NO: 463210 - protein, 394 aa, unidentified
MPKASAYSETSAAIQTHLTAIFVSLELSRKVWLITSLSPGAGEKMSKHSVPAGDVAALLTRFVELKRKAEARTGKSYPIVTIQEAGLDGFWLHRVLQSEGVESHVVDPASIATSRRRRRAKTDRLDGEALLRALMAFKRGEPRVCAMVKPPTPEEEDRRRVSRERKVLVAERIEHTNRIKGLLFSQGVFDYDPLARDRRQRLGELKTGDGRPLPVRLETQIVRELDRIELLLGQIKTVEAERDATLAPPKTDAQLPASPPPAGKMLLDFKGIGPEFASVLWHEGLYRHFDNRRQLASYAGLAPTPWQSGSVDHEQGVSKAGNSRLRTTLIELAWLWLHNQPDSALSLWFKQRVAANSGRRKKPTIVALARKLLVALWKYVAFGVVIKGAVMKQA

SEQ ID NO: 463211 - protein, 328 aa, unidentified
MKPVSARLGNGEAGMRNLFVGIDISKAELEVCVHPVSKGFKTPNDPVGLTELVGRLSELSPRLIVMEATGGLERPIQVVLEGAGLPVRVVNPRQVRDFAKGMQILAKTDAIDAAVLAKYGEKAELEARPLKDEQTRELEAMVERRRQLVEMLTAEKNRFQRAPSRVRPNIGAHIDWLERCISDVETEMQDFIGGLPEYKQKDGIIRSFKGAGPVLSRTLLANLPELGMIKNRKISALVGVAPFNRDSGTRRGQRCIWGGRADVRSVLYMATIVAIRHNPVISQFHHRLIAAGKKPKVAITACMHKVLIILNTMVRNGTHWMPPCAHAL

SEQ ID NO: 463212 - protein, 351 aa, unidentified
MIIGVDPHKSSHTATAVDPATNSPVASLRIDASLAGYRQMLRWAAQFGERRWAVENARGLGRHLAQWLVARDEIVLDVSSTATARVRELSRGGRRKNDVIDAAAAASVAALQGDATVVVGEDHTTVFAMLEERRANLAAQRVRVANQLHALLRDLVPGGAPLALTARAAAAILRSVRPASTSERARKELAQDLVRDLRAVDTGLADIEKRMTVALDEHGTRLRSVDGVGPVTAVRLIGRTGPASRFRSADAFAVYAGVAPVEVASGDRTRHRLSRSGDRQLNSAIHLVAVTQVRMRDSIGRKYFDTKLAEGKSRNEAMRCLKRRLAAHLWRLMITDERRVAAADAGIADAA

SEQ ID NO: 463213 - protein, 457 aa, unidentified
MRRQACRATKGAVVPKLRVQNPAAAGLDIGAAEIWACVPPDRDAQPVRAFGTFTPDLQALAAWLVQCQVTSVAMESTGVYWIPIYEELEARGLEVSLVNARHLKHVPGRKSDVQDCQWLQQLHSYGLLTASFRPAEEMRVLRAYLRQRAMLVEHRAGHIQHMQKALQQMNVQLTQVVSDITGTTGLQIIRAMVAGERDPQVLARFRHGRCQASEAEIAKALSGHYRAEHVFALKQALALYDFYTAQVQECDTYIEQHYAAIKPVDEEQTPPPLGPDPKPNSHAKNAPAFDVRAGLYRILGVDLTAIAGLEASSAQILVSEIGTDMSKWPTEKHFASWLGLAPHNDISGGKVLRSKPRKGNRRAAQVLRLAAQTLGRTQTALGSYYRRLRARKGPTPAITATAHKLARILYHVLKQRTPYQPQSQESYDHHLRHRAIRHLKRTATRLGFMLLPQPVTA

SEQ ID NO: 463214 - protein, 366 aa, unidentified
MKKISTMQVFGNEIFKEQKLTIGFDLGDRWSFYCILDEAGKIILEQKLPTTPEAMKQTFGKIPRSLIAMETGTHSPWVSRLLTELRHEVLVAHAQKVELITKSNRKDDRHDARTLARLARIDPELLGPVRHRSAKAQIHLTVIRARAELVSARTALVNAARGLAKSFGQRLPKCGTQQVSGKLAEGLSAELREVLEPLLREVESLNERIQEYDERMEKIAKEVYPEASLLKQVKGVGTQIALTYVLTIEDPYRFPKSRAVGCFLGLRPGRRNSGESEPQKKISKEGDRYLRTMMVQGAHYILGPFGEDSDLRRWGLKLAARGGKNAKKRAVVAVARKLAVLLHRLWVSGEVYEPLRNSQKTMRAVA

SEQ ID NO: 463215 - protein, 284 aa, unidentified
MSNDTAGWAELVARLRPLTVSAIGLEPSGGYERGIIRALLAARLSVRRINPSKLRQFARARGVLAKNDRLDARLIAEYVAIMPTRVVQRDAAVERLAEIVTMRRQLCDEHVAVENQAAHLEDAMLRRLSKRRQMRLEADIRLLDKRLAEMVAANGALAQRYELLTSMPGVGPVLAFTLIALLPELGKMSRKQIAALVGLAPYDFDSGKLKGHRSIYGGRMPVRNVLYMAALSASRYSPALKTFHKRLAAADKKSKVIIVAVMRKMITTLNAMLRDSAAWQPRSA

SEQ ID NO: 463216 - protein, 345 aa, unidentified
MIHVGADLHQRFCYMTALDARGRELSAKAVANRAEELRRYFEQFRGPVQVAVEACSFWPAFREAVGEGAEVHLVHRQRVKAIAAAKLKNDRIDWGILAHLLRCDLLPKAWMADAETQALRQQVRLRASLVRQRTRSKNQVHALLHQQGLRFEGSDVFGVRGREWLARVEMPKGTRAAMKVHLKLIDEFSRHVAGQDRQLEQLRKKDVRASWLETIPGIGKYSSLLLLAEIGDIQRFATKRALCHYAGLIPWMRESADKRRSGGITRVGSPWLRWILVEAAQTAIRTAPEVNAWFQCLARRKHKHTAVVAVARKLLVAVWSMLQDGVVYEESHFAVNSARAKAGAN

SEQ ID NO: 463217 - protein, 337 aa, unidentified
MSTVPVYVGLDYHQAAVQVCVLDGRGRVLANRSCGNDSRMIDEVVRPHGESVQAAIEACCGAADLAEELIQGFGWSVDLAHPGFVNRMKQNPDKTDFGDAHLLADLERVGYLPRVWLAPEEVRELRRLVRYRQQLADERRNVKLRIGAALREQRVARPEANPWTKAWRYWLEREAPLSSQSRWIIERQLHRLDQLAQEIVEVENRLEEMTAADPIVGKLRQQSGIGLVTAVTMRAEIGRFDRFRSGKQVARFCGLSPRNASSGERQADAGLIKASNARLRAVLIEASHRLMRTPGPWQELGRRLRSRGKPGSVVAAAVANRWVRWLYHQMQPAVLAA

SEQ ID NO: 463218 - protein, 423 aa, unidentified
MMKLKYSICCGLDVHKNIIVATIVTTNKEGISEYTRKSFSTINSDIQKFHDWLIENNCYHVCMESTGKYWIPIFNYLEKNIDVCLTHPKYVKAIKGKKTDKKDSKWIADLYKFDLVRCSFIPPKDFRQLRELARYRFKLVCMKSSEKNRIQNCMTVSNIGIASVLKDTFCKTATEIMSYLLEHTSDTIDEKAVRRLIKKGTKATSNEIIEAIKGYNIETDQAKKLELARNHLDYLENMITQTEVELYVRIKPYSEFVEFVSTMPGMTELSTTIVLAETGVNMEIFDDAGHLCSWCGLAPANNESAGKKKSVRITKAGEYLKPVMVQCALSAVRSKKQPYFAVKYNAIKKRRGHKKAIIATARMMMVCIYHMISEKKPFAPTDYEELMDSREQNKRVVLNEENALAFLAAQGYDTSQLVKCNDN

SEQ ID NO: 463219 - protein, 480 aa, unidentified
MNVKANQTKKQVNVENQANLLLSKEELRKRMEGVEKELKSYTWRELETNGKFAKNDKLSFITDDMLIVGCDIGSESHYIRAIDIRGRELGKGAFEFSNTAEGFENAKAWMLKHAAQNEKRQIVPGLEPTGHYWFALAAWMISKGISVVQVNPYAVKQSKEIEDNSQLKDDRKDPKLIANLVKDGNYGMPYLPEKTYADMRRLSMFRDQLTEDRIRNINRLHRELKIYFPEYMDAFGKIDGAFALEVLKVSCIPSEIAALGTEGLRNIWHDAKLRGRGYSRAGKIVNHAEKSVGLEDGTSAGREAVRWFSEQIMKLDEQLARIESTLHKKCMEIPYAENILEIKGVGENILAGILAEMGDISRFDDVKEIQKLSGMGLVACSSGKHRGQTKISHRGRKRLRYWLFQAAKSAVSHAEEFKQLHVYYTTRARNPLKKMQSLIVIACKILRVIYTILKTGATYDPQKMLKDIKRPEAAPAQMAA

SEQ ID NO: 463220 - protein, 314 aa, unidentified
MSSETVVGIDVSKRWLEVQVHGAATSQKVANAPQGFCALIELMQVAQPQLIAFEATGGYEREAAKALDAAGFTVVVVNPTRVRRFAQSMGILAKTDKIDAKVIAYFAEVSKATLHPNCPRTPQEEHLAACLERREQLLITLSAEKNRLATCAQCVRDDIKAHIAWLEAAIDRLDAEIDAGIAQHAEWQERAKIIASVPGIGRVTASTIVAELPELGRINRRVAAALVGVAPFNKDSGPKRGRRRITGGRARVRRVLYMAALSASKCNPVIRTFYQSLLARGKEKKVALVACMRKLLVMVNAMVRDGQVWRNAPA

SEQ ID NO: 463221 - protein, 373 aa, unidentified
MVWTPPPLTGINVPRWEEVTSSNQEEEESAMQVTTFSVDLAKNKFQVHGFSAVGEKIVAKTLPRAKFLAFLSARSERCRVVMEACATSHHWARELRSAGFHPELLPAQHVAALVVGEKNDANDADAIYEAASRPKIRRVAIKSEPQQDLLALHRVRDRLVRSRTALINQIRGLLAERGVVFAPRTGTLKRALPTWLQASSGPLKILTESLLEEWRLLDQRIGHLEIELKAHYRASPACQRIGAVEGIGVITATAIIASVGDARTFHSGRQFSAWIGLTPRERSSGERRYLGGITKRGDAYLRKLLIHGARAAVQAARRKDDARSRWINALRQRRGMNKAVVALANKNARILHALLSRGEDYRPPARERLMARS

SEQ ID NO: 463222 - protein, 351 aa, unidentified
MAEVIRIGMDTSKTVFQLHGVDASERPVLRHRLRRGEVVKFFASLAPCAVGLEACGGAHHWARVLGELGHAVKLVPPQYAKAYVKRNKNDAADAAAICEAVSRPHMPSVPVKTAAQQAACLLVSERSRLVRERTRLANRLRGLAMEFGVVSGRGLARIPTLLARLQGETAVPVEARRVFARLGAEYAALEARLSEADAEVRAWQRQDETCRLLRQVPGIGPLGAALLVLRTPAPEAFGSGRDFAAWMGLTPRDHSTAKKQRLGAISRAGDEALRAVLVSGAMAVIQQVQRGRVRPSPWLARLLERKAPKLAAVALANKMARVAWKLMTSGEEYQPARFLAPAPAAAAEAAS

SEQ ID NO: 463223 - protein, 328 aa, unidentified
MFSLGVDVAKAKLDCLLLDGSTGKQRDKTVPNTPAGVRTLLKWLLDRGVVLSELVLVMEPTGVYHELAAQALHDAGVLVHLVNPARARNFALGQGQRGKTDAADCRSLAHMGLQQPLPRWTPPSPSARTLKALLARRAALAEDLQREKNRLEKAQATLVPAAVSQSIAQGIAFVEQQIKTLGKQIKDHIDDDDDLRHKRELLLSIDGVGPRVADEITSILGCMRFDSAEQLACYLGLTPQRWESGTSVKGRARISKAGPARLRALLYMPAVVAKKHNRHIRELYERLLARGKPKMLAITAAMRKLVHLCFGVVHSNQPYDRTHGLEKG

SEQ ID NO: 463224 - protein, 342 aa, unidentified
MAILFVGIDLAKNVFAVHGVDEHGKAVLVRPSVARAKLNELMASLPACTIGMEACSGAHHWARMFKQHGHTVRLMAPKFVAPYRMGGARGKNDAADAAAICEAVQRPNMHFVPIKSEDEQARLCVHRVRQGFVEQRTATINRLRGLLSEFGIVLAQKAAIVRREAAAHLEDLPGWANAAVGDLLSEVHRLDERLAEYDRHVTQMAADDERSRRLMQLQGVGCTTASAIVATIGNAHDFKNGRQLAAWLGLVPGQYSSGGKTRLGSITKAGDGYLRTLLVLGAKSVLAAAKNKQDRLSRWAVSLQERRGYWRAVVAIAAKNARMAWAVLAKGEGFKPLEPQAL

SEQ ID NO: 463225 - protein, 317 aa, unidentified
MLIIGVDYHPSFQQIAFLDQDTGECGERRLNHGDGEAEKFYRDLQQKGVRVRVGMEATGYSRWFERLLSELSVEVWIGDAAKIKTKRVRKQKTDRQDAQLLLKLLLENNFPRVWAPSPENRDLRQLLWHRHRLVQMRTRIMNQLQALAMNEGTRWKKRLWSEQGRSQLEKIRLAPWASRRRQDLLELLDRMNPTIAELTAAVEQEAKKRPEVLRLMTHPGVGPITALAFVIIIMTPDRFPCGKQIGSYVGLIPCEDSSAGRQRLGHISKQGNALLRFLLVEAAQAAVRYDPDWRRRYLHLAMRRERRIAKVWRWRAK

SEQ ID NO: 463226 - protein, 355 aa, unidentified
MDSVKYIGMDVHKEAISIAVLNSSAKLVMECVIETKAITILDFLKGLRGSLHVTFEEGTWAAWLYDLIKPHVTELVVCNPRRNALLKEGSKSDRIDARKLAELLHSKMLRSVYHGEHGVRKLKELARSYLAISKDLGRVMSRVKAIYRSWGIPCTGKQVYAPRYRSEWLDKIKEAGVRRRAEFYYQQLDALRPLRQQVRQELLAEAKKHSAWKLLRAIPFIGPIRAALLMALIQTPHRFRTKRQLWSYSGFGIQTHSSAEQRFINGELRRAKKPVSIRGLNRNHHHDLKNLFKGVATVAAAKAGPFQEYYDALVAKGIRPEMARLTLARKIASITLIIWKKGARFEAQHLKPQTA

SEQ ID NO: 463227 - protein, 339 aa, unidentified
MRLYAAFDLHSSNSYLGIVDENGKRTFKKRLRNEPEIIRETLRPFKTDIVGITVESTYNWYWLVDFLTEEGYQMHLANPSKVQQYSGLKHGDDEDDAFWLAEMLRLKILPEGYIYPKEQRPLRDLLRKRGHLVRLRTSLIVSLQNILARNVGGKMKTNAIKALREDRVTPLLAGNDDICLAGKVSKDAIDSLTKQIRAIEVAVEKKIELRKPYDFLLSMPGVGRVLALTIMMETGPIERFVKVGNYVSYCRKVPAGRFSNDKKKGNGNRKNGNKYLSWAYAEAAELARRFDTEARAYYDRKRRRTNAPIAHSALAHKLSRAAYHIMRDKVPFMPEKTFA

SEQ ID NO: 463228 - protein, 359 aa, unidentified
MTTMKSPTILAIDLAKAKSLFCWHDVVKGTHQIRQIPSTPKAFHDALLQQPVERVIIEVCDMAGWIKDLCEGLAIPLQIANGNTEGWRWRNVKKKTDKEDALKLISLSLTNQLPTVVLPDRPTRQWKSLILYRQKLIERRTRIKNKIHAILVSEGRAMRGGRQAWSEPSLAAVSKLARPLADCAIDELWRGQLHMELAALDDLDHAVGQLDQRLDALGQADARVIRLETIPGVGPRLSELVVAVIDDPKRFKNVRQVSAYVGLVPRRYQSGAMDRSGRISKAGCAKLRKLLMEIAWGMLVHNAHGRSVFQRISKGQKTRRKQAAVALARRVLGWCWAMLRDGTDWRDPAGGAAPSPVAT

SEQ ID NO: 463229 - protein, 419 aa, unidentified
MTDSIHWFLGVDWATEAHDTCLTDATGKVHWARRPVRHDVAAVHAFLDTLLTYTNAAPSEIAVAIETPRGALVDAFLERGFNVASVNPKQVDRFRDRFTTAGAKDDDRDARVLADARRTDARAFHPVEPDAPAIVQLRELARTERDLTVQLAALASQLREQIYRVAPPLLTLSPAADDPWFWTLLEHLASPALRTTLSRTDVQKLLKDHRIRRVSVDQVWTQIHAPRFHLAPGVDEATWLHIDVLLPQMRVVDAQRRRCEKRIAGLLAEMAEAAPSEAEPGEHRDVTILQSLPGVGRTITATMFGESAQALAHRDYATLRLRTGVAPVTKKSGKRKKRPFVLMRRACSPELRDACYHWGRVSIQVDEACRRYYDRLRQRGHTHGRALRSVVDRLLRIAVAMLKHRTLYNPERLLAAAAA

SEQ ID NO: 463230 - protein, 403 aa, unidentified
MELSEIGVFVGVDMAKTDHFAQATTTDGVELFARSVLNDQTAIEKLIDDATGHGNVAVVIDMTASNAQLLLAVAAGRQVPVAYVTGLQMRRAADLYAGSAKTDPRDAWVLADFARRNADRLAWLDVGDELLLELRVLNGRDVDLATDANRIINRTRDALTALSPGLERAVGQRLVQAGVRDLIAKWSTPTALRAAGKVKVRNAIKKRSPRIAAKIADEIWAALDAQTVVLPAEETWGQVVGELLADLDRIQAQRARLAAQIEEAFLAHPLGQVLVTLCGFGPRTGARTLAEIGDPTRFANGSRLASYAGLSPTDWRSGSSIKGAFQHRGGNHRLKNAMFLAAFVATQHDPDARAYYQRKRAEGKKHNAAVICVARRRCNLIHAMLTTATPYDPSRSKNLAEAA

SEQ ID NO: 463231 - protein, 357 aa, unidentified
MGKIFCGIDFHKNECVLCVKTEKGEQIEPITTIKTRLLRQYLANKKDWVIGFEASGGTNEMATQLKADGHEVIILKPNQLRGVTKSMKKTDRNDCQVIADALRLNFTPSVHLKSKASRELKSLLTNREILVRSRVNFTNHIRGTLREYGITMPQGAEEFRKHAAASIKQLSCTIIAGVLENILEQAKELERMEDQLEVTIQKMIQEDSRYALLQTMPGVGALTAAALISVVDDIRRFPDACHFAAYLGLVPRVRSSAEMCMMGSITRSGPEIVRRYLIHGARAWMKYDPTPQDRDRTWAEAVKKRQGMNKATVALAHRMARIAFAMLRDNRPYQGRKKKKSAAAQSGETKVDAEIAA

SEQ ID NO: 463232 - protein, 351 aa, unidentified
MMIIGVDYHPSFQTIAFLMEETGECGEQELNHSDGQAEKFYRDLKQRGISVRVGMEATGYSRWFERLLAELGFEVWMGDPAEIKAKRVKKRKTDREDARLLLKLMLENNFPQVWVPGPENRDLRQLLWHRHRWVQMRTRIMNQLQALAMNEGYRWKKKLFSQQGRAQLEKLTLAPWASRRRQELLELLDRMNPTIEELTAAVEREARKRPEALRLMTHPGVGPLTALAYVLIIGTPTRFQRGKQIGTYVGMIPCEESSAGKQRLGHISKQGNSLLRFLLVEAAQAAARINPEWRRRYIHLAMRRHRSIAKVAMGRRLAVRLYWMWRNGCEYSPSLEFGSYAGQLGLVHGGK

SEQ ID NO: 463233 - protein, 347 aa, unidentified
MKYVSTIGLDLAKHVFQVHGADIAGSPLFNRKLRRGEVLRFFEKLPSCLVGMEACGGAHYWAREIANLGHEVRLIPPAYVKPFVKRGKTDAADAEAISEAVIRKTMRFVPIKTAEQQADAMVLKTRALLVQQRTQSVNALRAHLAELGIIAARGLPSVAALMTIVREGEDTRLPAAARFALMAVADQIDTLADQIFKLERAIVTEAKRDEDMRRLTTIPGVGAITAATIKALVPDPGGFKSARHFAAWVGLTPRPHSSGGKERLGGISKMGNPELRVLLVLGATAVLRIARNDDRARPWLKALLARRPFKVAAVALANKMARIIWALLNKGGIYHRPEPLSIAAVAR

SEQ ID NO: 463234 - protein, 368 aa, unidentified
MGKIRLVEVVGQQGSNTPRRPDPGSAVWMAIDISRTKLVYCVRWGGAEQRRLSTPMGLEHVRALVEQYQGCRLHVAYEACGFGYEIAWWLQEQGVAITVIAPSRMERAPGLAVKTDRLDASKMARKLEKGEIKTIYVPSRTIHEQRAFGRTYAQCVKERKRAQVHIRALMQEHAKLGPLPAQGWKAYSEWLAGQTLAQPLELSVNAHLQLRRLADQQARHLRAQLEVLAASEAYSKVVRALCQQSGVGTLSAIRLVLELGDINRFPTTGALPHYLGLTPSEYSSGVDVNYRGHIMKCGPGTLRATLLQCAWAAVRRGIDQDLVQVFARLAPRIGRKRAIVAVARRLAIKVRRLWLQAVSATPAADSPA

SEQ ID NO: 463235 - protein, 385 aa, unidentified
MRPFGEVVISPFEVQHTASELSELAKLLKSLDGETRVVMESTGNYHTPVAWLLHDAGLYVSVVNAMLVHDYGNNSLRRAKTDKKDAVKLANYGLDHWLTLPRYVPEEDTRLLLKNCYRQYQQYSKVQTMLKNNLISLLDAVFPEVNRLFNSSPRADGSEKWVDFVSTFWHCRCVSTLSLKSFSARYLKWCRKHGYYFSQEKAFEIHSKAQSCISVMPRNETTKLLVQQAIAQLKATSAALAALKQEMQSLAAALPEYPVVMEMFGVGSTLGPQLMAEIGDVRRFHSKKALVAFAGIDAPPCQSGQMDIHSRSISKRGSAALRRTLFLVMGIYLQSAPLDEPVYQFMDKKRSEGKPYKVYMMASANKFLRIYYASVTAYLNTLARI

SEQ ID NO: 463236 - protein, 317 aa, unidentified
MDKTSMIVAGIDTAKDKLDVAICGQTQRLQVANSMRGWKQLRLELTKAGVERVGIEATGGYERGVVRHLQAAGFVVLVLQPIQVRAFARMHRQKAKNDALDAALIAACATAIEPHQMGADQRLTGLADSLTFVEQIEEDIARFKTRLEHIAEPRLKRMVLADIARLKVRRLAQLRLIAKQLRDHRDLAVRLDLVMSVPGIGERTALALIVRMPELGRISREQASALAGLAPFDDDSGKYKGQRHIAGGRGRLRRSLYAAALPAAFRWNKALINLYSRLTAAGKAHNLAMVACARKLLIYANTVVARGKPWRENAVPT

SEQ ID NO: 463237 - protein, 429 aa, unidentified
MINVNELVTLRVCIYKVTLLLVCEFITFDTTNKEVFILIYIGIDIAKDHHDIVIIDDYGEIIKEHFQINNDKEGFEKLNTEIKSCMKSLNDIHIGMEETGIYHENLRDFLISKGFTVYTINPLLTSYSRKASSPRLTKTDKIDATAICRYIMNNFRFLHSYTPSLYYIDELKQLSRTYHHKKQLLSKTKIELKRLLQIGFPEFTKHFDPYAKWSLDILGEYPLPTFFKGLHTETLVARIKTKSNRLAKAILLKQLAKDSIGKCDNLRAFLVRSIISDFKHYESQIKELKKIITVKMSIFPKIMSVPGIGPINGATILGETGDIHRFSNKHEYYAFYGCDPIIHESGNYKLKKSRLSKRGDKYLRTAIYSASRVACVGKFTRNNKFQRKYLKMTERDNKHHNTIIFAVAKNMVHSIFKILKENEAYEDSK

SEQ ID NO: 463238 - protein, 414 aa, unidentified
MEIVHGRCAGMDVSKRDAKVCVRVAGRGRRKTVETVRTWASTTNAILRLREHLITEQVTLVVMEATGDYWKPFYYLLEDAGFEVMLVNARQVKNLPGRKSDVSDATWLAQLGAHGLVRGCFVPPAPIRELRDLTRARTMLTRERGREIQRLEKVLEDAGIKLSSVASDITGVSGRLMLQALVEGQRDPALLAELAKRRLRAKIPALTEALNGRFSEHHAFLTSMYLEVIDQRTRQIEELNARIEVAMEPYRSFCGLIGTIPGIGPRCMEVIVAETGGDMSIFSTAAHLASWAGTCPGSNESAGRVKSTATRPGNAYLKGALGAAALSVSHTHGTYLSAKYKRIAARRGPKKALVAVEHAILTAIWTMAHTGALYDDPGADYFTRRDPERLKRHALSQLQRLGYDVTLNAAAPTA

SEQ ID NO: 463239 - protein, 374 aa, unidentified
MRISILARDVLPETDGVDGPRPDSTEDGVQGFEEAFAMQITTIGVDLAKHVFQLHGIGPDGRVVLRQKLRRSQMMMFFAKLPPCLIGMEACATAHHWGRELTALGHDVRLMPAHYVKAYIKRGKNDVADAEAICEAVTRPTMRFVAIKTREQQAVLVVHRTRELLVRQRTQAVNALRGLLAEFGICEPQGIWHVGRLRAHLEGETIPEPGRRTLMLLVDQLDGLERLLVQVEAEIRTWHRANSVSQRLAKIPGVGPLIASAIVATVADASAFRSGREFAAWLGLVPRQRSTGGKQRLGRITHQGDAYIRRLLIVGAQSALQRSKEIKQNAWVQGLLGRCARLKVAVALANKTARIAWALMARGGVYHQAVLPAA

SEQ ID NO: 463240 - protein, 433 aa, unidentified
MSLSLYVGIDIGKFSHVASLISPKLLFKHHRYEACPTLAFEQSRSGFEKLLSALTEHAPPSVCHVLLENTGHYGRAIEQYLQEKGVQVYRISVSTEKRGKQKSDKRDAQALAVLLYNQIERHIIVTDKSQIAHRLVPPSDTARLLHGLVQHRLELVHETTRRKNKLTAICDELFPELTQVYADPNTPSALQLREKYPTPQAVASADLEDLCNTRKHHRPSKAKLAELQDLARSTIGTKDQSRLTCLLIEQRQLMKELALLNEHIEALNIEISKAVSTSREGRILTSFPMIGPIHAAVLIAAIGTIANFESIAKLRGYCGWSPLQQQTGTSKDSMVLQQAGNRLLKHTIYLITLQAVHMDTPFKVLYDRLIPIKCHYDERTGRYRGKMKVIGRVAGQIIKLIYVLLRRDHDLIAGGGQVPDPELYDPLKHKIKR

SEQ ID NO: 463241 - protein, 310 aa, unidentified
MILHPVVIGIDVSKHHLDLFEERSGPHRLANTPEAIQAWIASLVPTTPFVVFEATGSYDAALRQALAAAGIAHARVNPQQVRAFARALGQRAKTDPLDARILAEFGRRLTPRACPAPQAARERLALWHKRRDQLVAMRQQERTRRSECQDQEMTALLDSHIALLTREIAAVEHKLKALMAADEDLNRTRERLQSVPGVGPVTATTLLALLPELGQRSSKALAALAGLAPFNHDSGQRRGTRQIRGGRKRVRDALYMAAVTAARSNTRLAAFVKALRQAGKPPKLALIALARKILVILNAIIRDNSSFQTT

SEQ ID NO: 463242 - protein, 346 aa, unidentified
MALATISVLGVDLGKNVCSVVGLDSSGAVVMRRKMRRETLAGLAEKLPACVVAMEACCGAHHLGRLFAAHGHDVRLMSPEYVRPYVKAHKNDDRDAEGIAEAATRPTMRFVELKSQDQLDMQTLHRSRDRLVGERTALINQLRAILLERGLVAAQGKRKLEQFLAVLMDEQGGAGLSPRMISLVADARAQWAELDRRIAAFDAEFVALAKENEDARRLATIPGVGALIASAFVAAVGRAESFERGRDLAAWLGLVPRQFTTGGKPKLLGISKRGDKYLRRQLIHGARAALPYVAERDTPLGRWAKALLGRAHRNVAVVAFANKLARIAWAVLRRQQRFAAQPTMAA

SEQ ID NO: 463243 - protein, 369 aa, unidentified
MTDLTLFVGLDVHKKTISVAMAEATTGAEVRFYGTIANTPDTIRGLCKKLTKDGQQLHFCYEAGPCGYGVQRQLTRLGHCCEVVAPALIPRKVGDKVKTDRRDAMMLAQTLRAGQLTAVWVPDEAHEAMRDLVRLRAQAMRDLRKARQQLLSFLLRHGLISPYGHWTKMHRRWLGELVFAHPAQHLAHEEMLQRIERAEALCDRLKGAILDLVPQWTLAPVVQAIQALRGVSLIVASVIVAEVGCFSRFDSPRQLMAYLGLNPSEHSSGATIRRGAITKTGNTLARTCLVEAAWTYRFPARVTQIIRDRLKNLPEPIRNVAWKAQVRLSARYRKLIAAGKPAPKAVVAIARELVGFIWAIARMVEPKFA

SEQ ID NO: 463244 - protein, 316 aa, unidentified
MEISPIFIGIDVSKARLDVAVRPSGESESVSNDEDGIKALVKRLGEIQPALIVLEATGGVERLVARALSSAELPVVVVNPRQVRDFAKATGQLAKTDSIDAGVLARFGEAVRPALRPFPDEVTLELRALIARRRQITEMIVAERNRLSGASKSVRKHIAAHIRWLEAELARADKDLDQSIRQSPIWRENEDLLRSVPSIGPVVSRTLLAELPELGRLNRKQIAALVGIAPLNRDSGTLRGRRAIWGGRASVRAALYMAALVASRRNAAIRAFYKRLRHAGKAPKVALVACMRKLLTILNSMIKHKTRWSEITLQTT

SEQ ID NO: 463245 - protein, 410 aa, unidentified
MDLLRREVPATSLVVAVDPGKAFNRVWLTTGERGLIGEPVTLPVLREGVDELERLIVASGVAGAPVIGLEATGALHRAWATEIERRWPGSLRLFAPSETTAARGQLGSRRFKTDDRDCAALVWLMRQGAGRPAEPDTVTAMLGAVRHRRQLVDARKVLQQRLHDQLNALCPGLSAPPGHGRKLEVDSPTGQAVLACAAAFAGRPPTKRSLLARARGRMTEQTAAFWAARWKRLLGPPADHELRAARLGRDLRRWQELQADIELADDQLAELLARTAGQILTTLPGVAVVRAAEFSAHTLPIERWPTPEHLYSATGLATATYQSSTITRRGRISRQGLAEHRDALMGIAWGLSTNSDAFRARDIELRARGFRPIQARVALARHACRLCWRLLHSQQPYDDRRYARARRRGR

SEQ ID NO: 463246 - protein, 428 aa, unidentified
MNYNTQNAKIASITEKTLIVGIDVGSAIHFARAFDWRNYEYSKKPLEFSNSESGFATFKAWVQDIAEEHGKDVVIPGMEPTGHYWFNLGAYLQDNGMKPVHVNPHHVKKSKELDDNNPNKNDRKDPKTIAALVNEGRFLYPYIPTGIYAEIRNLSNLRLQAQEEITRIKNRIARWFSIYFPEIKDVYKKPDSVSGLMVLKEAPLPQDIVKLGVDGINKIWRDAKLRAAGPKRAQTLLTAAEHSIGSQEAPDSARIELKNLLNDYEIYRKREEELMEMLEQKLSEIPYIDKLLEIKGIGLKTVSGFIAEAGDITRFDNPKQLQKLAGYAIVECSSGKHKGESHISYRGRKRLRYVLYEAAISLIARNDEFKEVHRYYRTRKENPLKKMQSVIAVACKALRIFYTILRKGVTYDGAKMLQDIKRPQILAA

SEQ ID NO: 463247 - protein, 344 aa, unidentified
MRRVSKPSVFLGIDAHSQHCTFHAIDRRGGIVMQKNIPTISRNLRAAARQLPEDTWAILEASTMAFFVKETLDDLFERIIVCETRENRWIAQSNVKSDAKDAERLARLLRMGEFKEVHVPSRPRQEIRELVGAYQKSVGDVVRAKNRLNVQFRRHGVRITESAYGEGREDALRQLKRPGLTPIFDVQYAVLDAAEQAKDVLDRTLRARLSPTREYKLLQTIPGVGPVCGAIMVAIIDQPHRFATKRHLWSYAGIGASSRSSGNGPVKTGGTQHGNRLLKYAATQATQNAIRGDNRFARHHRSMLEQGIEPAMAKKTVARDILATALAMWKAGSVYRENNQAKSA

SEQ ID NO: 463248 - protein, 398 aa, unidentified
MKEFNAEHHRVESASALAVVSNAERYAAYVGLDVHKETIAVAVAEPGRSEPVYRGEVANRPKSVEKWLSKLSGAYEGGLLAFCYEAGPCGYGLYRQISASGHDCQVVAPSRIPRTPGERVKTDRRDALKLARLLRSGDLRAVWVPDQEQEMMRDLSRARDDMKEQERKARQQLNAFVLRHGRHWARGKSRWTQAHYNWLESLRFEQPWQQVTLQEYIDAAKEASARVAQFDAHLMGALAEWSLAPVVESLIALRGVDKLTAIVLLAELGDISRFDSPKELMAFLGLVPSEHSSGGRRRQGAITRTGNGHARRVLVESAWSYRFPARQTMHLKRKAKNASASAKKIAWAAQKRLCGRYRTLIQCGKHKNVVCVAIARELVGFVWDIVRQEMPRLAPQAA

SEQ ID NO: 463249 - protein, 310 aa, unidentified
MEHTTVVGIDVSKDRLDVHVLPSEEAWAVSRDADGLAELCRRLAGMSGVVALEATGGYENIVAASLSSAGLPLVVVNPAQVRAFAKALGQRAKTDPIDARVIARFAEATKPVVRPLPDQATRMLADLLGRRRQIVEMMASESQRLRRTEMPRVRKSIERLLAALKRELADIDHDIDDTVRGSPVWREKEDLLASVPGIGPIIARTMVADLPELGTLGRKQIGALAGLVPFVRQSGQWKGQAHIGGGRPTVRTALFLGAQVAKRHNPVLKAFYERLIAAGKSKMAATIAVAHKLLIILNAILRDKKPWQAA

SEQ ID NO: 463250 - protein, 350 aa, unidentified
MSSEAKSSATGVTNPYRRTEHCGKIHPYRCDKEVGVIGIDISKEHLITSRGRVRRYENSKKGYEEILKMKPCVIVLEPTGVYAIRPSQYFKEKGIKVLQVSPNVLSGEKELRGKKTDFYDAEKLENMVNKAKEYDYNPLKEMTTLYLFLKDIETKYKNRLKRALFLVSDNDKVNKDRLERLAKGDFTREELYQLEYTPIVLEEIKILAKNLLEIQERLKEVRRMIEGQVPQDHVLLTIPGVGKLAAGIVGDVKRFPKPESFVAYCGLDPVVERSGRAVISRGISKRGNKYLRSLFYFLAVRNYSRNPTLLKFYETHKDRLKGRKLYVALARKLARVVWSVWYNNRPYEPK

SEQ ID NO: 463251 - protein, 391 aa, unidentified
MVCVGIDVAKDKHDCCILDSDGTVRADCFTIPNNMDGFKQLLQTIRDCTKKSDKIKVGLEATGHYSYNILGFLLDNGLPTYVINPLHTNLYRKSLSLRKTKTDRVDARTIATMLLSDVDLKSYTDIAYHNEDLKSLTRYRFDKVQERAKLKQSVSRLATILFPELEGLVSSIHGTSIYALLGEYPGAKQISEVHLTKLTNLLTTASKGRYGKEKAIQIREAARASIGSVMPAKSLELKHTIKLIQELASEINEIEDSIQKIIDELNPPILSIPGMGVNSAAVILAEIGDFSNFSSPDKILAYAGCSPSTYQSGKLTNCYAHMEKRGSRYLRHALYNATKYVCYWNPVFAEYLAKKRAEGKHYNVALSHAMKKLVRLIYALQKSGKAYLAAA

SEQ ID NO: 463252 - protein, 437 aa, unidentified
MSKRLQVGFDIHQKHNHVCMMTKDGQMVDPHQRFDNNWSGHQKFVDMLIGVLEEGGFEGVDIAGESSGLLWFYPFYHLTQAKELTSFDPHVYLFNPRTVKHFKKVLAERDKADPKDAYAVVERLRFGGRMPHELTFDERYLPLQRLTRYRYHLSHTLAREKTYARMVPIYLKASDYTRQPKPFSDLFGATSRHILSEYATTDELAAMPLDDLADELDRIGRRRFSDAIDNARCLKRAAAQSYPLLPCLVEPVNMILDSLLAHIRFLEGELEKLDSLIETTLVDVPGAPYLRSVKGLGLVYTAGLLAEIQNPDRFIRGYKRDKEGNLRPKTKHDAQASLARFFGLWWPRGDSGEFQAEDRRLPKTGNPYGRYYFVEGANSLRRHNAEYTAYYQRKYDQSLKHKHWRATILTARKLIRLVFALLHNEEMYRPPEERYRN

SEQ ID NO: 463253 - protein, 261 aa, unidentified
MTKIVCGVDVSKRRLDAHVEPHRAFESFVNDASGIAELAAFCRRNGVELLVMEASGGYERTAFLLLWEAGIACGLTNPRSVRRYAEAMGVLEKTDRLDARIIARFAIAKDLRPNTPPGQQRLTALVARLCQITDDLVVQKQRRGSAMNPEVAASIDEVIALLKRQARTLEDEIAALIDDDPLWACLDKALRTKGVADRAVARLLAQLPEIGIYSNKAIVKLAGLAPLADDSGAKAGKRHIRGGRAGIRHERARQTASASAG

SEQ ID NO: 463254 - protein, 370 aa, unidentified
MSVRRILAKTINTDLEYEAIGIDLAKNCVSVALLTTDGEVVCIDRLDYSELEKSAQVLCPTTFAMEPCTEMNYLVQKLEAWGHRCLVIGGKNVQNYVENHYSGQKTDLNDAQALAFLAQDTQLRTIKAKDMEQRKYASLTTLREQYIKQYRQTIVSLKGICQAWGLNISKGISGKARLKDLIENHAAFPEELKESLVDMVTHAQTAQKALNKITKTLEELAKNDKLCQLIWTIPGLGLICSCRLRATIGDIKRFKNPKDFPAYYGLVPRSIATGHNEKKGRITHRGDKTMRSLMVQGAGSVINMATRGKLKSKQLTKWILKKQKEKMPWGKLVCAVAAKLLRIVRAVLISSKPYNPQIAGVAKCSLPKGT

SEQ ID NO: 463255 - protein, 445 aa, unidentified
MKIYSVVSKPASLPVVFIVFIIGVAGLCPSQTSQQSSTPSPLPSHREPTKADILRGAYGPYRANNDLLSYHLDVRIDPEKKSIAGKNTIRFKMLQDGTRIQLDLYSNLRVGKIVLAGAPLKYEREYNAVFVDFPETLKAGETYTIDFYYSGSPQSGTRFGGMTFATDPAGLAALVARCQAQPVTLVVLEATGGYEAPVVAALAAAGVPLAIVNPRQVRDFAKAVGCLAKTDAIDAQVLALFGARVQPAPRPLPDAATQELHAVWLRRRQLLEMLVAERQRFARSHGRVRANLRSHIHWLEKSLADSDRQLRDLIEASPLWRVQDELLQSVPGVGPKLASTLLGLLPELGHLDRRQIAALVGVAPLARDSGTLRGRRHCWGGRAPVRTVLYMCALVASRCNPIFRAFYQHLLAAGKPRKLALTAVARKLLVALNAMLRDGQPWRYA

SEQ ID NO: 463256 - protein, 421 aa, unidentified
MLEESQDDGVIIDRVAALDVGKAEVVCCVRVPSGRAGHRAQEVRTWTTMTRSLSAMGDWLRGLGVTRVVMEATSDYWRPPFYLLEAAGFEVWLVNARDVKHLPGRPKTDKLDAVWLCKVAERQMLRPSFVPPEPIRRLRDLTRYRVDLVGERGREKNRVEKLLEDAGIKVSVVASDIFGISGRAMMAALIAGERDPFVLAGMARTAMRKKIPELRQAFEGRFSDHHGFLLSRMLAHVDALNADIAAIEDKIEDLIAPFVDAAARLDQIPGVGPVAARVIIAEIGLDMTRFPTAAHLASWAKFSPGVKESAGRTLGVGSTGHGNRYLARVLGEAAVGASRTDTFLGERYRRIARRRGKKKAIVAVGRSILVITWHLLNDPAADFIDLGPDHYDQRRGTQRAIRSHVRQLQALGYQVTLQPAA

SEQ ID NO: 463257 - protein, 415 aa, unidentified
MTEEQLTVKRYYIGVDWGDRLHQVYVGDHEGKKVREIKVPETVEGLAEIGRWLDEQRANSFELWAAIEKPAGRIVDFLLDHGVEVYPVNPKAVDRVRDRYRMSGSKSDGFDAYVLAEFLRTDQAHLKALRPSSENAQELKMLCRDQRRVVRLKSRLLNQLTTTLKEYYARPLEVFQDIETEVALDFLTRYPTPAHLSALKRKEFNRFATQQHSLSKQRCEQLWEKLQQPQLGVPEHVVRAKAQLVEVLIDQLRASIKAVKTYQHKVESFFVSSPAAHLAKTLPGGKSGTLVASIWAELGDAQGRWESSSHLQAEAGAVPVTKASGKSHVVHFRFACNKHLRYSMYWFSFVSLNNSEWAKLYYRSQRDKGHNHPQALRALGAKWLKIIFVMWRDHKPYDEKFHLANIALQKMRQAA

SEQ ID NO: 463258 - protein, 350 aa, unidentified
MDQVSTIGLDTAKRIFQVHGVDEAGAVVLRRQLRRSEVLKFFAKLPRCVVGMEACGGAHYWGREIAALGHEVRLMPPTRVKPYVKWGRKSDKVDAAACCEAVTRPSMRFVPLKTVEQQAALMMHRARQLLVEQRTRLGNAIRGHMSEIGIIAAKGGAGLGALVAFIGNPEDQHLPAVVRTILVPLVEQWRSAGAQIAELDRQILAWHRNNADSQRLETIPQYGPILSSAMAATIGDAARFDNGRACAAWIGLVPTQNSSGGRERSGGISKTGDRYLRQLLVIAATGMVRRARAHPEDHPWFAGLLERMPPKKAAVALANKLARIGWAVLRHQTPYRARRPTAVAPALEAA

SEQ ID NO: 463259 - protein, 359 aa, unidentified
MSTQSKPFSFKGQKIFVGLDVHLRSWSVTVLSEQAVLKKFTQDPSPVALNRFLTNTYPDAEYYSVYEAGFCGFWIHWELCNLGINNIVVNPADVPTMAGERLRKTDAVDSGKLARSLRAGELKGIYVPDSATTEIRSLIRLRDSLTKDQTRHKNRIKAHLRYLGIDIPEEFCRPGRTWTNRFVLWLKGLELETEYGKKTLDLLIAQYEDLRGQQLKMMKELRVLSRTERFDKPLQFLMSIPGIGQLAGLTILSEVDDISRFKDAAHFASFIGMVPMCYSSGEHDGTGNITVRRHAKLRWLIVEAAWITSRKDPVLSAAYVEYCRTMKPSKAIIKIARRLVNRIYFVMKHQQPYVNCYVS

SEQ ID NO: 463260 - protein, 298 aa, unidentified
MDHFAGLDVSVKETSVCIVDDTGRIAKELRVASEPDALLRVLGNPAYRFKRIGLEAGPLSQWLFGALAEAGLPVICVETRHMRAVLKAQINKTDRNDARGMAQMMRAGLYRPVHVKTLRSQKLRMLLTHRKLLQSKAIAIDNDLRGTLRNFGLKVGVVGTVKFEARIKELVESFPDLAELVEPLLIVRRTLREQIGILHRRLLAIVRNDDVCRRLMTILGVGPVVALTYRATVDVPARFRNSKAVGAVFGLTPSRYQSGEIDRPGAISRCGDEMMRAMLYEAAHIMLVRLAKWSWLKA

SEQ ID NO: 463261 - protein, 318 aa, unidentified
MAQTTESCTYVGIDVSKHQLDLAYYSTKNKTLQVQNDEKGFGKVFSFLKGKDKPFCILESTGGYEIELAYYLIDQKIQFAIVNPKRVRDFAKALGKFAKTDKIDALTLAKYGETVKPDPFKPKYEEQLVLRKRVKRRSQLIEFRTMEKGHLENQKDPLIIKSIKDMIKNLTNEIKQLENEIMQLIDACPELKEIKNILVSYKGVGSISAAIFIAELPELGQLNRKQIAALAGLAPFNNDSGMMKGKRRIKGGRAVIRKILFMIYMSAASYNKSIQDFRNRLIKNGVDKTKIKGACMRKILVTLNSMVKNNKPWVENFA

SEQ ID NO: 463262 - protein, 362 aa, unidentified
MNATTVAVDLAKNVFQLAVADTHWKVIETHRLTRGQFERWFRNREVSLVIMEACGSAHHWARWLAGLGIEVKLLPAKYVRAYVKRNKTDAADAAALLEAARASDIAPVKVKSVEQQALQGLHRTRSLWMGTRTSRINALRGFCREFGLAIPQGSRTGVEAISRALADPNTAIPGLIRGAMKLLIEEIRLLEARIAQLERELTELAKHSPACKQLLTIPGIGLLTATAMVAATSGEVSHFRNARHFASWFGLTPKEYSSGNSRRLGRISKRGDRYLRMLLTHGARAVLRATTVARQAGREIDGLKDWALKVQGRTNHNKAACALANKLARVCYAVLRNHEPYGSQTRREENKKLNRAVYAVAA

SEQ ID NO: 463263 - protein, 340 aa, unidentified
MKLYVGVDLHGNNNFVAMVDKKGKRVDQKKLPNDLSIILEFFKPIQKEMVGLVVESTYNWYWLVDGLMEAGHTVHLANPSAIQQYSGLKHADDKHDAFWLAEMLRLGILPEGYIYPKEERPIRDLLRKRGHLVKLRTSLIISLQNIISRNCGVQFRVNEVKRLKEDRVSPLLEGNEDLALAGKASKEMIDQLTRQIRKIETWILQRIELKECYRFLLTLPGVGKILALTIMLETGPIRRFAQVGDYVSYCRKVPSRWTTNEKSKGKGNQKNGNKYLAWAFSEAAEFARRHDAQARAYYNRKMRKTNFMVAHSALAHKLARAAYYIMKDQVPFMSEKLFAR

SEQ ID NO: 463264 - protein, 452 aa, unidentified
MPDSTSSTSSSSRAPTAHPEFAIVRAHAAGLDIGAEEIWAASPPGEHPQTVQQFGTFTTDLHALKAWLKERGIKTVAMESTGVYWIPIYDVLDRAGIEVFLVNARHVKSVTGRKTDLLDCQWIQKLHSCGLLHGSFRPSQKIVGVRSLFRHRAELIREAASCVQRMQKALTQMNVQLHHVVTDITGHTGLAIIEAILAGERNPATLAKLRHHRCKQNEATIAKALTGTWLDEHLFTIRQHLATWKHFQAQIANTDTAINEALGDVPDHPDANRTPPAPPKLGQGGLGFDARTACHQKFGVDLTAIEGIGANTAMTILSEIGPDFSRFPTSAAFCAWLGLAPNTRITGGKPISSRVTRTHNRANLALRQAASALRRSKSALGALARNLERRLGASRSIVAMAHRLARYIYAMVTKGSAYVVRSLEDLEERRRDQQKRQLIHLASELGYGLVPQ

SEQ ID NO: 463265 - protein, 340 aa, unidentified
MFTNFVGIDVSKSKFDLALIKGQDKDQVIQGVFDNTQKGIKSMSKFIERAHKVLLSETIFCMEFTGVYCYPLTDFFVKHECHVWIEMPVNIIRSLGLQRGKNDRIDAHRIALYAYKNRDEVKLWKPQREAILKLRDLLALRERLISAQKSLQMPINEKISMGDRKGAEMVRKGCQKSMSSLENEIGQIDKNLDDIIKEDPQLKELFQLATSVPGIGKLTTLYMICFTNEFSMYTNPKQLACYCGVAPFEHSSGSSIRGRTRVSHMANKVLKRMLHMGAMSVISRDPELREYYQRKVAQGKNKMLVINAVRNKIIHRLCAVIKRGYEYKSENIFKEQLVLS

SEQ ID NO: 463266 - protein, 344 aa, unidentified
MKIMTGIDLHGNNAVLGLMDMEGRKILHKRVPCELPKVLDVLEPYREQIDTIAVESTFNWYWLVDGLQENHYKVVLANPAKIDQYDGLKHLDDKSEAYFLAKLLCLKILPTGYIYNKKTRPVRDILRRRMSLVRHRTSLLLSFKGLYTRNTGKTLSLSKVKSIEVEEAKKLFTHSADQLIAEEQVGLIKQFDQTIGRIEEAVLKVVNGLPNYQRLQTIPGIGKILGLTITLETGEIQRFASAGDYASYCRCVKSQRLSNEKQKGRNNAKCGNKYLGWAFIEGANFARRFNPECQQFMDRKKSKTNGVVAIKAMACKLSKAAWHMMAEDIDFDLTKVFPNMKNKQ

SEQ ID NO: 463267 - protein, 340 aa, unidentified
MGEYIGLDVSLKDTAICVRRDGKRVWRGKCASDPAVIAGVLRKHAPDAQRIVFETGPLSIWFFHALTAEGLPAICIDARHAKAALDMAANKTDANDAEGLAHLAEVGFFREVRVKGYDSMLVRTLVAGRNKLVRMATELSNQIRGLMKTFGLIVPGAKGGSFEAEVRRLLSDEDGLARVILPLLEAWGAVRRRAAELGRQLLAGARRSQACQRLMAIPGIGAITATAFVTAIEDPANFRSSRSVAAWFGLTTRRYQSGEVDYDGHISRRGDAHMRGLLYEAATVLLTRSRVDSDLRAWGLKLRERLGFKRAAVAVARKLAVIMHAMLRSGQPYLAKAAMA

SEQ ID NO: 463268 - protein, 342 aa, unidentified
MKDTMIGVDLAKNVFQLHGTSLSGQVRFRKKLPRQKLVEFLSGQPPAIVVMEACGSAHYWARELIKLGHKVKLIAPQYVKPFVKRQKNDAADAEAITIAAQRPEMRFVAPKSEQQQARAVLFRGRERLIHQRTELVNALRAVMYEYGYTVPQGFSHIKRIKAILDEPGTDLPVLVVEECRDLLEQIGEKSTRINLKTEKVKQLALKTDKARRLQTMPGVGPITALAVEAFAPEMESFKRGRDFAAWLGLVPRQNSSGGKERLGRISKAGQSDIRRLLIIGAMSRLSWLGRKSIPEGSWLSRMAARKPKMLVAIALANKMARGIWAMLTKNEDYRDPALAETV

SEQ ID NO: 463269 - protein, 345 aa, unidentified
MDHFAGLDVSVKETSVCIVDDTGRIVREVKVASEPDALLQVLRNPAYHFKRIGLEAGPLSQWLFGALAEAELPVVCVETRHMQAVLKAQINKTDRNDARGIAQMMRVGLYRPVHVKTLRSQKLRMLLTHRKLLQSKAIAIENDLRATLRNFGLKVGMVGKVRFEERIKELVENLPDLAALVEPLLVVRRVLREQIVILHRRLLAVVREDEVCRRLMTTPGVGPVVALTYRATVDVPARFRKSKAVGAVFGLTCSKYQSGEIDRRGRISRCGDEMMRAMLYEAAQSMLRSKKWSWLKAWAMQIARRRGMKKAIVALARRLAVIMHRIWVDGTEFRWTREQAAAAAA

SEQ ID NO: 463270 - protein, 324 aa, unidentified
MDKIIGIDISKQTFDVCFKEKQELSQKVYGNSLTGFKRFIGLLDPDSHVVMEASGPYYVPLATYLHGHGYKVSVVNPLKIRRYAQMRFYRAKTDKKDAQAIMEYATMNPQELPVYQPESKTTQSLKQMHTALELLQKQRHQSKRQLEAFRATGYVDTHVSSSLISMVKTLENRIRKIEEQMSALCKANCSDSYQALTSIPSIGDKTAIMLIAITDSFKKFTHYKQLIAYVGLSPRVYQSGTSIKGKGHICKMGKSQIRKLLYMCSWTAKKYNKSCREMYQRLKAKGKPERVIKIAIANKLLKQAFAIGKSKENYNENYPIKVCF

SEQ ID NO: 463271 - protein, 341 aa, unidentified
MEKATIIGIDLAKRVFQVHAASKDGRPVLRKKVSRAQLLGFLAKQPPTIVAMEACATAHEWGRAISGLGHDVRLVPPIYVKPFVRRQKNDAADAEAIAEAASRPTMRFVALKTEEQQARSMIFRTRDLLVRQRTQLVNALRGHLAEHGIVAAQGLAKVKVLATAMRDTGSLHPLVRELGQRYLDHIARLDVEIAELDKRLRRPSKDDEAAKRLQSMPGMGPITAAAIEAFAPPMATFKRGRDFAAWLGLVPRQHTTGGKPRLGRTSKMGQRDIRRLLIIGAMTVVRWAVRKGAAKGSWLARMLAQKPRLVVAIALANKMARSVWAMLSKGEEYRGSALAPA

SEQ ID NO: 463272 - protein, 421 aa, unidentified
MKVVYPVCCGIDVHKRFLVATIVSVTKMQTLSYKRERFSTFNKNLQRLKHWLIENGCYDVCMESTGKYWVPVLNVLEPEMHVVIANPKWVRAVQGHKDDAKDSKWIAELFCFGLVKGSFIPSKDIRILREFTRYRAKLTNMRSSEKNRFQNGFTVCNIALDAVVSDMFGTSAQRITKYLLTDKEPTAQHCSSLLHRSLKKKAVAVIESIEGFQLTEEQKFRMLQIRQHMEYLNATIQALDEKLDQMAAPYAAAIRLFCTIPGMGRESALTILSEIGTDMTQFGSSKRLCSWAGLTPGNNQSAGKKKSVRITRAGVYIKPMLVQVAHAAVKCTSQPYYKVKYENIARRRGKKRAIIAIARMILTAIYHMFKTGEVFCPTDLRQIDMPEELKEKRRSRKIQNAIHLLKQQGILSETFVAPTCA

SEQ ID NO: 463273 - protein, 349 aa, unidentified
MKECSTVSFKDQVIFAGIDVHKNNWTVNLRHCFRELDKFSMNPSPDELAAHLKRSYPEAEYRSVYEAGFSGFEPHRRLCALGIKNIIINPADVPTSGKERAYKCDRADSKKLARELENGSLEPIYIPPPKNLELRNLIRRETQIVGNIVRVKNRIKSHFFFCGLNFSGWSGRSLKMMESEAVQRFDDALLSKFRELRYLRLEKLQIIRDEKSCLSRLNRNELQTYLQSIPGIGFRTALILQAELWEMNRFSTKDALSSYVGFAPHLVGSGENEEVRSPGDRKKKELHYVLIEAAWRAVVFDMEQRARYGALLHKGWNTQRAISVVAKKLLYTIHAVWTQQRLYRKAPTE

SEQ ID NO: 463274 - protein, 412 aa, unidentified
MDILVERCAGLDVHRDSVMATVRLPAKRRRQREQQTRGFPSTLGGLQALADWLESFGVTLVGMEATGIYWRTVFDALEPHFQCWLLNARHLRNVPGRKSDVIDSAWICQLVEHGLVRPSFVPPLEIRRLRDLTRLRKAQIEERTRAIQRLEKVLQDAGIKLTSVASQAYSVSARAILEALLAGVTEPAQLAELARGRMRAKIPQLQEALRSRFDLAHHGVLVASLLSQLDSLELSIANLDQRIAHQTEPLAELVELVCTIPGVGPRTGQVLIAECGIDMSVFPTVGHFASWAGICPGINSSAGKRFSGKTRRGSKWLRQALSESAHAAARTKGTYLASHYAQIRGRRGTHKAIGAIRHDILVAYYHIVQDRRPYRELGPDWLARRYSPEHRARRLLRQIEALGFNVSIEAAS

SEQ ID NO: 463275 - protein, 416 aa, unidentified
MKKKVRNLNNYLNDKTLLVTADIGKYISYCYARTPKGEELEPFKFHNSGLGLQMIYGIIELFRKKNNLYRIVFGIESTGNYGEPLIHYMINRGIQMVQVNPLHTKKVKEMIGNSPNKNDKKDPKVIADIIALHNGLSIVIPRGAAAELDRLVHLREILLEDKKRAYNQLESAIVPVFPEFLHTFKDLQIKTVEHLLKCYPFPESIIKLGLDDLIDLLHTVSRGRFCREKAEKLYEAALNSAGIKEGREGTLLIIKNLYDKISLLNRQLSQLEQNIRIKLSEIPYSRYIMSIEGIGPIITAAIIGEVGDLRKYNCVQQLQKLAGINLYEISSGRQIGQRHITKRGRHLLRKMLYYAALNVTRKGRILHDTYNKHLMKGMTKTQALTAISRKIIGIIYALVRDNSDYIERVDGSKVAA

SEQ ID NO: 463276 - protein, 322 aa, unidentified
MGYIGIDVSKATFVVAYSADKGGKIRTFDNTTAGIKQFIGTLPKDGSIHCVMEATGNYSAMLLYLLNVAGITVSMENPLKIKNFAKAMLSTVKTDKSDARLIALYGEKMNPQPFKMQGEAILRLRQKRTVIRQLTKQITAMSNLRGSLVCLPVPDKGATHTVDETIKFLEKRRDRLQSELTELVEVEFSRQLALLTTIKGIGITLATALIITTGGFTYFQNAKQLSRYLGICPTYEQSGTSVNIRGHINRNGDAYTRGLIYVAAWNASRFNAKCGETYTRLRQNGKPGKLAMIAVANKLVRQAFAVVAHDKEYVDGFVSNRH

SEQ ID NO: 463277 - protein, 449 aa, unidentified
MNQHQLDQKRSWITGKFIVGIDPAKDKHQAAIIDSNGSAVGKSFSFNHNAWGFHEQLWFKLKRYLGPEFMHPDQLIFAVEAAIDFWQPLVDYLHRQGYSVVIVSPLTTKNSRALPGHDFTKTDPKDARLVAESAFRGHYHHYVDHPDQIKAMKTLSLTYNKLRKDLSRNQQRLRSIVNRVFPEFLSIVPLDTDTAHFLLSNYLHPHDFLNLDVSGTVVSMLKVSNQQHGMETLSDLQQAAPTSIGVPRDTLEIISDRLTVNSWLTLITMLKQQLKIISGQLIELAKQTPWFDSLVSIKGISDVSASLFIAEVKDLNIYRHYKQIQKLAGLNLRLNDSGKTRGRYKINKIGNRRLRWIIYLMTKETAKYIPEVRIKYLKRQIKRYNYTKNLIACSSQLLQLIMALIKDNRLYEYCPENQSLVWELEYHYDKIKKDRNRKKKPPIAVPMIV

SEQ ID NO: 463278 - protein, 319 aa, unidentified
MSQATLGIDVAKRKLDVALLTTDKTYTKQFENSPSGFQALQAWLGSFSLPALHACLEATGTYGEAVALFLYEQGHVVSLINPLRIKGYAAAKLQRNKTDKADARLIAEFCATQTPPPWTPPAPEIRQLQALTRRIETLTEMRQMEKNRRDSAPAETHASLDRIITALTEEITKLQQQINQHLDQHPQLKAQHDLLLSIPGIGEKTAQLLLSELDFARYDDARQVAAAAGVTPRKQESGTSLKRTNLSKLGNGRVRKALYFPAIVALRHNQIIKEFASRLKKNGKTPMQIVCAAMRKLLHQAFGVLKHNCSFNPNLAFAG

SEQ ID NO: 463279 - protein, 346 aa, unidentified
MKITTIGVDLAKNIFQIHGVDTHEKPVVRRALKRGEMLPYFANLQPCLIGMEACGSAHYWARKLMEYGHTVKLMAPQFVKPYVKSNKNDARDAEAICEAVARPNMRFVPIKNAEQQAVLSLHRARQGFIKSRTAQGNQIRGLLSEYGLIMPQGIYNICKRVPDILEDAENGLPGYMRALINRLTEHLKELDTQVNALDKEIKLWSASSEACQKLTDVPGIGPLTASALVATIGDAKNFASGRELAAWLGLVPKQYSSGGKSVLLGISKRGDIYLRMLLIHGARAVIRFVEGKQDKTSEWTQRLLARRNKNVAAVALANKNARTVWALLTKESKFRPDYTVVQPTPA

SEQ ID NO: 463280 - protein, 314 aa, unidentified
MAKMTEHNIGVDISKSYLDVFRLENDKAQRFDNSAAGFRALTKWLGEAPVARIVFEPTGPYHKAFEGAFGKTFPLVKVNPLQARRFAQAHGTRAKTDAVDAQMLARMGAAFDLEPQAPCSKETLVLKDLHVARAVLIKDRTRLRNRAQTQDIALLKRQTKARLAQVDRQIAELDAEIAALIEAHEATARNRDILCSMPGIGAVTAAAMLTLLPEIGRLHRKQVASLTGLAPITRQSGQWQGKSFIGGGRKPLRDALYMPALVAMRFNPDLKVKYEGLRAAGKPAKVAIVAIMRKLIETANALVKADRTWTPKNA

SEQ ID NO: 463281 - protein, 406 aa, unidentified
MSIYIGIDWSQDKHDVAFMNAAGAIIARLTIPHQPDGFRKLETTRQQMAVTAADCLVGLETAHNLLLDFLWDHGYQHIYVIPPLVVKSSRGRYGHSGARDDTLDAQLLADLLRTDRARLHPWRPDSQLTRQIRARVGFLTFLTYSANRTHNRLRAALLRYYPQALELFSGLMVPTTLAFIAAYNTPQALAALSYEAFLAFAHQQGYWNRQVLLDCYARLQHTPLQASPATVAVYQDETRLLAQQLRELILAKRQVQRDLNALFAQHPDQAIFASLPGTGDFLAPALLAKLGDDRDRFPSAASLQALAGTCPVTVASGKHKRVIFRQACDHQFRQIAQQWARCSLYKSVWAVAYWQQIRPRSASDHDAYRRLANRWLAVLWKLWRSRETYDEAYHLQQRRLRSQPLA

SEQ ID NO: 463282 - protein, 456 aa, unidentified
MRRTKRRSSKIRPALPMVHANAAAIDVGARMHVAAVGADRSAEPVRSFGTFTTDLHRLADWFAECGVETVVMESTSVYWIPIFELLEARGFTVFLVNARDAKHVPGRKTDVSDAQWLQRLHSHGLLRASFRPKGEIIELRAYLRQRERLLEYAASHIQHMQKALSEMNLQLHHVVADITGTTGLRIIRAILAGERDPAVLALLRDTRCHASVETITQALTGHYRAEHLFALEQALALYDAYQEKASACDARIEAVLKQLSFRRGRGVGPLPAPRRGMRRQPNGPAFDVRAALFALLGKDLTQINGLGPYLALKLIAECGADLSAWPSAKHFTSWLCLAPSNKISGGKVLSSRTRRSGSRAAALLRLAAVTIGRTDTALGAFYRRLSARIGKIKAITATARKIAVLFYNALRHGMDYIDPGASSYETRYRARVIENLHRRAKAFGFVLHPAAPQAVS

SEQ ID NO: 463283 - protein, 310 aa, unidentified
MSTEYFVGIDVSKDTLDVCVYPTQEPFRVPNSAQGLDELIKRLKPIEPRLIVCEATGGYETLAVSSLAAAGLPVVVVNPRQIRDFAKSIGQLAKTDRIDAGVIARFASAVRPELRPVKDSPSQALSGLVTRRRQIVEMIVAETNRLQAATRRNRRDIQTHIGWLQKRLKQIDDEIKRDIKNGPLWRTTDHILQSTPGVGPATSAMLISCVPELGQLDRKKIACLIGLAPLNRDSGRYKGRRTIWGGRAQVRSMLYMSALSAIKYNPVIKQFYQRLRDAGKCFKVAIVACMRKLLIILNAMVHNQTKWRSC

SEQ ID NO: 463284 - protein, 345 aa, unidentified
MENVILVVGIDISKDDFHVCAKEKSADGNVKIKGSRTFSNDSKGFTELRSWMSNREKAGSSVRYIMEATGSYYEDLAYYLHGTGNRVSVVLPNKIKHFGKSINVKTKTDKVDSVLIAEIGIERELPEWKPMSPEYKQLRDLCREMLSLKKEKSRAMCQLHAMKYSHEKTPGIVKIKNAQIDFYEETILQIEEEIEKLVNSDVELKNRVNKIRKVKGLELNTIIIVLCETNGFQMFESIRQVVSYAGLDVVMKESGKFKGKTKISKKGNARIRQCLFMPAMSAIQHNDKIKDLYWRIRERNPDIKRKGIVAGMRKLLILIFVLWKKNEEYDLNYVWQKTDIGQRGD

SEQ ID NO: 463285 - protein, 334 aa, unidentified
MEKDHYIGVDISKKTIDVAIYVKNQAKKGTFPHETFLNTAEGFKDMKRWLRKQGVVLSKSLFCMEATGNYTYELCLFLEQIGVAYSIQSPLHLKRSFGLTHGKNDRVDASRIAYYAYLHREDIKLSKLASGNVRKLKSLIAERKSLVVEIARCKAQLKETGENAPSPGTIKRTEALQLFLENQVESIEEEMAQTIETDEQMRTNYNLLLSVDGIGIVNAINTIIATHNFEMFDNARQYASYIGVAPFEHTSGTSMRGRTHVEPGAKMLKADLTGAVRSCINHDKEIRRYYDRKIAEGKAYGVVANAIKFKLLLRMFAVIKRGTPFVRKPDFIYQ

SEQ ID NO: 463286 - protein, 419 aa, unidentified
MQVLYPRCCGLDIHKKTVVACMLLTDPDGTNRRIVRTFGTMTGDLLALGDWRSLHEVTPVAMESTGVLWRPIFHVLEEGRTLLLVNAQHIKAVPGRKTDVKDSEWLADLLRHGLLRPSFIPPPAIRVLRDLTRYRKNRVELRTQEINRVHKVLETANIKLGAVASNVVGVSGRRMLEAIKQGESDPEVLAELAKGRVREKLPALRLALDGRVQAHHQRLLGELLDHLDYLDRAIPRVEVDIAALVAKEEKAVELLLTLPATGPVTAAAIIAEIGTDMSRFPSAAHLASWAGVCPGNKRSAGKQLSGASTKGNKPRKHDPVRNRGHDCSHTGDVSACALSAHRTSTGQAARYDGGGPQPPGEQLLHVARSETRLSGDTYFSLLRGIWRCPIQLSQPGGSGALLLSFFRGLMDRIFRRNAL

SEQ ID NO: 463287 - protein, 315 aa, unidentified
MKTRQYIGVDVSKAFLDVSMDGETALRYTYDEAGLTRFLMEITRATAHACVVMEATGGLERALVIALSEAQIAYCVVPPDRVRYLAKALDWAKTDAIDAKLIARYGQSAMPVPQRMTDKHHRALVDCRARRKQLVRMMTSEKNRVQRNNALEASHQRILNALTAELKTIDIQIAELIDSNARVKRIHDTLMDVKGVGQVTATTLVAELPELGTLSGKKITALVGLAPKNRDSGTLKGKRFIQGGRAAVREALYMATVSAIRHNALIKPVYLRLIDNGKPAKVAIVAAMRKLLIYLNVLIRDNISWSELKLSNTKA

SEQ ID NO: 463288 - protein, 350 aa, unidentified
MSRYIGLDVHMASCTMVILGPSGKKLGCHVVETNASLLVDLLKGIPKPRHLCFEEGAQSAWLYETLSPHVDEIVVTVKRDRRGSKDDQRDAQELADKLRTNSIEVRVYKEVGSYGRLRELSKVHRMQVRDTVRVQNRILSLYRSRGIATEDSVYDPKQREEWLRKLPVRMQTAADSLLRQYDVVEPLRRESEKTMVAEARKAPISKLLATVPGLGPIRVANLLAIIVSPRRFRTRRQLWEYSGLGVVMRSSSDWVQGDDGKWRKGQVQQTRGLNRHHNHELKSIFKGAATTVIGQARKDCPLYQHYVAMLNNKIKPNLAKLTIARQIASITLSLWKKEARYDPAKLTKNS

SEQ ID NO: 463289 - protein, 463 aa, unidentified
MQTRPLEAVAGFASVSGSSAHLWVERRDEVPTRPAMPQGSGLQGATLAHVTTSTIDPTLTEAAATEVFAGIDWGGSFHQICLIDEDGKVLRQQRVPHNAAGFDELDRLLTCHRARLRVAIERAEGLLVEHLHLLGVEIFCVSPKISARARERYRMAAAKSDAFDAFVLADTLRHEHRHWRALTPPSPVLAELRAISRDRDRIVIAQQATENRLRAVLEAYHPAPLHLFSTLDRDITLDFITDYPTPEQAGRVGTARMDGFCRRHGYSGRTQPEVLVERLRPHLLSAGEGTAAGKAFSASLFTEQLRMLNTHLRAYDKRLDELLERHPDTPIFTSFPGVGPVVAATLISEMGDDRHRFPAPGALLAEAGLSPVTRASGRTRQVRFRYASNRRMRHMIDWWMFTAIREDDWTRQAYDHARARGQGKYRALRGLGSRWTRILWRCWTDHTRYDPAIHHRNPEPTTA

SEQ ID NO: 463290 - protein, 338 aa, unidentified
MKYSGIDLHSNNCVVVVSDDSDRILVSRRVPNSVPSVLQALEPHREEIVGVVVEATYNWYWLVDGLQAAGYAMHLANVAAIKRYEGLKRTGDEADAAYLAHLLRVGLLAEGYICPKPLRVLRDLARKRMQLVRSRTQHILAVENIQARESGSRMNVKQVMGLDEQSVEAMPQLLPEVKLALQANVAVIGELSQQIARLERCLHERVRLSQDFCLLRSVPGIGQTLASTIMLETGTVARFAKVGNFSSYCRCVDSERLSNGKKKGTGNAKNGNAYLAWAFIEAANFARRYCPEAKRFYERKKAKTNNIVATKALAHKLARACYHMLREQKPFEANRCFS

SEQ ID NO: 463291 - protein, 416 aa, unidentified
MEVMFKCCAGLDVHKRISVACALVSSAEGVQRHLKTWPTTLAGLEALAVWLTGLGVTHVAMESTGVYWKPVFNVLAPLFEVWIINASHLKQVPGRKTDVKDAEWIAQLMRLGLLKRSFIPEVAQRDLRDLTRYRTRLLGERASAANRLQKILEDANIKLASVASDVQGVSARAMLEALIQGETDAAVLADLALGRLRSKLPELEAALAGRIREHHRFMWRQLLHHLDTLNQELATLDAQIRVLTAPQATIIERLDAIPGIDRRTAEVILAEIGPDVTLFPTAQHLASWACLCPGNNITGGKRRSGKTRRGQNWLRAALVEAAWGAARTKDCYFNAQFHRLRARRGDKRAAVAVAHSILIVVYHLLAKPEAVYQELGGDYFLKRNPEQEQRRAVRKLETLGFTVTLAPGPAAAPAPS

SEQ ID NO: 463292 - protein, 344 aa, unidentified
MTITTIGLDLAKSIFQVHGVDAKGAVAARKTLRRSQVLSFFSKLPPCLVGIEACGTSHYWARAIARFGHEVRLMPANYVKPYVKRGKSDANDAEAICEAVTRPTMRFVAIKSAEQQAALSMHRTRDLLVKQRTQLVNMIRGLLAEFGLDIPRGIERALLIAKRILDGEALEIPEEAAKVVLMLSQQAFDTHSRIQGIDRDLQRWHRSSELSRRLETIPGIGPIGATALAASVTDPGQFRSGREFAAWLGLTPRQNSSGGKERLGHITKMGDRYLRKLLFVGMMSLVRRAKSKPESVDPRLIDLLARKPVRLAAIGLANKTARIIWAIMTRGGTYSASHVPTLTT

SEQ ID NO: 463293 - protein, 338 aa, unidentified
MKLKRIGVDLAKQVFQVHGVDSHEQVKCRKQLKRHQMLDFFRQLEPCVVAMEACGSAHYWARELGKLGHEVRLIAPQFVKPYVKGGKNDANDAQAICEAASRPTMRYVEVKTVEQQASQSVHRIRGRLIKARTALVNEVRGLLAEFGLIESRKGVAATRELLCRAIDDSDSSMPGTMRELLRELSEELQGYDERLKKLEQLIQREAREDERVRRLMKIEGLGPISATAIVSAVGDARQFASGRQFAAWLGLVPSQYSTGGKERLGGISKRGDKYLRTLLIHGSRSVLKHCQSKTDKRSDWLSQLMCRRNKNIATVALANKNARIIWAILSKGEQYQPC

SEQ ID NO: 463294 - protein, 370 aa, unidentified
MLDTTTFVGLDVHARSIKAVSLDVMTGEARCATFGYDAGAVAEWVRSVDPKAKCVYESGVTGFDLQKRLSGLGVDCVVGAVSKMIKPSADRRRKNDRNDAEFLARMLSVGNVVEVWVPDDECEAARDLTRALEDARDDLSRSKQRLSKFLLRHGLVFDERTPTGRRKGNWTRAHWSWIESIRFAEGADNDVLAYYVDAVRRAAEEKARLEGLVEAEARKPRWRRRVDSLRCLKGVDTATAADLVFEAGEFSRFGNARSFAAWVGLTPSEHSSGESDRRGAITKAGNKHLRKALVEAAWHYLTCSGRPKDLAKGQAPDRVARRHAAKGVRRLVERREALLARGVHNNKANVATARELACWVWAVGLMAEEA

SEQ ID NO: 463295 - protein, 355 aa, unidentified
MTHPTYLSKDYETFIGLDVDKSSFSFTINNHFQTAKSKKMPSNPEHLYNYIQKHFDRKKVICAYEAGPTGFHLHDYLTEKEVLCLITSPASIPKASNQRVKNNRIDSIKIVDHLMSGKLKPIRVPQGPYRELRDLVKIRNQYATDRKTAKQRIKAYLLYSNLHTALKDPDSNWSSKYINDLKQIECSFAEGQRLSMLIEDLEYSRKKLLLVQRTLRSFCRENDEINQYIQYLRSIPGIGFIIAVTLLGNIGNPINLQNPRELASFAGLTPKENSTGDSVNRGSISQMGDKTLRFLLVEASWVAIRKDTQLSQFYHRIRRKNNPKIASKIAITAVARKLTQIIYRVLKDKREYIQH

SEQ ID NO: 463296 - protein, 411 aa, unidentified
MELLYARCAGLDVHAKTVVACARIASGGTVTYHHRPVATTTQGPLELAEWLTAQGCTHVALESTGVYWKPVWHMLDDQVELTLANAMPVRNVPGRKSDMKDARWRADLLAMGVIRSRFVPPAPIQELRDLTRTRTQVVREIARQTQRIQKTLEDANVKLTEAISDIRGTSGRAILRALMTGETNPERLVDLTTGRLNASRAQLVEVLRGRVTAHHRFMITLHLTQIEALETAVTTIEARIGEALAPFRAAVNLLTTMPGLSETAAAVILAEIGDNVSSFPTAGHLVSWAGLCPRLDESAGKRRSTRTRQGAPWLKTTLVQAAWAATRRKNSYFHAQFMRLKSRRGPKKAILAVAASMLTDVYYMLHDGVEFHDLGAQYFVQRDHDKERLTTRLLRRLRELGVDIEVKEKAA

SEQ ID NO: 463297 - protein, 316 aa, unidentified
MTRIICGVDVSSLSLEARIGREGAFASFPNTVEGIAALAIFCQHHQVQLVAMEATGGYEQSAMAQLSAQNWGVAILNPRAVRKFAEGMGLLEKTDKIDAGVIAWYAEIKNSSPMVLSSPTQQHLRALVTRLRQLTELRTAQRNQRRLITDSAVQACFDELLALVQRQIGDLEQAIASLLAEDPLWRELDQAFRTIKGVADRTVARLMAEMPEIGVLSNKTISKLAGVAPLARDSGKHQGKRVVRGGRAAVREILFVVASVVGRHEPDFIAFQQRLRAAGKPPKVIRIALAHKLLVRLNAKAREVRSCWPSSFPQPS

SEQ ID NO: 463298 - protein, 364 aa, unidentified
MRRQTADAMMRWCYSLPMKTNITKTSPTPSVVPTSSAAVSSGFTLGLDLGDRQHHVCVLAAAGNIVREASLPNTRPALAQLLADFPRATVALEAGTHSPWISRYLTEQGATVLVANPRKLHAISRNERKCNRRDAQMLARLARVDAALLHPIQHGSAQAQHDLLGLKLRDALVRNRVSLINAIRFTLKSLGHPVRNPSSESFHKTVLQDIPADCRPVVQPLLTVLAHVTEQIKAMERDLVRRSKKDYPATQRLQQIAGVGPLTALCFVLKVGDPQRFSRGRDVGAYLGLCPRRNQSGGTDKGWLRAVNKLSKLAKSTHGRQAAKKFEIRWPEILPLTEIAQAKNEKIISFRKNQMARGFGLESE

SEQ ID NO: 463299 - protein, 400 aa, unidentified
MRAVFGIDVSKASSEVAILVNGEKVHGYTMSNDAIGFARLLGDLRTVHKPEIIFEATGVYSRRLQAFLDEHGYAYTRLNPLEAKKQLDSLRVRKTDQIDAEKLAQSQFVLNRKPTYVQEEVYQNLRALSRFYQNLTEDIVRAKNRLHKVLQVTFPELENILSTPSGEQYWNLVTAFPCKDFVLDLSKDELSESIRQSTSKRISDKRVAYLAEKLIALANQSYCAVKKTSPILEEVRYYGKELLRLSEQRQTVLDQMVELAQPLPEYDILLSIPGIAETTATSIIGELGDIRRFQSANQINAFIGIDLRHYESGNFLAKEHITKRGNPYARKILFKCIHNIASASHTNPCHIADFYEKRKRQSQTTSTKPHTIASIHRLIRTMYYLITHNKLYDYRSTQNQ

SEQ ID NO: 463300 - protein, 346 aa, unidentified
MEQVVRIGMDTSKHVFQLHGVNSADESVLRRKLRRKEMIAFFEKLPPAVIGIEACSGSHHWARQLRSFGHEAKLIPPQYVKPYVKRGKNDAADAEALCEAMSRPTMRFVPVKTTESQAALMLIGLRDRLVRNRVQLTNAIRGYAAEFGLIAAKGICKVELLLERIAADETLPALARELFGLHGREYGQLQEQLKEIDAKLIAWHRANECSQRLAQIPGVGPIGASMLVMKTPAAEGFRSARHFAAWLGLTPKDHSTAGKVRLGVITRAGDEALRSVLVVGATAVIQHLERGRRCVSPWLVELLKRKPPKLAAVALANKIARIAWKMMMTGEKYRDTAMPIGVACGA

SEQ ID NO: 463301 - protein, 320 aa, unidentified
MRNAVGLDISKLTFDASAMVGNAEYSAKFDNDSKGLNQFSDRLKSLGCQNLHICMEATGNYYEEVADYFAQYYSVYVVNPLKISKYAESRFKRTKTDKQDAKLIAQYCRSAQESELVKRQKPTDEQYRLSRMTAAYAQIKSECAAMKNRYHAAKDEEAAKAYAEIIKAMNEQLEVLKEKIKEQTEKPNCKEGVKRLETIPAIGRMTAAVLFHHLTSSKFETSNKFAAFAGLSPQQKESGTSVRGKGKLTKFGNRKLRAVLFMPAMVAYRIRAFPGFIARLEEKKKPKKVIIAALMRKLAVIAYHVHKKGGDYDPSRYKSA

SEQ ID NO: 463302 - protein, 429 aa, unidentified
MKIIYPRVCGIDVHKKFIVAVICISESVEPIYLKKRFSTFHNDLIRFRDWLIQNDCQNVCMESTGKYYIPVYNVLESHISNIVVANPKWVCAVKGEKDDDKDAKWIADLFKFGIVRSSFIPQKDFRILRELTRYKYKLVNMRSSEKNRYQNALTSGNCKLDMVFTDVFGKSASNIIDLILSDNPYTDEDILSKVHKNCKASPDMILNSINGTDLTPVQKSRIELVNDHIKQLSSNIQRLDKLIDLMIEPYEDYISFLCQIPGVSRNSAIIILSEIGVDMNQFTSTRRLTSWAGLTPSSNQSAGKKKSVRISRAGVYLKPCLVEVAHAAVKDKNHPYYANKFNKISKRRGKKRAYIAIARKILVAAYHMLLTGEIWNPADLSEVETPVEQRIKYVKNNLKSDIKQLLDIGLTVEELTLMIQQNANIIATQ

SEQ ID NO: 463303 - protein, 369 aa, unidentified
MKNGSTLRVGLDGHKESIAVAYAGEAGTEAVYVGEIGTRQCDIDAVIRKLQSKGTELMFVYEAGPCGYWRYRYLTGKGLTCFVVAPSLIPRKAGDRVKTDRRDAVMLARLARAGDLTPVYVPAVGDEALRDLARAREDALHDLNAARFRLKAFLLRNDIRYSGRANWSAEHVHWLARLVLPTPAQQIVFQEYVRTVSERTELLRRLERALLEQAKTWRLAPVVEALQALRGVQFTVAITTVAELGDLTRFDSPRQPTNYLGLTPSEYSSGERRRQGGITKMDNGHARRVLVEAAKAYRHRAKVSEQIQARQQQLPKEICDIAWRAQVRLCGRYKKLALRGKHANTIAAAIARELAGFMWAIAKAQATAA

SEQ ID NO: 463304 - protein, 403 aa, unidentified
MNAVGIDVSKGYSTVMVMRPFGEIVASPFEVKHIDSELSKLAKMLKELDGETKVVMECTGAYHLPIAYALNEAELFVCAVNPIITHNYDNNSIRKSRNDKSDAIKIANYALTNWLKLQQYIPEEDVRHMLKAYSRQYNKYKKINTMLKNNLISLLDSTFPGANELFSSPPRKHDGHEKWVDFVAHFWHCKCICSLSQKVFIERYRKWCKRAGYNFSEAKAEDVYIESLGHFCVIPMNETTKLLVTQAASQINAISETIETISCEMKSLAAALPEYSVVMGFHGVGDILGPQLIAEIGDIYRYFQKSSLVRFAGLEPVENQSGKFRGKESISKQGSPHLRKTLFQVMDCLIKQKPADDPIFQFLDRKRAEGKHYYSYMTAGSAKFLRVYYARVKEYLESNYTED

SEQ ID NO: 463305 - protein, 410 aa, unidentified
MPEPTYALYVGVDWGNQTHQVAVLDTARGLRGERGGAHDGPGLHALASWLAELAAPGTVAVAIEVPHGAVVDTLRERGFAVYALNPRPMDRFRDRDTVAGAKDDRRDAQVLAAALLTDRPAFRRLHVDDPQVVQLRELTRIEAELSEELRRLANRLREQLLRFYPQALELCPAADEPWFWALLTQLPTPPAAARRRRGPVAALLREYRIRRRTADEVLTVLRRTPLTVAPGTLEAATEHIALGLPRLELIATPRRACAPRVETMLAVLAAAGQQQGHRDVTILRSFPGVGRVVAATMLAEASQLLAARAYHRLRASGGAAPVTRQSGKQRGVPMRYAWNPRLRNALYYWAFIAARHDPATRQHYEGLRARGHSQGRALRGVADRLLAVLIVMLKTQTLYDPSRREAKFAA

SEQ ID NO: 463306 - protein, 339 aa, unidentified
MKYTTIGVDIAKNVFQLHWVDTGTGEIVNKQLKRAAFLEHFANREPCLIGMEACGGSQHWARRLIEMGHQVKLMPAKFVKAFNIGNKNDPADARAIWMATQMPSKPVAVKTEAQQAVLALHRLRQQKIKFRTMQMNCLRGLLTEYGEVMAKSRAALDRAIPGVLAKLAERLPAMLIDSLRELWSDLDRLDKQIADIERRLQMWMKEDRACKAIAAIPGVGLLTATATVATMGDAKAFRSGREFAAWLGLVPKQIGTGGKIQLLGISRRGDTYVRTLLIHGARSVLFHAKHAGGWVEQIRARRPSNVVAVALANKMARMIWAVLAHDTPYSSDHVSLRGV

SEQ ID NO: 463307 - protein, 348 aa, unidentified
MVADSLDVVIGVDTHRDAHALALAAAPSGALLLEAVVEASTVGYRDALALAQAHAPGRRAWAIEGSGCYGAGLACFLLARGERVLEVDRPRREQRPGRGKSDALDALRAARSLLASEPLASPRRAGRREALRALLATRESAVGARRCALNQLRALIVTCPEPLRAELRPLTRARLLGRLRGTRPRRHADSQLRGSLLAMRLLAVRIEALTLEERTLKREIRALVRELAPRLLAEPGVGPIAAAHVLLAWSHKGRLRSEAAFARLAGAPPIPASSGKVVRHRLDRGGDRKLNRALHAIILTRRRTDPETIAYIQRRVSEGKSDREAVRCLKRYLARSLFRQLEAMPQAA

SEQ ID NO: 463308 - protein, 405 aa, unidentified
MTVLVGVDWGDGSHAVCVINSGGEVLDRFAVNHDRQGLGDLVRRLRKRQGEIRIAIERPSGLLVDTLVDAGFTVVPIHPNVVKACRPRYRAVSAKSDPGDAYILADILRTDGHRLRSLEPQSDAIKALRGLVRGRDDLVATRVAMANQLTAVLQSFWPAAATLFNDLTCRIALAFIERYPSPEAAARLGPKRLAGFLARHPYYGHKKPQALLAHLHTAPPGCAGKAESKAKAELVCALARTLQTLVAQIATIGSRIEHMIAELPDGRIIMSFPRAGRICAAQILAELGDVRQRFQTEQQFAGEAGLAPVTYQSGKSRVVAWRWACNKRLRVAFTCFAGNSRRQSPWAADIYKRARARGCDHPHATRILARAWARVLWRAWTDRQLYDPTKHAGAAAFLSSPQPSG

SEQ ID NO: 463309 - protein, 338 aa, unidentified
MELKRIAIDTSKWVFTLHGVDAEERPVLRRDLRRGQLVAFFTKLAPTEVVLEACGGSHHWARTLSRLGHRVGLIPPQYVKPFVKRGKTDRNDAEAISEAASRPAMRRVAIKSAAQQADAVTLSARELLVAQRTQTINALRGHAGEFGVVVAGGANRVAELLAAVAQEADMPPTARRLLAFLGQQVAHFDREIAKLDTALMRQHKANPVSQLLAEIPGIGPIGALTLAVRIEPAQFQSGRHLAAWIGLTPREHSSGGKRRMGGISRAGDERLRQLLVLGATAIIRYAKPGRSSAWLLSLLERRPRKLAAVALANKMARIALAMMTTGEAYRRTPFAATA

SEQ ID NO: 463310 - protein, 334 aa, unidentified
MDHQGRVLTKSKVSNQREAFLKFLSSYPPSDSQVVMEATWNWYWLWDLLEERGYQLQMAHPLKTKAIASARIKTDRIDSEILAHLSRSNLVPQAYVVDRETRVSRELIRYRASPVRLRATIRNKLHALLAKNGLRYPSADILGKKTLSWLLSLDVVLVYREALEGYLRVSKSLGTEIDQVSESVRISAKQNWMATRLLCLRGIGKWRAFPIVSEIGEIERFPSAKHLCSYAGLVPSVHVSGNTSYTGHITKQGSKWLRWALVEGAHHAIRKPPYRDFYQKTAKRRGKAIATVAVARKILKAIYHLLRKEQKSLPRDEKKGRISLGQARCGVMVQ

SEQ ID NO: 463311 - protein, 372 aa, unidentified
MNYNTVYVGMDVHKESFSLCAYTIEAEKASHYQRTEADYKKVLNYLEFLRTIYGDDANFICGYEAGCFGYTLYHQLTANNVKCIILAPTTMLEQRSKKRIKTDRRDAEIIAKCLAQHNYSPVHIPTAKDEETKEFLRMRDDHKLALKKVKQQILAFCLRHNYHYDGKSHWTAAHLKWLKALTPEALYKEILDEYLLTYQTLSDKIERLDKRIEELATQDEYKEAVKKLCCFIGVKTHTALSVLVEVGDFKRFASAQHFASYLGLVPGEDSSGDDQNRLGITKAGNRHVRLLLTEASQCYARGQVGFKSKELKSRQSGNTPAVIAYADKANERLRRRYYKMVLNKYKKHNVAKTAIARELACFMWGMMTDNIV

SEQ ID NO: 463312 - protein, 356 aa, unidentified
MEPIKTDCVGCDAHRRYSVFVVMDERGHTGKETRVEHSRELYRHFLSTLPPGSPIALESIGNWYWMIEEMERAGHQPLLAHAKKAKLMMGLTNKTDKLDARGLALLLRNGTLPSVWIPPGELRDQRELPRMRMVFARIRTMLKNRIQSTLAKYGIQIDQVSDLFGVTGRGLLQNRLNELPPETQRSIQEHLKLLDGVLEQIEGTEKRIKELIKETPQMQLLMSLPGVGPILAIVIILEIGDIERFPGAPQLASYAGTVPQVRSSGGKTYYGKVRPDVNRYLKWAFIEAANSIVLNQSRMPNRHVVQLYHRIMKRKGHPKAIVAVARHLAEATYWMLTKNEAYREPTSSRWISPTQK

SEQ ID NO: 463313 - protein, 422 aa, unidentified
MLEETNDTEEIIGRVAALDIGKAELVCCVRVPSPDRPGKRLQEVRTYATMTRSLLQLADRLGELGVTRVVMEATSDYWKAPFYLLEAQGLEVWLVNARDVKHLPGRPKTDRLDAVWLAKVAERQMLRPSFVPPPAIRRLRDLTRYRADLVAVRTAEKQRVEKLLEDAQIKLSVVASDVFGVSGRAMLAALIAGERDPKALAQLARTRLRAKRSQLEEAFCGHFSDHHGFLLARMLGRIDQASADIAELEAHIDQELAPFAQAVDRLDEITGVGRTAAGVIIAEIGLDMGRFPTPGHLASWAKFAPAVKQSAGKTKGKATTGHGNPYLARVLGEAAVAAGRTDTFLGERYRRLAKRRGTKKAIVAVGRSILVIVWHLLADPTARFHDLGAGFYDTRINPERIKRNHIRQLEALGYKVTLEPAA

SEQ ID NO: 463314 - protein, 350 aa, unidentified
MKTILAIDLGKRNSVFCKLDTSSLKPEYSTVKTAPEKFHDIFADLDLESSIVLFEVGSQAGWLSDMMRAMRLEFKVANVNHPAWKWTNNTNKSDKADAHRLAMMYHHGFFPEVYIPVKSVRQKRSLIYYRQKIVNRMTQVKNGIRALMTTVAIDLPIGKNCWTKKYRKQLQEQALPFDSIDDPCELWRGQLHTELQQFDALQISLDKTTAKLDELNKQKQSVALLETIPGIGPRTAEAIVAVIDDPHRFKSCRQVSNYAGFTPRRYQSGQMERSGRISKRGNPLLRALLTQASWAALRFGWAQDIYKRVCRGSAKRRKIAIIAVARHLLMRCWAMMRDNKPWQYEIDKAA

SEQ ID NO: 463315 - protein, 353 aa, unidentified
MKITTLGIDLAKTVFHLVGLDEKGHDVMKKKVSLKDLAATLQNIPPCRIAMEACGSASFWGRKFEAMGHTVILLPPQYVKPFVRTNKNDWNDAHAIAEASLRPSIPTVPIKTEEAQDLQSLHRGRQLLIEFRTATINHIRGILAEYGIVLKVSAQKVEQELAQLLNDAEDTRISPFLKETLRTMTTELAGLYDKVKEYDRKIEAFAKENPLCQRLMTVPGVGILTATVLLAMVGDPFRFKNGRHFAAYIGLVPRQHSSGGKNVLLGISKRGDTYLRTLLIHGGRAVVRSVQNLASSGQELRGRNAWIADIALRRGYKRAAVAVANKNARVIWVLLTKNDAVYDPTALRAKKAA

SEQ ID NO: 463316 - protein, 360 aa, unidentified
MGVDLAKNLFSVCAVDGAGHVQRRQDLGREAFALWLAQVPAGTVVAMEACSGAHHWARRCLEVGLQPRLMAAQFVTPFRKSRTLKNDRNDAEAIATAARQGNMRFVPVKSVEQQARLAWHRVREGYKTEGLEISNRLRGLLAEFGIVMAQGDRALRIALADLDAAASLPAELKELLRDLSAHWAQVRDRIAACDARIEAHAKADERCVRLRALIGIGPLTADAMVASVGSAKEFKNGRQLAAWLGLVPTQHSSGGHTRLGTISCRGDAYLRTLLIQGARSSLQRAKVTAQDRATPEQIWIRQLACRMPFGKLLVAIANKHARQLWAMLAREEAYDAEAWLKHPMVQRPAGKRAVRIAGMA

SEQ ID NO: 463317 - protein, 360 aa, unidentified
MVYLGVDLHRKHSVVTALAEDGRVVLSRRIASRPQDFQRVFGELEPGSLSVVFEATYGWCWFADLLADGGIEAHMAHPLATKAIAAGRVKNDSVDARTLAHLLRTNLLPEAWIAPPLVRERRRLARTRTSLVRIRSRLRCQVHAILADHCVQPPIGSIFGPVGQRFLASVELPAVDRGRVDAALRLMDAITAEVIGVDKELRAAFSGDERIRRLMAIPGIGFLSAAVVLAEVGELSRFSSPDQLASWAGLTPTERSSDEHTRRGHISKQGSRWVRWVMVEAATRPFRDPALRRFEERIARRRGKKVARVALARRLLTLSFYALRDQGGCRAFPVRARASRQIRSGALAGSHDLPQGTVAD

SEQ ID NO: 463318 - protein, 415 aa, unidentified
MVISVGIDVSKDKHDCFIVSSEGEVLADVFTIPNNMDGFHRLLQRIQDCTNSQDKIKVGLEATGHYSYNLLGFLLDNGLTTYVLNPLRTNLYRKSLSLRKTKTDRVDARTIASMLLSDAGLKPYTNIAYHNEELKSLTRYRFDKVKERAKLKSSISRLVCILFPELEKLVPTLHMTSVYSLLEELPGAKQVAAAHLTRLKTLLETASKGHYKRDMALEIRDAARNSIGSRMPAKSLELQHTIRLTRELDREIDEIEEQIQSIMGELHSPITTIPGLGFRMAAMILAEVGDFTRFDSPDKLLAYAGMSPSTYQSGQQAYSSSLVYGVTKSAIHFLTKSLVKELEPKQIRVNAIAPGFIETSWHKNRTPESYERINRKIALHRFGEISEVADMAYEILKNGYMNGSIVDIHGGYDYF

SEQ ID NO: 463319 - protein, 402 aa, unidentified
MNAVGIDVSKGKSMVAIMRPFGEIVSTPFEIKHTASDIHSLVELINSVEGESRIVMEHTGRYYEVLAHQLSEANLFVSAINPKLIKDFDNDSLRKVKSDKADAVKIARYALDKWQNLKQYNVMDELRNQLKTMNRQFGFYMKHKTAMKNNLIGILDQTYPGVNTYFDSPARSDGSQKWVDFASTYWHVDCIRKMSLNAFIDHYQNWCKRKKYNFSQSKAEEIYGKAKELVPVLPKDAITKLIIKQAVDQLNSASTTVESLRTLMNETASKLPEYPVVMAMKGVGTSLGPQLMAEIGDVSRFTHKSAITAFAGVDPGVNESGTYEQKSVPTSKRGSADLRKTLFQVMDVLIKTHPQDDPVYQFLDKKRAQGKPYYVYMTAGANKFLRIYYGRVKEYLSSLPES

SEQ ID NO: 463320 - protein, 394 aa, unidentified
MKLIGIDIGKNKHFFCVMDQQTGEIISQPVSFSNDKEGFDFLVQKIKSYPKDSILIGMEDTGHYHFALLKYLLDLQYTVALINPKTTDFNRKMQGGITKNDKHDTINICDVLDTPERKKQYRITKVNSFDLYEQKQLTRHHHNLKEEENVYKNRLQKCIDIVFPEFNKLFNSKYGIVYMNILKMFGSAENIANTDIRTIRKCFEIDGRDNRISLTPERLKECARSSIGISSSAEVIQIKHLTAQIELIEEQLTEIDKKIEEFSIQNNSPILSIPGISHFSVTSILAELGDISNYSKPSQIIKFAGVAPLHYESSQFNAQHTAITKKGSKYLRKTLYQIILPVIRHNPVFNKYYQLKISQGKGHRCAQGHCVRKLLRIIYHLLKTNQQFDPQLLR

SEQ ID NO: 463321 - protein, 376 aa, unidentified
MTTLETEYSTNSALYLALDLSEAKWKLGFTCALRQKPWIRTIDAGDVLQLGVEIRRAKKRFELAEDSRVLSCYEAGRDGFWLHRYLVAAGVENVVVDAASIEINRRAKRTKTDRLDAGKLVRMLVRYASGEQKVWSVVHVPSLEAEDQRQIHREIATLKVDHTRHINRIHGLLAGQGIHVPIQADFVARLAELRLWDGAPLPAGLRARLEQEYACLQFVDEQIAAQEAQRRELLRTSTESYVEQVRQLMRLKGIGEQSAWRYVTEFFAWRAFRNRREVGALAGLAPTPYRSGDEQHELGISKAGNRLVRAMAIEIAWAWLQFQPESELSQWYRRRFGEGSKRIHKMGIVALARKLLIALWRYLEQGQLPAGAQLKA

SEQ ID NO: 463322 - protein, 347 aa, unidentified
MRFYNRQHRHYCGIDLHVKTMYVCILDATGQVLVHRNVKATPEAFLETVAPYRDDLVVAAECMFTWYWLADLCAAEGIVFVLGHALAMKAIHGGKAKNDKIDSRKIAGLLRGGLLPQAYVYPSAMRSTRDLLRRRLHLVRKRGQLLAHIQNTRAQYNLPAFERRLAYPANRDGVSAHFADPSVRKSIDVDLALIDQYDTLIVDLELTIVREAKRHDADAFHRLRSVPGIGKILALTILYEVHDITRFDRVQEFASYARLVKCVKQSGGKKLGTGGAKMGNVHLKWAFSEAAVLFLRHTANGKKILAGIEKKHGKGKALSILAHKTGRAVFYMLSRGTVFSMEKFLAA

SEQ ID NO: 463323 - protein, 306 aa, unidentified
MTTRQRSTSSSSDPPVPGEVVLGVDTHGETHAAAVVSPLGKFLGTESFPATAVGYRRLLVWACKLGTVRRAGVEGTGTFGAGLSLYLLAQHVEVYEVNRPDRTARRLLGKSDPLDAQAAARAVLSGRARARAKTGDGPVHSARMFKLAKDSAVKARIQAINQLKAVLVIADPALRERLSGLGNRELFRTCARLSPREGGAGGGDEDTVAEATLMTLSMLAQRIEQLTGQVDQLNQQLTGLVERHAPQLLAPVGIGPDSAVTLLITMGDNPERLSTEASFAALCGVSPIEYSSGGRSSRRLNHGGDR

SEQ ID NO: 463324 - protein, 373 aa, unidentified
MHYTTVYVGMDVHKETFSLCCYTNEKEQAEYPQRVEGHYSKVLNYIEAMRFHYGEDALFICGYEAGCLGFTLYHQLTDHNVKCVILAPTTMLQQRGRKKVKTDKRDAALIARCLAHHDYSPVHIPTDQDEQTKEYLRMRDDHKLALKKVKQQILAFCLRHNYRYDATNNHWTQAHLKWLRALKPEGLYEEVLKEYLLTYDTLTDKLERLDKRIEELAGGEEYHENVKKLSCFLGVKTVTALSVLTEVGDFNRFASAQHFASYIGLTPGEDSSGEDQTQLGITKAGNRHVRCLLVEAAQSYTRGQIGFKSKALKARQEGNPPEVIAYADKANERLRRRYYRMVLKNNKKTNVAKTAIARELACFMWGMITGNVA

SEQ ID NO: 463325 - protein, 348 aa, unidentified
MLIIGCDFHAGFQVLAIFDNRTGVTTEKRLEHPQGAMEFYRSLREQGERVRVGIEAGAPCQWFRRLLAECGHELWVGDAARIRAAAVGKKKTDREDAKLILQLMREERFPRIWVPTEEERDVRQLLLDRHHRVRARTAAKNQLQALAMNQGVQKGRGLWTEAGRELLAGLTMAEHTARRRDYLLQRVAELDQEIAEMDVRVWAEVQRRPAALRLKTHPGVGPQTALATVLTLGEVSRFRSARAVSAYLGLVPTEHSSGGKRRLGHISKQGSSLMRFLLVEAGQSAVKRDEELKRAYKRLWVRKGNRAVAKVMVARRLAVRLYWMLRKEWTYAELVGHAGKPGSSCGKR

SEQ ID NO: 463326 - protein, 342 aa, unidentified
MRGYHYVGLDVHKKSISYCVKKGDGTVVSEGKIGARRQDLDEWLKGLPKRWIGGMEATMFTGWVYDYLEPHAVELKVGHPLKMKAITAAKHKSDALDAGTISDLLRCNLFPECWMAPQEIRDLRRVLRYRNLLVREAVRMRNREAGILMECGLEYDKKRLHGKKYFRDLMESLDDDTPRTVKELLVLTRSNYEIFDSGQKRLVKELEQNEALRERIERLMSIPGVGVVTALTWALEIGDPNRFPTVKDAQSYCGLCAGRDESAGKSKRGPLSKQRNAHLQTMLVEAAKLAPRHNPQLAAAHQKEMERSSNPNRATLAVARKLVAYLLYVDKSGEKFELRDSA

SEQ ID NO: 463327 - protein, 340 aa, unidentified
MKKLYGAFDLHSSNNYLGISDEKDQRVYKKRLPNQPDVILAELEPYRNELVGIVVESTFNWYWLIDLLMEEGYRMHLANPAGIQKYKGLKHSDDQDDAFWLAHLLRLGILPEGYIYPKEERPVRDLLRKRGHLVKLRTSLINSLQGIIHRNCGVKLNATKIKALKVNNVAPLLSGQEDLALSGMVSKEAIDYLGQQIRKVENIVLGKIKLKKEYLSLLTIPGIGKILALTIMLEAGPMARFQKVGNLASYCRKVPTKWISNNKKKGKGNQKNGNRYLAWAFSEAAEFARRYDDHARAFYNRKASKKNFMVAHSALAHKLSRAAYCVIRDQVAFDPQKLFA

SEQ ID NO: 463328 - protein, 401 aa, unidentified
MADSLEKVWAGIDIGKTHHWVCVIDSGGKVLLSAKVVNREADLSVIIAAVKDLAARVVWAVDIIGAPSALILALLTQAQQPIRYASGRVVSTMSTAFAGEGKTDAKDAYVIAETVRIRRDLTAVDQTTEVVRNLGILTARRADLIADRVRMINRLRDLMNSVFPTLETEFDYSSCKGALVLLTGYSSPQQLRRTGEKRLSAWLHRRHVRGYAAVAAKAIAAAAAQQITLPGQDIAAEVIAEIAADILALDQRVKALDTQIADMFASHEQGPIIESMPGFGPILGATLLVAAGDLRAFPTAGHLAAAAGLVPVPNDSGRRSGNLHKPRRYSRRLRHVFYLSAQTAMMREGANRDYYLKKRARGRTHVQAVISLARRRIDVLWALLRDGRTYSITPPNVTRAA

SEQ ID NO: 463329 - protein, 343 aa, unidentified
MQRDLGMVVGVDTHKDSHSAALVDAMGALVAATDVGANRKGYRRLLEWARCRGPQRTWVVEGTGSYGAGLASFLAAAEEVVFEGDRPQRRKPGAAGKSDQLDAVKVAREALAREHHAVPRQRGNREAIRALLSTREGAVSAHRQALNQLYALVVSAPDPIRERLIRLRGEHLVTACLRLRSAAGDIETRVTNRVLRQVARRIRTLQAEAADHLALLEQLVAETAPSLLAQPGVGAITAAQLLVSWSHAGRIRNENAFAAMAGVAPVPASSGKVVRHRLNRQGDRRLNRALHVVAICRSSFHAPTKLYIARRTAEGKSTREIRRCLKRYLARRFFRLLQRLDNL

SEQ ID NO: 463330 - protein, 320 aa, unidentified
MTYIGIDVSKDSFVAAYPKKSGYTTKTFLNTTSGVRQFISSLPEDCHCVMEATGNYSMLLLYLLQQANIIVSMENPQKIKHFARAMLSTTKTDEIDAKLIALYGEKMEPAPYKIPSESIILLKQKRTVLRQLKKQLTAMINLQHALSVLPKQDPTAKVATEQTIKFLRKQISKLEDEITNLSNKEFKRQMELLTSIKGIGENIASALIMATGGFTYFSSAKQISRFLGLCPTYQQSGTSVNVKGHINRNGDTHLRSLMYVVAFASIRCNTACREMYERLRSRGKSGRVAIIAVANKLIRQAFAVVTNNRPYIDGYVSSLA

SEQ ID NO: 463331 - protein, 403 aa, unidentified
MNNVAGIDVSKGKSMVSVLRPFGEVVAKPFSVGHTGSELKELADYLKSLDGETRVVMEHTGRYYEPVARFLHEEGVFVSAVNPKLIKDYGNNTLRKVKTDKADARKIARYGLDNWTELRQHTPMDTIRMQLKTLNRQQGLYSKTKTMMKNNLIALLDQTYPGVNSLFDSPVREDGSQKWVDFAMAFWHVDCVRNMSLVAFTERYQKWCKRHGYNFSQSRVVEIHARAQDLIAMLPKDALTKTVVRQAIDALNAVSASLERLKAEMRTLAAQLPEYPVVMAMRGVGDSLGPQLMAEIGDVTRFTHRNSITAFAGVDPGADQSGTHEAKSTRASKSGPPELRKALFLVMDCLLKTMPQDDPVYCFIDKKRAEGKPYLVYMTAGANKFLRIYYASVKAYLDSLEHD

SEQ ID NO: 463332 - protein, 484 aa, unidentified
MAKVKLSAFDRLRLGARLNRKERRAVEQRLSAADPELEIVNRDAAGIDVGNESHYVAVPRGRDAQPVREFGSWTAALVEMAQWLVRCGIRTVGMQATGVYWIAVHDVLQKHGLEVNLVDARGTKNVPGRKSDVQECQWLMRLHTYGLLRACFLPAPEIHGVRTVWRLRDQHVKDSGRCIQHMQKSLIAMNVQLHNALSDIGGTSGQAIIRALLAGQRDPKTLAALRDRRCMASEEEIVHSLQGVWKPDVLFELQQAVDAYDFYRQQMAKCDEQLKQYMALLPARSVETIVSSIEPSPTDMNKKSRSRKPRKPQGNEPTFDLEAELERILSVNATTIDGINVMTVQTVLAEVGPDLSAWKTEAHWSSWLNLAPKRDVSGGRVIRHVREHRTNRVGNAFRMAAQALIRSHSYLGARCRYLRAKLGGHKAIKAMARVLACLYYRLVMKGQRWVDQGIEEFNRRSEQRELALLQRKAQKHGMQLVPAA

SEQ ID NO: 463333 - protein, 338 aa, unidentified
MKVTTVGLDLAKLIFTVHGVDEHGKVMLRKTVRRAKLLEVFAQMPPCVVGMEACSGAQHWARELRKLSHEPRIMAAEFVEPYRQGGKNDANDAAAICEAVSRRQMRFVAVKSVEQQAVLAVHRMRQGLVEERTALVNRMRGLLAEYGIVVGMGLDRLRRALPEILEDGANAIPGLAKEVFADAEQHLRRLDERVATYDRRIAALAKSSEPAQRLMKVEGIGPVTATALLASVGDAKVFHNGRQFAAWLGLTPRQHSTGGKQRLGAMTKHGDVYLRTLLVHGARAVLRMSSLRSDTKSRWVENLRRRRPDNVAAVALAAKTARISWALLARGSDYHSAR

SEQ ID NO: 463334 - protein, 459 aa, unidentified
MHTRIIGIDLARTAPHKAVVLDQTSNHFVSKLLKFRTDPAAIDRVLAAARADAPDDVHLMAVLEATGMAWYSVGMYLQRQGVDVYRVNGQQVADLRRVYQRHAKSDRIDARVLARLPLSCPENLHRCPFPSAPQMALQRACREADRLTDDIAASKNRLLATDQFAWLGLSDITPPYEDAAFWLRAHWYHPWRVVEAGEAAIATAWRAASPQQPADTSWIPFLIRRAQQVIALYGAADCVPYAHLQASLYREQQRIRTTEADLHSLRLETVRPLYRQLHPQRYLETLQGVGQDSAAIYIAFIGDISRFPSLRDFRGWSGMTPFSRQSGEAQARGLRITKAGPNLIKATAFLNAGVARQWDPQIAAVYYKQMVVHGKHYLQALCACATHLLDRIYAVLREDRPYQLCDVDGTPITKHEARRICQEQYHVPDEVRRRNNYRQRKARKERQVERHYNRRKQNS

SEQ ID NO: 463335 - protein, 341 aa, unidentified
MQVYGIDLSKDKFDVNFFDATGKINTRTVKNGLAGISDFLSGIPSEAILCAENTGSYGDLLVFLCGQYGVQIALVPGYTVKHSLGLVRGKSDPIDAGRLREYGERFFDKLSFKTYQSETMSELRQLYSLRSQLVKARKELRTGAHARQTMPMQSIRTNQILKNTLGSLDAQILEVEKEIELIVKSDSELKENYTFSISVKGVGPVIATDIIIKTGNFKVIDTARKAASYAGVCPFPNASGKMVGKARTSHFADKELKCLLYMGAKSAVKHNKEYNLYYQKKKLEGKPHYLIINNIMNKLLRTIYSVVKNKNAYTPEYMCIDPREKNVNSSDKKSGKKLVFN

SEQ ID NO: 463336 - protein, 404 aa, unidentified
MVFLGVDWAEEHHDVWLENEQGEMLGKARIANDVGGVRQLHELVAEHAHDPSQVVVGIETDRGLLVTALVGAGYQIYAINPLSVSRYRDRHGTSGAKSDRADAKLLADLVRTDRHNHRRLAGDSELSEAVKVLAREHQDLVWTRKRFINRLRSTLREFYPAALEAFGTDLGALDALAVLERAPTPWQGRQLSHAKIVSMLRKAGRQRNLEPKAGEIQRALRSEQLQAPAQLQAAMAIVVSSCVAMIKSLNLQLEQVAAEMTASFEGHPDAEIYLSLPGLGVVLSARVLGEFGDDRARFADAKARKAYAGTAPVTQASGTKKIVLARFARNRRLADACYCWAFSSLTRSPGANRYYRTLRTRGKTHHQALRGLANRLVGILHACLAAGQTYLESLAWPQPYEIAA

SEQ ID NO: 463337 - protein, 315 aa, unidentified
MTNTKTRKTVVNIGVDVGKASLDIAIHEKGLHWQEDNTIEGIGRLLKRLSHYQVERLVMEATGRYEFELAQAAYNKGLPVCIAKPLSVRRYAGAVEQLAKTDKIDAAIIAEYAAVVKPRATPQKSKNLIAIKNLVVRRRQLVNLRTQEMNRLKIMGKTFEVSCRRMIRALDAEIERMEKRLSTHVEQQAEWTEKHTLLTSAPGVGNTLVYTLLADLPELGTLNNREIGALVGVAPINRDSGKLRRKRRVQGGRATIRTVLYMATLSALQCNPVIKAFYRKLVAQGKHKKVAITACMRKFITILNTMVKNKTQWAY

SEQ ID NO: 463338 - protein, 385 aa, unidentified
MAPPIRPEIVIGLDVGKSSHWACVATRGGEVLASKPVANRENALDSLFAEFPGALVVVDQVRNIGALALSRARAAGMPSAYLPGLAAHEAAKLFGGDAKTDERDAMVIAKTALGIPDSLLPVPHPDPAIAAARAIAAQRDFLTCENTRNKNRLRSILLESCPEFESLVDLSDASELRLMAALGGPWSVADAGRRRAAALARGARSGKVDALVGSVGSSTRPDAAAIAAEDRAVRFLARRIAENAAELQAATAEISALLERDETYRCLLTIPGIGPKTASELAISIDIDDFPSHDRLASYCGLAPRNRQSGTSVSSVSASRQGNKRLKNLLIFSCNCLARTDGRWGEYYARCRDRGMPHGKALKAVARKRLKVIYAVMRDKVPYVA

SEQ ID NO: 463339 - protein, 348 aa, unidentified
MDYYAGLDVSLEETAICVVDGTGRIVKEARAASEPAALAGALNQLGLPLERIGLEACSLTAWLHDGLRELGFAATCIETRQANAAMKTMPNKTDRNDARALAQIMRTGWFRQVHVKSRQCRLWRSLLVARRTVLGEMRSIENVVRAILREAGLKLGTPGRAAFAGRVRELAGDDPLVMPLVEPLLTVLATMLTVLARLTRQVLDLVRKEAVCRRLMSVPGVGPITALAFRATIDRPGRFRRSRDVGAHLGLTPARYQSGETDIQGKISRCGDELARTALYEAAHTLLVRSQKWSSLRAWGMNIARHRGMARARVAVARKLAVILHRMWSDGAEFRWGKEPAPGAPAAA

SEQ ID NO: 463340 - protein, 314 aa, unidentified
MKDISTFVGIDVAKKSLDVATLPTSTPRTFVHDPPGRQELLDSLPEPGTCLIVIEATGGYERLLVADLLDAGHLVAVVNPRQVRDFAKAFGILAKTDRIDAAVIAHFGKKVKPRPLAEVHEKQGELDQLVTRRRQLVALRTAEKNRFAMAHSKPVKRSLQQVINTLIKEIKRIEKEIFVLVESDDQWRGKADILSSVPGVGDVTAATLIAEFPELGQINRQQAAALAGLAPFNRDSGKFQGKRTISGGRRTVRTALYMAALSAKTHNPLIRKFADRLKAEGKLPKVILTACMRKLLVILNTMLKTNTLWNPRII

SEQ ID NO: 463341 - protein, 355 aa, unidentified
MDSTKYMGMDVHKESISIAVMNAAGKIGMECVIETKASMILQFIDGLRGNLHVTFEEGTWAAWLYDLLKPRVTKLVVCDPRKNKSMREGNQSDKIDARRLAELLRLDHLTPVYHGEHGLRTLKELVRSYLTITKDLGRVMTRVKAIYRSWAIPCTGKQVYARCHRAEWLGKINELGVRRRAELYYQQLDALRVLRQQVRRDLLAESKKQQAWKRLCQIPSMGPIRSAVLLGILQTPHRFRTKRQLWTYSGLAIETHSSADHRRVNGQLQLAKKQVLVRGLNPNCNHDLKNLFKGAAVVASSKPGPFEEFYAALVAKGMRPEMARLTLARKIATIVLIVWKRGVCFDAQHLKPQTA

SEQ ID NO: 463342 - protein, 347 aa, unidentified
MTLFVGLDVSVKETAVCVVDDTGKVVCEQKVPTEPDDIVRLLASIGEDYGRVGIEAGPLSQWLVNGLTAAGLPVVCVETRHMMALLKAQQINKSDRNDARGIAQMMRVGLFKPVHVKTQLAQEQRMLLTSRKLLQRKLLDVESDLRGTLRNFGLKVGVVSTGKFEARIRELVVGSPRLALVVEPILRRVMRQQFAVLHKMLLDTVRHDPVCRRLMTAPGVGVVVALTYRATVDQPQRFVHSRAVGAHVGSTPRRHQSGEIDYDGGVSKSGDTMLRTMLYEAAQSLLTRPGKWSWLKAWGMRVAQRRGMRRAIVAVARRLAVILHRMWVDGTEFRWSNSPAAVVPQAA

SEQ ID NO: 463343 - protein, 422 aa, unidentified
MLEETHDSEEVIQRVAAPDIGKARLVCCARVPSEQGSGKRLQEVATYATMTRSLLGMSDRLRQLGVTRVVMEATSDYWKPVFWLLEAEGFECWLVNAKDVKHLPGRPKTDRLDAVWLCKVAERQMLRPSFVPPPPIRRLRDLTRYRADLVVARTAEKQRVEKLLEDAQIKLSVVASDIFGVSGRDMMAALLAGQRDPKALAQLARRRMRAKLSLLEEAFVGHFGDHHAFLLAKMLGRVDQISADIAELEAKIAEEIGPFAQQADRLDAITGVGQAAAHVLIAEVGVDMGRFPTPAHLASWARFAPGVKESAGKTKGKNATGHAVPYLARVLGEAAIAAGRTDTFLGERYRRIARRRGKQKAIVAVGRSILVIVWHLLSDPNARFCDLGPGFYDTRSNADRAKRNHVRQLESLGYKVTLEPAA

SEQ ID NO: 463344 - protein, 446 aa, unidentified
MAVRMWPADVGSAWLGETVVKIDAGALTLGERCAAVDVGKDVIAVAVRVPGDGPDGRQTVKRTFKAFYGVLGEAARWLTSLGVTHVAMEATGIYSMPVYHALIEHGHFTQVLVCNAGHVKNVPGRKTDLADADWLVHLLECGLLRGSFIPPAQIKAARDVIRYRTKIVQSRASEAQRLGNVLQDAGIKIDSVASSITTKSGRAMIEALIDGERRPRVLADLALGKMRAKIGDLELALEGRFGDHHALMCRLHLDHIGHLDEMICRLDAQIEAMMKPFRAERDLLTTAPGIGPLAAAAVISEIGASPAEFFPDAAHLASWTGICPGNHESAGKRRSGRRRHGNAHLQAVLVEAAWAAVRHDGYLKALYHRHVMKWGGYRSPTAKKKAIIVVAHALLVIIWHMLAGGASYHELGTDFFTRRLDPERETRRLIARLEALGHQVTLQPAA

SEQ ID NO: 463345 - protein, 373 aa, unidentified
MGKHKLAFVAFDSAKEKHAVAIADDGRDGEVRYLGEIDNSPDAVSKLVAKLSRQYERLHFCYEAGPTGYGLHRQLTDLGHVCDVIAPTMIPKRSGDRVKTNRRDSVTLVKLLRAGELRAIWVPDSVHEAVRDLTRAREVAMLDLKKKRQQLLGFLLRHSRIYPGGKNWTKMHERWLAKQTFNHPAQQIVFQDHLEVINAAQVRLAALEQQLREIVPTWTMAPVMAAYQALRGVSFLVAITFVAEVGDVRRFATPQQLMAFLGLVPSERTTGDTVRRGSITKTGNHRARRVLIEGAWTYRFSARVGETLRGRLKDLPLNIRSIAWKAQVRLCARYRRLIANGKKTPVATTAIARELAAFLWAIGQQVAPLKPAT

SEQ ID NO: 463346 - protein, 426 aa, unidentified
MEVIYSKACGVDVHKSFIVAVICDSTSITPKYYKKRFSTFNNDLVKFRNWLIDNDCQNVCMESTGKYYIPVYNALEGFIPNVVVANPKWVAVIKGEKDDNKDAKWIADLFKLGIVRSSFIPSKKFRILREYTRYLYKLTCMKSSEKNRFTNALTVGNCKLDMVFSDIFGKSSQSIIQTILDNNSFSDDDIINSLHKNCKSSREDILSAISGISFTSEQKLRIKLIKDHIDYLTNEINNLRDIINNLIAPYENYINLLMTIPGIDRNSAITILSEIGDDMSQFSSHYKLTSWAGLTPGCNESAGKKKSVKISRAGVYLKPCLVEVAHCAVKDKTNTYYSNKFNKISKRRGKKRASIAIARKILVAIYHMLLTGEVWNPRDLASNETSDKDRLKYTKNNFKQSLKQLLSLGLTFNELLEIVNQNAIIE

SEQ ID NO: 463347 - protein, 459 aa, unidentified
MSNPSRRLSRGDRRRNDRLAALRAVVTRETAVLAFDLAADKQVCALTDQDSRVLARRTVKAKAWQLREAVGWGLAQAAAAGFSSVVVACEPTGHRWRVLDQIAAEARLVCVQPLLVRRARESEDFTHNKSDETDAMIIARLVTELRCYLPERAEPAWARLRHLGARRGALVTDATAARLQVTDLLECAWPAALQAAGEPFKSKSWLAAITVVLDRVGATGDLTVIRRWGWTRFATAVRRELPRHGTTRWHSGIVRAVFDAAADPARAEAGVASQRAGALERTRFALADLAHARAEKAVVEARMVEVLDELGLTTLVTSIPGLSAVGAAAILAETGDPTRFTSARALVKHAGLCPRDNASGAYQGKTGISGRGRPQLRLAAWRAVWAALRNNPVLAARYAHLTGRADNKLTKTQARVAVAGSLLRQLHAVITTGTAWDPAIASGFKPQSRECAKGAAAAA

SEQ ID NO: 463348 - protein, 401 aa, unidentified
MTSVRSRAWIGIDIGKTHHWVCAVDETGKRLLSCKVLNDEAQIIEVIAEVSELAAGRVWAIDILGTPSALLVALLAKAGEQMRYASGRVVAAMSTAYAGEGKTDAKDAYVIAETARIRADLSVVDTDTDLVRTLGVLTGHRADLVADRVRMINRLRDLLTSVFPALEREFDFASCKGALVLLSGYATPEAIRRMGEARLSRWLRQRRVRGYADVASRAVAAAQTQHTVLAGQDVAASIVAELANSILAQHERLKLLEQQIQDTFAQHPQAEVIESIPGFGPVLGASLLVAAGDLSAFPTAGHLAAAAGLVPVPNDSGRRAGNLHKPRRYSRPLRHALYLSAQSSMMRAGPNRDYYLKKRDQGRTHSQAVIALARRRIDVLWALLRDNRTWTATPPARAQAA

SEQ ID NO: 463349 - protein, 437 aa, unidentified
MRRVIGIDIHRTFGEVVIWENGLTRREGRVDMTRAALEGFGRQLRKTDEVVIEATGNCMAVSRVLSPHVKRVVIANPLQVKAIAHAHVKTDKVDAGTLASLHAAGYLPEIWTPDAATERMRRLVARRYQVVRHRTRIKNEVHAILHAHLIPKCPHADLFNKRGRDWLTRQPVPEDERVAIARHIRELDRLGEDLAGLDRDIAQGALDDEDIQRLLTITGVNLVVAAGLMAAIGSIERFTSPQKLVSYFGLNPHVRQSGLGPAHHGRISKAGRSHARAMLVEAAWAAAKAPGPLRAFFIRIRARRGHQIAAVAVARKLATLCWHMLTRGEDYRWARPSLVAHKRRAMELAAGLPQKKGNRRGPGYAYNVKELRHQEARVAEHAEKSYEHFVAAWRTRPPRKGNGCATASNRQGLDGLPGDASSRCATLRHEVGRTAKE

SEQ ID NO: 463350 - protein, 334 aa, unidentified
MDLKEGALVNPTGTTTARVYVGVDVSKDRLDVCLRWSEPESREEVFAVAHDEAGIDTLVSRLVVEPPVLVILEATGGFERAVVGVLAAEGLPVAVVNPRQVRDFARATGRLAKTDRIDASILARFAEAIRPAPKPLPEEEIRALQGILARRRQLVGMLTAENNRLPTATKPVAKRIAAHIRWLEKELSRTDRDLEEAIKSSPTLRQNETLLRSVPGVGPVLARTLLAEVPELGTLTHKRVAALVGVAPLNRDSGTLRGRRSIWGGRAEVRAALYMGALVAARRNPVVREFYERLLAAGKPKKVALVACRRKLLSIVNAVLKHRTPWRSPHYLSP

SEQ ID NO: 463351 - protein, 412 aa, unidentified
MSPMLIGIDVSLKSHHVQFMDGTGTSLASFAVPNDQAGADSLIHKMLDTASKAGAQELRIGMEATSNLGWHLAHYLKTELQGYEPNVRSQIYVLNARKVSRFKKGYEALPKNDRVDAWVIADHLRFGRLPHEMKDTIQYEALQRLTRTRFYLINNIKRDKTYFLNQVFLKFSGMRQDNPFSNTFGSTSLAVIQELEPEQIVSMSLEELIAFLQDKGKNRFDNPEEIATYLKKIARSSYRLDKTMADPVNISMATTLSVIKHLESEVKKLDKEIAKIMKGIPQTLTSVKGIGPVFAAGILAEIGGIDRFADHHALAKYAGLVWSQHQSGEFEADETSRLRTGNKYLRYYLVQAADSMRKHDAEYAAFYKKKFDEVPKHKHKRALVLSARKLVRLVFMLLKTNTLYTPPERRNP

SEQ ID NO: 463352 - protein, 408 aa, unidentified
MNAVGIDVSKGKSMVAALRPMGEVALLPQEFLHTEVGLEQMAYAILALGEDTRVVMEATGRYHEPVAAALHEYGIYVCVLNPLYIKQSGGGSIRKVKSDKADAMKIAKYGLDNWVDLREYTPMDTVRQQLKLCSRQYNLYMKTVVSLQNNLISLTDKTFPGVNELFSSPERADGHQKWVDFVMTFWHCDCICRVSEKVFTERYQKWCKRKGYHCSVEKALDIYASSCGHFTTLPKNDNTKLLIVTAAQQLLAGKTTLAALRAEMTRLASQLPEYETVRAMYGVGETTAAQLMAEIGDVRRFPHRSSIVGFAGVDPAVDQSGKHETQSTSTTKRGSPHLRKTLYQIVCTYLRKAPADEPVYQFLDKKRAEGKPYFVYMTAAQNKFLRIYYARVKECLETFDAHQKNTQG

SEQ ID NO: 463353 - protein, 356 aa, unidentified
MSRDVKYIGMDVHKEAVVIAVLNSSGKLEMESIVETKASSILQFIHGLRGELHVTWEEGTWAAWLYDLLQPQVAQVLVCDPRRNALLKEGNKSDKVDARKLADLLRTGMLRPVYHGEHGLRTLRELGRSYQTLSQDLNRVMNRVKALYRGWSIPCAGTQVYAPRYREEWLQKIEHAGVRRRAELLYQQLDGLQALRRTLRPELLAESRKHKAAKLLRQIPCIGPIRAARLIALMQTPHRFRRKRQLWTYSGLGIETRDSAQYCYVHGQLQRTKKPQQIRGLNQNHNHEMKEIFKGAATRASCGVGPLRDFYVALLAKGMKPEMARLTLARKIAAIALTLWKKEERFDAEQLKPQAA

SEQ ID NO: 463354 - protein, 342 aa, unidentified
MEYFAGLDVSVKETSVCIVDETGKIVREVKVASEPAVLLAVLKNPAYRFKRIGLEAGPLSQWLFSALAEAGLPAICVETRHMQAVLKAQINKTDRNDARGIAQMMRAGLYRPVHVKTLRSQKLRMLLTHRKLLQSKAIAIENDLRSTLRNFGLKVGMVGTVKFEARIRELVENLSDLAALVEPLLIVRRVLREQIVILHRRLLAIVRDDDVCRRLMTVPGVGPVVSLTYRATVDVPARFHKSKAVGAVFGLTCSKYQSGEVDRNGRISRCGDEMMRVMLYEAAQSMLRSKKWSWLKAWAIQIARRRGMKKAIVALARRLAVILHRIWVDGTEFQWTREAAAA

SEQ ID NO: 463355 - protein, 448 aa, unidentified
MTAGRPEEIVDEEHERIIERVCAIDVAKESGQVCVRVPGQGRRTSRLWTVKATTGAVLELGEQLQREGIEKVTVESTSDYWRIFFYLLEGCGLDVQLVNARDVKNVPGRPKTDKHDAVWLAKLTEKGMLRPSFVPPHQIRVLRDYTRMRVDLVRERTRHWQRLEKLLEDSLIKVSAVASTLTTLSTRDMIEALIRGERDPRTLAGLARGRMRSKQPALVEALTGRFDDHHAELAQILLDQIDALTGQIDKLTTRIDQLLAELPATGPASSPAADADDDPHAPRTGSPSPVQRLAEIPGISPEGAHVIIAEIGLDMTQFPTAGHLVSWAKLCPRTIQSGNKHKTGKTPKGNPYLKGVLGQAAGAAARTNTFLGERYRRIVKRRGKGKALVAVARSILVIIWHLLADPASTYHDLGADYHLTRLDTDRKIRNHVRQIEALGYHVTLAPAA

SEQ ID NO: 463356 - protein, 359 aa, unidentified
MKIVGCDFHPCWQQVAVFDVETGEINERKLMNGDGEAERFYGDLPVPSLIGIEACGNSQWFIELLERLGHQVWIGDAAQIRASYVRRQKTDRRDAGHILRLLLENRFPRLWVPTAEQRDLRQLLMHRHKLVEIRSRVKNGLQHLALNRGVQKQRALWTAGGMAGLKNLPLKGWSLRRRQDLLELLSGLDGQVAELDTAVEQAAEQHPQARLLMTQPGVGPITALAFVLTIGEVSRFQTSGQVASYVGLIPREHSSGGKQRLGAISKQGNRFLRQLLVEAAQTACRFDQGLRRQYQARCHHKPKAVAKVAAARKLAVRLYWMLRQNVGYPEIARIESSSGVPLAGPHRAEGLIERSRIQR

SEQ ID NO: 463357 - protein, 354 aa, unidentified
MENIKISFKNIPIYIGIDVHLKGWKVCILTEEFEHIVANFSPSAKVLSNYLRRKFPEGDYHSVYEAGYSGYWIHEELEKCGIKNLIVNPLDIPTSDKEKRIKTDKIDCRKLARCLRNGTLETIYIRDKEQQQDRALVRIRYKMIKKQTICKNQIKSLLAFYGIYIEEEKIQTYWSKKYIESVEYKTKQKGSATIAFDSLLRELKDLRSNILEITRQIRLLSRTERYQEKVRLLQSIPGISMLSAITILTEIGDIRNFHTLDKLNGYIGLIPGEHSSGEREYKGGMLHRGNKILKCIMVESSWVAVKKDPSLMLSYKNFIQKHKKTRAIIKIARKLVNRIRYVLVNQKEYQPSVA

SEQ ID NO: 463358 - protein, 385 aa, unidentified
MAEQIFKYSVGCDISKDAFNVCILEVSQDMQSKVKASHKFKNEKKGFREFEAWVKKHKRHDVPTGFYMEATGVYYENLAWYLFEQECNVFVLLPYKTKHYLKSIGIKSKNDKIDAQGLARMGAEQKHNPWRPHSKSIYVLRALTRQHESVTKLKTSLQNQLHANEHSAVRNATVKKQLNATIRLLEKQLEELSGEISKLIDADEKLNEKYSHIDQLRGISKLSWATIIAETSGFETFENQRQLVSYAGYDVVENQSGKHVGKTKISKKGNSRIRRILYMPSLVSVRLKEPALFNIYQRVHERTGIKMKGYVAVQKKLLVLIYHIWKNNKAFQSDYSKTFGEEKSKSLFPFGFGETIKESSPDKRATQDEHSYELSSKVLFPLAQI

SEQ ID NO: 463359 - protein, 428 aa, unidentified
MLSRAGARRLRPLFGKELSLNKVDIAPFEVFCGIDVGKTLNHIVALDRYDDKPLINRKVPQEEAEIRAALEEAGDFGLALVIVDQFGAFGRLVVGVAKSMDIPVAHMPPRRFRQVAETYGEDKFDEKDAFILADASRTTPRNIEFVGNRAESMAEIKVLSSLRDDIVEERTRCYNRLHDFIHQVSPPLEELFSKRKLHNDLEIRLIARYGGPIGFRQAGRARASTWAAELKYHCVDGPKKVEQVFDVLDRQTVMLPGAAVIEEQIRSIASRIIELLAEEKRLNLMIDQRAKMIPEVDLLQSIPGVGPVYAALIAVEIGDIGRFRDSNHLASYAGVAPRKEESGTSVHKRRKRKGGNRRLKNALMQSSQRSVQCDPLARAYYERKRAEGKKHLQALRALARHRVTVIFAMLNEGTFYEPPVEVDENGRG

SEQ ID NO: 463360 - protein, 316 aa, unidentified
MTDNSMICAGIDVGKSHLDIALHPGNARLRVTYDTAGLKALDAFLREHDVSRIGFEASGGYEWRLLAHLRAGKRPAARLQPAQLRFFAKSRLKRAKNDRLDAALIALFTASLEQLPALPDARFDKLAAELTYLEQIEQQIALVKTFAETALSEAIKRRHAREVARLETCRKAHLLRLEKTVRDDCDLAQRLDLLISIKGIGLRSALCLIIRLPELGHASRAEIAALAGVAPYDDDSGKHHGRRRIQGGRERLRKSLFMCAFTATRHNPDLAAFYTRLRQSGKEHLCAVIAVARKLIVLANTILFRKTEWTPQYSKN

SEQ ID NO: 463361 - protein, 420 aa, unidentified
MKPIAPQQFTAYVGIDWADLKHDVCLQAAGSEQREFDCFAHKVDRIDQWAHSLHRRFGGPIAVILELAKGPIVYALQKYDFFVLFPVNPSSLAKYREAFKPSGAKDDPTDAELALDLLLRHPERLAPLQPQSQGMRTLLSLTEHRRELVDDKTRFTNRLTNTLKQYYPQAVDWFEQRDTVLFCDFLARWPTLTQAKRARRASLEAFFYAHNGRRAHVISTRLDAIKAATPLTEDRGVIAPCRLQVLVLVEQLRTTLQAIDRFDREIAELAPKLPDYFLFQPLPGAGPHLAPRLLAAFGGQRERFASADQIQKYSGVAPVTERSGKKNWVHWRWKCPTFVRQTFVEWAAQTINKSFWAGAYYRQQRDKGCSHPVAVRALAFKWIRILYRCWQTRTPYDESTYLNALKRRGSPLLKQLGATT

SEQ ID NO: 463362 - protein, 427 aa, unidentified
MNETESNKVDEFRQFKSQIRGSREYLIVGLDIAKRKHHGFLGDANGKTILKGLIVENNAEGFGHLLSQVRFYMQRDGFSRVVFGLEPTSVYHKPLAEHLISQGHLVVYATNEAIKKNRSLIDGRWDKNDTKDSANVADLVAQGKCHYYDLPDQRLRDLRSLLLLRKRLKKQVHSCRVRIRNNLVAQYFPELDLFWNNAEAENLAIVRGYLDPARIRQLTCEQFIAQVSTHNGGLRQQRRLRHIWEAAGNSIGCRPGAAMALEAKLLVASLKSIQEQLDHVEKATQRLAEGFEEYGYLKSIPGFGPYVSAVTLAAIGNPHRFENRAQLIRLAGFDLCASRSGEKSNTAVPVISKKGKADLRYALYQAALVASSLTTHFRSHYNRLLEGRQREKGIRTKMLVKIAAKMLVIAWTLMKRKEPFNPAHIQA

SEQ ID NO: 463363 - protein, 404 aa, unidentified
MAAICGIDWASEWHDVRIAEAHDGSVLVEQRFSHDEAGVSALIELLVDTRVERAAIERPDGLLVGRLLAAGICVLAIHPNQVAAARDRFRAAAGKSDRFDAMVLCELARTDSHRFPILAPCSDETLALRALVRTREDLVAVRVHLANQLRAQLDAFWPGAGRIFAAVDSPIALAFLARYPGPEEARGLGPKRLAGFLARHAYCGRRPTEQLLERLRAAPSAAIGELEHDARRAAVAGLVATLTPIVEQISQLTSEIAGAIRAHPDGPIFLSFFRDPKSVVTAAGLLAEIGDNRARYPTEATLAADAGQAPVAKESGKQRHATFRWACDKRLRNHLGVLSDSTRHWHPWAHDVYQGATTRGKDHPHAIRILGRAWTRVLWRCWQDRTPYDPTKHGNLTRLLESRG

SEQ ID NO: 463364 - protein, 402 aa, unidentified
MNCVGIDVSKGKSMIAVMRPFGEVVVSPFEVRHTASELSKLAGLLKSLDGETRVVMESTGNYHAPVAWLLHDAGLYVSVVNAMLVHDYGNNSLRRGKTDKKDAVKLANYGLDHWLTLPRYVPEEDTRLMLKTCYRQYQQYSKVQTMLKNNLISLLDTTFPDANRLFTSPPRTDGSEKWVDFVAAFWHCECVCGLSEKAFAAKYQKWCRKHGYHFSEDKALDIYASACGHFGVMPKTDTAKLLVEQAIFQLRATSAALAALKQEMQSLAASLPEYPVVMEMFGVGPTLGPQLMAEIGDVRRFHSKKALVAFAGIDAPPYQSGQMDVRSRSISKRGSASLRRTLFLVMGILLQCAPMDEPVYQFMNKKRSEGKPYRVYMMASANKFLRIYYASVKAYLDSLEHN

SEQ ID NO: 463365 - protein, 347 aa, unidentified
MRFYNNQHKYYCGIDLHTRKMYVCIIDEKGEIKEHRNMKTDRDAFLRAIAPFREDIVVAVECIFTWYWVADLCHNEGIPFVLGHALYMKAIHGGKAKNDKIDSHKIAALLRGGMIPMSYVYPEKMRATRDLMRRRNHLMRKRSELYAHIQNTNSQYNLPDSFGCLAVSKNRNGIIEQFEHPSVQESITADMEIIKSYDVILSQLEKSIINMAIHHDPVSYALLQTIPGVGKIIALIILYEVENVRRFASVQDFASYSRLVKCAKESNGKKCGSGGSKIGNGHLKWAFSEAASFFANNSDSAKKYLDRSTKKHGKSKALSILAHKLGRAVYFMLKNKEAFNQNKLLNL

SEQ ID NO: 463366 - protein, 404 aa, unidentified
MFYCGIDIAKRNHEASVIDADGKPLLDSVTITNTQEGCEKLFSLFERLSIDKDAVIIGMEATGHYWLSVYEYLTVQKYDVRVINPIQSDAFRKMYIRQTKNDSKDSFIIAQVMRFGQYSQTTLSDENTVAMRQLTRFRMALVDNCGDCKRRIIALLDQVFPEYADLFSDTFGTTSKELLLNYPTPDDMLAVSTRKLTTFLSKASHGRFGEEKAKEIRSAASNSFGVGFAKNAFAFQIKQLVEQLMFLEAQIEELDEQISYLLHQVNQVITTIPGIGDTLGAIIVSEIGDINRFDAPNKLVAFAGLDVKVTQSGEFTGTKQHISKRGSPYLRRAIWLAANRAAFCDPILAEYYQSLKVRGKHHLTAVGAVARKMCNIIFTILRENRPYEAMPPKRKEMEGVAWEK

SEQ ID NO: 463367 - protein, 354 aa, unidentified
MKQTTDFTNHHIYVGLDISKTSWKVCILTDLVEHKTFTQPPSVEVLVHYLKRNFTAARYHCVYEAGRFGFWIHDQLVQHGIDCLVVNPADVPTTNKETAHKTDRIDARKLARCLRACDLKSIYIPSRTAREDRSLVRTRQLLVNKQTRSKNQIKALLSFYGINIPENLNAYNWARRFIIWLQGVSFESESGNQSLRILIDELLHLRESILQLTNAIRSLAHEERYWRHVCNLITIPGVSILTAMTFLTELVTLDRFKTLDQLASYVGLIPGEHSSGEREITTSITRRQNAVLRSALIESAWIAVRKDPALVLAFTTLAKRMPKNQAIIRIARKLLNRIRYVLKNQKPYVTAVVQ

SEQ ID NO: 463368 - protein, 339 aa, unidentified
MELYIGIDLHSNNAFVGICDREDRRVYQRRLPNVADVILAELEPYKEKVTGVVVESTYNWYWLVDSLADHGYRVHLANPAAIQQYKGLKYAGDRHDAFWLAHLLRLGILPEGYIYPQEQRPVRDLLRKRGHLVRLRTSLINSLQGIISRNCGSRLSASKIKQFRENHVATTLADKEDVLLSGGISKETIDHLTGQIRKIEAIILERVKLQPPFVALQNIPGIGKVLGLTIMLETGNPHRFAKAGAFASYCRKVPTSRISNDKKKGGGNAKNGNKYLAWAFSEAAEMARRYDDRARAFYNRKAARTNFMVAHTALAHKLCRAAWQVMSKEVPYDPDKLFA

SEQ ID NO: 463369 - protein, 421 aa, unidentified
MRKADTRKVKFVRNDTLIVAIDVGMETNHGYCTTPDGKDIKPFKFDNTRDGMDKLWGMVMASKNRFQCEEIIVGYESTGPYGEPLVHYLMKKPVMLVQINPMHTKRVKEISDNSPLKTDDKDPRVIADIIKLGRTLSIVIPEGDAAYLRRLNNSRERHVKERTALVNQLQQLVFLLFPEFKKVLKNIKCRTPLYLLKKYPTPESISVLETPVLGEEMRKKSRGKFREHHADMLINLAKNTVGIREGVAGISMDIRHILVQLEMLKSLIAEIEDEMEIALGRIPYSSKLLSIKGLGIVSVAGIIGEIGDFKKFQTQGEIMKLAGLDLYEISSGKMKGQRRISKRGRSLLRKILYYAAIQTIRKNGILYDYYTRLTDRGMKRMMALVAVSRKLLGIIYAIVRDDSEYLVNFESIKRQVIKKAA

SEQ ID NO: 463370 - protein, 420 aa, unidentified
MKSVKTKKIKKFNPKSLLVTIDIGKRTHYGYFRAPDSSEVEPFEFYTSRESFNKFYHKMRRFADSQGLKDITVGFESTGPYGEPLFHYLKNKPVKLVQINPMHTKRIKELTGNSPNKTDRKDPRVIADVISLGHVLTVVIPKQAAAELRRLSFARQRSIKKRTAAKNQLNDLVYILFPEFTQIFKDITCKSAMHLLGHHPLPEDIAAIEPAVLATMLKKISRGRISADKATQLHAAAQYSVGIKEGRQAMCLEISQLIGEIGMHTQFIEQCEQQMRQGLKQIDYSSSLLSIKGLSVVTVAGLIGEVGDFRQFKTISEITKLAGLDLYEISSGKHQKGKRRISKRGRPLMRKLLFFAALNTVKSGGIMHDHYQQMLQRGMKKIKALVAISRKLLAIIFALVRDHSVYMENYRGEHKLKLAA

SEQ ID NO: 463371 - protein, 365 aa, unidentified
MEEEYFVGIDLHRQYFTCYATNGKGDEILKERLSNCQEEVDYLVKHFPFPPKVVIEATRNWMWLVKALKEKGCQVSLAHPLKTKAIASARIKTDLLDAKTLCHLLRSNLVPSSYVASEEEQDNRELARGRIALVHYQTMIKNRIRAILGKENLSYSGSDLFGKGGRAWLKKQQLPETKRKMVKIYLERLDDLISAIRKVDELIQEKSSRLPEVKLLTSIPGVGTTTAFLLAAEIGDIKRFNTAKQFASYFGLVPRLHQSGNHQYYGRITKLGNPYVRWALVQTTHRLARMDRNYKWFVDRISYRGGKKKAIVALARKLATIIFCILKEKREYIKDYQSNYQQVGRLKVCPAILPERTRKNLVALA

SEQ ID NO: 463372 - protein, 442 aa, unidentified
MSNAVYSSQSEFAAFVGIDWADRKHVWALQVSDSLLFEQGELDHTPEAVEQWAAALARRFPGRLVAIAVEQSRGALCFMLSKYEHLVLYPVHPNSLASYRKSFRPSGAKDDPDDASLLLDLLVRHRDRLRRLNPDTVETRTLQFLVEDRRKLVDERTRISNRLTDYLKLYFPQMLDWFDQVRSPLVVDMLERWPTLEELQRAKASSLRQFLTRHNCRSQSKIQERLERIRRAVPATRDAAVLTAGRSAVTTLVQLLRQLNGAIRAYDEQIQQRAQNHPDFAIFDSLPGAGPALVPRLMVALGTQRDRYQSAYQIQCYSGIAPVVESSGQQLWVHWRWCCPKFLRQSFHEWALHSIGCSDWARAFYDQQRSHGKSHHTAVRALAFKWIRVLFRCWQDRTPYDETKYSRALQQRRRKPPLPQPVAVDLQLKKVAGFWKLSANPS

SEQ ID NO: 463373 - protein, 299 aa, unidentified
MLYIGVDLHRKASQVAVVDEQGKLIFNRHVPSQRQELLRIFGEAGPVESMQVAYEATYGWGWFADLLEEVGIPAHMAHPRANKAIASARVKNDAVDAKTLAQLLRTGLLPESWIAPPETREARRLVRMRTAMVRIRSRLKNQIHALLADRGLHPEGSDIFAGDLTRMTKQLPAVTKQRAEANLRLIEELDKEVDLADSHIHKLFARDEGVRRLLPIPGVGIITAAIVVAEVGDITRFPTARQFSSWCGLTPTEHSSADNIRRGHISKQGSRWLRWVLVEAACHAYRNRELSNFEAGIAS

SEQ ID NO: 463374 - protein, 308 aa, unidentified
MNSVYHTELSSLEETRGQFNGGKADIKLGIDVHQDFYVVVMQEGGSNPKPPQRFQKQAFLLWAAKLKSRSAEVHAVYEACGFGFSLQRQLSQLSIHCYVSCPQKLDEHNKRVKTDSLDAKALCLRLDRFVRGNREALAMVRVPSEDEERSRVIHRQREQLIKVRKMLEAQGRSLMVNHGIEPVKNWWKRNNFAALPLPAWIKELLQNSQPILIALQQKISALTLQLQVAAAFNQPRGLGAMTSVMIDREIGDWHRFNNRRQIASYTGLCPGEYSSGQHSLTKLRDQTRQPAPACGPSGVGLATGPLPA

SEQ ID NO: 463375 - protein, 350 aa, unidentified
MTIRNKPRPAAVFGIDIGKNLFHVVGLDATGAPVQKVTFRRETLLQFFERASPTLVGMEACPGSQWLARKISALGHTVRIIPAQFVKPYVKSNKSDIIDAAAIAEAATRPTMRFVEIKTTEQVDLQALHRIRDRMIAHRTRLINQMRAFCLEYGIATHQGAGKFKVDLPKILADEGNDLTSAMRRILAMSFDELADLEDRIDDLNREIEGIAARSDTARRLMSIPGIGPLGATALLASAGSAKQFRKARDMAAWLGLVPREYSTGGKTTLLGISKRGNKYLRRMLIHGARSCVNHLDRTRDRLGNWLDGLQSRMHKNKVTVALAAKIARIAWVIMTRSGSTYDRQDPAFS

SEQ ID NO: 463376 - protein, 339 aa, unidentified
MEVEKTCVWAGFDVGKASFSAALDIPAENGRVKLTTLLCRDFKRTPEGVEQFFRWATKTASDYDIRIVMETTGCYSQHLTGWINQLHPEVGVTIENARNIHAFIQSLNLPHKTDKLDAQAIARFGTERQPKPTNRPSQTVLTLRELSRERTALIKARVDLQNRRDTLVSPIVRKINGQTLATLTLQIEKIDKEIKDCVVQDEELLAEVHIMTTMPGVNFVSAYSILAEIGSLKQYSAKELSSLSGLAPRIIESGLSVHSSYLSRRSSGRLRQILYLDSVPGVPKIPVLQEFHQRLIAKGKKKMTARCACMRKMLLMLRAMVVHQTPFDENFSEKSPKGA

SEQ ID NO: 463377 - protein, 338 aa, unidentified
METYAGIDLHSSNNFIGIINEQDQRLYGKRIPNELDRVLSALEPFKKELSGVVVESTYNWYWLVDGLKDNGYKLHLANPSAIKQYEGLKHTDDKWDSFWLAHMLRLGILPEGYIYPKEDRPLRDLLRRRLLLVRQRTTHILSLQSMINRNLGIQISGNGIKKFKEADAEKLFDQTYLVLAAKSSILVIRFLKEKISIIEKEALSLLKHCHGFNCLQTIPGIGNILALTIMLEVGNIGRFPTVGDYSSYCRCVKSERFSNGKKKGTGNRKNGNKYLAWAYVEAANFAIRYCPYSKKFYQHKKAKTNGIVGIKALSNKLARASYYIIRDQVPYDVKKLFG

SEQ ID NO: 463378 - protein, 317 aa, unidentified
MREYIGIDISKTSIDVYDGKKSYKFENNTTGFEATVTLVDDIEKSVFIFEPTGVYSYALTQFCSQKRINIVMVGPKESRDFARSLKVRSKTDKIDAKVLYRYQSQIEPGMIKVPVVNHQGIKIQEMLNVYEGICSAAQKFKNQIESTSKENKELLHTLKQMIKDLEVQALKLFNKIELTLLNDEKTKARYEAISTIPAIGQKSALYLTAFFLKYPMANAKEITALMGLDPMMRDSGTYRGKQKISKHGGQQLRDLLYLPTLSALQYNDRIKVFYERLTSQAKPKKLAVIASMRKLVLMAFSIFNSLEVYRKLEVKAQ

SEQ ID NO: 463379 - protein, 367 aa, unidentified
MLSTLRYVGLDVHKVNTVVAVAEGSGGEASVWGRVASDYATVERELKKLGGPACVRVCYEAGPTGYGLARHLHAQGYDCIVVAPTLVPSDTRRIKTDNRDAVRLAHFLRSGNLTAVAIPDAATEAIRDLVRARGAAKRAERVARHQLSQFLLRHGRWWTEGSHWTAAHLAWVRSQKFAHAALTATFDDAAATVESAGERVKELTAAIGEAVASWTAAPLVKALQAFRGIQLVTAATVAAEIGDFARFPTARHFMAYLGLVPSERSSGGTRRQGSITRTGNGHVRRVLVEAAWNYRMRAQLSKAIAARNVGVADGVKAIAWKAQRRLHKRYRRLIARGKGKAEVVVAVARELAGFVWAAARQPQYLAA

SEQ ID NO: 463380 - protein, 351 aa, unidentified
MMIIGVDYHPSFQQIAFFVEETGKCGERPLNHSDGEAEKFYRELKPRGLSVRVGMEATGHSRWFERLLAELGIETWIGDAAKIKRQRIRKQKTDREDARLLLKLLLENRFPRIWVPSPENRDLRQLLWHRHRLVQMRTRIMNQLQAVAMNEGYRWKKKLFSAQGRALLENLWLAPWASRRRKELLELLDQLDPKIAELTAAAEREAKKQPDVVRLMTHPGVGPLTALAFVLIIGTTVRFRCGKQIGSYTGLIPCEDSSARKQRLGHISKQGNTLLRFLLVEAAQAAARCNPDWRRWYVHLAMRRHKNIAKAAMARKLAVRLYWMWRNGWDYSQLVEFGSNAGKLATGHGVN

SEQ ID NO: 463381 - protein, 443 aa, unidentified
MSTFPAPAVEPVFAAFAAIDWASKVHVVAFVPATGGRIEISKLKNTPEAVELWAASLRQRFPDGPVAVAIEQKRGSVIYMLSKYDHLALYPVPPTMSSSYRHAFFPSGAKDDDGDTLLLLDLLRHHRDRLLPLQQDTPDTRLLRFLAEQRRGLVEQKVSVVQQLGACVAQYFPQVCAWFGPLDTPLLDALLQRWPSLQQLQRSHPGTLKRFLTEHRSWDKDRIAEQIRQIYAAVPATNDEIVLEACARKTDACLAQLRVLRDQIAAYDKRIAAVTADHPDAPIFSSLPGVGAVLTPRLIAAFGTDRKQWRSAADLQRFSGIAPILVRSGNCSRVAMRRACPKFVRQTFHEFAAHSIRFCPWAKLLYEHHLHGDRKNHHRAVRAVAFQWIRIAYRCWVNREPYNERIFLEAQCRRNSPFSSNNPHSAGIAFQNQSGLQKLTAKA

SEQ ID NO: 463382 - protein, 394 aa, unidentified
MKLVGIDVGKNSHHFCVMDKETGEFNVAPSSFSNNKEGFDFLINSLKPYSKKSILIGMEGTGHYHVALLKFLLNNGYTVALINPKTTDLTRKMEGGITKNDKLDTITICDVLDTPERKKQYRITKVDRFDLYEQRQLTRHHHNLKEELNVYCNRLQKSIDLVFPEFNTLFSSKYSIVYMNLLKTFGSAEAIASTDIRTIRKCFEIKGRGNRISLTPEKLKECAKNSIGISSEVETIQIKHLVSQITLIKEQIAEIDKKIEEFSITNNSPILSIPGISHFSGTSILAELGDIGNYSKPSQIIKFAGVAPYHYESSQYNAQHTGITKKGSKYLRKTLYQIILTVINNNPVFKKYYRLKISQGKGHRCAQGHCIRKLLRIIYHLLETGQSFDPALLR

SEQ ID NO: 463383 - protein, 344 aa, unidentified
MQIVRIGLDLAKYVFEIHGVDAHGKTVLRKTLRRHAVSTFFANLPPCLVGLEASNGAHFWAQALSDLGHDVRLISPQFVTPYVKSNKNDRNDAEAICEAVGRPNMRFVPVKSPEQLAVQAVHRIRSRLVADRVRLVNQVRGLLGEHGIVVAKDIGNLRRALARIVGDNEDHALHDLVRSLMGELREELIELDARIGGYDRKIRELYRNSEICQRLGKVEGIGPVTATALVAAVGDRSSFKNGRQFAAWLGLVPKQRSSGGRARLFGISKRGDRYLRTLLIHGARSALGRVRDKQDPRSLWLGKMRQRRHPNIVAVALANKNARIAWSLLASDSAYDASLSVGAA

SEQ ID NO: 463384 - protein, 394 aa, unidentified
MLYCGIDVAKRQHVVALLDEKGQKTQPVFSISNDRAGFDRLMQSLPEMDSVLIALEATGHYWLALYDLLTHQGYRVVVLNPLQVAAYRRSGVRKVKNDRSDAVWIADFVRIANPSPTRQDIPVMLQLRELSRFRFRLSEQIGDIKRKLLTILDRVFPEYEQLFSSVFLQASRALLEQAVSAQEVAEMDLQELEVLLHDASRGRFGREKAQQVHAQAVQSVGVGFLADAAGIEMRCLLAQIELLEQQRDQIDAVLATLMSQIPQHITSIPGIGPATGAAIVGEIGDISRFDSPEKLVAYTGIDPSVYQTGQFQASEAHMSKRGSPYLRHAVWQAASVAIQHDPELQAYYTRKREEGKHHGTALGAVCRKLLLRIYIILKEQRPYTVRPTIPSPDI

SEQ ID NO: 463385 - protein, 384 aa, unidentified
MDQTTSTLSANTLHCALELSKNSWLLAIQFPDREQPSLYPIEGGNTEKLMAKLTAARDCWAKVSGSPPAITVCYEVGYDAFWLARFLKARGIECLVIDPGSVQVNRRGRRVKTDRVDVKMLLRTLIAWCRGERHVWSLVRIPSIDEEDLRRSHRERSRLVRERTAHINRIKGLLFGQGIRGINVKSQYKSLAVDKLMTGDGHRLPPRLACEIAREVQRLAMVQEQIVKIERERDTAPTPCEATERKRHLLLQLKSIGPAISALLSREVYYRQFANRRQVGSFLGLTPSPYSSGEEERCQGISRAGSGHVRAIMIEAAWLWIRHQPKSALTRWFLERTAGQSTRMRKIIIVAVARKLAIALWRYVEHGLVPQGAILNPPTTGNAR

SEQ ID NO: 463386 - protein, 343 aa, unidentified
MAQAPQLVLGVDTHKDIHVAVLLDWLGRHQAAASFGTTDAANRDLVAWTRRYGQVTTAGVEGTGSYGYRLAQHLSSRGIDVVEVNRPDRARRRRKGKTDPVDAEAAARAVLAGDARAVPKDRNGAVGELRALVVARRSAIKARTQATNQLRALLVDGDDELRSQLRGLRKAPLARACAELAPAAGLHLALGSLGRRWLALNNEIADLDAAITSRVRRTAPRLLERHSVGVQTAAQLLITAGDNPDRLHSEAAFAAVCGASPVQASSGKTIRHRLNRGGDRAANSALWTIANNRLMHDPRSRAYAARRTALGNSRKEILRCVKRALARELYPVILDALALPRLP

SEQ ID NO: 463387 - protein, 434 aa, unidentified
MGAVYTVCCGLDVHAYQIEACLRTVGEDGHARYERRPFEAHQQALFELADWLSSSQCQAAAMESTGVYWKSVYALLNGVLPRVVVAHAGKVKRRGPKTDKKDARWLSNLLAQDEVPPSFVPPADIQSIRELMRARYSMLKSRTQLKNRVHKLLHVGHIKLSGAVSDIFVGSGRAMLDALVGGERDVEVLLSKARKAMQKRKGEELKKALKGELTADLRWLIGSLLEQLDVITRQLRELEQRLDALISDEIRSAREQLKTLPGVDAIAALQIISEVGLDMQQFGSASRLASWSAMCPGTHQSAGKSRKGQRQKGNKYLRAILAECAWSTRKTDTFLGRKFRQLEARIGGAKAAVAIGHKLLRLVYFLLSDGTLYDDSHYDSLKDRDQARELRRIVKHMRKMGWQVETRDDGVEVRILPIETTLGASSLASTPPSS

SEQ ID NO: 463388 - protein, 347 aa, unidentified
MHYMGVDHHRQYSQMAVLDEEGRLVRTARVANLRREIKPFLDGLDEIRAVIETGRATYAMVDLLEDLGVEMTIANPTQVRAIAQAKIKTDKRDARILADLLRAGLIPAVYQRSRTNRDRQQVLRQRMFYVRMQTMIRNRVSALMARQDESVQMEIGCLKDLFTRKSREVLRGLRLAEPDRSLLDGLLQTHDHLTEKIGESNVMVRGLYREMDEAKRVSTVPGFGVFFSVLVTTEIADIKRFAGPGKLHAYAGLVPSTHASGERMYHGKIIRAGNPWLRWAAIEAAWTAIKHDFDLQLRFERMARRKTRSSAAVATARRLLTIIYKILKENRTYIPYLRNESAAFKHS

SEQ ID NO: 463389 - protein, 422 aa, unidentified
MSYCPVAGIDVSKRFSDMCILSPDNKIFAQEKIYHDETSINRANALLQKAERLFFSKPVIVMESTSHYHLILFQFFSEHGYDVIVVNPLQSNSMKDFSIRKRKTDRVDAFKLAMMYRTKTLRPSQIPQTATRALRQLCRHRAELLNDVSSYKNRLTALLDQTFPGYDKVFSDVGGVTSCAVLARFPTPTILLVEEESELVEVIAAASKSGYSFAKKKAGLLISAAQKAQTLGIHSCADETLIVCTIQMLRTLSESVLQIETAIDNLLAQIKEMRNNVSLLQSIPGIGSHSAALLLGEIGDISLFKKPKQLAAYFGLDPTERQSGSFRGTKNKLSKRGSSYARAALHMGVVNSICKRGKDSAANPVLLSYYEKKCKNKPAKVAQAASMHKLVFIIFAVLRDQKPFELKTPEQHAVEQGFVKAA

SEQ ID NO: 463390 - protein, 397 aa, unidentified
MYIVGIDIAKRKHEAAVIDGDGAVIIKPFSFTNNCSGYNRLLAMLTKAKLPLDEVSFAMEATGHYWLALFTRLQKEGFRVQVINPVQTNSIRSFYIRQAKTDPRDALLIAEVIRFGHFSESTLHPENIYELRELCRGRHAIVSMQADVKRKVVALLDQVFPEYETAFTNLFSDTSMAILQTCPTPKELSEMPLEELCHLIEVSSRKRFRMVKAQELQELARNSFGFAMAGDVFSTMIRLYAKHLVFLKQQVQEMDRKIAEIMDTLDTPITTITGIGPTLGAYILSEIGDISRFSSAAKLAAYAGIDPTMRQSGEYNGVRNRMSKRGSPYLRHAIWLAASSAVLHDPALKLYFQKKRDEGKPYMASVGHACRKMVSIIYAVMRDNKAYTPYIPNEISA

SEQ ID NO: 463391 - protein, 393 aa, unidentified
MAIVDEHGKVVGRRRIDTGLPGFTELMALLAEHTEDPTSVPVAIETDKNLIVVALQAAGFTMFAINPRAVARYRERHGQSGKKSDPGDAALLADVLRTDARQHRPLPNISDEGRAVKALARQHQEAVWAVHQTTSRLRSVLLEFYPQALQAFPNLKHKAALTILATASTPELGMKLTRRRVVALLQRCGRRNDPALVEQILADLKTPALRQPAAVEDALGLTVVSLLGVVVAMHTAVEQLEQALSAQFNDHPLALVLRSAPGLGPVLAARVLAEVGDDPTRFSTAAGLRAFAGTAPVTRASGRSRRVMARRVRNKRLADACHWWAFAALTRSAGTRAHYDRRRAAGDHHNAALRNLANKLLGRMWWCLQNNQAWDDQTAWSNPATSQPAAVAA

SEQ ID NO: 463392 - protein, 414 aa, unidentified
MEIVHSRCAGMDVSKRDAKVCVRVAGRGRRKTVETVRTWGSTTNAVLALREYLINEQVTLVVMEATGDYWKPFYYLLEDAGFEVMLVNARQVKNLPGRKSDVSDAAWLAQLGAHGLVRGSFVPPAPIRELRDLTRARTAMTRERGREIQRLEKLLEDAGIKLSSVASDITCVSGRLMLQALIEGQHDPAVLADLAKRRLRAKIPELTEALTGRFSDHHAFLAGMYLEAVDQRSRQIAELTARIEVVIEPFRTFCDLIDTIPGIGQRCAEVIVAETGADMSIFPTAAHLVSWAGTCPGSNESAGRVKSTATRPGNPYLKAALGAAALSIANTHDTYFAAKYRRIAARRGPKKALVAIEHAILVAIWNMAHTGALYDDPGADYYTRRDPERARRNAVNQLQRLGYQVTLTPTAVSA

SEQ ID NO: 463393 - protein, 341 aa, unidentified
MNATTIAVDLAKSVFQISIANSANRIVDRKRLTRSQFERFLAQHAPARVVMEACATANYWSQYAQAHGHEATQLHTRYVRPYVRRNKTDAADADGLIRASSDPHLLPVPTKQPDQQALQALHRCRQQLIDARKRRIVMLRAILAEFGIALAKGIRTIEARLGQHVDKVPAVLAATLRDIIAEIGDLRDRIERLDRQLASIAVQHPVATLLMTIPGIGAIIATAMVASVPDIHVFKRSRQFSAWLGITPREHSSGSKRRLGAISKQGDRYLRALLIHGARSALLQAHRKSAADQAALSEVQRWVIELESRRPRNVATVALANKMARIIWSTWTQQRPFQSLP

SEQ ID NO: 463394 - protein, 477 aa, unidentified
MTPYKDAFPEPCPPPPTVPEPTVRTLPLQLYNPHAAGIDIGEAEHWVAVPPDRSPQPVRRFGTFTADLDALADWLLDCDITTVAMESTGVYWIPLFELLEARGVQVFLIDPRQAKRAPGRPKTDRLDCQWLQRLHAYGLLAAAFRPADQICVLRSSLRHRQMLLTYGAHHIQHMHKALQQMHLKLSQVVSELTGATGMAILKAIIAGERDPLTLAKLRNPHCHHSEDEIAKARQGTWRAEHLFALQQAVELYQFSHQQLTLCDQHIQTPLATFADKSAGQPFPPKARRHKKANEPRFDARTPLYRLAGVDLTTIEGIEEGTALVILSEIGTDMSRWPSVKHFCSWLGLSPPHKISGGKVLSRRVRPGAQRVAVALRLAARTVHHARTALGAFFRRLRSRLGAPKAITATAHKLARLVYSLFKHGSAYVQQGLEAYESQYHERQVKGMARQARALGYTLVALGTPEGQSLDAVAAPTS

SEQ ID NO: 463395 - protein, 355 aa, unidentified
MQNIAFDSHKRYTLALVERPDGTIVHEQRIPHERGRLQEFLGKCEAGSPVAVETVGNWYWIVDEIEQAGMKAKLVHARKAKLMMGMINKTDKLDVRGMNKLQRNGVLPTVWIPEGELRDKRELIRTRMFLVHNRTRVKNRISSTMLKYALDIREVTDTFGKTGRELLEERMKELPSQTKYVTRRMLWELDSLERKIVQIEERMRKVFKKTREVRLLDTLPGVGLILATVIAHEVGDVNRFPRAENLASYAGTTPRVHASGGKVRYGRMRPDVNRYLKWAFVEAGNSVARKRERRPERHVVRLYERIAKKGGRSKAVGAVARHLAEATYWMLKKGEPYRERRVFRRTRKRGDVMSS

SEQ ID NO: 463396 - protein, 392 aa, unidentified
MFFVGIDVASRKHDAAITSNYGEVITEPFTIENNLEGFKKLRKEILSHTESLDEVCIGIEETGIYSKNICEYLALCDFTVYMINPILTSNSRKSQSVRITKTDSIDALAICRYVEFNFKRLNPYTPSLYLIEELKSLSRARLDIQYKLTKAKTEWTRLLDITFPEFRKEFNQHSKWAYQLFKQNPTPDKIARMHVKSLCDIVKVQANRNETASKIKSFAKNSIGQSSRINAILVQNTLDDILHYTSQMNLLGSEIESIVSDNFKNILTVPGIGHITAGIIIGEIGDIHRFKSPAALLAYAGLDPIVHQSGLFKAQNVSISKRGSTVLRSAIFTSTKVACINPNVKFNKFKAKYQLKISQGKHHNSSICHATKNMINTIFALLHSGENFDYDQ

SEQ ID NO: 463397 - protein, 379 aa, unidentified
MLASYRSIKHTKEGFDEIVNLVREMEKKLETEVCVVYEATGVYHRVLKKVLEDNNIKQFIINPLLSAKTRKNDSLRCPKTDKLDPKSIAKTYYSHSLHNSHKQETIYHELRELSRYYEDILVHIRKDKVAFRAQLDIVFPGYDTLFDDLYGPVALAVIEKYPHPEMLQKKKINTVSKVIQSKTCHRQAVSDTMADKAIEYSKTIYSGCDKDDIEVLILQRFIKKLNEDMAEAERTIGEMIKLAQELPDFSIIKSIPGIGDNLAARIIAELGDMTRFKKKNELVAFAGLDPRISESGKNDGDHMHITKKGNKRLRCLLYLAVTCSIRLKRDDNSIKDFYIKKKQQSNPMCSKAAKTACASKLVRIIYSMCKTGELYQYNK

SEQ ID NO: 463398 - protein, 338 aa, unidentified
MIVIGVDVHKQSLTAVAVDEAGRMLDKRTVSGANDGLLAWAASLTDERLWALEDCRQLTRALEQTLLAEGERLVRVPPKLMAPERRAGRARGKSDPIDALAVARAALREPRLDQPRPGERRLRELKLLVDHRDDLIDERRRAQQRLRWHLHELDPTLAVPLGALDRAVWLDRLGRRLARLQQTAQVRIARELVARCRGLTRTILELDRELQAATTETAPALLALPGCGALSAAKLLGEIGPIERFDSDAQLARHAGVAPLEASSGKQRRHRLDRGGNRQLNCALHRIAITQGRVHAPARAYLERKQSEGKSRREAIRCLKRQLARTVYTTLKTESALT

SEQ ID NO: 463399 - protein, 370 aa, unidentified
MKQYTEIFVGLDVAKSRHAVAVAEDGRQGEVRYLGEIGADKESVRRLVVKLEKRHGRRLHFCYEAGPTGYGLYRQLVELGHECMIVAPSLIPRKPGDRVKTNRRDAQQLARLLRAGELTAVWVPDEAHEAMRDLVRAREAAMDDLRRKRQAISSMMLRQGRTYPGKKTWGARHLRWLQEQNFAHPAQQLVLQELLLAARHTGERLQRIEAAMAEFLPEWSLAPVVEALQALRGVNLITAATVMVEIGDLRRFDSPRQLMGYLGLVPGERSTGDTVRRLGITKAGNGRARRVLVESAWSYRHLPRIGKAKHYVHERLPPAVRDIAAKAQARLCARYRALSGRGKPLTVAVTAIARELAGFVWAIGREVQAA

SEQ ID NO: 463400 - protein, 470 aa, unidentified
MSQLKIKPKGKKKEAKALALPVIREDAAGIDIGATLIHVAVGPGRDEEPVRTFETFTRDLKAIAVWLRTVGVKTVAMESTGVYWIPLYELLESEGFEVLLVNAHHVKNVPGRKTDVSDAQWLQYLHSVGLLQGSFRPNEAICAIRSMGRHRESLVQAASACIQMMQKALTQMNLQLHNVISDITGASGMRILQAILKGERDPDYLESLCDKGIQAKAEVIRQSLEGNYRAELLFILGQNVTRYENLQSLIGDCEKEVGRMIDAAPAKVNVVDKPLPPTTKRGSKRSASAAPCLPDLREKQYRMLGVDLTQIPGINTQTVQDFIGEVGPDLSDFPNASAFSSWITVSPHNDVSGGKRLRSKTRKSKSRAAKAFRIAAQSLAHSNEALGDYYRRFRGKKGPAEAITATAHKLARIVFHMVTTGEAYDASVFAKAEQKHRFHQENRLRSNAFKLGFKLVPIQPSTDNGAVVVP

SEQ ID NO: 463401 - protein, 414 aa, unidentified
MTAETKDAPSVARAIPPARDLHSEAMMALQATKMTRMGWTGRALAAQLLLECAGAFQEKGDCHAPYDQVSFSDHHHRHRYGQEHSSHDRARLKRSHRLAREGLARTHRVKTCEFATLPHCIEAGMATRYVARELAALGHNVKQVPPTYAKPFRQGHKNDFRDAHAVAEAVQRPTTRFVPAKTAEQLDLQALHRVRSRLVSERTAVINEIRGFLLERGIIVRQGLRFLRQSLPDFLAKRTDVLSLRMVRIVADLADDWRRLDQRIEAVTDEIETVVKSDDNCRRVMTVPGIGPIISSAMVAAIGNGVAFARGRDFSAWLGLVPKQMSTGDRTILGRISKRGNGYLRMLFVQAARVILRRPTNWSKHNFGGWLVCAAQRLHPNVLAAALANKLARIAWTVLAQQRCYEARVTKAAA

SEQ ID NO: 463402 - protein, 456 aa, unidentified
MANFYLGLDVSKGYADLIMINQRKQIVEQSFQLDDTVNGHKQLCAFLSTFFKSHPTAVVYAAVESTGGYENNWFKTLHQIQHPFDIKVARLNPCGVTHNSKAGLQRIVTDKLSAKYIAEYMIDHPEKICYETHDYFYQIRRKWKFIKTLVKEKVRFLNQLEILVYDANPELLPYCRHSVPQWILRLLKRYPTAETLKQASVQDVAQIPYISENKAQRLISNAQTSVASADDVLTADTIILLCTEILRLEGLIAQQTRLIAQYQQFPEVDLLKTFTGIKDLNAIGLLINIGSHERYLTCKHLSSFSGVHPVFKSSGDGISGIHMSKKGSREIRAILFMIALTAIRTNPLIRDLYWYHVNKGREKLDAIGICMHKILRIVYGMLKNNTPFDPEIDRANRIKSISRGNGAAKNTLRRYQDLDELAPISGRQSNKRKEKEKSQDDHIVMNGIKFPPLSLN

SEQ ID NO: 463403 - protein, 431 aa, unidentified
MKGGDFMKNNFMSTLFVGIDVSSKTNVLCALNFQGNKLLKLQALNNQPGAKSILDSILDCLNSNSLKYVVIALESTSFYSTHIANFLSSNEELMFYKPLVYCLNPKSVANYRKSFVDIDKTDPLDAYVIADFARVGRITCEPWRGAQFLALQRLSRHRLHIVECITREKTYMVSNIYLKFSELAVLDKNELPFSNTYGTASAAVLTEFLSLDDITYSSIEELVAFISAKGKNRFSNPIETAKLLQKAARDSYRLDKVLYEPLNTSISSSFNLIKAFDDEIKTIDKAIEKTIKGLNTTEYQSLTSIPGIGPVLASGILAEIGTITSFSSHDALAKYAGLTWRVNQSGNYSADDTRMTKTGNKYLRYYLIEAANSVKNNIPEYREFYNKKYGEVTTHCHKRALALTSRKLVRLIFGLLTKNQIYSKDKVGDIQ

SEQ ID NO: 463404 - protein, 360 aa, unidentified
MLYLGIDQHRKQLTVSVRNEAGDVTLRRQVSTEWGRVRAFFEELRRLAEAEGGFVAILEVCGFNDWLLKMLAEYGCRETVLIQVEKRSKKKTDRRDAHQLSGILWVNRHRLLAGQRVEGVRRVQPPTAEDAQDRQITELRKRMGQLRTRTINKIKHLLRKHNLEQAQPAKGLDTKRTRNWLATLPLRPIDRLEMDLLLAQWKLWDEQIETLEAEIRQRQCQSETAAVLATIPGCAAYGSLALAARIGTIERFPRPASLANYWGLTPGCRNSGETTDRLGSITKQGSAMARFILGQLVLHVLRRDPWMKAWYGRIKRRRGSKIARVAVMRRLATIIWHMVKNNEPYVVGGPPRRKLGGEAA

SEQ ID NO: 463405 - protein, 337 aa, unidentified
MKYSGIDLHSNNSLVTVTDETDRVVAEKRLPNELSRILAFLSPWREELIGVVVESTYNWYWLVDGLQAAGYKVHLAHCSAIKKYDGLKHSGDEADARHLAHLLRLGILPTGTILPPAQRAARDLARKRMQLVRSRTTHILAVENITARELGARISSNQVKRLTVDLIDRMPIASDVALAIKANLTVITAINAQIELLEKRLQQSVKAGSDYGLVSSIPGIGRVLATTILLETGPIDRFAGPGNFASYARCVDSQHTSNGKKKGEGNTKNGNKYLAWAFVEAAHFAMRYCAEAKRFYERKKAKTNNVVAIKALAHKLARACYHMLKERKPFDVARCFA

SEQ ID NO: 463406 - protein, 341 aa, unidentified
MKPELSVVGIDLAKSIFHLVGMDERGKIILRKRLTRGEVMPFMATLPRVLVGMEACGGAHYWARQLRAQGHEVKLMAPQYVKPYVKTNKNDLRDAEAIAEAVTRPSMRFVPIKNIEQQDLQALHRVRERLMGARTALVNEIRGLLAEYGIVLPTGVNAFRNALAAKLEAEHAKLTPLSQELFGKLREEFKKVEAEVAYYDEKLQALATTHPESQRLLTIPGIGPITATALIAAVGDVGGFTNGRQFAAWLGLVPKQHSTGGQTRLLGISKRGDRYLRKLLIHGARATLRWARTKTDSRSRWIRELLERRGWNRTAVAVANKNARIVWALLSRGGVYGESTH

SEQ ID NO: 463407 - protein, 427 aa, unidentified
MSEAESVKQEPQFAAFIGIDWADKKHVWRLQAVGSEKRESGELEHTPEAVEAWVGQLCQRFANRAIAVAVEQSRGALVFMLSKYEPLHLFPVPSTMAANMREALYPSGAKDDPRDADLLLDLLLQHRDKLRRLSPDTEATRRVQNLVEERRKLVDEKTEQTNRLMSHLKIYFPQMLDWFERLDTELVCALLERWPTLEELQKVPPAKLRAFFQKYHCRDQELIERRIVAIRQAIPAIRDRAVIEATSTLVKVVVQVIRSLVEGIANLDEKVEEAAAAHPDFFIFDSLPGAGQTLAPRLLAAFGSQRERYSSAREVQSYSGIAPVMESSGKKKWVHFRWACPKFLRQSFHEWAGHSIVSSVWARSYYQQLRSRGKGHHAAVRALAFKWIRVVFRCWKDGVAYDESKYLASLARRGSPLSAILGTGKTL

SEQ ID NO: 463408 - protein, 363 aa, unidentified
MKIMVGIDLHSNNALCGLMDESGRRLLHKQLPCDLAAILQLLKPYKKRIDTIAIESTYNWYWLVDGLQDHGYHVVLANPAAMQPYSGKKHTDDVSDAYFLAELLRLNLLPTGHLYDRKLRPVRDLLRRRMLLVRQRTTLILSFKSLNERTLGQRVPLARVKGMAPEEAQARFTEPADQLLAGEQITLMAHYTDAITKIEKHILEVAEKSPAYQRLQEMPGIGKILGLTIALETGDAKRFADAGHFASYCRCVKSVRQSNHKKKGENNRKCGNQYLAWAFVEAAHFACRHDERCRRFYDRKKQQANPVIATKSLACKLAKASWHVMVADVPYDAARVFGPGKTKDFGETGREPAKGSGHPSQQN

SEQ ID NO: 463409 - protein, 356 aa, unidentified
MSYDVKYIGMDVHKEAIVIAVLNESGKLVMESVIETKASSILQFLHGLRGELHVTWEEGTWAAWLYDLLQPQVQHIVVCNPRRNALLKEGSKSDKVDAGKLANLLRTGMLRPVYHGENGLRTLRELARSYQTIGKDLTRVMNRLKALYRGWGIPCTGTQVYAPRYREEWLNRIPHAGVRRRAELLYQQLDGLQGLRRTLRPELLAESRKHKAAKLLRQIPCIGPIRAARLIALIQTPHRFRSKRQLWTYSGLGIETHDSAQYRYVGGQVQRSKKPQQLRGLNQNHNHEMKEIFKSTATRASCSTGPFHDFYAALLAKGMKPEMARLTLARKIAAITLTLWKKEERFDAEQLKTQAA

SEQ ID NO: 463410 - protein, 339 aa, unidentified
MKNLFIGVDFSKEKVDVAIIFADGLTETAARVFNEFKTTVSGYKQLVKWVEQNSYGIDSSLWLFCGENTGDYSKGLCNFIYGKGYDMWLENAKSIKDASGLRRLKSDRADASMIAEYAMRNYDRAIMYEPLSESLAQLRELFLYRQMVIRHRCSFQVRRGEKKLTMEKSPVKTMISQSGRHIVSELNKEVEKIDKRIAELIKSDEELTEVFTIVTSVPGIGTQNAVCLMVYTDNFRRFNYDSRKIACYYGIAPFGKDSGTSVHSDPRVHYMANRQIKSMLTQAALAAVNFNPVIARYYMRLVERGKKKQVALNNVKNKLVHLVTAMARNRQLYTPEYKI

SEQ ID NO: 463411 - protein, 343 aa, unidentified
MDYFAGLDVSVKETSICIVDDAGKIVREVRVTSEPEALLQVLTNTIYRFKRVGLEAGPLSQWLFSVLAEAGLPVICVETRHMRAVLKAQINKTDRNDARGIAQMMRVGLYRPVHVKTLRSQKLRVLLTHRKLLQSKAIAIENDLRATLRNFGLKVSRVGTVKFEARIRELVESLPDVAVLVEPLLVVRRVLREQVGILHRRVLAIVRDDEVCRRLMTVPGVGAVVALTYRATVDVPARFRNSKAVGAVFGLTPARYQSGENDRTGAISRCGDEMTRVMLYEAAQSMLVRSAKWSWLKAWAMKIARHCGMKKAIVALARRLAVIMHRIWVDGSEFRWTREVAAA

SEQ ID NO: 463412 - protein, 527 aa, unidentified
MESPLFLLDLLTVHEPGRVWPRFDAGSSVAVIVLWCLVPGGKTGSGGGLLRILVRPEWVFPLGRFVFSRTPPGFRRWGQTMTTPSLPVLDPLAAFVDVGSEQMYVSIAGGPPEVFGTVTDQLHRLRDWLQERKVKSVAMEATGVYWLPLYGVLEAAGFKVVMVNGKQTRNLPGRKTDMKDCQWGATLHAHGLLQAGFVPPAQIRRLQDYLRLRADHLVSAAANVQHQQKALERMNVKLHDVISSLVGTSGSKVIAAILAGERNPDRLLALCDVQIQKKKAERVKESLRGTWAEEHLFALRQAVENWEHYQRQIAACDQRIEAVLREINGPDQPANPPPPIASSKRAGANAPEIDDLHSLLVKLCGGKDLTVLPAHTDYSLLQLIGEVGTDLTQWATEKHFTAWAGLAPGSHQSGKRKGSVRRKRNRAGRLFCVMARSLARSKHIALGGFYRRMAARRGGLVANIALARKLALLFWRVMVKGLSFAEAGLKAYEEQVLETKRRALCRLAKQLGRVVLPSLAEMQTKPA

SEQ ID NO: 463413 - protein, 322 aa, unidentified
MSQPNPLCVGIDVSKTTLDIAASSDIAQFTVSNDSDGFDAVITGLRRHSVALVLMEATGGLEVAVACSLQAEGFEVAVVNPRQARDFARAMGYLAKTDRIDARVLAQMAEVINHHPERKRFIRALPDAERQALAAMVVRRRQLIAMLVAERNRLHPSHPQNKKSINTIIKALEDELIRLEKEMDSHIRNHFKEIAERLSSIKGVGTMTVSALLAEIPELGTLSRREISALIGVAPVNRDSGTMRGRRTIFGGRAGVRSALYMAALVATRFNPVIKTFYVRLLAAGKAKKVALVACMRKLLTILNAMLRKNEEWDESYHHVAP

SEQ ID NO: 463414 - protein, 345 aa, unidentified
MKNSNVIGIDLAKHVIQVCKIDKHGELISNKAISPSKLKELLAKTVPSIVAMEGCGACHYWARLAQKHGHDVRVISPKKVKAFLQGHKTDANDALAIAIASIQFGMKFSQIKSEEQQALQTLETSRKFLGKELVALNNHIRAYLYEYGITLRRGHKSLRETMAIVLDDLDTRLPSCLKNTLRLLWERYQLTVEQFKEAEKYKAHLVGQLEPCKRLMDLEGIGKVCASMLYASMGNGREFKNGRQASVYIGLTPKQHSSGGKTFMTGIDKQGGNKELRAALYQGALSVISKLPVEPRTVKEAWLIELVKRAGVKRTCIALANKTVRTAWALLSTGKFYEPALLGRS

SEQ ID NO: 463415 - protein, 386 aa, unidentified
MPRLNDLSRSLVTLEQDATLIAVIEMSLTSWLVAGIVPGVERQPLKKLGVDERALLKLLHRWREEAEKAGHRIKRIAVAFEAGRDGFWLARWLRAYGIEARVIHASSVAVSREHRRAKTDRLDTELLKRAFLGWLRGERDHCRMVAIPTIKDEDAKRPNRERESLVGEQSRIVNRMKAALIRLGIRGFNPKLKKAAERLDGLRTPEGDPIPPNTLAELRRDMVRRRLVSDQIRQIENARLERLEHASGDGPHAMVRLLARVIGVGTETADMLVQEVLSRNMRDRRAVARYAGLTGSPDESGKKRHEKGLARSGNARVRRGMIQLAWRFLMFQKDSALARWFRARTENARGTRKTMIVALARKLLIALWWLVREGVVPDGVVLRPAQ

SEQ ID NO: 463416 - protein, 352 aa, unidentified
MQCIAFDSHKHYTWALVQDETGRVLREQRITHTRGALRGFLEEFEPGSPVAVETIGNWYWITDEIEAAGMVPQLVNARRAKVMSGSINKTDKLDARGLNRLQRSGTLPTVWIPPRDLRDARELPRTRMVLVRQRTKLKNRIHANLAKYGLKTNGATDLFGVRGRRILGQCLKELPVQTRYATQSLLDELDHLHARIGELEERMAELFSEIRALDHIKTLPGVGFILGVVILTEVGDVERFPSAGHLASYAGLTPRVHASGGRVRYGRTRPDVNHYLKWAYAEAANVAMMHRRRHPQRHVSRLYDRVKRRRGHPKAIGAVGRHLAEATYWMLTKHEPYRDPAAEQTEESKREA

SEQ ID NO: 463417 - protein, 419 aa, unidentified
MKSSKTKKIKLINKKTMLATIDIGKNVHYGYFRAPDGSELKPFTFYNYKKYFQRFWNKLCQFKRQHQLQDIVIGFESTGPYAEPLYHYLKKKPVKLVQINPMHSKRVKEMSGNSPNKTDRKDPRIIADIISLGHALTLVVPDGAAAQLRRLAHGRERALKARTVMLNQLQHLIFVIFPEFLSIMKNMSTKTAAYLLNHHPTPESIVELGVDDLTQVIKKVSRGKLARQRAEELFEAAKSSVGIGEGKDSIVLEIEHLNAMIDNENRFIQSLEKQMLCYLEQIAYSVSLLSIKGLGVVTVAGLIGEVGDFKKFDTHSEIMKLAGFDLFEVSSGQHQGQRHISKRGRALMRKLLFFAAINAVKTHGIMHARYHQMLDNGKPKIKALVAISRKLLRLIFALARDNTMYIENYDPTHKYKLAA

SEQ ID NO: 463418 - protein, 419 aa, unidentified
MVNPIVKICAGIDVHKDMLVVCLMKGELIDDQPTTCIKEFETLPDSLEKLASWLDSEHCEQVAMESTGIYWKPVWTILENHSYKLILANARDIKNKPGRKTDTLDAEWIAGLLRCGLIESSFVPDQDIRELRNSTRLYRKTKQDITRVKNRIHKILEESGIKITHQISDVFGVTGIKILEKIIYDEDITYSFLLQITSTFGANKLRKKIDEIYRGLQRKVSPTNLKLLQLLYNHYKELVSMLNELEDIISKQIMPYSDEEELLCTIPGISKTAARSILAEIGPDMSVFPNDKHLSSWAGICPGNNESAGKKKKGRTTKRGSKALKGTLCESAWSSVNNVQSIFSKIYGAYVRRMGKQKAITAVANKILQVCYVLLRDHVTYQEIEPIQTKAIKQRKLNKMISMLENEGYEIVLKSPEIA

SEQ ID NO: 463419 - protein, 353 aa, unidentified
MSNIRYVGMDVHRSITVIVVLDAAGQVESRSQVKTKAENLRDFFRGISGKVNVVFEEGTHSAWLYKLLKPLVASATVCDPRHNKLIEDGNKSDDEDAETLARLLRLGAVKAVYKGDDQQQQLKEICRAYDNLVEDSTRVQNRLKALYRGRGIDCSGHALYRTDQRSDWLEKLGEEAARFRAESLLEQLESISQLRKQAKQRLVAQARAHADYRLLVELPGFGPVRVAQLIAEVGTPHRFRTKRQFWPYCGYAVVTRSSADYQFVEGKIVKQRKKVSTRGLNRNHNPQLKQVFKGAALTALRHEAVKAYYQRLIDSGVRPELARVSVARKLASIALTIWQRREEFDAKKAFAQD

SEQ ID NO: 463420 - protein, 330 aa, unidentified
MEVIGIDVSKEHLDVAMLDPACKVLLEQRVANDGKALGRLLRSMLRKKVLREDALVCLEATGHYGYRAIMTCMEMGLHVWVAHPVDIQLSLGMQRGKSDKVDAMRIANYALKHPEKALVIDGNYLRFEELKALLASREFFVRERAKCRGQLTDNLRFMPAGAAPIIERELKRQIRALDKSLAELDAAIDAFIKADGQLSAKRDLLLSVSGVGPAVANEIVAVTRGFTRLINPRKLACYAGLAPFEHSSGKSIRGRTRVSHRANKRLKSLLHLAAMASVRVHGSIRDFYRRKLAEGKKPISAINAVRGKIVHHLCAVLRSGKPYQPYLQEP

SEQ ID NO: 463421 - protein, 452 aa, unidentified
MEEKEISMEIVNPQAAGIDIGSRSHWVAVGQKEGDVREFGVFNQDLFEMAEWLKERQVKNIAMESTGSYWQNLYAVLLSKGFSIILCNGKYTKNIKGKKTDIKDCQWIQRLHSLGLLSTSFLPDGKTEQLRTYCRQRSNLMYLAASTSKKMQKNLRLLNLRLDVVVKDICGLTGLAIIRAICAGETNPQKLASLRHSNCRKSEDEIANALQSNGRKDYLFALGQELDTYDHLQQKIAECDKMIQQTLNEIIDNDDNKKQHRIEPKSYKRPQKNTPKNIDLNLQSYQMFEGTDFLAIEGISFSTVLSLMSEIGVEGIRKFPTAKHFTSWLRLAPNNKVSGGKILSSKVPKGSNRLKIALRSAANAIGNLKESTPLRDFFHRINFRKGRVAAISATARKLAVIMWNMVVKRIPYFNPHEYLYLDQKRKLGIVKRIKKQIAKFELTVEDLNLIPT

SEQ ID NO: 463422 - protein, 371 aa, unidentified
MNDLIRIGMDTSKSVFVLHGVDAAEQPVLRRKLRRRQVVEFFDKLPAMKVGIEACGGAHHWARELGALGHQVLLLPPQRVKPYVARNKNDAADAEAICEAMSRPRMRFVPMKTTEQQAALMLVGVRDQLVARRTELSNAIRGYAAEFGLTAATGLDKIAPLLERLATDRTVPALAKELFATLGEDYAQVKLKLRTIEAKLMAWHRQNELSRRLAEIPGIGPIGASLLAMKVPDPKAFRCGRDFAAWIGLTPKDHSTAGKTRLGVITRAGDEALRSVLVVGATSVINQARRQKGHPSPWLVALLKRKPAKLAAVALANKTARIAWKLMVSGQHYNPHLAPKTCFVPPTGSVAPCSRRQGRFAPPAAVACGQP

SEQ ID NO: 463423 - protein, 398 aa, unidentified
MTESSDYESVQVFIGVDVGKDTHHAVAINRSGKRLFDKALPNDENKLRSLISDLKQHGQILLVVDQPATIGALPVAVARSEGVLVGYLPGLAMRRIADLHAGEAKTDARDAAIIAEAARTLPHALRTLKLADEQIAELSMLCGFDDDLAAQTTQASNRIRGLLTQIHPALERVLGPRLDHPAVLDLLQRYPSPEKLASLGEKKLAAQLCKLAPRLGKRLAADIAQALAEQTVVVPGTNAAAVVLPRLALQLITLRKQRDEVALAVEQRVLAHPLYPVLTSMPGVGVRTAARLLTEVACRAFASVAHLAAYAGLAPVTRRSGSSIRGEHPSRRGNKALKRALFLSAFAALRDPLSRAYYTRKMSQGKRHNQALIALARRRCDVLFAMMRDGTFYTTQAS

SEQ ID NO: 463424 - protein, 342 aa, unidentified
MTEVSTIGLDLAKMVFQAHGAGASGGVVFRKTLRRAKVLDFFREQPTCVVAMEACGGAHYWAREIGRLGHEVRLIPPAYVKPFVKRQKNDASDAEAICEAAQRPTMRFVAVKSEGAQASAAIFRTRDLLVRQRTQLVNAIRGQLTEYGLVAAKGPANLPKLLELADGAGSALPQGARAMLDVLADMAAVLTARVTELDREIARRAKDEDVPARLMTIPGIGPITATAIAALAPPIATFRKGRDFAAWLGLTPVQRSTGGKQKLGATSKMGERTIRRLLIIGAAALVRQTSRREPPPGSWLARMLARKPRMLVITALANKMARMIWALLTRNEVYRAPAVIAA

SEQ ID NO: 463425 - protein, 411 aa, unidentified
MRIVYKRCCGLDVHKKVILACLLVLDRDGELRKEIRKFGTMTTDLLDLLDWLKQAGCTHVAMESTGVYWKPIYNILEGHVEAVVVNAQHLKGVPGRKTDVLDSEWLAECFQLGLLKASFIPPAPVRELRDLTRYRTSLIAERARAANRLQKVLEDANIKLASVATDIQGVSSWSMLQAIVAGDTDPEALADLAKGLLRKKRPQLVKALTGKIKPHHRFLIAELICQIEYLEETVGRIGKEIEERLRPFEEDISLLDSVPGISRQTAEVLLAEMGWDMTRFPSDKHLASWAGMCPGNNESAGKRRTGKTRKGSRWLRHALIEAAHGAARTKNKYLKAHYHRVAAHRGKKKALVAVGHSILIIAYHLLTRRQQYSDLGANYFDERDRTSVRLRCVKRLEKLGFRVDLQPSVLR

SEQ ID NO: 463426 - protein, 364 aa, unidentified
MQCISNNTELSSLEGTRCQFNGSKAVIKLGIDVHQEFYTVVVQVNGSNPKPPQRFRKEGFLHWAAKLKGRGAQVHAVYEACGFGFGLQRQLSALGIECYVVCPQKLDERNRRVKTDGLDAKALCLKLDRFVEGNREALALVRVPTEEEEQLRAIHRQREQLVKARKIMEAQGRSLMVNHGIEPVNKWWKRRTFAELAVPAWMKELLSNSQPILLALEEKIRALSVQLQAAARPNQPRGFGALTSVVIDREIANWHMFKNRRRIGSYTGLCPGEDSSGATRLQTCVTKHGNPRLRAALVEAAWRLVRFQPNYKPVVKWRSTLCKGALATGAARKRAIVAVARQLAVDLWRIRTGRVRAEQLGLLN

SEQ ID NO: 463427 - protein, 350 aa, unidentified
MTMVGGLDVHRQQITFDYVDSDGLVRWGQIRPATRKTLRAWLAEHCPDGAGEFALEGCTGWRYVSEELAAAGVGVHLGDPAEIAALRGPKKRAKTDRADARLLRTLLLEGRFPESWIPPAHVVEMRTLGRLYYRLMDERRAWQQRIHAQLFHQGCPPVATLLSAAGRDTLGRAELSVAGRQYVETALRRIDELTDQIDPLRTQLVNFAQHQTGCRALQRHYGIGWLCAVIIWAEVGDVRRFRSSDQPVRFAGLDVTVYSSDAKRSPGHLSRQGSPELRWAAFEAAKSAAGRGSPDYGYYHELAAKHDHKNGKNPTLAVERKILRRCYHTLRALGDAALAVPSPQGQEVAA

SEQ ID NO: 463428 - protein, 344 aa, unidentified
MQITTMGLDLAKTVFQVHGVDARGKTVLRKSFRRAQLMPFFAQLPGCLVGMEACGSAHYWARQLTKLGHTVKLMAPQFVKPYVKTNKNDARDAEGICEAVGRPNMRFVPVKTLEQQGLLSLHRARQGFVGARTAQANQIRGLLGEFGVVMAKGIRTLERQLPGILEDAQNELCSGTRALLNRLYEHFRELDRQVQELAEQIQLWHRQTPQSQRLEKIPGIGPLTASALVASIGDAGNFKNGRQLAAWLGLVPRQSSSGGKERLLGISKRGDVYLRTLLIHGARAVLLSLKRRGGQAEGWLARLAQRRHPNIAAVALANKNARIVWALLRHQRDYQAGYRSTAAA

SEQ ID NO: 463429 - protein, 326 aa, unidentified
MAAVPPADRYVGIDVSKNTLDVYLLPQEQTFTAPNTAAGFTRIIDRLDDEVSTLVVVEASGSYHLQLTIALDAAGMTPAVINPNWIFHHARSQGKRAKTDRGDARQLALYGQQHQLRPRPLLDATGRELASLVARRADLVKIGAMEKARQHTAAGAALTDIEHHIAYIDGRVKVLERSIRAVVAADPFWKRRVAILRSAPGIGPVLSVLLAVRLAELGVLDRRQIASLAGVAPHTQDSGAHRGRRVIGGGRRDVCKGLYQGSVVMRTRNPPMRAHYEQLAARGMEPKPALIACARRMVGILNAMVRDDLLWSETRVGQGAFMTPSP

SEQ ID NO: 463430 - protein, 405 aa, unidentified
MLFAGDDWAEDHHDVEVQDGSGRVLGRARLGEGVAGITRFHELIGRFADPDAGPDQVVIGIETDRGPWVAALIAAGYVVYAVNPRQAARYRERRGTSGAKSDAGDAHMLADMVRTDSHQLRAVAGDSGEAQAVKVVARAHQALIWERTRHVLRLRSALREFFPAALEAFDDLTAPDALELLARAADPASAARLSIAAITAALKRARRRNAAEKAAQIQAVLRGHQLAQPQVVTAAYAATVRAAVAVISVLNEQAGVMEAQVESHFGRHPDAEIIVSQPGLGMVLGARVLAEFGDDPDRYAGARARKNYAGTSPITRASGKKKAVLARYVRNRHLADALHQQAFCALTASPGARAYYDELRARGTSHHAALRQLASRLVAILHGCLKTSTLYDEATAWRHRLDDAA

SEQ ID NO: 463431 - protein, 353 aa, unidentified
MQRPKQGQVVVGVDTHKEIHVAAAVDWQGTLVGEECFPTTRQGYRQLESWARSLGEVLRVGVECSGSYGSGLTRHLAKNGFAVPEVTFPDKTVRRKRGKDDFIDAEMAAEAAFTGARTVTPKSRDGMVEALRMLQKTRSTAVAARRVALQMIRADVISAPEELRDRLRGMTRMQLIRHLVATRPDATDFRTPLGAAKIALKRLAKRYVDLDDEVSELDDMIAAILADAAPLLVQLKCVGAQSAAQLMVTVGDNPERLRSEASFAMLCGVAPVPVSSGMTYRHRLNRGGDRQANSAIHIVAIGRLRTDERTKEYVAKKMAEGHTKMEAIRCLKRYIAREVYYTIKKQSELVNCS

SEQ ID NO: 463432 - protein, 429 aa, unidentified
MPDPLLVGLDVHRKTQSVCVMNVLGAIIDDELTVHNTPAGAKALADYLHALANRGGYDALHIAAEATGWYWWHFFRALSSDPRLQQSPLALYPLNPRLVAKLKQTYSDDDKTDPGDAFVVADRLRMGRDLPYPFSDDLRYLRLRLLTRHRRHLVRDLVREKSFCLAHLYLKASEYTHLQPFGDTFGATSRAIIREYPSMEEIAAIPLDDLVETIDRLGKRRFADPLQAAQKLQAVARLSYTLPEALQGPVNLILRQTLQQVTALERLIHQTDAAIAETMEGFPNTLQTIPGFGPVFAGGVIAEIGDLSRFQHDQTKVAKYAGLKWRRTQSADFEAEETPMTQAGNRYLRYYLCEAANSVRMRDAEYQAYYERKYDEVRMHQHKRAIVLTARKLVRLVVRLLTTNQPYRPRRAQLRPRMICGDSASPPSV

SEQ ID NO: 463433 - protein, 395 aa, unidentified
MFIVGIDIAKRSHEAIIIAEDGQVVRKAFSFRNNCTGYNLLLEQVRRLTLVKSQIVFAMESTAHYWLALYARLLKDGYTVMVLNPIQSHSLRELYIRKAKTDARDSLIIADLVRFGRCKASNVPQDKILALRELCRSRAYLVDMAADLKRKLIALLDRIFPEYESLFDSVFSKASIAVLSKYSTPKKVKNANLRKLTDILMESSNGHFGEWKAHQLKEAACSSFGIDDSGGVYSTSLGMFLEQILSLTAQADSLEKQISVFFQEFNNPLNSIPGVGTVLAATILSEIGDITRFSSADKLLAYAGLDPSVKQSGEFKSNLNRMSKRGSPYLRRAIWLASTVAVHRDPMFQTYYEKKISEGLHYMNVIGHVSRKMTAVIFAVLRDGQPYQPILQSAG

SEQ ID NO: 463434 - protein, 347 aa, unidentified
MRFYNRQHQYYCGVDLHVKTMYVCILDATGQVLVHRNVPSTPEALRSVIGPYRTELVVAAECMFTWYWLADVCAAEGITFVLGHALAMKAIHGGKAKNDKIDSHKIASLLRGGLLPQAYVYPAAMRSTRDLLRRRLHLVRKRGQLLAHIQNTRAQYNLPEFGRRLAYPGNRDGVVDHFADPSVRKSIEVDLALIGQYDALVTDLELTIVREAKRHDGDAFHRLRSVPGIGKVLALTILYEIHDITRFDRVQEFASYARLVKCQKQSGGRTLGTSGAKMGNVHLKWAFSEAAVLFLRHTKEGKTLLAAIAKKHGKGKALSILAHKIGRAVYYMLSRGTVFSTEKFLAA

SEQ ID NO: 463435 - protein, 403 aa, unidentified
MSFKIFKFNCCGLDVHKTWIYACIGITDSNNRTEYKQARFSSFSKGLHQLCVWLAKYNCNDVCMESTGKYWIPVFNILEQHKIRVTLSHPKYTKPMKGNKTDRKDAKWICDLYMCGMVKPSFIPPADIRELRDLVRYRFKLTCMITGEKNRAQNCLTVSNLKLDDVFSDVFGKSSRSITEQILQHPGEKFDVSPFVDSRCKTPIEEIQAAVDGNISKEQDVKLRQCLDHIDELQKHISEVEQEILRLSDKYEAALNLIRTVPGFDKNPMTAIQVLSEIGGDMSVFLTAKHLVSWAGCCPRNDKSDRKIKSTRISCAGSYFKPVLVQIANALIKSKKHFEFTTRYKRIKTRRGHKKAIIARCRMILTAIWHILTDLKPYTSDGFLESRPVKKEKVLTTSQALIF

SEQ ID NO: 463436 - protein, 320 aa, unidentified
MGQEFKSFVGIDVSEDWLEVCVLPQAVRWRFAQQAQGWQALADLVAAQPAPLVVMEATGGLERPAARLLNGAGIAVAVVNPRHTRQFAKGLGWLAKTDRLDAALLARYGALAEPTAHPPPGEAQARLQALVLRRRQLAQQVNAEGNRLRRATEAVIRESLSAHLAWLKAALAALDGHIAAALAAQPEGSERATILASVPGVGPVATSTLLALLPELGRRDGKAIAALAGLAPIAQDSGKQRGQRCIQGGRAVVRCALYMATLVASRHNPVIRAFYQRLVAAGKARKLALTAAMRKLLVILNAMLRDRTPWNPDHAAATNL

SEQ ID NO: 463437 - protein, 401 aa, unidentified
MVSDFMKGRYNLMKIFVGIDIAKLNHFAAAISSDGEILIEPFKFTNDADGFQLLVSKLESFDKNSIIIGLESTAHYGDNLVRYLVAEFYQVCVLNPIKTCQMRKNNVRKTKTDKVDTFVIAKTLMMQDDLRFITFFDLDMMDLKALGRFRQKTIKQRTRLKIQLTTYVDQVFPEIQYFFKSGLHQHAVYALLKEAPSPKEIASMHMTHLANLLKVNSHGHFTKEQAKELRVLAQKSVGANDSAISIQITQTIQQIELLDSQLEKIEAEMTDIMKFNDSVIMTIPGIGYINGGMILGEIGDIHRFSNPNKLLAFAGLDPSVYQSGNFQAKTTRMSKRGSRVLRYALVNAAWNVVRNNATFKAYYDAKRAEGRSHYNALGHCAGKLVRVIWKMLTDEVEFNLE

SEQ ID NO: 463438 - protein, 379 aa, unidentified
MGKSIRFVGLDVHGETIAGAVAEEDGSELDFGVIGNRPEVVRRLIKRLGSVEKLRVCYEAGPCGYVLYWQLTGLGVDCQVVAPGLVPQKPGDRVKTDRRDAKKLARMYRAGLLTAVWVPEADDEALRDLVRAREAAKKDELRARHRLGKFLLRRGCRAPQAVKAWTKRHWQWLQGLRLERPAQEVVFIDYLHEVDHAGERLVRLERAIDEAVERVPASKRAVIEGLQALRGVSKVTAVTVYSEVGELSRFARPKLMMGYTGMVSSEHSSASRIRRGAITKTGNAHLRRVLVQAAWAYCRRPNLSPALKKRQAGLSEEIKEISWKAQHRLYGRYRRLVSKGKTPQQAITAVARELVGFIWAIGVHVEGQIRQESQGHAAA

SEQ ID NO: 463439 - protein, 386 aa, unidentified
MPQLNDLSRSLVILEQDATLIAVIEMGQSSWLVAGIVPGVERSPLKKLAVDESALLKLLNRWREEAEKAGHRIERIAIAFEAGRDGFWLARWLRARGIEAHVIHASSVAVSREHRRAKTDRLDTELLKRAFLGWLRGERDHCKMVAIPTLAQEDAKRPNRERESLVGEQSRIVNRMKAALARLGIRGFNPKLKKAAERLDGLRTPEGEPIPPNTLAELKHDMERRRLVRSQIRDIEGTRLERLKQAPSDGPHVMVRLLARVIGVGVETADMLVQEVLSRNLRDRRAVARYGGLTGSPDESGKKRREKGLARSGNARVRRGMIQLAWRFLMFQKDSALAHWFYARTKNAPQTRKTMIVALARKLLIALWRLAREGAIPEGIVLRPAL

SEQ ID NO: 463440 - protein, 341 aa, unidentified
MVHVGLDLSRTRLDVHVMDEAGAPLAVTTAAPDRGGLAVLADRVAGFGGPVYAAIESMNGARFVHDQLELAGWQVEIADAQKVKGLAPLACKTDKIDSWVLAELSRRDLVPAIWLPTPAVRAEREQARWRLHLVRHRTALKNRIHATLLAFGHPCPVADLFGVGGRALLHRLELPEPWAADTAAALQLIDQLDTEITTCERALRRLGADHRYVPLLMTTPGVGWVLGYTIAAEIGDIARFPSPTKLAGYTGLCPRVYQSGGKDHRGPLSKNGPKYLRWALIEAATHAGRHPVYAERYRRTKTRLGRQRGPKIAQVDLARRLAEAIWHMLTTNKPFAPAGAA

SEQ ID NO: 463441 - protein, 409 aa, unidentified
MRIIGLDIHRAFAEAVAWDDGKLKRLGRVDMRRPLLEAFAKKLSKEDVVVIEATGNASSVAAVIAPHVKKVVIANPKQVRIIAHAKIKTDTIDASVLAQLYASGFLPEVWIPDEPTQALRRQVTRRNQIVRQRSRLKNIIQSILHSHLIPSCPHADLCGASGRAWLFHQVLPEDERLAVERHLREFDRLGDDLKVIERDLARSALGDEGVKRLMTIPGVDMVVALAIVAAIGDVGRFEQSQKLVSYLGLNPSVRQSGPGPAYHGRITKQGRGHARGMLVEAAWAAARAPGPLRAFFLRVRARRGQHVAAVATARKLAVLIWHLLSKGESYVWARPALHARKLRDLELKAGYKAARGQRGAAHAYNIKSHRDQERRWVEQAETAYARFVSGWNPRGPKRVRTGAATEVRR

SEQ ID NO: 463442 - protein, 406 aa, unidentified
MNAVGIDVSKGTSTVCVMRSFGEVVASPFEVAHTVGELGKLADLLKSLNGETKVVMECTGSYHLPVAHALHAEGFFVSAVNPVLIHGFGNNTIRKRRNDKADSIKIANYALSSWLELPRFAPEEEIRQSLKSFSRQYSKYNKVKTMLTNNFISLLDQTFPGLKELFTSPARKSDGHEKWLDFAARFWHCECVGGVSLNAFTEAYRKWCRRSGYNCVGAGEIHALSRQCAAVMPKNNDTKSLITLAVAQLNAVAESLARLAREMKRLAEMLPEYPVVLGFFGVGEILGPQLMAEIGDVRRFAKKSSLVCFAGLEPTDNQSGKFHGNEPISKKGSPHLRKALFQVMSCLLQHSPAGDPVYQFLDRKRAENKHYYSYMNAGAAKFLRIYYARVNEYLDGEDALSMGCTL

SEQ ID NO: 463443 - protein, 408 aa, unidentified
MSIVFGIDVSSRDSSVCVLQSGVTREYKITNDTIGFKTLLIDLKEYAEHPQIILEATGIYSRRITRFLDEYDYDYVLLNPLKAKKEINQGLRRNKTDRNDAYHLALAQDRNQHQPNRKETEAYHQLQSLSRAYEELTHDIISSKNRLHKYLQLTFPELETILNNSRGVNYWYLVELFPHCQDVRNLEVSTIAKQIKDFKGYGINRAQKLAIKLKHLADLAYPAVDQDDPERDEVVYYANRLLRLTADRERRSEEMIKLAKTLPNRDLEILMSIPGIAEITAVRILAELGDIRRFSNPNKINAFVGIDPGRYQSGEKDSSLRISKHGNAVARKILYPAIGQIDLAAKTSPCHIADYYERKKQFSQTKGFKKIAIASIHKLLRTIYILIITDQMYDYNVANNNQKDFCRN

SEQ ID NO: 463444 - protein, 343 aa, unidentified
MDYFAGLDVSVKDTSVCIVDEAGKIIREVKVASEPDALLAVLNNLAYHFKRIGLEAGPLSQWLFSALAEADLPVICVETRHMRAVLKAQINKTDRNDARGIAQMMRVGLYRPVHVKTLRSQKLRMLLTHRKLLQAKAIAVENDLRATLRNFGLKVGTVGAVKFEARVKELVDNFPDLVELVEPLLVVRRVLREQISILHRRVLAAVRNDEVCRRLMTVPGVGPLVALTYRATVDVPARFRKSKSVGAVFGLTPARDQSGESDRPGAISRCGDEMMRTTLYEAAQVVLLRSAKWSWLKAWAMKIARHRGMKKAIVALARRLAVIMHRIWIDDTEFRWTREAAAT

SEQ ID NO: 463445 - protein, 411 aa, unidentified
MATETTNVIAGIDTHADTHHVAVINEHGKPLADREFLAVGSGYRKIVEFITSHGTVTAVGVEGTGSYGAEIARTLRGEGLCVLEVNRPNRASRRLKGKSDPLDAYQAAGSVLDGRTKSVPKAKDGPVECLRILRAGRTSAVKARTAAINQIKGLLVSAPDRLRAKYRGLGTSAMITALQRTRPSGHMADPEFVCLLTLKALATRCQSLAAEIATADAALQEILDTYAPMLCDLPGVGTEVASQLLVTVGDNPDRLGNEAQFAALVGVAPIPASSGKTTRHRLSRGGDRNANHALYQVVLVRMASCQRTKDYVAKRTAEGKSKREIMRCLKRYASREIYRQITNPQAAPDNTDLRQMRTTLGCTITTAARELGQWPSKISLLERGLLRNDDLAATYRQWLTQQTTSIMNPRP

SEQ ID NO: 463446 - protein, 414 aa, unidentified
MEVLYPRCAGLDVHKDVVVACMRIAQQDGKALQEVRSFATTTTELCGLVDWLAERECTHVVMEATGVYWKPIWHVLEESFELVLANAQHVKNVPGRKSDVNDATWLADLLAHGLVRGSFVPPTHIQEVRDLSRTRKQLTREIIQHTNRIQKTLEDANIKLASAISNVMGKSGRAILEAIIAGETKPEKLVELCHGRLKASRKELLEALRGRVTAHHRFLLKLHLAQVDQLTSGMRELEARMGEVLAPFQEHVDNLTTIPGVNDTTARVLAGEIGLDMSRFPTAGHLISWAGLCPRLDESAGKHRSRRIRKGAPWLKTALVSAAWGGIRTKSSYLRAQFLRLKSRRGAKKAIIAVAASMLTAAFYIIRDRVVYRDLGSDHFTKRNPEHAAKRLIKRLEGLGFAVETRPTTAFVSI

SEQ ID NO: 463447 - protein, 341 aa, unidentified
MQITTIGLDIAKNVFQIHGIDSNEQVVVRKQLRRGQVIGFFQGLAPCLIGLEACATAHHWARELAKFGHDVRLMPAKDVKAYVKRNKNDAADAAAICEAVRRPTMRFVPVKSTEQQAQLMQHRARDLLMRQRTQLINAIRAHMAEFGVTAPQGREGIKQLLAIIVDDEDRRLPVDARASLMILAAQLQAMQTTIGALEKRIVARHRANEVSKRLQTIPGVGVIGATAIVATVADPTAFRSGRDFAAWVGLVPRQDSTGGKPRLGSISKQGDRYLRRILVGGAVSILRRAKLNPERYPWVIRLLARRPFKVVAIALANKMARVAWALLAKGETYRRPRLAAV

SEQ ID NO: 463448 - protein, 361 aa, unidentified
MFTERTSVGLDVHARSVVAAAIDGDTGEVFRKRLTPGNDDVIGWVRSLPGPSAVVYEAGPTGFGLARAFTTAGIRCEVAAPSKIQRPAGDRVKTDARDAMLLARLLRLDDIVSVTVPSVAREAARDLVRAREDVRGDLMRARHRVSKLLLRQGIVYYGGHAWTGTHLVWLRRQHFDAPGLQLAFDAEHEAVLQAEARRNRLDKAIEAMAADSEYTPVVHRLGCLRGIATLTAFGLAVEVGDWDRLTGASIGAYLGLVPTESSSGQSRSQGSITKTGNTHARRLLVEAGWQHLKPYRTPGATMRARWELAPAAARARGHAGNQRLHQRWVHFTDRKKNPVIANVAIARELAGWCWSLAVMDD

SEQ ID NO: 463449 - protein, 395 aa, unidentified
MRVLGLDVAKSSVAGCLLTERPTNPRQFYYECNFFNLKADAAGIRAMLELKPDVAVLEPTGINYSRLWGTHLARSGVKIFLVGHKELRRFRENHLALPDKDDDADALALACYYFDYFNDVRRFVQIREPITVRIRELILRLAHLNRVQSPIVNRLRQDLAWQFPEVALVRSRRGSSNVPVLWGWIAGERSSNRYDYLYKNTVGLGLNTFAKYHAQRLCHIQREEQEIEEELLQLIADPKFDLYRLVFKHFGFGDRVQAVILSQIYPLESYFGSDGKPEVIIRKGRKSGSYTKRYLSLRRFQKALGMAPSEESSGDSHRKKVSGGSHLCRRSLWQWVFTRIEVRKNRPKNDICESLGQQLDQEKAAGRPVRLVRSRIAAKATKLLFKELVQLFHKP

SEQ ID NO: 463450 - protein, 341 aa, unidentified
MKNKSFIGIDISKNVIDVSIFCEETPIKDFSHDVFNNSRKGFGEMCTWLKKNHVVLSNCLFGMEFTGSYSMELEKFLNARNYQFCMLSTHVVKHYPMGPKDKSDKIDSAKIADFLYRYNGTECVKPYNMPDKTMQRLKALMNERKFLVEQRTCFMNRRQLCITKEDAQLYDGYIKKFSRDIENIELEEQKLLATDDSLLSTYKNLLTIPGIGFVNAINVIVITRNFTAFETARQYASYVGVAPHFRTSGTSVKWRPRPSARCDGQAKADLSMAASVAVQCDAELQSFYNRKLGGKQDSDTKRKALNAVKFKLVLRMFAIGKQNREWEPLDSKSSNEKLAIS

SEQ ID NO: 463451 - protein, 411 aa, unidentified
MDVLYPVCCGLDVHKKTITACLRFASARARAEEVRTFGTTTRELLRLADWLTAAGCTHVAMESTGVYWRPVYHILEASFEVLLVNAQHVKAVPGRKTDVKDCQWLAQLLEHGLLRGSFVPPAPLRELRELTRYRRQLVQEHAREANRVQKVLETANIKLGDVATDVLGVSGRAMLHALIAGERDPERLADLARGALRQKAEALREALVGRFTLHHAFMLQGLLDHIEFLDQQIARFDERIEEQTRPFGPAIERLDTIPGVGRRSAEQILAELGDDMRRFPTAAQAASWSGICPGNHESAGKRRSGRTRKGNAWLRSTLVESARAAVRNRGCYLSAQYHALARRRGDKKAIVAVGHSILVAAWHILRDGVEYRDLGPDHFDRLNRERLVQYHTRRLAELGLTVQLPGAQATA

SEQ ID NO: 463452 - protein, 422 aa, unidentified
MRRFECFTADLHRLAEWLHNCGVKTVALQSTGVYWIPLYDILEERGFEVYLVNAQHTKNLPGRKSDVQESQWLLKLHTYGLLNNSFQPPSKIRTLRTYWRQRLQHVTGAATCVQRMQKALTQMNIQLANVISDLSGVTGQMIVRAIIDGERDPWKLAELSHPRIQASRTEIAKSLEGTWRPELIFVLQQELEMYDTYQRRVGECDQQLQKHLARFANTVAPPAKEDLSPKKKKKQNKNNPHFHLAEELQRITGVDLTRIDGVDVFVAQTMISEVGLDMSRWKTEAHFASWLGLCPDNRISGDKVLARGTRHVLNRAATALRLGASTLLKSQTYLGAQYRRLRSKLGAPKAITAMAHRLARLVYRMLKYGQQYVDKGAEYYERRNRQQQIEVPHKEGSPTRPAGHSGPSLNYHKEVSGESGSR

SEQ ID NO: 463453 - protein, 363 aa, unidentified
MIIIGVDFHPSGQQIAFLDQETGECGERQLNHSDGEAEKFYRELKQRGVSVRVGMEATGHSRWFERLLAELGFEVWIGDAAEIKRQRVRKQKTDREDARLVLKLLLENRFPRIWVPSPENRDLRQLLWHRHRLVQMRTRIMNQLQAVAMNEGYRWKKKLFSAQGRALLEKLSLAPWASRRRKELLELLDQLDPKIAELTTAVEREADKRPEVVRLMTHPGVGPITGVAYVLVIGTPGRFPCGKQIGSYIGLIPCEDSSAGKQRLGHLSKQGNALLRYLLGEAAQAAARCNPDWRRRYVHLAMRRHKNIAKAAMARKLAVRLYWMWRNGWNYSQFVEFGSHAGKLATGHGVKSSVVHMIGHPAP

SEQ ID NO: 463454 - protein, 387 aa, unidentified
MPKQNDLSRCLVALEQDATLIAVVEMGQSSWLVAGIVPGLDRYPLKKLGADRDALLQLLHRWRNEAAQAGRTIERIAVAFEAGRDGFWLARWLRAQSIEAYVIHPSSVPVSREHRRAKTDRLDTELLKRAFLGWLRGEPKHCSMAAIPTLEEEDARRPGREREVLVGERTRIVNRLKANLARLGIRGFRPNLARAQSQLEALRTPEGLAIPTNTLAEMRRDMDRLQFVKRQIKEIEKTRAERLAKAPSEQRHAMVRQLMRVVGVGVETADTLVQEVFSREIRDRKALARYAGLTGAPDESGQKRRERGLAKAGNARVRRGMIELAWGHLTHQKGSPLTAWFWRRTADARGGTRKTMIVALARKLLVVLWRFATTGETPAGLRLRPAA

SEQ ID NO: 463455 - protein, 395 aa, unidentified
MFIVGIDIAKRSHEAIIIAEDGQVVRKAFSFRNNCTGYNLLLEQVRRLTLVKSQIVFAMESTAHYWLALYARLLKDGYAVMVLNPIQSHSLRELYIRKAKTDARDSLIIADLVRFGRCKASNVPQDKILALRALCRSRAYLVDMAADLKRKLIALLDRIFPEYESLFDSVFSKASIAVLRKYSTPQKVKNAHLGELTDILMERSNGHFGEWKAHQLKEAACSSFGIDDSGGVYSMLLGMFLEQILSLTAQADSLEKQISVFFQEFNNPLTSIPGVGTVLAATILSEIGDVTRFSSADKLLAYAGLDPSVKQSGEFKSNQNRMSKRGSPYLRRAIWLASTVAVHRDPMFQTYYEKKISEGLHYMNVIGHVSRKMTTVIFAVLRDGQPYQPILQSAG

SEQ ID NO: 463456 - protein, 418 aa, unidentified
MDRTKYIYIGMDIHKETHTAVLLNYLEEKLGEIKIKNTLQGFHKLEDYILKQKGELIPIFGLEDITHYGRNLSIFLLDRDYPVKEVNPSFSYMERMSYASTRKNDTWDAQCISAVLMRRSHLLPDANPQDYYWTMRHLVNRRNALVKASTKLMQQFHEQIQTAYPNYKGFFRELDCQTSLTFFEHYPSYKHLENISEEELGAFLRIPSNNSCSTNRARKILDLVAEETTKERDYQFARDTVIQSITRQLRAYQREIKELERTERQMYQELGYQLETMPGIDIVTACALVGHIGDIQRFFNGDKLANYAGVAPLRFSSAGKGKDLQNKSQGNRKLYSTLYFLAIQQIYLTNKGEPRNPVFRAYFERKVSEGKTKIQALICIMRKLIKIIYSMMKHKTAYDLPKIEEKMASDEKCAKMLV

SEQ ID NO: 463457 - protein, 354 aa, unidentified
MRIVCALDVHRRQITYAIVDVRSGELSRGRITPATRESVREWLARFDSLHDVHFALEGTTGWRFVAEEVARAGHRAHLADPAETAVKRGRKRRAKTDRADCDLLLRLLSARELPESWIPPAQILELRTRVRLRKTLVDERTAWQQRLQAQLFHQGVPAGVRPRTRAGREALASVELSPAGRELVALALRMIDRIERELEPLDRALSLYARCQPGCRELITRLYGVGPVTATAIVAELGDARRFGCSDDAVRHCGLDVTVHQSDRKRAPGHLSHEGPELLRWALFEAAQQACRPASPDYDYYRQVARRIDHNRACLSVARKLCRRAFHILRELGAEALAPIEPAPPGEEVTPAAA

SEQ ID NO: 463458 - protein, 426 aa, unidentified
MKVLYERVAGIDVHKKMIKVGIRVPGDKPWTRKSEVLQYRTFYGVLQQMAAELRKRGITHVVMEASGVYTEPVYYALAERDFEQVAVINPAHAKALKGHTTDARDCLRLAELFECGLLRGSYIPAPELKEVRDLTRCRIKTVQARTSEIQRLAKALESAGIKLGSVASDITGKSATAMIEALTGGERRGAVLADLARGRMRTAGKLADLSQALAGRFTDHHALLCRLHLDRIAIFDSAVAGLEDTITRKAARWQREQDLLKTIPGFGDAVAQAWLAEIGPAPHSYFAGHDKLASWVTLCPGNHMSAGNRKHGRTGDAGAYIKPMLVNAAWAAVKAPGRLQSKYHRLVRRFGGQKNPAAKKKAIIAIAHTLLKIAYQVLQSGQPYQDLGADFYTRRESPEQRQAYLLRQLQQLNPGCTITITPAEAA

SEQ ID NO: 463459 - protein, 349 aa, unidentified
MGEVITIGVDIAKSVFQIHGVDADGTVVIRKRVGRARVLEFFADLPPCRVGMEACATAHQWARELTKLGHDTRLMPPTYVKAYVKRGKNDAADAAAICEAVTRPSMRFVPIKSVEQQSMLMLHRARDLLIRQRTQLTNALRAHLAELGLVAAKGREGLHQLATVVTECGVERLPSNARFACQAIVTQLHAVQIEISGLDKRITQTHRASADSKRLETIPGFGVILSTAVVATMTDPKAFRTGREFAAWIGLVPRQNSTGGKERLGSITKQGDRYLRRLLVIGATSVINSARARPYKYPWVIELLGRRPTKVVAVALANKMARIAWAVLAKGETYRTPTRPWNAAVPVAA

SEQ ID NO: 463460 - protein, 415 aa, unidentified
MDDRQLWYAGVDWGSQSHHVVLTDGDGRKIGERSFKHGGEGLAEMAAWLMAASCAAEPGQILAAIEVPHGPVVETLIERGFKVHAINPKQMDRFRDRFTMAGAKDDSRDAEVMASALRTDPRCFRSLAAADPIIVELREWSRIAEDLGVERNRLINRLREQLWRYFPALLELEDDLGAEWLLELWEAAPTPNTASRLREATIAKLLKRHRIRRFDAASVVNTLRRPPVRVAAGTVEAASAHVALLVPRIRLLNRQIKDAHSRIDGLTARLMPAEAAEPGQKKQHDAEILASLPGVGRTVLATLLAEASDALQRRDYAALRSLAGVAPVTKRSGKSCVVVRRQACHDRLANAVYHWARVAVQHDPRSRAKYAELRSRGHSHGRALRSVADRLLNVACAMLKSGAAFNPSSAAQKPA

SEQ ID NO: 463461 - protein, 407 aa, unidentified
MQEATQHDAVDVFVDVDVDVGVDVGKGQHHAVALDRNGKRLYNKALPNDEVKLRALIAELKTHRRLLFVVDQPSTIGALPVAVARAEGVLVAYLPGLAMRRIADLHAGEAKTDARDAAIIAEAARSMPHTLRSLRLADEQLAELTMLRGFDDDLAAQVTQTSNRIRGLLTQIHPALERVLGPRLDHPAVLDLLERYPSPSALAAANEKTLANRLTKLAPRMGKNWAAEIVQALNEQAVIVPGTQAATIVMPRLAQQLAALRKQRDEIAAEVERLVLAHPFWPVLTSMPGVGVRTAARRLTEAAQKAFATAAHLAAYAGLAPVTRRSGSSIRGEHPSRRGNKVLKRALFLSAFAALRDPVSRAYYSRKIQQGKRHNQALIALARRRCDVLFAMLRDGTIYPPKSAPDA

SEQ ID NO: 463462 - protein, 414 aa, unidentified
MDNSLTPRFVGIDLHKHFAVVAAVNAQQRLVLPPTRPIDLDEFPAWASTHLYPTDVVVLEATSNAWWLYDLLAPRVQRVVVANPLQVKWIAHAAVKTDKHDAIRLAKLLAANLIPEVWVPPRHVRELRALLAHRRALVKQRTAVKNRLHSILHRQSLKLPSGDPFAAHNRTWWLALDLSPTERLRLRQDLDTLEHVEKQLADLDSELARLSNQSPWNLAMPFLIQLPGLALLSAMTVLAAIGDITRFPTAKHLVGYAGLGTRIHDSGETSSEGHISKEGRRDLRRILIEAAWIAVNTHPYWKAEFERLCRHKPQGVAIVAIARKLLVVIWHVLTERAADHHADPVMVACKLMRWSWELTEEQRGGLTSRQFVRYGLLRLRLGNELTTFTYGGMPRRLASVEEMLARFPDLAESS

SEQ ID NO: 463463 - protein, 296 aa, unidentified
MNVPGKTVLKPLTFSNNKAGFELLDLSFRQLNQDCLIALEDTGHYAFNLLNFLHEQGYKVYTYTPLLIKEFAKSLSLRKTKTDKKDAHGIALKLLSDPNREQFQHDNRQVELKILARHIHRLKKKQSDWKVQYTRCLDIIFPELDKIVGKHSEYTYQLLTCYPNPQKRLEAGFDKLIEIKRLTASKIQDILSVAPRSIGTTSPAREFEIIKHYKRLIDKAETCVNDLMAEFNSVITTVTGIGGRLGAVILAEIRNIHAFDNPAQLQAFAGLDSSIYQSGQIDLAGRMVKRGSPHLR

SEQ ID NO: 463464 - protein, 412 aa, unidentified
MKDLLEISCGLDIHKEKIVACILTGPLGKPTHSEIREFTTLIPDMLALRDWIISENCHHIAMESTGIYWIPIYEILEDAFSGDITLLVVNARHMKNVPGKKTDMRDSEWISTLLRAGLLNASFIPEKRIREFRDLNRYRKSIIRDITSQKNRVEKFLQSSGFRLSSFISDIFGASGRNIILHLMEHGQIDKISLDSYLKTKTRKRIDEILMSVNGTLSEHQKSFLKILMCHYDSMKEHLIEIETHLQEDMLPFALQIEQLNTIYGISTTASCAIIAEIGTDMKPFKTAEHICSWAGLCPGNNESAGKRKSTSITKGNPYIKSMLCEIAWVIAGKRNTYLSAWYWRIKQKKGAKKAIVALARKLLVIIYTMLKQGTNFDENCFEVRRKNCEQKQLSRYIRELEKHGYTVEAQV

SEQ ID NO: 463465 - protein, 540 aa, unidentified
MCGGCPPALLEFKHLMLSLFGITINLSGEKVSALGFEPVPEFLPPARFKSGNNVVHRHRMSTRLIIPGIFQFSFYRIGGFMNQYFLGIDASKGYSDFVMLNAKKQPVIENFQLDDTFEGHARLYELLRSFNQDHPEATIYAAVESTGGYENNWFQSLLKFQGSLPIKTAHLNPLGVNYNHKADLKRNVTDKISAQNVAEYMIAHPEKVSYQHQDSLTSLRKQWGFITMLTKQSTQLLNQLESLVYNANPEILMYCKDGTPQWVLKLLTLYPTALRLSKAKVKSVARIPYVSKDRAQQLVATAKKSVASASDNVTQRLIVATVKQILHLNKTIKAQTKILTNECAVPEVELLKTFIGISDYSAIGLMLEIQSIQRFLLSKKLASFFGIHPAYKKSGDGTWKYRMSKKGRKEPRRILFMVAMSAIKSNPLIRSIYQQAVQRGMEKKAAVGLCMHKILRIIYGMLKHNKAFDPEIDRKNRQKKPLRQRRVRQDKNRRYQDFDSKAPISSRQKITRKERKQSQNVSNVECGISEASVPVTELAN

SEQ ID NO: 463466 - protein, 338 aa, unidentified
MKKNFFVGIDVSKQTIDVAFIMQLDQEKTLPCWKVFDNTEKGFYEMKTWLQDNQVPFNENTLFVIENTGLYHRLLVKFCNKHQLRLCIENGAQVKWSLGIARGKSDKVDSRRLAVYAVRFADRLKPAAALHEGIQAIKDLITLRNRHLVHLRSLQTHLKELKVTTDQKAVKELQKMHIPLIEAIQTTIKKTELAIIKKIEINELTKRQYKLLLSIPSIGPVTASYLIASTNAFTLCSNGKQLACYCGVVPFEYQSGVSIKGKYHVHKMANKNLKALLHLCAMSSIKYVAEMKHYFNRKLKEGKHKMSVLNAIRNKLVLRVFAVIKNNKPFVENSSITG

SEQ ID NO: 463467 - protein, 482 aa, unidentified
MKAKQKEPTEKSTGQSSQLHWRQMNRKQRRDLERKIRSADLTLQLVHPDAAGIDIGNESHYVAVPPDPDSQPVQHFGCTTAELRAMADWLKQCRIRTVAMQSTSVYWIAVYDVLEQAGLEVYLVNARETKNLPGRKSDVQESQWLMKLHTYGLLRNSFRPPQEIRTMRTYWRQRNDLVRSAARHIQRIQKTLTQMNMQLANVLSDVSGVTGQAIIKAILAGERDPQKLAAFRDPRVKASEKDIARSLEGNWQEDLLFVLKQEQAAFEFCRKQMAECDRQLEQYLQKMEDRSQGATLPEEKRKDRLQKKKGNQPQFDLQQQLFRMTGTDLTQIDGIDVMTATTILSEAGWDMIKWKDEHHFVSWLRLAPDNRISGDRIIGKGRLPTSNRVTVALKLAASNLRTSQSYLGAQFRRLRARLDTPVAIKAMAAKLARLIYRMLRYGTKYVDHGSRYYELQQRTREIRRLKLKAATLGFHLVQSTAA

SEQ ID NO: 463468 - protein, 356 aa, unidentified
MFHSLRCKTLNTKAMKTKQYFIGIDVSSESFTASVFKLSDKTIHTFDEHLSNSIDGYKTLLELLERKHINKANSVVCLEATGVYGEGLCYFLCSQQYKVALEPPLKVKRSFDESSHKNDKVDSRQIAEYCWRFFDELHIWSPKDEILEQISTFLSVREQFVRQLTANQNVLAGLKRKYIQTPLAINMCKDTIENLKENIKDIDNQIKELIDKDKDYRGMVDKLKSIPGVGLSLAANLLVLTGGFKRTITSKQLASYLGICPLEHRSGKSVNRRPRSKGYGPSLMRKLLYLASLNLRKTQEDTKKYFFRKVAEGKPGKLVINNIANKLLKTICAVIRDKKPYIKNYVSVNPMILKSA

SEQ ID NO: 463469 - protein, 407 aa, unidentified
MSEKEANPARFVGLDVHKHYLVAVAVDTDKNEIMPPRRVPLAHLDDWVRKNLTLQDAVVLEMTTNTFQIYDDLLPHVHSITVVHPPHVALITRAQVMTDKIAARILARLHAAGLLPSVWVPPAEVRDHRALVAQRAKMMGLATQARNRLHAVLHRHHISPPGGDLFTPNKHPWWLALDISALEQARVQSDLATLLFAWGQVDILEEAMAVLASQDERSVLLLQLPGIGLITAVTLLAAIGDVSRFPTASHLVGYAGLGGRVHDSGLTHHSGRITKAGRRDIRAAMVEAAHTACRTHPHWQAELARLEPRLGKNKAIVAIARKLLVAVWHVLTKGEVDRYATAERTARKLLRHAYRLGHENRQGQSPTQYVREQLDRLGVGADLAAVPWGKTRLLALPPSSLKEAAES

SEQ ID NO: 463470 - protein, 347 aa, unidentified
MDQIIRIGMDTSKHVFQLHGVNAAERPILRKKMRRKEMVDFFATCPPTVIAIEACAASHHWARLLTGFGHEVKLIAPQLAKPYVKRGKNDAADAEALCEAMSRPTMRFVPVKSADQQAALMLVGMRERAVAAQTQLANTIRGYAAEFGLTAAKGMSHLPLLLERIMIDESIPAVARELFASLVEEFAQLGERLKEVEAKLMAWYRNNECCRRLAKIPGVGPIGAVLLVMKAPAPEQFRSGRQFAAWMGLTPKDHSTAGKVRLGIITRAGDEVLRKTLVVGATSLLRQVRAGRGRNASLWLIELLKRKAPKLAAVALANKIARIAWKMMVTGEAYKGNAARPALACAA

SEQ ID NO: 463471 - protein, 388 aa, unidentified
MNAVGIDVSSRKSTVAVLRPLGEVVCLPFDVTHDIAVLASLVEKLKAIDGETRVVMEHTGRYYEAVAKALHEAGFFVCAVNPLLIKEYGANSLRRVKTDKADAVKIARYALDNWADLRDFTPMDAIRYDLKTLNRQFQLASKQRTASANNLIALLEQSFPGIRKCFDSPVRSDGTQKWVDFAHSFWHVDCVRKQPFPAFCERYRKWCKRHAYLFKLSNAEEVYALAKRAVVLTPKSKVVKVLVQEAANQLISISRSVEVYRAEMDRLAAMLPEYPVVMAMYGVGKSYGPQLMAEIGDVRRFERKQALVAFAGIDPMPNQSGDKNVRSNKSSKRGSPYLRKTLFNVIRTYLQCAPQDEPVFQFLNRKRAEGKPFYVYMLAAANKFLRRY

SEQ ID NO: 463472 - protein, 456 aa, unidentified
MARKRKNSTKKIGAPVLHCLNPNAAGVDVGATEIYIAVPVDRDPQPVRHFSTFTEDLHAVAAWLKACKIETVAMESTGVYWIPLFQVLEARGFTVVLVNARHVKNVPGRKSDVSDCQWLQYLHTVGLLRGSFRPEQAVCTVRSILRHRDSLVQMASSHVQHMQKALDQMNLQLHHVINDITGLTGLTIIKAILAGERNPHTLAALRDRRVKATEDTIAKSLVGDYRREHLFTLSQSLTAFRHYQELIGACDYEIEQYLEAFESKVDPREGSLPESKNEQEPSDDASRFDLGSHLHRIFGVDLTRIPGINILTTQTLLAEIGPDLSRFGSAPSFTSWLGLCPDNRVSGGKVLSVKTRKVKNRAATALRMAAQSLHRSQSYLGHFYRRMRAKLGAPKAITATAHKLARIIYHMVTMGQAYDETVCARNEIQNRLRLEARLRKQAREMGFQLVLANTAV

SEQ ID NO: 463473 - protein, 457 aa, unidentified
MTIYIGGDASKGYADFHMMDESGTMLCQHKLDDSSRGHGVLHQWLTNNTQEKRVLIGLESSGGVEKNWLRGLQELSKLPMLQVFLVNPLAVKKSREALRLHESVTDPSSARAVAEYLQMMDGKLLWEDNPVLEEARRLEAYISSQIKHVARLKIQLQQLVVNTHPELARYSRLGFAGWMLTLLEKYPTSQELAKARPEDLALIPYLVESRAEKIIQAAGATVASTRTKAASYLVRELAREISRMTQKVKELLEELHAPFLNDPIVALYLSIPGVGLATAVYLRLSIGDCRRFRSSAAVVAFCGLDPRIHNSGDTKKNLRISKRGHSRIRALLFQCAKAAIRSAGPFRTFYERLVGRGKPKMVALIAVMAKMLRVAYAIQLKQQPFNGSLPVKAIVSPTTRTTTTVVECEDAPVSRRESNRRKKAANASNEVEPQEERTLAAVGNGIITCPIGAIPTG

SEQ ID NO: 463474 - protein, 336 aa, unidentified
MSELVTVGIDLAKSVFQIHGVDASGRVLVRRQLRRSQLLAFFGKQPRCLVGMEACGGAHDWGRRLQELGHDVRLMPPSYVKPYVKRGKTDAADAAAICEAVTRPSMRFVAVKSEACSAVLVLHRTRDLLVRQRTQIGNAIRAHMTEFGVIAAKGAQNVDRLRTQLHQLPDAARLPVSLLFEQLVDTDTRIERLTGEIEATHAQCETSQRLATIPGGGKLSATIIAATTPDVGNFDCARDYAAWLGLTPKPHSTGGKQRIGRISKMGNRYIRRLLYLGAMSQIMVRSRCGPRQDWLSDMLARKKTKVAAIALAHRMARTIFAVLRDGSRYQPQATTA

SEQ ID NO: 463475 - protein, 377 aa, unidentified
MQKVRFVGLDVHAETIAVAVAEAGGELHSLGVIPNRAESVERLVRKLGRPEQLRVCYEAGPTGYVLYWQLSQLGINCEVVAPTLVPVKAGDRVKTDRRDAEKLARCYRAGQLTPVWVPDAAHEALRDLVRAREAAKRDQLRARHRLGKFLLRQGRRVAAGTRAWGPKHLAWVKQQHFEQAAQQLTLLDYLHEVEHAAERIARLERYIDAAIETLPVKMRAVIEALQSLRGIAQISAVSIVAELGELSRFEHPRQLMGYSGAVSREHSSGERIRRGAISKTGNAHLRRIVVEAAWAYRHRPAVGQTLAARQRRCSAAVTELAWKAQHRLHQRYARLMARGKCQQQTVTAVARELLGFIWAIGTQVERAHNRQEVKRAA

SEQ ID NO: 463476 - protein, 375 aa, unidentified
MLMVAERSPSPQPPTVAEVYRFVVGVDTHAKVHQYAIVEAATGRVLDEGGFPTSAAGLARAAAWIARRTGGDLDPGPGSVLVSCEGTGSYGARLAKLLLEVGYRVVDAPSPKRDRGQDKDDTIDAIKAARGVLGTRVDRLAEVRAGQLQEALKVLLAARDRMAGESTRSVNALTALLRGVDLGLDARRKLTAPQIRQVARWRTRSESPAAAIARAEAVRLAARIMQLRVELAANKTQLRQIVQAHALVLLDTYGVGPVNAAIVLSVWSHPGRVHHEAALAKLGGVSPIKLESGDSTEHRLNRGGDRQLNRALHSIAKTRMERDPHTQAYVERRTRQGLSKRRIRRCLKRYIARQLFRTLTTHTEQINNQVMPPAA

SEQ ID NO: 463477 - protein, 319 aa, unidentified
MARNESVVVGIDVAKDKVDACIRRLALRQTFPNTAPGHRKLVAWLRKHQVNKAVMEASGGYEREWARVLRQASTEVRIVDPKRVRSFALSAGRLAKNDMIDAEMIAWFAETFDEAPSQAHDAAREELAALVKARKNLIDVKTRLQSQNEHAVPGPVQKAHARVLKSVAAEIAKLETAISAKIKATPQFAERAEIIESVPGLADNTSAVLIAGASELGKVSDEIAAALIGIAPYDDDSGKRRGERHIKGGRRWVRNALFTPCLGAATQHNPVLKAHYERLIAKGKEPKVALVACMRKLIIILNTMIARREKWDPSRYALR

SEQ ID NO: 463478 - protein, 484 aa, unidentified
MTRRKLSTFERLQRGERLNRKQCREVQQRLNLDDPGLDIIHRDAAGIDVGNESHFVSVPPDRDPQAIREFGSWTAALEEMARWLKDCRIRTVVMQSTGVYWIALFDVLQRYGLEVNLVDARGTKHVPGRKSDVQECQWLRKLHTYGLLRPCFLPPPEIQAVRTLWRLHLQHVRDAGRCIQRMQKAMIQMNVQLHNALSDISGASGQAIIRAVLKGERDAKVLAKLRDLRCQATEDEIVQSLQGNWKEDLLFELQQAVEAYDFCQRQMKTCDQQLRRYMAALPTRATVPAPGSVSSLPSAKKGKQGRARKPRRQGNQPAFDLASELERVLGVNVATIDGIDVLTIQTVLAEVGSDLSAWKTEQHWTSWLNLAPKRDVSGGRVIRHVRQHRTNRAGNAFRMAAQSLVRSQTYLGARYRYLRAKLGGLKAVKAMARYLACLYYRLLTQGQIWVDRGTEEFNRRSQQRELTALERKARKHGLQLVPAA

SEQ ID NO: 463479 - protein, 412 aa, unidentified
MEGETVIAGVDTHKDVHVLCLLDGLGRKIRSGSFGADPEGYDRLAEAIGDPGSCMVVGVEGTASYGAGLTRRLVELGYNVVEVLRPKRDKARPGEGKSDPLDAERAARKAASGKGCSVPKSQDGWVEAVRQLYVARRLAVATSTSCVACAKSMLTTAPSALRERFRDRERPKDLMPLLARGRKAGDALEESVLASLRSVAAVWKEARSQVESLDERIRALLEANAPALLGIEGCGTTTAAALVVAAGDNPGRLKGEAAFSMLCGVSPIPASSGKTDRHRLNRGGNRQANWALYEIAIKRMAYDERTRRYVARRTSEGKSRREAVRCLKRYIAREVYHVLMDQNPDGAAPEGPELAKMRKAMRVTQKQAAAELGLSAATLGHLERGKRRSTKLERRYYELLCELERALPQTAS

SEQ ID NO: 463480 - protein, 340 aa, unidentified
MTITTVGIDLAKNVFAVHGVDQNGRTVLVKPKVSRAALPELIASLPPCVIGMEACSGAHYWARLFRQYGHEPRLMAAKFVSPYRMAGKSGKNDAADAQAICEAVRRPHMRFVPVKDESQQAMQCLHRTRQGFIEEKTATYNRLRGLISEFGVIAPQSADALRHMVSVQKSSLPLQVQQCVDDLLEHVARIEDNIAEYDRILSHIAKTDHRSQRLMELKGVGPTTACALVASIGNAHDFKNGRQLAAWLGLTPSQYSSGGKSKLGRITKAGDSYLRTLLVQGARSVLIGAGKRTDSFSRWVCMLVERRGYWRAVVAIAAKNARLCWASLHYGDDFRLYSVN

SEQ ID NO: 463481 - protein, 409 aa, unidentified
MPGALHIGIDISGRENMACFLNENGDRIGPVFTFCNDQTGLNRFLEQLFQIAHNHSPEKINIGMEATNFYWWHLQEALSEIRFDGAAIDLFTINPKLVKGFKKAYPNLPKTDAIDAFVIADRLRFGRLSPVHQGSLIYAPLARVTRLRYMMKKNIEREKNRAINLTFLKFSNFRQATGRRAFNKSSCELLNEFTVDEVADKPLEELVDFILAHGNNRIASPEEFVNEIQKAANNSYRLNPKMNDMVSVALTMTIENIRFLENQCKKLDKVIEKEFAAMPQVLNTIPGIGKVLSAGITTEIGDISRLSGEKALAKFAGLTWHRTQSGPFVAEETSLTKAGNAYLRYYLVEAANSLRLHNDDYAAYYRRKYDEVTKHRHKRALVLTARKFVRLVFALLSKGQIYNDRMVNG

SEQ ID NO: 463482 - protein, 428 aa, unidentified
MTKRTENLTLIHKDRTLIVGVDIAQNAHWARILDGKTSIETGTAFKFKNNIEGFVRLLDKTNQAKERTGAEKIVIAMEPSGHYWKTLAAYLLASEVTVVLVNPFHVKKQKELDDNSPSKSDRKDALIIAMLAWQGRFSRCYIPEGVWAELRGYTVVRCQQKRKLNAARNNLAAILDEYFPEYYGVFKEPLGKASLHVLTHFPFPMDIARLTEAELAQELKKATQNRVGEKRATLLFSKARMSVGVKEGLAAARLRLSHCLSEISFYREQLAQTEAAMEDALGRTGIADILLSIRGIGVVTLASLLGEIGDPNRFENWRQVRKLSGYNLVENSSGKHKGKTGISKRGRPRLRSILYQASLHLVIHNPEFRALHEYFKTRRENPLKPKQSLTAISCKLLRVLFVLAKKRCPYDPKKVLGAYRQQQLKLAA

SEQ ID NO: 463483 - protein, 411 aa, unidentified
MEAAVITAVGIDVSKSKSTVAVRRPGGEIVLRPFDVRHTNSDLKKLTSTLKKLGGDIRIVMEHTSTYWRPIALTLKEAGFFVSVVNAMLIHDFSDNTIRKLKTDRADALKIANYALTFWDTLPPFNNEEETRLLLKMQSRANERITATATALRNGLIALADQIFPGVNIAFAPNTKNANGHEKWVDFFLRYRHKDCVCQYSMEAFTESYRGWCKRKNYKFRTDTAHQIYLLAQEGVATLPKCESTKMLITQACKSLNAVCEAKQSTQLEMQRLAAMLPEYEVVMQMEGAGPITGPALMAEIGDVRRFKNKKALVAFAGIDAPPFQSGAFESKSRHVSKRGSPHLRRTIFIVSNIILTRSNPENAVYCFMDKKRSEGKHYYVYTVAGSAKFLRVYYARVTEFLRSQPSPGAC

SEQ ID NO: 463484 - protein, 367 aa, unidentified
MSKPAEPVAKVNAHALGLDVHKNLIVWCLLDRRGRLAAQGRTGGTPGHLLDLLRTVVGRKKAHIAFEASSCSLWVYDLLVDRLGDPSRVHVAHARKVDAIANSRDKSDENDAWWLAYLTYEGRLPEVRVSVGVYRELRTVGRHRTSLVQRRTRLAQAIHAHFRQAGMALPRTQLSAARSWDCVREQAVQLPGVVREIVLEGLEEMARLSRQIEHWNARLAQIAKELPEVEEIRRQLPGFGPLLAAVVVGELGELSRFGHAKALGRYAGLVPTRRGTGGDPRHGQISLEGSAHLRWALVQAAAASLRVKEGPGSAVAAWIRTHQRHLGSKKKGLIAGARKLAESIWLLFHHGKDFDIRRPFGRYQPAA

SEQ ID NO: 463485 - protein, 366 aa, unidentified
MPSVSSAAELIHLGMDTSVSEIVVAVLRPGEEVPVVDRIPGDEESVRRLIGRFPDRRLLSACYEAGPGGYELHRLLASMGVACDVVAPSLIPKGSSDRVKTDKRDSVRLALTHRAGLLTPVRVPSPAEEAVRDLVRARGDLLDDRKRMQQRLNAMLLRHGRVWRGGKKWSYAHRAWVDRQVFDEPALAEAFALYRGGLEAREAELAAAGARLAAWAAREPLAGPVARLGGYRGIAQLTGLTLAAEVVDWRRFASARAFMGFAGLIPTEYSSGSRSRRGHITKAGPEGVRTALIEAAWAYRYRPAIGATLRHRQAGLPPETLARSWKAQQRLHAKYAKMTARGKPPGVAVVAVARELAGFVWAEMIS

SEQ ID NO: 463486 - protein, 342 aa, unidentified
MLYVGIDVAKNKHDVTALNVPGKTVLKPLTFSNNKAGFELLDLSFRQLNQDCLIALEDTGHYAFNLLNFLHEQGYKVYTYTPLLIKEFAKSLSLRKTKTDKKDAHGIALKLLSDPNREQFQHDNRQVELKILARHIHRLKKKQSDWKVQYTRCLDIIFPELDKIVGKHSEYTYQLLTCYPNPQKRIEAGFDKLIEIKRLTASKIQDILSVAPRSIGTTSPAREFEIIEIIKHYKRLIDKAETCVNDLMAEFNSVITTVTGIGDRLEAVILAEIRNIHAFDNPAQLQAFAGLDSSIYQSGQIDLAGRMVKRGSPHLRWALIQAAKACARFSPAFKAYLKTKLE

SEQ ID NO: 463487 - protein, 408 aa, unidentified
MNAVGIDLSNGKSMVAALRPMGEVALLPQEFLHTEVGLEQMAYAIIALGEDTRVIMEATGRYHEPVAAALHEYGIYVYVLNPLFIKQSGGGSIRKVKTDKADAMKIAKYGLDNWVDLREYTPMDTVRQQLKLCSRQYNLYMKTVVSLQNNLISLTDKTFPGVNELFSSPERADGHQKWVDFVMTFYHCDCICRVSENAFAERYQKWCKRKGYHFSAEKAQDVYLGSCGHFTTLPKNDNTKLLITTAAQQLLAGKMTLAALRTEMTRLAKQLPEYDIVRAMYGVGETTAVQLMAEIGDVRRFPRRSSIVGFAGVDPAVDQSGKHSAKSVPTTKRGSPHLRKTLYQIICTYLRKAPADEPVYQFLDKKRTEGKPYFVYMTAAQNKFLRIYYARVKECLEAFDAQQDTVQN

SEQ ID NO: 463488 - protein, 316 aa, unidentified
MANLTKSKSSVNVGVDVGKSFLDVYIHEKQIYFQEENNHNGIQNILRRLAHYNVERLVVEATGRYEFALAEAAYLKEIPVCIMKPLSIRRYAGAVEQLAKTDKIDAAIIAEFAAVIKPKPTPQKSKNLIAIKDLLARRRQVMEMRTQELNRLKIMGKSLEASCKRIIKVFDKEVERLEKSLSEYVDEQSEWSEKRDLLISTPGVGNTLVYTLLADLPEIGTLNNKEIGALVGVAPMNRDSGSLRGKRKIKGGRASVRTMLYMATLSATQCNPVIKHFYKKLVEQGKHKKVAIVACMRKFITILNAMVRDKKEWCHD

SEQ ID NO: 463489 - protein, 401 aa, unidentified
MEIVVGWDWADDHHDVVVQDRPGHTLWVGQVNQTRDALEALEAQLVAWAQHVRTDVHVVIETSQGLVVDWLSTTGFWVYPVNPKVSDARRKPSGAKTDRLDAAILARLGWYERDQLRPLRPTDEDWVELRQLTRIDEDLTQQMTRLSNQLTAALKSYYPQVLAAFAEINRPVALAFLAAWPDPVEARNIALSDLITWLRQHRYARAAQEAPRIWSALQQRALEASPGKRRAQMWAVRAWVAQLQALQTEQRALRKHLEKLFLANPDADLWTSVPGVGVTLGARLLAGFGPDRDRFERAEAAQALAGTSPVLYQSGKLKRVHMRRACDKHFRATVHQFAFSSLSHCPWARQYYEQYRSRGHGHHAALRALGNVWLRIVFRMWKTGQHYDESRFLADRAQHAS

SEQ ID NO: 463490 - protein, 489 aa, unidentified
MSKASQQQQGKKDATLKAQAPKRQARGSHRPQGEGNQRRSQLRITNPDAAGIDIGSQVHYVAVPEERAERTVRSFGAYTTQLEELAHWLKECAVKTVAMESTGIYWIPLYQKLEEAGFEVLLVDARQAKHVPGRKSDVQDCQWLQQLHTYGLLRAAFRPEDSVCRLRTLQRHRKNLVECAGMFVQHMQKALNEMNLHLHHVLSDISGYSGLAIVDAILAGERDPRKLASLADYRVKKSQAQIEAALTGDYRPELLFVLNQSLQDYRQIQQQLAQCDLRIEKQLRQIADCTNPSQDCGPRQQGPESATGKRAKIKPKDALEVSLAGHLKRILGVDLTTIPGLNVLAILTLISEIGTNMAKWRNEKAFVSWLGLSPNNKISGQRLLSSRTRKVVNRAATTLRLAAMVLGHTNTPLGSFYRRKRAQLGAPKAITATARKLGCLIYRLIKNGQDYQAPDLHVYELKYKDQILNSLRKRAKSFGFDLVEIPKAA

SEQ ID NO: 463491 - protein, 310 aa, unidentified
MSTIKVVGIDLAKNVFQVCVWMEDGSVASNRKISRQKFLDTIRAFPPETLIAMEACATSHYWGRTLQSMGYHVRMVPTQYVKAFSHHQKNDANDALAICETACRPGLHFVPIKTVEQQDIKALRRARQLMVEQRTALANQIRAFFAEQGIIVPVGIQKLQQHLPDILEEGDNALSCVLRRLLHTLWEDLQNLNVSTHEMDNEITALSRQQAGYGHLLTIPGVGPLIAAAFVSDVNASQFTNGRQLSAWCGLVPRQHSSGGKSRLSSLSKHGNRHLRTLIIHGARAMMQGVQKRDDPLGEWLEPGLPDVAP

SEQ ID NO: 463492 - protein, 313 aa, unidentified
MMATHRIGVDVGKAELWISIDGETAQPCPNELPAIRRWVRSLEGPADFALEATNDYHLALALEAHHQGHRVYLVNGYRLNRYRESIGGRAKTDAGDARLLVRYLQREQDELRPWTPPPEGYRTLQKLLRRRATLVRARVMLEQSLRGVPELQSNLKDLLREIGRLDAVLQRVLRETVGRAGWSDHARRCQQIEGVGPLTAAGLTMAFQRGAFRNSDAFVAFLGLDVRIRDSGTKRGQRKLTKQGDPELRRLLYLAAMQAKSTPAWSDYYQRCLDRGLATTQALNTLARKLARVAFALMNNQTDYQPKTPCGET

SEQ ID NO: 463493 - protein, 382 aa, unidentified
MQASRKSTPTADHCGTIFVAIELSQKTWLITVHSPDRDQFSRHRLEGGDHAGLLALIEKVRARATQQLGSTPRVVSCYEAGYDGFWLHRLLEAAGISSLVFDAASIAVEQRSRRAKTDRIDGELLLRTLMAHLRGEPRVVRIVRVPSVEEEDARRASRERDRLITEQTAHSNRIKSLLRLLGMAVGNPRRRDWLAWLKRQRDWQGRPLPPHLLAEAQREHARLMLVREQLAALEQVQAAQASAVPAPMAERRDLLQRLKALGPAFSATLVNELFYKDFRNRREVASYCGLAPSPWQSGGIDREQGISKAGNRRARHKAIELAWLWLRHQPNSALSHWFRTRTANAGRRAKRIAIVALARKLIVALWRYLTAGLVPEGATMKA

SEQ ID NO: 463494 - protein, 430 aa, unidentified
MKSNTQNAKIEAITEKTLVLGIDVGSKTHYARAFDYRGIEYSKKPFKFSNTEAGFVTFKEWILDLKERHEKDKVVPGMEPTGHYWFNLGKFLQDNEMKPVLVNPHHVKKSKELDDNNPTKNDRKDPKVIAGLVREGRYMIPYLPEGVYADLRTASNIRFQLQAELTRIQNRISRWFNIYFPEYKTVYGKPDAKSGILILKAAPLPEDILTLGIDGVNQIWRDAKLRAVGKARAKTLIEAAEHSVGSKEGAVSARMEIRMLLEDYESRNIRLQEVMTLIEGLVKQIPMAEKLLEIKGVGIRTVSGFLAEVGDISRFNNPKELQKLAGLALVENSSGKHKGETTISRRGRKRLRYLLFEVAMSLVAKNPEFRELHNYYTTRRLNPLKKMQSLMAIAAKLIRVFYAMLTKGVDYDPKKMVSDIKRPAVYLQAA

SEQ ID NO: 463495 - protein, 332 aa, unidentified
MLNSYVLGIDVSKDTLDAALLPAEKPTEANKKEKAKKIKVKNTPDGFRELIEWLNVRKMDNLHICLEATGTYGDAVARFFHDNNYKTSVVNPLLTRRHAESEGLRGKNDPMDAASIARFCREKSPREWVPTTPELSLMKSLLRHLGHLVGARKRIVTASKTPGLADIEILSFSAELDFYDKQISFITSHIKEHVAAHPSIEKTVKLLETIPGIAELTAWKLIAEIGDRVDICTPRQIAAYAGLTPEDNQSGTSVNGKTSLSKKGNSRLRCALFYPAIAAMRHNPIIKSFSQRLLKKGKTAKSVVCASMHKLLKIAVAIMKSGEPFNANISVN

SEQ ID NO: 463496 - protein, 346 aa, unidentified
MEKITVIGLDLAKSIFQVHGANARGKKLLSKKLKRSEVMGFFASQPPCLVGMEACGGAHEWARQIQSLGHDVKLMAPQYVKGFVQGNKTDARDAAGIAEAAVRESIQRVTIRSREEQQIQALHRVREAWVKHRTATANQIRGLLAEFGQILTPGLRHLRREVALWQEQSRGMLGILNGLVDELLQYLSELEERIGQVEKQIKQVLQSNPACKLIETIPGVGVLTATAIIGSFGRAENFTEGRKFANALGLTPREHSSGGKQVLLGLSKRGNGYVRKLLVHGARSVLQARINKPAYAEDWVVKLAKRRGHNIAVCALAAKNARRIWAMLQSGEVFRADHAQTNDVCT

SEQ ID NO: 463497 - protein, 414 aa, unidentified
MEGEINKACGIDIHKIFVIATILSRSGEKQLQRFERDDEGILSLKNWVTSEKCDVVACESTSDFWVPIYESLIDHLPVIVGNARDMKAFTHKKTDKIDSEFIAQLALNNMIQPSRVFPKRHREFRSYVRLRLTLVRKRTDIKNEAHAILSSEMLRLGDVLTDIFGKNGRAILSGIASGKNVDQIIESLSPNVRKKTAQIREILDREISQSAAIRLQICLNLIKHLDDEIETLEREIFNYAYQKHKREMEILMSVPGIGELGAATLIAEIGNFSDFPSGDKLASWLGIVPNVYQSADKYHNGRITKRGSKVARWILTQIAQAAARKKNSRLKEFFNRKKKSIGYAKAIIALAKKIATIIWHLIINDEMYEDETGYEKGEVKKRKIVETEIFSVDERIKIMSEIFAITEKQNEEST

SEQ ID NO: 463498 - protein, 411 aa, unidentified
MIKENYIYVGIDLHKETHTAVMIDCYNQKLGEITFPNRPAAFPKLVTKVKKCNTDGKEVVYGLENAYGYGRALAVWLIDKGYLVKDVNTAISHRQAKHRGAMYRKSDSDDAKAIALATLNMLDKLPDACPNDAYWSLGQLVHRRDNIMKQRTRLVNQLHEQLCIAYPSYKQFFNDISRPTALYFWEHYPSRKYLKGKSVEDLRTELVPVSHNRCSTKNCEKILDAVASDKVKNNAYQDARDMVTLSIVSDLQHYDSQLAEVDKMLEQMYKMLGCTLTTIPGVNVITAVKILAEIGDIKRFGNANKLAQFAGIAPLHLSSSGKGKDVATKQGNRRLQATIYFLAIQMVQVSSKGTPRNSVVRAYYEKRKAEGKTSQQALICISRRLISIIYGMLKHGTEYRMPVVESAGENR

SEQ ID NO: 463499 - protein, 368 aa, unidentified
MKKIAYLGIDYHMNVVAIAVILEGEKEFYDTIRLKNTDTLIAKYMQKLSHQFTIKACYEASSSGYCFQRKMQAWGYHCDVIVPSLVPKKPGSRRKNDFRDARELAQHYANGLLTVVHPPREQDEAVRCLIRCRQSLKEADKRVKNQINSLLLSQGLHWPKSKWTLRHRQWLTTLHLPHPYLQQVLDEHLALLHYLEARVLHFDHQIEALAQSDLYADSVKKLCTLKGIRTLAAMILIAEITDFRRFASPRALMAFLGLIPAEHSSGDKQTGCAITKTGNKRCRTQLIEAALHYVKKPLLGARLKSALSHVDAATSTIALSCMQRLHKRYWALVMKGKESKVARTAIARELAGFIWALMNQQPAPATIV

SEQ ID NO: 463500 - protein, 370 aa, unidentified
MSETIVAYQSFIGVDLHKNTVTLAAVRPDGSLIDRVKIPTKCRDRIASWLRTRPRPSHMAVEAVGFVEWFIDDYRDCVDRIDIADATELANRRGKRRKNDPNDARDIAQRLARGECPLGYIADDELMQLRKLGRHWHQLSRLLSRTKHSMRSMLLAANIAGPKLDGHAAQKWILARGYLLKPVQQQAFVHFLDIIQLVERQRAGLHLQITFANRSTRFRQTVDLLKSVPGIDEIWGCIIAAEIGPFDRFPNSDALEFWAGMTADLKESAGRTQSGHITKAGSRSLRWALCKAAVTLCRSDANQEAIRQRLIRRIGKPKANVAMGRRLLRILYAMIRDEKDFARGPATKHNRGANRARMARKQRKEVAGAC

SEQ ID NO: 463501 - protein, 265 aa, unidentified
MSPNNPNILYVGLDVAKLSLELHLAGHSHALANDVKGHAQLHKHLRAHPQAHIVCEATGGYEQAVVRVLHAAGLPVSILEAGRVRHFAKAQGLRAKTDPIDAAVLTAYGTALQPPARSPASPQQQQLADLAQLRRQLIQTGVTERNRAEHYTHPLCLRQARQCLKSLEKQIAQCVQAITRLIAADAVLAHKAKRLNAIPGGGPVVAATVLAEMPELGQLTKQTAAVLAEVAPYNRDSGSQKGVRQHQWWSSPGALRPLPGHFAWP

SEQ ID NO: 463502 - protein, 392 aa, unidentified
MYIVGIDIGKNHHEASIVSPEGKQIGRSLRFATTHKGADSLMSFIFKNIGNSPCVFGMEATGHYWYPIYSFLKAKGYTIYVINPIQSDSLRKMYIRQTKNDSIDSFLIAEVIRFGQFGTTSMADENILAMRQLCRYRDSVISSRTEIKLRIGTIMEQIFPEYEKQFSSLWVSTSMGILEKYLTPENIENAPIDELFEIIKDKSHNRLTRAKAISIKEAAADTFGIKIAQDAFSFQLKQLIDRMNFLDKQIEALDCQILEYYEKFDCYLHTIPGIGIIGAATILAEIGDISRFKNSSALVAFAGIDPTVRQSGEFNSTHNHMSKRGSPYLRHAIFLAATTCSFHNSPLNAYYKKKRDQGKHHLTATGAVARKLTSVIYAVLRDSKPYEPKSFC

SEQ ID NO: 463503 - protein, 343 aa, unidentified
MQAITTIGLDIAKSVFQVHGIDAAGHVVMRRQLKRRYVLAFFQKLPACVVGIEACASSHYWSRELQALGHTARLMPPAYVKPYVKRQKNDMADAEAICEAVTRANMRFVPTKTPEQQSGLMLHRTRHLLIRQQTSVINAIRAHLAEFGITAPVGRRGVEELLRVIADPSDKRVPEIVRSCLAALGSQLLSLKKQILEFDRMILAWHRNNQTSKRLNCIPGVGPLLATALVASVGDPKSFRSGRSFSAWIGLVPKQHSSGGRERLGSISKQGDRYLRSLFVAGALAVIRYAKLHGTDHRPWLTALLARRPTKVAAIALANKLARMAWALMASGERYNYPVALRP

SEQ ID NO: 463504 - protein, 420 aa, unidentified
MKSARNTLPEEPPGDVTCGIDWARDDHAVSVVNARGREIHRCSVEHSAAGLRDLVAVLSRLGAREAAIERPDGPVVDALLGAGITVVVISPNQVKNLRGRYGSAGNKDDRFDAYVLADTLRTDRARLSPLIPDSPATVTLRRACRARKDLVSHRVAMANQLRAHLRNAFPGAVGLFAGIDSPISLKFLARFDTQDRASWLSPARLAAWLASAGYSGRTGPAVLHARLAAAPRGATGDDGTAQAHVTHALHAVLTTLGEQIKALSEQIGEQLALHADAHVFTSLPRSGTVRAARLLAEIGDCRARFPTPESLACLAGAAPSTRQSGKLRAVTFRWSCDKQLRDAVTDFAGDSRHASPWAADLYDRARARGHDHPHAVRILARAWLFVIWHCWQDHTAYDPARHHALQRLLAAQPGAAARAA

SEQ ID NO: 463505 - protein, 356 aa, unidentified
MRQFSKEPVTTIGIDLAKNSVHVFGVDAQGEAVFSRKLARRALSAFIAQQPSCRIAMEACGSAHHWARTFQGLGHEVVLIAPQHVKPFVKSNKTDAADAEAICEAAQRPRMRVVPIKSVEQQDIQAMHRMRSQVIAQRTALVNQVRGLLAEYGLVMPQGRKAAMARLPEILEDAGNGLSERFRTELHGLLEELRHLDERVAHYDSQIQAIAEASESVQRLMTIPGIGPLVATALLATLGEDWGLFANGRALAAWLGLVPRQHSTGGKPRLLGISKRGDVYLRQLLIHGARAMLRWVERKDDATSRWARDLKQRRHPNVAIVAMANKLARIAWAVMTTGKAFDPARGALAKGAVAAA

SEQ ID NO: 463506 - protein, 346 aa, unidentified
MNQIYIGMDLHKNTSTFLVKDKEGKIIDTCKIATEPSAIKGYLKRYPDSSLAVEPVSQWYFYADLIQKLGVDVHLANPLKVKAIASARVKTDKIDSGVLCDLLRSNLLPEAYFACPEVRNWKEMVRYRASLIRLRTQIKNKIHGILFRNGLRHCFTNLFGVGGRKWLETLEMPECFAFNLKHYLSLIDAFTKLIKEAEEKIETTVADNSQAKLLTSIPGVSYVSALTIMAEIGTIERFESAKKLQGYAGLVPSTYASGDRMVHGRLTKQGSRWLRWTMIEIAQRQLLCKKKPGFGWYYQRIKQRKGSGAAAAATARKLLAVVWRMLKDNRPFEIVPPGREPRMLTE

SEQ ID NO: 463507 - protein, 323 aa, unidentified
MYYLGVDVAKAKLDCMLLDGTSGKRKAKVVPNTRAGFTQLLEWLDKQGASAPHVVMEPTGVYHEPAALALTDAGLTLSLVNPAQLRQFAQGLGVKTKTDKADSAVLARFGQMQQPEAWQPPSRSARTLKALLARRDAVADDLQREHNRQEAADFAQTPGEVKASITQTIVFLESELKRFEKMINDHIDSDPDLRSKKELLGTIPGVGERVSTNMTALFAARSFERAEQVAAYLGLVPVQWESGSSVHGRPRLSKAGPSHLRKLLYMPAVTARQCNPHVRALGERLLAKGKPMMAVIGACMRKLAHLCFGVVNSGKPYDPKFAM

SEQ ID NO: 463508 - protein, 369 aa, unidentified
MDDITFVGLDVHKATICIAVAEGTRGGEVRQLGVFENRPEILRKVVSRLSKGGRRLSFCYEAGPCGYGLHRLLTGYGHECVVVAPSLIPMKAGDRVKTDRRDALMLAKLHRAGELTAIWIPDAAHEAVRDLVRARATAVRVLVKARQHLQGFLLRHERIYRGARAWTLAYRRWLSTVRFDHPAQQIVLQDYIHAVQEAETRRDRLTQQIEELLPNWSMAPVVAALQSMRGVALVVAVTVVAEVGDFRRFANPRQLMAYLGLVPSEHSSGSSVRRGGITKAGNALARRVLIEGAWTYRMSARVSRKLHDRLEGLPAAVRDIAWKAQLRLCARYRRLAATGRPKVVVTTAIAREMVGFIWAIARVAQPALV

SEQ ID NO: 463509 - protein, 354 aa, unidentified
MKKLVKQIVGIDVAQKELVVCLGRMTDEWSPELFAYKSFTNNVKGFTALENWVKKLANPDVPVRFVMEATGVYHESLAYYLFGQGYAISVVLPNKISNYFRTLEVKTITDQTASQAIALFGLERKLEDWKRPNVVFKRLRQLVRERDQLVQERTIVKNQLHAEKSEAEPGSSSMMRMKKRITLLDKQEMEIKEEIQSIVKKDTSTNDAVKLISTIPGIGLLTAVTVLSETNGFELIRNKRQLTSYAGLDVVQKQSGTSVQGKPRISKKGNKYLRKAMYLPALSVIRCDERFKAIFTRVVVKKGIKMKAGVAVQRKLLEMTYTIFKTNQPYDKDYFKKEMEKQSIKEDKIRAVIN

SEQ ID NO: 463510 - protein, 350 aa, unidentified
METAYDGLQFVGMDLHRRRSVLVRMTEDGRRLGTARITNSPAELRREIAKAGQGPQVVLEATYGWYWAVDVLAAAGAQVHLAHPLGVKAFTYRRVKNDERDAADLADLLRMGRLPQAWIAPAEIRELRELTRYRIKLVQRRSGFKEQVHAVLAKLGVQVTCTDIFGVWGSMWLDGLSLPQPYAGKVASLRKLAGELTAEIGLLDTVIADLLAGHDGYRAVQALPGIGPVLAAVTVAEIGDIARFSCPARLCSWAGLTPRHRESDLKVTRGHITKQGSPILRWAMVEAIQHQPAGSPVRAVKDRIIARRGIEAKNIAKTAAARHLLTAVFYAMRDGHVRSLAARTAARDAA

SEQ ID NO: 463511 - protein, 397 aa, unidentified
MYIVGIDIAKRKHEAAVIDGEGTVIIKPFSFTNNCSGYNRLLAMLAKAKLPLDEVSFAMEATGHYWLALFTRLQKEGFRVQVINPVQTNSIRSFYIRQAKTDPRDALLIAEVIRFGHFSESTLHPENIYELRELCRGRHAIVSMQADVKRKVVALLDQVFPEYETAFTNMFSDTSMAILQTCPTPKELSEMPLEELCHLIEVSSHKRFRMAKAQELQALAHGSFGFAMAGDVFSTMIRLYAKHLVFLKQQVQEMDRKIAEIMDTLDTPITTITGIGPTLGAYILSEIGDISRFSSAAKLAAYAGIDPTMRQSGEYNGVRNRMSKRGSPYLRHAIWLATSSAVLHDPALKLYFQKKRDEGKTYMASVGHVCRKMVSIIYAVMRDNKAYTPYIPNEISA

SEQ ID NO: 463512 - protein, 375 aa, unidentified
MINYTIFVGLDVHKDSITVAIARSGKQDVESIGFINNDSTSVRKMVKRLEEKGGELSFCYEAGPCGYGLYRQITAMGHSCMVAASSLVPQRPGDQVKNDRRDARKLARHLRNGDLTSVWVPDEDNEALRDLSRARQSAKEDLHRNRQKLLKFLLRLGVRSPQGIKNWGSKYWQWLKALKLDNSIQQMILSEHIYAIEECDSRVSRFEKEIEAQSQDGPHQKTMAALQGLKGVALITSTTILSEVGDLTRFKNPRQLMAYAGLVPSESSSGNIIKRGSITKSGNSHLRKVIVEAAWHYQHRPTLSIGLKKRQEELSEEIKQISWKAQHRLNLKFRRMVAKGKPSQKAVIGVARELLGFIWAVGQTVGKENELSEAV

SEQ ID NO: 463513 - protein, 355 aa, unidentified
MNQEKYIGMDVHDATISAAVKNAEGKLLMECVLETKAATILDFIQGLRGTLALTFEEGILAAWLHDLLKPHVSRLVVCDPRKNALMRDGNQNDRADARNLAELLRTNQVKAVYHGKHGTRALKELGRSYLTLTKDSSRVMNRIKSVYRSWAIPCGGTSVYSRRHRAEWLAKLVEPAVRIRAEHLYQQLDSLEPVRHAARRELLGESRKHAAVKLLRQIPAIGPIRSALLVAILQTPHRFRTKRQLWAYSGFAVQTYDSGEYRMVRGKLQRNRERITVRGLNRNHNHDLKNLLKGAAISAIQRPGPLQDFYAALVEKGMRPSMARLTLARKIAAITLIMWKKGVSFDPKQLQRQAA

SEQ ID NO: 463514 - protein, 353 aa, unidentified
MVYSPNEYDIFIGIDVDQKSFSFTVKNHDTMSNSYKIPANPENLYQHIRNRYNNQRVICAYEVGVTGYHLHDYLTSQNIRCLMVPPQSVPKASNDRTKNNRLDSDRISQHLKNGDMEPIRIPDYDYRELRQLLRSREEYVDLRKVSKQRIKSLLLFAHLHTLLKDTTQYWSYAHIKRIKELPCSPATRKRLDFLLNDLNYSRNQTVIIIKELKSFSDQNASLKCNIHYLRSIPGIGFITAITILASIGDPQRLRNPRELSAFVGLVPSEYSTGERITRGRITHLGSSVLRCLLVEAAWANIAKDARLRQFYDRIRSKHHPQIGARKAIVAVARKLTLIIYRVLKEQREYITNI

SEQ ID NO: 463515 - protein, 455 aa, unidentified
MKKQTILKRKQKRISKHLEQVNLYAAGIDIGSTSHYVAVPAELDDDPVREFPCFTADLNRMADWLVQMGIQTVAMESTGVYWIPAFEILEERGLEVFLVNAHHVSNVPGRKSDVQDCQWLQQLHTYGLLRGCFRTPEENIALRSYMRQRENLIQGASDHIRRMQKALRQMNLLLDNVVTDITGKTGMGIIRAILDGVREPGELAKLRDARCKQDEQTIASSLEGHYREEHLFSLKQEVEFYDFHQQQILDCDATIETQLRKLDSKGDPDDLASVKKRKNKNGLAFDVRRELYRMSGVDLTRIDGMDENSVLKVLSETGTDMSAWPTEKHFASWLTLSPCNKITGGKVFSSKTRPSANRAAAAFRMAAFALFNSKSALGAYLRRMRTRLGAPKAVTATAHKLARIFYNMLKNGTEYVDQGQDYYEEQYRERVMKNLKKTRGRSQLSEQDPQGVLFS

SEQ ID NO: 463516 - protein, 447 aa, unidentified
MIRGVKSCAEMTPNLVNQGGLHMDFKQNHKINQVTEKTLVVGIDIAKRIHYACFVDDRGRVLRKSFSVSQSRDGFELFYQRILTEMKEHEKTEVIVGIEPTGHYWLNLAYFLEERGIPLVMANPMHVKRSKELDDNLPTKHDRKDALVIARLIKDGRFSYPRILKDKEAELRVGATFRSKLTEELGAVKNMMIRWLDRYFPEFTQVFPSFGKMAMAVLECTPFPSDLHQKQPDEVLTLYRQVEGLKSPQRPKAMRLIEVAANSIGVTEGREMARIEIATLVRRYHQLEQDIESITQHLVELVQTSVEYEWLSSVQALGDVTIVDLLAEIGSFSHYVDSRQIMKLAGLTLRENSSGQHKGQKRISKRGRRRLRALLFRVMMPMIRHNEAFRKLHEYYTNRKENPLRKKQSIVVLCGKLLKVLHGICTKHKAFDAQRMMKDIPSLAEAM

SEQ ID NO: 463517 - protein, 351 aa, unidentified
MIFEKNIGLDIHGGNSCFVVNDRNGKILRRAKVKTTERELLEFIRSEKGKKRLALEETSLSQWAYMLLRGEVDQIIVCNTSQRGRRQGPKTDFRDAYELAELMRIDALKPVFHTADSKMELRVLVSSYVDLMQEIVRAKNRYKALFGREAKSETGACFYRDEGKIDSLGSEEKRFSARHLLEQIKLLEKHKEAYKERFIRNVRRFKEIRLLTGIPGIGPVFANQLVGAIVTPYRFPDKYSFFAYASLIKHIQWSDGKAYGKIKAHGRTQLKYIFRTAAQVVLRGKSSFRRKYDEMLENGYSEKSAKHAVIRRLASTVLGVWKSGKKYNDKLWEVQRSKDCHRAEAVSLRAC

SEQ ID NO: 463518 - protein, 418 aa, unidentified
MKKHNNSPMKSEQQPSKRAKSRGPVPRDTKEVMAELVGKLRKKLDPKVVAASAGEEHPRGGLRPNLDRLTAGVDLGDQWSHYCILGLEGETLAEGQLRTAQHDVAEFFQALNSARVVLEVGTHSAWVREIISSYGHEVLVANPRLMEGSKRRKRKNDRIDANKLARLGHVDPKSLYPMQHRSKEVRQDLVMLRARDALVAARTELINATRGLVKSMGTRLPNCSSPSFAQKVEEALPAEIREALLPLVRLAAALSDCIKGYDKKIEKLGSEKYGPTALLRQVTGVGPITALAYVLTLENPERFAKSRDVGPYLGLVPKQEDSGDSQPQLVISKAGDTMLRKLLVGSAHYTLGPFGPDTDLRRYGLRLCERGGKNGKKRAVVAVARKLAVLLHRLWVSGEVYEPLRHAMSATTAEAAAA

SEQ ID NO: 463519 - protein, 403 aa, unidentified
MFIVGIDIAKRSHEAIVLEDSGKVAHKAFSFKNDVSGFKRLLDILLSLSADPDHFVVGMESTGHYWLALYSALRKQGFSVCVLNPIQSNALRNLYIRQVKTDQRDCLIIADVLRFGRYQQGNVPPSELYELRELCRARSFLVDTTADLKHKVIALLDQAFPEYETLFTNIFGLTSSELLLNCSTPEEILAIDTDKLAKILETPSRKRFGRAKAEQIKETAANSFGVILEFGSAGFLIKQYMEHIRYTESQIAQLEEKIAELFSHFDTQLTTIPGIGPTLGATIFSEIGDISRFPSPAKLAAFAGIDPSVKQSGEFQSSHAHMSKRGSPYLRRAIWQAAVIAAMHDPAIRAYFEKKRSQGKSYMVAIGHVTRKMNNIIFAVLRDNKPYYSSCLLYTSPSPRDTR

SEQ ID NO: 463520 - protein, 352 aa, unidentified
MPKGTRIVIGGVDTHGRTHHAAVLDEQGRLLGDQEFPANRGGYRQLLSWLGHHGQVGVVGVEGTGSYGAGLARYLLDQQVRVVEVDRPDRRIRRQRGRSDPIDAEAAARAVLAGTATAAPKRRDGIVESIRALRTARSGAVKARTAAINQLKALLVTAPANLREALDGRSTPALIAACGRLRPDQNALADPAHATKAALAMVAQRIQLLEAEITLADQRLAILVGRAAPRLLGLLAIGNDHAGQLLVTAGQHPERLRGEAAFAHLCGVAPIPASSGKTHRHRLHRGGDRDANRALHLAVVVRMRFCPRTRAYVQRRTREGLSKPEIIRCVKRYLAREVYHALVADFEALHAT

SEQ ID NO: 463521 - protein, 340 aa, unidentified
MNEITTIGLDLAKHVFQVHGVDASGAPVVRKRLRRSEVLAFFARLPSCLVGLEACATAHYWARQLQAVGHEVRLMPAQYVKAYVKRNKNDAADAEAICEAVRRPTMRFVPVKTAEQQAALLVHRGRERLVRQRTALVNALRAHLAEFGVIAPLGLRNVAGLIAIVRDESDARLPALARQVLRVLATQVEQVEAAVAALEKQLMAWHKNNPVSQRLASIPGIGPIIATAIAATVVEASGFRSGREFAAWLGLVPRQHSTGGKARLGGISKRGNRYLRRLLINGASANLLRSKATNADPWVIGLRRRRPSLVVAVALANKTARIAWAVMHRQENYRRLTAAA

SEQ ID NO: 463522 - protein, 345 aa, unidentified
MKPVVRIGMDTSKSVFQLHGVDDAEEPVIRCQLRRREMIKFFETTPPTSIAIEACGSSHHWGRLLTSFGHEVRLIPPQYVKPYVKRGKNDAADAEALCEAVSRPSMRFVPIKSREQQAACMLMSVRERLVGVKSQLSNAIRSYAAEFGIIGPPGRQNVAALIKRTLEDDTLPQLAKELFGLQAKEYQAVESRLEEIEAKLMKWHRNDDVSRRIATIPGIGPIGSTMLSVKAPPAGNFASGRHFAAWLGLTPKDHSTGGRVRLGGITKAGDPSIRSTLIVGATALLRHVRKGRTKPSRWLAAMLERKPPKLVAVALANKFARIAWRLMISGGVYSRPGDPELSAAA

SEQ ID NO: 463523 - protein, 317 aa, unidentified
MDRRIEPDRYVGIDVAKGQVTVHVRPDTTTFSCRTDAQGLADLLTRLRPLTPKLIVLEATGGYEATVAATLTAADLPVAVVNPRQTRKFAGALGRLAKSDAIDAADIAHFAEAIRPQPRPLPDEQTIRLRALLARRHQLVVMAGAEQQRHDRAETALARRSCAAMLRSLRAEIARIEHAIDKLITASPIFCAKQDLLKTIPGVGDVVARTFIAELPELGAVDRHKIAALVGLAPMNRDSGRMRGERHIKGGRPQIRSPLFAACLAVIQHNPPLRGFYQRLVAAGKAKRLALVAVMRKLVCIANAILRTQHPWAHAQS

SEQ ID NO: 463524 - protein, 338 aa, unidentified
MVLYAGIDLHSNNNVIVVQDEEDKVVGRARLANELKKVLAWLEPYREELTGVVVESTYNWYWLVDGLIEHGYPVHLANTVAIQPYEGLKYRDDASDARWLAKLLRLGELPEGYIGPRAERAIRDLLRKRSQLVRLATINLLSIQNLFARNRGESISANRVKRLTPAMVDAAFADTNVALAVKSNVKVLECLREEIRLLEGAVHDQVKLRKSYKQLLTVPGIGRVLALTIMLETGDIGRFREVGHYVSYGRLVGSSHLSNGKRKGSGNTKNGNAFLCWAFIEAANFAIRFNSTIRRYYQRKQARTKRIVALKAVAHKLARACYHMIQEDVAFNVTRAFA

SEQ ID NO: 463525 - protein, 337 aa, unidentified
MKFVGIDLHKKSISVCVVDQQRQVLIRKRFACADPDRIVAFFKELELFQAVMEATSSYEWLFKLLEPLAQRVLPAHPKKLRVIAESTRKSDKLDAQVLAEFLALDMIPEAHRATPRQRQHRRLVRQRSYLHKRITCVRSKIRWILTDYNADRSDLFTAKGLTYLERVKVSSEDRFVLDQLTEEWKTYVQQVDTLDKRLREFAKSAPAAEAEARAVLDSIPYVGPVTIDAVVSELGDVRRFRSQKRAAAYSGLVPGQRESAGRKRETGITKEGSRILRWVLVETAWRLVYHSRRWGSVFEALCKRRGKKRAIIAVARRLLCMMVAMLQSGRRYQAAMV

SEQ ID NO: 463526 - protein, 424 aa, unidentified
MREEGLSMAEEIEWFVGIDWASQSHQVCLVDARGERLGERAIAHGGLGIEELCDWLIARTGATPEVIGVAIEMTQGPVVAALLERGFCVYGINPKQLDRFRDRFTVAGAKDDRRDAHVLGDSLRTDRHAFRRLSNDEPVIVKLREWSRMADDLQQERARLASRMREQLWRYYPQMLELADDLAADWFLDLWNQAPSPAKAARLRQTTIERFVKAHRLRRWQAPEVLRILKQKPLSVAPGVVEAASDHIRTLTVRIRLVNQQLKAAHRKLDELCAQLVPSEEGEPGQQCEQRDVVILRSMPGLGRIILAVLLAEGWQPLRRRDYHALRSLSGVAPVTRRSGKTCVVVRRYACNKRLANALYHWARLATQHDALSRRRYAALRQRGHSHGRALRTVADRLLSVACTLLEQQTLFDPTYEVHEAAGA

SEQ ID NO: 463527 - protein, 352 aa, unidentified
MAKTDFDELMSIGIDIGKDTFHLVGFDQAGQRVLRKQIKRLALVTTFEKLPRCIVGMEACLNAHFVSRTLREMGFESRIIPAIYVKPFNKGQKNDYNDAEAIAEAALRPNLQTVSEKSQDQLDLQALHRVRSRLVSRRTATINQIRAFLIEQGITVRKGLRALKNSFEAILEERKDEISPRMRSILIGLYGDWMWMDDRIDKVSAEIEEISRTEENCVNVMTVPGIGPMISTAMVAAIGEGEAFDRGRDFAAWVGLVPRQYSTGGRTVLGRISKRGSRYLRMLFVQAAKIIMMRPHRWPGFSFGDWLARASERMHRNKAAVALANKLARMAWSILRHKTAFDAPRDEVAVGV

SEQ ID NO: 463528 - protein, 400 aa, unidentified
MLSIGIDVSKGKSIVCGMKPGGEIVYAPFEVQHTREGMLELVSLLRGSGEEVRAVLESTGSYHCPVVAALLENGIFVSVVNSLRMKRFCSQSIRKVKTDRIDAMQIALYGLAYWQELQPTRLPEDTYRELQLLARQYYQMTSILIKAKVDFNALCDQVLPGMQELMSDHAGRHKLSDFVLRYRHTTHILEMGETRFRKDYCKWAEKKGYRNCERMAVLIFATAQNGIPVLPNAPSTQIVITEAIRVLHTVEASRDAILTQMQALAKTLPEYSLVREMPCIGDTLAPRLIAEIGDVRRFHSKRALIAYAGIDAPPYQSGKFCANNRHISKRGNRYLRKTGYEVMQSYVMHKPANDPIFTFIEKKRGEGKSGKLAMVAGLNKFLRVYYGKVTELYRSLPTIE

SEQ ID NO: 463529 - protein, 343 aa, unidentified
MKIYALGIDLGKTVFHLVGLDASGQVVVRKRCSRTQLLAFTANLQVGLIGMEACSGAHFLGRALRAQGHEVRLIPAQYVKPYVKTNKSDYIDAEAIAEAVQRPRMRFVPIKTEEQLDLQALHRVRERWVMRRTAVVNQIRSLLLERGLTLPKGRSHLDEQLPRILEDAELNLSDSFRVLLAQLKLELEQLAARIEEMDRVIQKTARENEACQRLTEIPGVGPVTATALIGAVGNASAFGKGRNLSAWMGIVPGEYSTGGKQKLLGISKRGNKYLRRLFVQGARSVLQQRHKQAPGLREWLAQLLARTHQNVVVVALANKLVRMAWAVLCKNERYRAPVLAITT

SEQ ID NO: 463530 - protein, 404 aa, unidentified
MELSAVYRCVAALDVHQAKLTVCVLSENDQGEVETHIREFGGFKRDRREMAAWVASFHPELVVMESTGIYWKSPYAALEWHGLKLAVINARHVKQVPGRKTDINDAQWLAILARSGLLRGGFVPPRHFREYRLIARQLQKLTGIASGERNRLHKLLTDAGIRLSVVVSDLSGKSAQAMIKGLLAGETPEQLLAYADPRLKASPDELREALAGDLSDSHRFVIQELMTHLEELDARILRFRQALLSHLAPYQTILQNLQTLPGIDEFSAAMILVEIGDDMAAFGSPAKLASWAGVCPGQNESAGKRKSARARKGNPYLRRILCEAANAASRTRCSLQDKFKGLLIRRGRKRAIFAIAHQLLKTVFLLIQRGDYYRDAQTDYEALSVQRNAPRWLKKLIQYGYITA

SEQ ID NO: 463531 - protein, 332 aa, unidentified
MEQFIGCDAHKKFSLFIAMNEDGEYGKAIRVGHERERMRAFLEELPAGQRIALETSGSYYWLVEEMERAGHVPQLAHALTAKRRMEGRHKTDERDARGLAMLLRNGTLPRVWIPPAELRDQREMLRLRMSLVESRSQAKNRIHGALLRYNVELKAKDIYTGEGRQELAGQLAQVPEWTRQSVVRQLEMVDYLERQIEACEQSLETMLAPNAERDLLRSLPGVGKILSAVIALEIGDIARFGSAQRLVSYAGLVPAARESAGKKRPGKCPADCNTYLKWAFVEAANVIAVHHKKWPDRHVAQLYTRVKHTTKMHGKATVAVGRHLAEAAYWIF

SEQ ID NO: 463532 - protein, 337 aa, unidentified
MDVHKKSWTSHFKTDLFDYKTVTTPADPNSLHDYVQKHFPGHEVICCYEAGCCGYWIARTLQQFNWNVLVVNPADVPRTNKQDWQKTDKIDCRNLCEQLQKKNVHSIHIPDEEQEQLRSLFRRRNHLVRQLRTIKNHIKSQLLYYGIKLPEQYDNPNWSHEMKTWLGNIKWQFSSATETMRSRLKQLDFLWYEELHISNELRAYCRKHHRKDYYLLKSVPGIGGITAAGMLAELGDIRRFSRIDDLAAIVGLVPGIYKSSDNEICLGLTKRSNRYLRSLLVETTWVAVRTDMALQAYYRKHAHKEPNKAIIKVAHKLLSRIRAVVISGIPYQTGLVK

SEQ ID NO: 463533 - protein, 414 aa, unidentified
MDVLVERCAGLDVHRDSVVATVRVPGKRRGTRRGETRTFATTIAGLERMADWLVGEHAVTLVGMEATGVYWKPVFAVLEPRVECWLLNAQHLHNVPGRKTDVADSVWIAQLVEHGLVRPSFVPPAPVRDLRDVTRLRTALTQERTRAIQRLEKVMQDAGIKLTSVASQAYSKSARAILSALLAGVSDPVELAALAKGRLRSKTDRLVEALANRFRITHHGVMVRRLLAHIDSLDDQLAALDEKVTAMVAPIAELVDLLCTIPGVAPNTAHVLLAECGWDMSVFPSAGHLASWAGICPGNNASGGKRFSGATRPGSKWLRKALTQAAQAAARGKGTYLAAHHAQIRGRRGSAKAIGATRHDILVAFWHIVRDKVPFRELGPDWAARRFSIEHRTDRLVKQLEALGVKVTIEPDAA

SEQ ID NO: 463534 - protein, 378 aa, unidentified
MKRILKIGMDVHTTNYTLCAMEPIIGEDDRVFATIKVTPDYKNILMFIENLKLKLGLNDEYDIQCGYEAGCLGYSLYNQLTAVGIKCVILAPTTMLTPQGVRIKTDMRDAYMIAQCLSYGGYHAVYIPTEDDDSVKEYLRMRNDHKLALKKIKQQINAFCIRHGFCYDGTKWTLSHLKWLKKLEITNGLHRETLDEYMASYEEQEAKIERYDKRIGEIAEQTRYHDKVKKLGCFLGIKTHTALSLIVETGDFERFAKGNQYASYLGLAPGENSSSDNIHRLGITKAGNSHLRQLLIEASGGICKGAVGHKSKELRARQNGNTAEVIAYADKANTRLRSRYYKFIRHGKKRNVAVAAIARELACFVWGMMTDNIEMKAA

SEQ ID NO: 463535 - protein, 340 aa, unidentified
MHPYFVGLDVHKQVIAYCVKTRDGEIVSEGKIPATRAALDEWVKTLPGPWQGGMEATMFSHWIYHHLKPHAQRLEMGHSARMKAISAGKKKSDKIDARTIADLLRCDLFPSCFVIAPELGALRQQMRFRRLVVEETVMFQNKTAGLLMGAGVEYEGRRLHGKRYFRDLVKDNQWIDEQMRPLLAFNREQIETLQGMEGRLIRMLERHPRLKARVEALQTIDGVGPVTALTWALEIATPERFPSVKAAMSYCGLTSALRESAGQQKRGPLSKQRNRHLQSTLIEAAKIGPMVNAKLRQVHHKAKEKGGHANRATLAVARKLVAYLLAADRAFLASQESVTA

SEQ ID NO: 463536 - protein, 449 aa, unidentified
MAKNKRTSKGMPVIHPSAAGIDIGSRFHVAAVPPDLLKQPVKTFQAFTSDLHAMADWLIQAGITTVAMESTEVYWVPVYEILEDRGLEVILANARDARGVPGRKTDVNDSQWLQKLHACGLLKASFRPDRQISALRSYLRQRERHLDYCAAHIQHMQKSLTFMNLQLHHVITDITGVTGMKIIRSIVQGQQNPLILAKHRDGRCKATEKTIAASLTGNYQPEHLFALEQALLLYDFYQLRVHDCDEHINAALQTLNQSTSVPDTPLPKPRHKTRQPNALNFDVRAPLYQLVGSDLTQIHGIGPYLALRLVSECGTDLSRWPSAKHFTSWLTLSPGSKVSGGKVLSSHSRKTNNRITAHLRLAATTVGRTNTALGAFYRRLSARIGKAKAVTATARKMAVLFYNAMRYGMSYQDPGSDHYEQQYRKRVVKGLHRRAAEFGFTLNEIECVS

SEQ ID NO: 463537 - protein, 401 aa, unidentified
MNALYKPNELHVGIDVGSLSHSIAIGDTHGNFIKEFEITHNQKGFDEFFETIENEANKADAVIAIAMEGYNGWARPLDKLILQKRYKLYNVNNVKLARFKEIFPAAAKSDSIDARKIVELFSLQKHLPAAKEVLQEIPTPDESNTKLKKLTRRRRQLVDERIAIANRFSADLQAEAPDLKALSPSVTNLWFLRFIILKKDIRQLSRVHKKSIMKIDHLGPKRLEPILQWQKEARFSDSLDYTASILYEDAMRLLELKDKIKELGKQIDELIPSSQIARVIKTIPGFSTISAGTLAGEIGTIDRFRSESSLALYLGMTNLDNSSGKRKGSKRNMATNKSAKTAMVTAVMKHSQHVEESKAYIEKKISQGKNYQQAIRSLGRHMVRVIWNMIQQDRAYEIREK

SEQ ID NO: 463538 - protein, 401 aa, unidentified
MFVGIDWASETHAVCVVDDAGAKLANFQITHTADGFQLLVGRLRRLGDPAELPVAIERPDGRLVDRLLEAGHPVVPVKPKAIRTWRQDEVPSGAKSDPGDAQVIAEYLRLRRHRLRRLEPFSAQTRALRAVVRTRDDLVTQRVAATNQLGAMLDAFWPGANAIFASLDSQITLAFLERYPTPESAAQLGERRLAAFCAKHRYSGRRSPGELLARLHAAPAGLVGTVEVGARHDALLALVGVLKALNTAIKHLDRSVVAHLGEHPDAKIFTSLPRSGQINAAQMLAEWGDCRPAYAGAEAVAALGGASPVTKQSGKHKAVHFRWACNKRFRLAVTTFADNSRHASPWAAKVYRDAVARGHDHQHAVRILARAWIRVIWRCWVDRTPYDPNRHGGAARLAAAA

SEQ ID NO: 463539 - protein, 358 aa, unidentified
MQRNKISFKGQRIFIGIDVHKRNWDVAIAPEVGNVKRHTQKASVKELFDFLKRHYPDGDYLAVYESGFSGYSTYYALKEAGIECMVIHAADVPTTQYEEVMKTDRVDSVKLVRSLKAGLLKGIYIREKENIDDRSVVRIRKTIQKQLAGYKARVKHLLYCNGVSFPERFEKPGSHWSMAFIKWLKEDVTLLSSTRNSLDLLIHQVETIRMTLLEATKMVRSLSQTERYKSKFDLLMTVPGIGVTVSMCILTEVYDVRRFHNEKQFAAYLGLIPTSHSSGDKVAHGEKTFRGNKLLGPMIVEAAWISVFKDAGLASLYLHYKERMKPQEAIVRIARKLSNIIFAVLKNEKEYVPYQTGK

SEQ ID NO: 463540 - protein, 349 aa, unidentified
MKILGIDLGKYKSAACLFDSDTHETLHFTFASFPAEFKSLLANTQPELVVIEACALTGWVHDLCQAEAFKIIVANTNQNAWCWKHVKRKTDKDDALKLTKLAALGMIVPVHIPPAESRQYRQLVKYRKRLVSRVTQVQNTIRALFNQQGISIPVGVRAWTVAGLDALGKYRKPLAECDMLSLWQGQLDIELTALDRLWEELHTVDLQLTNIAKQDTRVQILESIPGVGRRTAEVVVAYIDDPHRFKNARQVSAYAGLVPRQSQSGESNRMGRITGRGPRLLRSALVEAAWAMLRYNPWAAALYQRICGGQKSRKKQAIIAVARQLLVRCWTLLRKQEKWNPDKAFGSVV

SEQ ID NO: 463541 - protein, 412 aa, unidentified
MQDILTCAMGLDVHRDVIVACLAKGELGTDPEIEIRSFSTLIPEMRKLRDWVLEVDCHHVAMESTGIYWQPIYEMLESCFDGQINILVVNARHMKNVPGRKTDMRDAQWIATLLRAGLLKGSFIPDKTFRELRHLTRYRKSIVHDITAQKNRIDKFLQSSGFRFTAFLSDAFGASGRNIIRHLMEHGSISRDALDKCLKTQTRKRIDEILIALNGSLSEHQRSFLQMVFGHLELLEQHRCAVEDAIAEEIVKHEEALNLLCSIPGIDVTAAAAIVAEIGTDMSAFPDSQHICSWAGLSPGNNESAGKRKSAHINKGNPYLKSMLCEVGWVISGKRTLYLSGWYWRIKQRKGAKRATIALARKLLALIYTMLKTGTPYNEECFEIRRKQSERKRATRMVNELQRLGYFVVAPD

SEQ ID NO: 463542 - protein, 293 aa, unidentified
MKKPGQHLIAEVPRGQAKVEMTIGIDLGDFWSHYCALNQDGEVVDRGRFRMTPKAIEKWFTDVPPARVAMEAGTHSIWISEQLQELGHGVIVANVRELRAISHSDRKSDQVDAEKLARYARLDPNILRPIAHRTIAQQEALTLIRARALLVRLRTAAVNAVRGLTKSCGYRMPTSATTCFAQRSLAVMPPGLAQALGPVLQQIAEITVKIKQYDRQIQQLGQTEYPETQALLQVHGVGHLTALTFVLTLGSKTRFGRSRDVGCYLGLRPRRSQSGDHDPQLGITHAGNANLRS

SEQ ID NO: 463543 - protein, 430 aa, unidentified
MVIKTRKEDILSTLFVGIDVGSKANAVCAIDFFSEKHLAFTVENNHAGASLLVEKLAGFLSAKDFTQLIIAMESTSVYSTHIASFLSTAAQLALYKTEVYCLNPKQTANYKKSYIDEGKTDPIDAFMIADFARVGRIKQSPWRGSQFIALQRLTRHRLHLAQSIAREKSYMLTNIFLKFSELALDTDKSPFSDTFGATAEAVLREFLSTEDIIARSPAELVGFVNEKGRGRFANPQHTADLLRQAAKNSYRLDKCLYEPLTISIASSFNCISAFEKEIKSIDKAIANAIKGLNPLEYQCLTSVPGIGPVFAAGILAEIGTIVSFNSENALAKYAGLVWNRSQSGDFEADDTRMSKAGNSYLRYYLLEAANSVRRYIPEYSDFYRKKYSEATTHHHTRAIALTARKLIRLIFGLLGKNRLYSPDPAGGKIK

SEQ ID NO: 463544 - protein, 324 aa, unidentified
MHRQSIFNRKLRRAEVLRFFEKLPPCLVGMEACGGSHYWAREIAAFGHEERLIPPIYVKPFVKRGKTDAADAEAISEALTRKTMRFVPVKSADQQAAAMVLKTRALLVRQHTQAINALRAHLSEFGVIAAIGTATVVALIEIVRDEADMRLPKAAHFALAEIANQIEALTRQIEKLEREIVAEAKRDEDMRRLVTIPGVGAITAASIKALVPDPDGFKSSRHFAAWLGLTPKPHSSSGKERLGGISKMGNPMLRSLLVLGATSVLRRARGNANAPQWLIALLARRPFKVVAVALANKMARIIWALLTKGGTYRNTGPARGAASA

SEQ ID NO: 463545 - protein, 346 aa, unidentified
MAKSSVAVLGIDLGKNSCSLVGFDPAGAVVLRRRARRETIVGLTAKLPACVVAMEACCGAHHLGRLLAAQGHTIRLMSPEYVRPYVKAQKNDDRDAEAIAEAATRPTMRFVPLKAQDQLDMQSLHRVRSRLVSMRTMLMNQLRAILLERGLVFPQGRRKFETAVGILVTDPEAQIGARIRSLVVDIREEWANLDGRIEALDREFVAHARADEAARRLVSIPGVGPMTATALRAAVDDGSAFASARDLPAWLGLVPRQHTTGGKPKLLGISKRGNAYLRGLFIHGARAALATLSKVEDATGRWLRGLLARTHYNVVVVALAAKLARIAWATLRKGVSFERRPEPALA

SEQ ID NO: 463546 - protein, 379 aa, unidentified
MTTEFAVNDVCCVALELSKSTWVCAFAPPESGRASVHRMRAGDVDRLVSILETGRARAMRDASRALEIALCYEVGYDGFWLARLLIARGIRTIVFDPASFLKPRRGRLAKTDRLDAEEMTRILRTWLSGDRAVATAVRIPTVEEEDAKRIERERKNLVEERTRIVGRIKGLLALHGIWLSSKRIGKGLLGRLHTMMTGDGRPLPPFLRRDIGRMIQHYEFICDQIAEVEADRKTALNDETSSFPQRDKVRRLTSLGAVGVTTATVLVAEVFHRTFETRRHLASFIGLAPSPYASGDVNRDRGINKAGTKLARQTLVELAWFWLRYQPNSKLARWWHERFGNMGMRGRKVGIVALARKLAIALWRFVEQGVVPEGATLKS

SEQ ID NO: 463547 - protein, 375 aa, unidentified
MDNHIEAFVGFDTSKLRNAVAIAEGGRGGEVRFVGEIENTASATAKLVRKLGAKYAQLTFCYEAGPTGYGLHRQIESLGYQCMVVAPSLIPKRPGDKVKTNRRDAVSLAKLLRADELTAVWVPDSHHEAMRDLTRARETAMLDARTKRQQVSALLLRLGRHYPATKKTWTKVHLKWLASQKFDHPEQRHVFEEMMLAMRQAAERQERLEQAIRAAVPDWSLADWVTALMAMRGIDLIAATTLLAEVGDLSRFRTAHAVMAYFGIVPSEDSTGDVVKRGPITKAGNRRARRMLIECAWSYQHPPRIGQTKQPKVDAAPPAVREIAWKAQCRLYRRYRALTRKGKLKTVAITAVARELSGFIWAVNREIATARDAAS

SEQ ID NO: 463548 - protein, 343 aa, unidentified
MNVFIELDVSLASTAICVLGPQGKVVEELEAASEPEALVRAMASLPYAVDAIGLEAGPLSQWLSKGIEEAGFDVVLMETRLVKAALKAMPIKTDRRDAQGIARLLQMGWYRPVHRKSVSSQEIRALLSARKSIQQAIINIELSMRGVLRNFGLKLGHVTRVRYEARVRELVADNDILSASALALLRARGQLRTELASLDEKVVGLAEHDDVCRLMMTMPGVGPIVALTVRSAIDDPARFAKSRDIGPWVGLTPRRTQSGEMDIVGQITRAGDRGLRSALYQAATILMHRAAPNWLQAWALRVAHRRGSKRALIALARRIGVILHRMWMDGSPFRFTLNPGPTA

SEQ ID NO: 463549 - protein, 351 aa, unidentified
MFKQVNLDLLTINSKVMEFTYFIGTDVSKNELDFAVMRGKVFLFHKEIANTETAIILFIKELVKLPGFDLASAIFCMEHTGIYNNHLLACLHNKKANIWLESALQIKRSSGNIRGKNDKVDAIRIADYAYTKRDKVRLWVPRREIIQQLANLAATRVRLIEAKKILKTPLQEQDSFTAKKIIRHSTYVCSHTLKAIDADLDRAEKAINNLIAKDPELKRLFNLVTSVNGIGKVTATQILITTNEFKDISNPKQYACYAGVAPFIEESGIFKGKGRVSHQANKKVKTLLHMAAIVAIQYNQDIKQYYDRKVNEQKKNKMSVINAVRNKLILRIFACVNHNSPYQNNYQQSLA

SEQ ID NO: 463550 - protein, 349 aa, unidentified
MLADQLDYVVGVDTHLDEHVLAVVAAPTGAVVARQTVRASAGGYAAALRFVAEAATGARAWAIEGAGHYGAGLARFLAGRGETVLELSRTPRAERRLRGKDDSLDAARTARAALASETLALPRSGERREALRLLLIARRSAVDVRREALVQLRSVIVTAPDPLREQLRRLPVGRLLKRCSRLRRSSSARPDELATRLVLRSLARRIEAATSEATELEREILAHVRALAPQLLDEPGVGPIVAAQLLVAWSHRGRVRSEAAFARLAGVAPVPASSGQTTRQRLSRGGDRQLNRALHTVVLHRRQHDPQTRDYIARRTAEGKSRREATRLLKRYLARHLYRLLQHREPLLA

SEQ ID NO: 463551 - protein, 358 aa, unidentified
MNKNSTIFIGLDLGDKFSYIAILDQDAEVIEETRLPTRKSAFKRKFSSFPPCRIAMEVGAQSRWVSHLLREFGYDVLVANARKLRAIYANPRKDDRADAEILARLARLDPDLLSPIHHRSPQAQADLSVIRSRDALVRSRTLLINHVRGIVKSFGDRLSSCSANYFAKKVASDIPEPLQPALIPILDTIASLSQQIRAFDRQIESLCENKYPETKLLRNVSGVGPLTALAYTLTLEDPQRFPKSRDVGPAIGLVPKRDQSGDRDPQLRITKTGNTFLRRLLVSSAQYILGPFGPDCDLRRWGLKLAERGGKNAKRRAVVAVARKLAVLLHHLWKNGEVYDPLFHSQSNEALPALLAVV

SEQ ID NO: 463552 - protein, 410 aa, unidentified
MEVLYERCCGLDVHKETVVACLRVVSGGEVAREVRTLETTTASLMALSEWLAENGCTHVAMEATGVYWKPVWHILDDGDFQLILANAAHVKNVPGRKTDVNDATWLADLLAHGLIRASFVPDTQTQELRTLLRTRKQLVREKSSHILRVQKMLEDANIKLDSVITDVMGMSGRAMIEALIAGESNPAKLARLANYRLRASQEKLREALRGRVTKHHRFLLRLHLNQIDALDASIVMIDEQVEAGIAPFRAAVGQVMTIPGIRDIGAQVIVSEIGTDMSRFPSEGHLISWAGLCPRNDESAGKRRSNRLRKGAPWLKTTLVQCAWAAVRKKGSYLQAQFLRLKARRGPKKAIMAVAASILTAIYHMLKDGTLYQDLGSNHFQNRSKGQQTKRLVKRLADLGYKVALTPLAG

SEQ ID NO: 463553 - protein, 429 aa, unidentified
MKKKNNSLTKSDRIGKPGKARGPVQRDAKEVMAELVTKLSQRFEPQSARTIKDEGRQQGIPGPNRDRLTVGVDLGDKWSNFCVLGLDGEKLTEGELRTGQEDFAEFFQSLAASRVVMEVGTHSAWARDVVARSGHEVLVANPRQMEGPKRRKRKNDRIDAHKLARVGRMDPQSLFPIEHRSVEVRQDLVAVRARDALVAVRKDLINTTRGLVKSMGARLPKCSTQSFAKKAEGALPAAVREVLLPLVRLAETLSSYIQEYDERIEKLATGKYAHTELLRQVKGVGPLTSLAYVLTLEDPQRFVKSRDVGPYLGLVPKQEDSGDRQPQLRITKMGDMMLRRLLVGSAHYILGPFGPDTDLRRYGLRLCERGGKNAKKRAVVAVARKLAVLLHRLWVSGEVYEPLHQALPKVTQEQAARPAPAEATEEEAA

SEQ ID NO: 463554 - protein, 391 aa, unidentified
MIYIGIDVAKDKHDCFITNSDSEVLFKAFTIFNNLDGFNDLYQKIESVMDDVTKVKVGLEATGHYSYNLLGYLIDKGLPTYVINPLHTNLYRKSLSLRQTKTDKVDARTIASMLMSDVNLKSYSDTSYHNEELKSLTRYRFDKVKERAKLKTSVSRLVCILFPELEKLVPTLHMASVYALLSEFPSAKHVATAHLTRLTNLLSESSKGRYGKDTAITFRDSARASIGSNMPAKSLELKHPIKLIQELDSEIDEIENEIKIIMDEINSPILSIPGINYRMGAMIIAEIGDFNRFDSPDKILAYAGFSPSTYQSGQLDGAYAHMEKRGSRYLRYALYNATKYVCHWDPTFAAYLAKKRAEGKHYNVAISHAVKKLVRVIYHLEKTKQQYIKAA

SEQ ID NO: 463555 - protein, 402 aa, unidentified
MNCVGIDVSKGKSTIAVMRPFGEVVVSPFEVCHTVNELSELARLLKNLDGETRVVMESTGNYHAPVAWLLHGAGFYVSVVNAMLVHDYGNNSLKRAKTDKKDAVKLANYGLDHWLTLPRYVPEEDTRLMLKTCYRQYQQYSKVQTMLKNNLISLLDTAFPNANRLFTSPPRADGSEKWVDFVATFWHCECVCGLSKKAFTAKYQKWCRKHGYNFSQDKALDIYASACGRFGVMPKTNTAKLLVEQAISQLQTTSAALAALKQEMQSLAASLPEYPVVMEMFGVGPTLGPQLMAEIGDVRRFHSKKALVAFAGIDAPPYQSGQIDVRSRSISKRGSASLRRTLFLVMGVLLQCAPMDEPVYQFMNKKRSEGKPYRVYMMASANKFLRIYYASVKAYLDSLEHD

SEQ ID NO: 463556 - protein, 401 aa, unidentified
MQGQIQPQTPSAQPVYVGIDVCKDHLDIHLHPLGHGLRLANDRDGVSRLKRLLARHDVARVVLEPTASYHRLVHRSLAQAGWPVAVVNPLRARLFAEVLGSRAKTDRVDAKMLAILGATLAPQATPPAPEALEDLRELVHARAAATQERTALANRLTASHVAVLKAELRRRLAGLDRHIARLAREIGRRITDDPGLARRQAILTSIPGIGATVAAVLIADMSELGQLDRHACASLAGVAPSPTTAATSGGRATSGAAAPCPAARSIGQRCPPPGTIPTSPSSTNACATTPKNPRSPSPPSCESSSSSPTPCSRRTDCGPQNTLDLKHRCSPQPSPHGRGGKAITCRHFFRLSSTQEVAATMVRTTKMTPMALTMGERPKRMRAPISVTSVQEPPMAKNVVL

SEQ ID NO: 463557 - protein, 412 aa, unidentified
MQVIHRVCCGIDVHAKMLVACLILANGEKQKRTFSTMTVELLKLRDWLVAVQCTQVAIESTGVYWKPVFNILEDALTVILINPEHAQALRGRKTDVKDAEWLADLLRHGLLQPSFIPPPVIRELRELTRYRDSVVREQSSVANRIQKLLESGNLKLGQVASDALGVSGRMILKALAKGESDPRKLAALARGKLKEKSLSLEQALQGRLTVNQRFVLGELLSRWEQLEAADARVTGEIDKYVQANPKLARAREQLDTIPGIGPRVAEVIMAEIGIEMAAVFADAAHLASWAGICPGNKATGGKRLSGRTRKGNTYLRSALVQAAWGASLKKHCYLSSQFQRLVKRLGRKKALVAVGHSLLVIIFHVLQNDQSYTELGGDYFDRRHVEQQRDYYVRRLQMLGLKVTLEELPQAA

SEQ ID NO: 463558 - protein, 387 aa, unidentified
MIYVGIDIAKLNHYASAISSDGEVLLEPFKFTNDNDGFCLLDSKLKSFEMDQLIIGLESTAHYGNNLLMFLVPKGYNVCLINPIQTSTMRKNNIRKTKTDKVDTYIICKTLMMHPHRFVTLYDLGLMQLKNLGRFRQKTVKQRTRLKIQLTSYVDQVFPELQYFFKSGIHHKGCYALLKEAPTPDAIASMHLTHLTHLLKAASKGHFQKETAVELRVLAQKSVGSSDKSLSIQITQSIEQIELLDRQLESIESEMKDIVTSLDSVIMTIPGIGYINGGMILGEIGDINRFSNPSKLLAFAGLDPSVYQSGNFEAKHTRMSKRGSRALRYALINAAHNVVKNNKTFNTYYHQKLSEGRSHYNALGHCAGKLVRIIYKMLTDNVSFNLD

SEQ ID NO: 463559 - protein, 442 aa, unidentified
MPVTHPNAAGIDIGSQFHVVSVPPDRTDKSVQTFKSFTGELHAMAKWLKECRVDTIAMESTSVYWIPAFEILESYGFEVFLVNAREAKTVPGRKTDVNDAQWLQKLHQFGLLRASFQPSKEIAGLRAYIRQREKLIEYRAAHVQHLQKAFMQMNIQLQHVVTDITGKTGIAIIRAIVNGQHNPDELVKLRDPHCKNSVEVMKAALTGNYKAEHLFALTQALELIDTYTEKIEACDRVIESTLEGLHKEADSMHTTLPKPRSKENSKNAPSFDVRQSLFKMIGTDLTQIHGIGSSIALKLVAECGTDMTKWPSAKHFASWLCLAPGNKISGGKVLSSKTRRSASKSATDLRLAAMVVGKTNTALGATYRRYAARIGKAKAITAIARKLATLFYNALRYGMEYVDQGADYYEEQYQKKVFRNLKRTAESFGYTLLKNEQTISAA

SEQ ID NO: 463560 - protein, 372 aa, unidentified
MEKHSEVFIGLDTSKLKISVAVADGERNGEVRFFGNISSEPGSVSSMVAKLAAGGARLHFCYEAGPTGYDLYRQLIGLGHECVVVAPSLVPKRPGDRVKTNRRDAVSLARLHRAGELTPVWVPDAAHEAVRDLVRAREAASDALKRARQHLQSFLLRHGRIYTGRTPWAGPHRRWLAGQQFEHPAHQIVLAEYVQAIEDAGVRLDRLTKQVSETAAAWSMAPVVAAYQAMRGVAFMVAVTFIAEIGDVRRFDTPRQLMAYLGLVPSERSTGEQVKRAGITKAGNKRARQVLVEGAWTYRFPARVSPTIQARLEGVPRTVREIAWKGQIRLCARYRKLSMAGKRKTVVITAIAREMAAFLWAIGQEVAPAPQA

SEQ ID NO: 463561 - protein, 343 aa, unidentified
MKVSTIGLDLAKSVFQVHGIDAAGQVVVRRQLRRRQLLGFFEKLGPCLVGIEACATAHYWGREIAALGHEVRLMPAHYVKAYVKRGKNDAADAEAICEAVQRPTMRFVSLKSPDQQSMLMLHRTRALLVRQRTMLVNALRAHMAEFGIVTRVGLPQLKELLAVIADKDDRRLPPDARACLEILGRQFLSVHEEICAADSRLHAWHRSDPVSQRLATIPGIGPVTASALAASITDPSVFKSGREMAAWIGLVPRQNSTGGKQRLGKISKQGDPYLRWLLVAGAMTVIRHAKRRGRANQPWLDDLIARRPTKVAAVALANKMARMAWALLRHGGAYRPSAITASV

SEQ ID NO: 463562 - protein, 365 aa, unidentified
MTKSISKEACMKFYTKQHKYYCGVDLHSRNLYVCIIDQKGEIVKHKNIEATPEAFLNILKGCREDVVVAVECMFAWYWVADLCREEGIPFVLGHALYMKAIHGGKAKNDRIDAHKIAALLRGGMIPMAYAYPSEMRATRDLLRRRNHFVRRRADLLAHIQNTNHQYNLPRFKKVIAYRRNRDGIAEQFRDECVRKSIEVNITLIDQYSYLIKKLEYYLCKKAKIHDMDSFVRLQSVPGIGQTLALIILYEIHDIRRFPRVQDFVSYSRLVKCAKESAGKRYGTSGAKIGNAHLKWAFSEAAVIMLRECRDVNTYKLRLQKKHGKAKALTILAHKIGRAVYYMLKRKEVFNTDRFLNKQIVQTGRA

SEQ ID NO: 463563 - protein, 333 aa, unidentified
MPRRARKPKEEYNRMQTQLRYLGVDVSKDTLVVAFERNRWQFPNSKEGYAKLITQIQKQAGTVHVVCEATGPYHLPMCLALQEAGLPVTVANPAWIKYFGRSEGVLAKSDPIDATLIERYANARRPSADAPFRREQIGLTELVNHRTQLVNSKRALLNMRAQVLDRTAAKEIDRAIAALERCIEAAERRMKEKIEADPIWSAKLGVLTSVEGVGFVTATVLLAKMPELGLLNRAQCAALAGLAPYDNESGTFTGQRSICGGRSEVRRALYMAAVSAARHNAVLRGFYERLIQAKKPFKVAITAVMRKLLVYLNSLLKAAAMDRGSDLSIIAPV

SEQ ID NO: 463564 - protein, 475 aa, unidentified
MRKAKHIKASKRTEVQKQLRNIPYDKVLVVAIDPAKYSPKALICNYFGEILVNSFFFTINSKGLNLLLTKIKDSVNNISAQKVLIGIETTGHYHEIIVRYLQEFDYNVLLINAYTTSESRAENLNWSKTDDIDLFAIASALIDGKTTKSRLLNGNYEKLKNLCRYRRYEVQKRSAIKSKIRALMDKIWPTFQGKGKIINGTSKVENIFSDFWGKAPLFIMKNYPHPSLIKKLDKKDLRKISRENNLKFRNSTIEKLLLAAKDSYARPFEKLKVEIELLTMTIADYENANQKISLLQDKIENILVQNPGLLLLSVPEIGIITAAEFTAEMGPVNQYDYAGQVIKTAGTNPLVEESGGKKARYGSISKQGNPSFRHIVYLAGRSLATGKTNPYFKTYADKLRKKDKSPNQIYIAVGNKFIKVAFAMLRDHKLFDPPMWKGKSLTSNIFDKIDSPENKEIALKTLENYLGVNSSKLAG

SEQ ID NO: 463565 - protein, 318 aa, unidentified
MNTKMKQSINVGVDTGKTQLDIHIRPLDLFLSVENSDKGIKEALKVIKKYSPERIVIEATGRLEMPFVLACAEANLPIVRANPVHIKRFAGAIGRRAKNDRLDAELIAHYSDVIKPALTVIKAENIRLMSDLVIRRNQLLSMQTMEKNRIQILPRCLHSTIKPMLTAMKNQITKIENKLIKLIEESPEYQGKNAILQSVPGIGNIAAASIISNVPELGYITNKQAASLIGVAPITRESGRYKGKRVIQGGRAQVRTVLYMAMMSAMQCNPIFKATYARLVNAGKPKKVAIIACVRKMVVILNTMLRDGVAWDENTAKN

SEQ ID NO: 463566 - protein, 283 aa, unidentified
MEKAYDGRQVVGMDLHRRRSVLVRMAEDGRRLGMARFTNSPEELRAQIARAGKSPKVVLEATYGWYWAADALAAAGAEVHLAHPLGVKAFSYRRVKNDERDAADLADLLRMGRLPEAWIAPPRVRELRELTRYRHKLVGLRTSCKTQVHAVLGKLGIPVGYSDVFGKAGSAWLDELTLPQPYAGKVTSLRQLAGQLTTEIAMLSRVIADLLADDRGYQVIQQLPGIGPVLAAVIIAEIGEVTRFRNAGQLCSWAGLTPRHRESDTKVSRGHVTKQGSRMLRWR

SEQ ID NO: 463567 - protein, 352 aa, unidentified
MVRLYRNRKIKKMKTTTKFFMGIDVSKPFFDVALLIVEAHGKQPLRTGRFDNSVNGLKAFDKWLKTNRVPFDESTLLVIENTGIYHRPLWGYCSKKGLPIHIGNAAHLKWSFGLARGKNDKVDAERLCNYAHRHADELKATPTLDPVLLLLKDLMASRSKLLSQVNAIKSYIKELRGINDSDVQRILEQAHRTAIEGLAKSIKALEAQIKKTVSDNMAIKATYDLLVTVPGIGHLTATYIVCCTNNFLNKVNGKQLACYAGVAPFEHSSGISVRGRTKVHKMANKELKKMLHLCALSAIQAYPEFRDYYERKKAEGKHAMVILNAIRNKIVLRAVSVVNNQKPYVNNYKKAA

SEQ ID NO: 463568 - protein, 420 aa, unidentified
MKKHSKSCRRSEASSKRAKSRGPVQRDAKEVMAEVLRKLTGRAALDAGVVSGNGKKDGRGNTVGPNRDRLTVGVDLGDRWSQYCILGLEGETLAEGQLRTTQEDVGEFFRGLTTARVVVEVGTHSAWVQDVITELGHEVLVANPRLMEGSKRRKRKNDRIDANKLARLGRVDPQSLYPIRHRSREVRQDLVVLRARDALVSVRTELINTTRGRVKSMGARLPRCSSPSFAEKVKDAIPAEVREALQPLVQLVETVNECIERYDERIEELGRKKYGHTTLLRQVKGVGPITSLAYVLTLEDPQRFASSREVGPYLGLVPKQEDSGDSQPQLGISKAGDRMLRRLLVGSSQYMLGAFGPDTDLRRYGLRLCERGGKNAKKRAVVAVARKLAVLLHHLWVTGDVYEPLHRTETGTGTAQAAAA

SEQ ID NO: 463569 - protein, 321 aa, unidentified
MTVDVLGIDVGKRDLHAMLLQGDRHASKSVPNSQAGIAQLQSWLKNRTAEHVHACLEATGGWSEQVAISLGEAGHVISIVNPARIKAFAQSEMVRTKTDRVDAALIARFCRLHQPEPWTPPAPEIRMLQGLVRRQNSLTQMRVEEENRRSAPTASPAVTASIEATLEHLARELERVDREIEQLFDDYPTLRRQRELLISIPGIAESTAARILGEMPNITEFRDVKAIAAYAGLSPRHYQSGSIERRSRIAKSGNAHLRRTLYFPAISAIRFNPPIRALAKRLSARGKTKMTIVAAAMRKLLTLAYGVLKSGRSFDPLYGNS

SEQ ID NO: 463570 - protein, 317 aa, unidentified
MDVETTADRFVGIDVSKARVDVHVRPDGTAFGCATDPEGLSALVARLKPLSPCLVVLEASGGYERVVAAALAEAGLPVAIVNPRQVRNFAGAIGRLAKTDAIDAAVIAHFAQAVRPTARPLPDDLSVRLAELMARRRQLVVMINAEKQRLAKAQDRIAQRSFKALLKSLEAERARIDKAIDKLIEASPVWCAQQDLLKSVPGIGDVVARTLIAELPELGRVDRHQIAALAGVAPMNRDSGRYRGKRKIQGGRVEVRAPLYMACLVAIQHNPALKSFYRRLREGGKPARLALVAAMRKLLTILNAMLRDRKPWASAQS

SEQ ID NO: 463571 - protein, 387 aa, unidentified
MPQPNDLSRSLVALDQDSTLIAVIEMGQASWLVAGIVPGVNRHPLKKIATDQEQLLQVLRRWAKEAETTGRMIKRIAVAYEAGRDGFWLARWLRARGVEAYVIHPSSVPVSREHRRAKTDRLDTELLKRAFLGWLRGEPDHCNMAAIPTLTEEDAKRPGRERESLVGERTRIINRIKGALARLGIREFKPMSRSAPQLLETLRTPEDAALPPNTLAELRRDMARLSFVKQQINEVERARLERLQRAPGERGNAMVHLLTRVVGVGVETADMLVQEIFSRNLRDRKAVARYAGLTGAPDESGKKRRERGLAKSGNARVRRGMLQLAWGFLVHQPDSVLAKWYRARTADARGVTRKTMIVALARKLLIALWRLAATGEVPEGLALRAAA

SEQ ID NO: 463572 - protein, 302 aa, unidentified
MQSNKISFKGQKIYVGIDVHLKNWSVTVITEKGLKRTHPQKADAKELFEFLNRHYPDGEYLAVYESGFSGFATYYALKEVGIDCIVINAADVPSSQYENVMKTDVIDSEKLARALKGGLLRPIYIREKENLDDRGVVRIRKTIQKKIAGDKTRVKHMLHQNGVTIPERFTKSAYWSGAFIKWLREDVHLLSCTRMSLDLLIEQVQTQKRMVLKCTRTLRELSLSPKYKDRFDLLMSIPGIGPIVAMCILTEVYDITRFSNERQFASYLGLIPTCHSSGEKVSHGEKTFRGNKKLGPMIVETC

SEQ ID NO: 463573 - protein, 393 aa, unidentified
MLYLGIDIGKNTHVASLIDETAKPLFKAFSFSNTTEGANSLIEKLSVHINNQSEVEIGMEATGHYWLSIYSFLVENGFVVHVVNPIQTDGWRKGTEIRKRKTDFIDSVLIADLIRYGDFVETSLSDEDTMSLRNLSRFRTYLVSSISDLKRKVICVLDRVFPEYHTAFSDVFGETSKELLSHFQTADDFENISSEQLENVLKKVSFKGFAKNKITQISELAASSFGLKFCQDSFSLQLRLLIEQIKFIDAQVCDVEAEIKVILDKINSPIMTVPGVGNINAAVILGEIGDISRFSNASKLAAYAGIDASVSQSGEYQSTNNKMSKRGSPYLRKALFQAALIAAFHDPVFSAFYQKKRSEGKHHLTAVGAVARKLCNTIFAVLKYNTAYVPQFK

SEQ ID NO: 463574 - protein, 355 aa, unidentified
MSDVKCIGLDVHKTSISAAVLDESGKLVMQAVFMTKAAAILGFLGGLSGSLRVTFEEGTHAAWMHSLLQSQVSEVRVCNPRKNALLKSGNQSDQIDARQLAELLRSGMLSRVYHDDTQTLTLKELGRSYRSLTDDTTRVMRRLKALYRSLTIASDGKKLYTRCRREQWLSQVQQTGQGYRAERMFEQLDSLQALRRQIRCDLIEEGRKHAATAVLSSIPFVGAIRSALLIARVQTPFRFRTKRQFWADCGLALETRSSADHQVIDGELRRKSKPVFIRGLNLNHNHDLKNIFKSAATVASVSPGPFRDFYENLLGKGIKPEMARLTLARKIAAISLRIWKKGERFDPEQLKTQAA

SEQ ID NO: 463575 - protein, 412 aa, unidentified
MQTLIERGCGLDVHQATVVACLLIARKDGKVQKQMRTFGTTTRELVGLREWLLSEGCTHVAMESTGVYWKPIYAILEGALEIVVANAQHIKKVPGRKTDVKDAEWIADLLCHGLLRSSFVPPKPIRELRDLMRYRRKLVESQAAERNRLLKVLETANIKLANVATDVFGMSGRLMLRALIQGKATPQEMAELAKGLLRKKIPELQLALEGKLEEHHRFLLELQLQRLEAAERDLAVLEQRIRQMLEPYAAQLALLDEIPGVDWTLAAVIIAELGVDMSVFGSVSQLASWAGVCPGNNESAGKRKSSRIPSGNVYLKSGLVEAANAAARAKGTYLRDKFFRLKARRGYKRAVVAIAHKILVAIYHMLSQQVSYNDLGDLYLDKLNKNHLTRNLVHRLERLGYAVTLTLQQQAA

SEQ ID NO: 463576 - protein, 467 aa, unidentified
MLPGRDGQGSYPLSLDGLGGVATRLVRARPTSDRDMPQRLIRKVVDGGRAVRAARRYWPLTEGTPATVFDRHEIDVFVGDDVAKGDHYAQVVTVSGDEVFDRPVGNDEPAIRRLIGDAGGYGRPVLVVDQPASTAQLLLTVASDMGVPVAYVTGLQMRRAADLYAGHAKTDPKDAWVLADYARRNVDRLTWLEISDELLVELRVLNGRDVDLAHDATRIISRCREALVAVSPALERVVGDRMASAGIRDLLGRYPTPTQLRGAGKARIRRVIARRSPRLADKVTIAIWDALDAQTVTLPAEATWSQVIAALIADLERVTLQRAELADQIEQVFLSHPLGKVLVTLTGFGPRTGARTLAEIGDPHRFADGGRLAAYAGFAPVDRRSGATINSASRSRSGNHRLKDAMFIAAFVASQHDPHAKAYYQRKRAEGKKHNAAIICLARRRCDIILAMLKTATPYTTQHPKAA

SEQ ID NO: 463577 - protein, 345 aa, unidentified
MWSIGIDVHQRSFAVCILDEHGKTVKQMKLRGTLAKLVDTLRRIQEPFAVCYEASCGYGHLHDLFGELAERVVVAHPGHLRLIFRTKKKNDRVDAKKLATLLFLDQVPTIHVPSMDVRSWRSLIEFRHRLVAKRTRVKNALRAVLRSHGVEQPLGKKLWTRCGVAWLAVVELPTRPIALQRDVGIEELAHLETQVKRVEKELNAIAEAHAGVFLLRTIPGVGPRTAEAVVAYIDRADRFARNKQVGSYFGLVPSQDQTGDRNRLGHITREGPATVRKLLTEAAWQGIRRSSHIRAYFERVANGDKQRRKIALVATAHYLVRVMHSMLRSGEIGRFEGEKAEPQAA

SEQ ID NO: 463578 - protein, 345 aa, unidentified
MTVYCGVDFHARQQTVAYCNTQDGEIRSIQLKHDDRQTLRRFYTQFQSPVIVGLEAGGYSDWFERFLEELGIEAWFGNPTEIRRRARSRQKNDWRDAELLLDLLIKNEFPRVFRQNADSRAVLAQLRYRHKLVQVRTQVTNSLHALSIREGLSLQAALLTKAGRARLNALPLTNVRAKQRDEWLALIDQLSDNIKRVEQELAKLAAQDEQVKRVRTHPGIGLLTGLALVHTLAPISRFANSRKVTAYVGLEPREFTSDTKQRWGGISKAGSPLLRFLLVEAAQHAARADSELKNIYQHLSMRRGRPKAKVAVARRLLVRAYILLRDQIDYATYLRRTVAVRSARH

SEQ ID NO: 463579 - protein, 370 aa, unidentified
MKQSSKLYVGMDVHKDSIEIALAEAGGGEVRRFGRIGGDRKGLAGAVRKLESAHGKSLVFVYEAGPCGYGIYRLLRERGHECWVVAPSMTPRRSSDRVKTDRRDADKLARLARAGELTPVYVPDARDEAMRDLVRAREDAVSMQRQARHRLKALLLRNDIRYVGKSAWTSAHRRWLANEVSLPYGAQQIAFEEYVEAVESATARIERITAAIRADIEHWRWAPVVAALQALRGVQLIHAVTLIAELGDLSRFASPRQLMGYLGLVPSEDSTGARRRQGAITKAGNGHARKALVEAAWAYQHRARVSAIIARRQTGLPKAACEIAWQAQLRLCTKFRRLAARRMLKQKIVVAVARELAGFVWAIALAVKPD

SEQ ID NO: 463580 - protein, 461 aa, unidentified
MSRKKLRGKQKGSVQKKTDWKALEIVHPDAAGIDVGGSEHWVAVSPDRDPEPVRRFGCFTADLREMGRWLVEKGVRSVAMQSTGVYWMPVFEILEQHGLEVYLVNAQHTKNVPGRKSDIQECQWLLKLHAFGLLNNSFQPTDEIRIARTLWRHRGNLVAEASSTIQRMQKVLTEMNVQLSNVLSDISGMSGMKIIGAILEGERDRWELAALVEPGVKATAEDVAKSLEGNWREELLFVLRQQVELYWIYREKITACDLQLRKHLESLGSKLDLKTQPIGPRPKGKKSSRNAPSFDLRTELYRITGIDWTQINGIDVLTAQTVIAEAGADLSAFPSEKQFASWLGLCPTNEQSGGKILNRRTRKVVNRATVAFRNAALTLLRSQSYLGAQYRRLRTRLGAPKAITAMARKLACLFYRLIKHGQQYVDKGTEYYEARYREQQIRSLTKKAQKLGLQLLIPKTA

SEQ ID NO: 463581 - protein, 412 aa, unidentified
MPPGSCEHAVREFGVFTRDLYAIADWLEACGVRSVAIESTGVYWVPLHEVLEQRGFSVKLVDARKVKNVSGRKTDVLDCQWLQQLESYGLLAGAYRPDDQIVVLRSYVRQRSMLVKSAAIHIQHMQKALQQMNLRLDTVVADVTGQTGMRILKAILAGERDVAKLGAMRDARCKATADAIGASLQGNYRREHLFELRQAVELFEVYQGKIAECEREMAQYLESLTGGSDEEPPPMPGRGKRQTMSFDVRGHAWKLTGVDLFRIKGLNAETVLRIVSEVGADLRAFPTAKHFASWLCLSPNRRVSGGKVLSSRTRASSNRAAAAFRQAAVSVQRSDSELGAYYRRMRAKKGPGSATTATAHKIARLYYSLVRWGRQYEERAAADYEQRERARVLAILAKRAKGLGYELVARAA

SEQ ID NO: 463582 - protein, 424 aa, unidentified
MKRTQNEKILQIKFETLVVGIDIGKDTHYARAFDCRGIELSKLLRFSNTNQGYKALEDWMQEIMKEKGKTEAIVGFEPTGHYWFTLGDHLQRKGHRLAIVNPFHVKCTRELDDNSQTKNDKKDPKTIAMLVKDGRFRDVYIPEDVYQELREAVSERERLVEQMISLSNQVIRWLDIRFPEFNQVFKNWRGEAAWLTLRHFPTPAKVAATGASSIVSTWRKKMKKPSIKKAEKLVNLAIRSIGRTAGNEAAEAALQNLLTQYEMVMRQKQDIEQLMQELLIKVPSASKLVDIKGMGMVAAAVIVSEIGDISRFNDPRQIQKMAGLSLRENSSGKHKGKTRISKRGRRCLREGLFRAMITMLATNSEFRQLHQRNLSREQNPLNKMESIVALCGKLIRVIFAILTKGNDYDADRMLNDMKRSMKAA

SEQ ID NO: 463583 - protein, 347 aa, unidentified
MTEAYDGRQVVGIDLHRRRSVIVRMTEDGRKLETVRITNSPAALRAVIARAGKNPRVVIEATYGWYWAVDVLEESGAEVHLAHPLGVKAYSYRRVKNDERDASDLADLLRMGRLPEAWIAPPEIRELREVTRYRHQLVKARTSVKDQVHGVLAKLGIPVTCTDIFGVHGQAWLDELPMPQPYAGKVASLRQLAGTLSAEITLLDTVLGDLLAGHEGYAAIQQLPGIGPVLAAVIVAEIGDIRRFPGPGQLASWAGLTPRHYESDTKVIRGHVTKQGSRMLRWAVVEAIQRQPDGTRPRQVKDAIIARRGKEARNIAKVAAARELLTLVFYGMRDGHLRRALQRGQAA

SEQ ID NO: 463584 - protein, 404 aa, unidentified
MIFVGVDWAEAHHDVCVMAEEGRVLEQRRVSHSVAGIGELHALAAAHNEEGELVAVGIEVDRGLVVTALLAAGYQVYAVNPLAVSRYRDRHASSGAKSDRGDAKVLADLVRTDRHNHRQVAGDSDLAEAVKVLARAHQSAVWSRQRQVNALRSALREYYPAALAAFGTGLADRDAAAILAIAPAPDQGRALSRSKIASALRRAGRQRNIEPRASEIQAALRADYLQAPPAIARAYSAAARSAIRLINAYTAEIAELEQALSEHFDQHPDTTIVRSLPGLGTILGARVLGEFGDDRTRFASPKSRKNYAGTSPITKASGRSRIVLARYARNRRLADALEQWAFCSLTHSPGARRYYDQLRARGKTHHQALRQLANRWVGILHICLQRGQLYDETTAWQHLEAAAA

SEQ ID NO: 463585 - protein, 308 aa, unidentified
MAKPVTKITLGIDVSKDKHDIYNWQTDKLTTLANERSVIKAWLKAFHGPVQIAIEPTSHYHLVMIEEAHALGYEVYLINPRQLVHYRQAVNVRNKTDPLDAWLLARYLEREGSQLRPFKPQDPRAQRLWQLILRRATVVKSRQQLRQSLAGVRLPIKALLTQFQQLLDRIDRQVIALIKELNWWSDYLYCHSIPGIGDGNASALVAAYHRGAFAGSDAFISYLGLDVKIRDSGYFKGRRKLTKRGEPELRRLLFCASQGARSYHLFADYHQSQLDKGLSKIAARVILSRKLARIAFTLMRKEEMFMKH

SEQ ID NO: 463586 - protein, 396 aa, unidentified
MKVCFLNGDGEKLDSFSVSNDLPGATTLKEKLLQCVAGKEVDILKIGLESTSVYSFHPSMFLHHDIDLQRFGAKVFLLNPKQVANFKKSYSDMNKTDEIDAYVIADYLRFGRNQMSIVKESQYVALQQLTRSRYQLVKMLTKEKQHFLQHLSFKCNTFSQEVDTSVFGSAMTELFLEKFSLEELANMPLEELAEFLQEKSRNRFGDPKCVAASIQKAVKASYRLDKVVEDSIDVILGTSIAVIRTFQQQIKELEKSIKKIMAGLTQTLESIPGVGPVFAAGIIAEIGQIERFDDETKIAKYAGLYWRKHQSGRFTAEDTSLSRTGNHYLRYYLVEAANSVRKHVSDYQEYYVKKYNEVPKHQHKRALVLTARKFVRLVDALLRSHQLFTPGRCVKE

SEQ ID NO: 463587 - protein, 314 aa, unidentified
MATPSVFVGIDVSKGRLDVHVRPLGTGFSVSNAAAGYAELIARLRPLRTKRIVMEATGGYERALWLALTEAGLVAAVVNPRQVREFARASGRLAKTDRLDAAVIAHFAETFSPVGVRNPDPVADRLGEHVLYRRALKEEIVALANQLRRLETPALRGRAERRLESLRSEATEIDREMRAIVDGDPGKKALYACLTALKGVGPVLACTLIANMRELGSLSRHQAAALIGVAPVNRDSGTMRGHRAIAGGRRGVRNVLYVATLSAVRSNPAIKEFYGRLRGKGKPAKVALVACMRKIAIILNARIRDQLAAAAATS

SEQ ID NO: 463588 - protein, 350 aa, unidentified
MIIIGVDFHPEFQQIAWVDTDSGELEERQLRHREEAEAFYRGLVTEGKKVRVGMEASGHARWFERLLGELKFELWIGDAAEIRTKRVRKQKTDRQDAQLILKLLLEDRFPRIWVPSWENRDLRQLLWHRHRMVQARTRIMNQLQAVALNEGLRCKKRLWGERGRQQLESFRLAPWASRRRRDLLELLDRLNPTIAELSQAIEQEVERCPEAQRLMTHPGVGPLTALAFVLIIGKAERFQCGKQITSYLGLVPLEESSGNRRRLGHITKQGSSILRFLLVEAAQVTVRSLPEWRSKYFHLMMRRGRKIAKVAMARRLAVRLYWMMRQGWDYQQWVKFGSHAGQPENRQGVQ

SEQ ID NO: 463589 - protein, 409 aa, unidentified
MTPEKKQAPTRFIGLDIHKHFFVAVAMDAAANEVLGPQQVPMARLVPWAQRHLTPQDAVVLEMTTNSFQVYDDLRPLVHSVIIVHPPHVDLIVRAQVMTDKIAARTLAYLHAKGMLVSIWIPPQEVRDLRAILAQRRKMTRLSTQAKNRLHAVLHRYYLSLPEGDPFDPQQRDWWLALPVSPLERVRIQGDLDTLVFARSQVAHLEEIITARAAQDERVPLLVQLPGISIIAAMTILAAIGDITRFPTDKKLVGYAGFGTKVHDSGQRRRYGRITKKGRRDLRAIMVQAAQTAMRTDPHWEKELARLQRRMPRNKAIVAIARKLLVAVWHVLTKGEADRYAQPERLARKFMQHTYRLGKANRPAGQTTTAYVREQLDALGVGAELTAIPWGRKRVIALPPSTLKPAGDK

SEQ ID NO: 463590 - protein, 355 aa, unidentified
MTRTVYCGVDFHARMQTIAYCDSADGEIQLAQLDHRKDDVREFYSKLTGQVIVGLETGGYSSWFEAMLEELGHTVWIGHANEIRRRANWRQKNDRRDAELILEIMLKGDFPKIHSHSRESVEALRMLRYRARLVKMRTMISNNLQAIAISSGLTERSRMLSRAGQQRLRNARMTPAIKHQSEDLLTLLVPLNERIARVERWLKQQASIDDRVRLLMTHPGVGVLTALGVVHTLEPFNRFSKQRSVVAYVGLEPRERSSGERKRYIGISKAGSRLLRFLLGEAAHVAVRLDPDLKQFYQRVGQRRGKSKATVAVARKLLIRCWIMLRNNIDYAEFRSRGVEARLARATHRPIVSVI

SEQ ID NO: 463591 - protein, 376 aa, unidentified
MTQTTAISSNLTIGMDLGDTTCEVCVLKLGVKKPEATGTLPMTPEALIEFVLRYPAATVVFEVGAQSRWVQQLFRLNGIEHIAADPRQLKLISQSRRKNDKKDAYLLACAGRGMPELLNPITHRSVQAHADRAISKARDALVSTRTKLVNHIRGVVKTEGGRIKATAQHFHNHALEQIPERLRPALEPLIEVLAAIHEQILKYEREMKKIARERYPEVERLMGIFSVGLTTAFAFVTTIEDPSRFRRARACGAYLGMAPRQRESGSISPELNITKAGDGHLRRLLVLCAHHLLGPFGKDCRLRRWGLELCGGTKKGRKRAVVAVARKLAVQMIAIWKSGQAFDPWKGMPLSEIPAGAQPNGESSGTDIVSQEAPAA

SEQ ID NO: 463592 - protein, 424 aa, unidentified
MNLTQNDRLKQVTSDTLIVGVDVGSQTHFCRAFDWRGFELSRRVFKFSNTGMGFLTFLRWTEELMNKTEMKKVIVGCEPTGCYWLTFQKFLQDHAIQLVTVNPFTVNRSMELDDNSPEKSDLKDPKTIALLVKDGRYSTSYLPSGVYAEIREASVCRDQIMKQHVRLSNQIQGWIQKFFPEYFECYADWDSTSGLMLLREAPLPQDILKIGAGGINQIWRNAKVRAAGIKRAQTLVEAAQNSVGLEAGEAARLEIWVLVNDYILKAEQLKRLDEYLEEKVKEVPNVEKMLAIKGVGMSTVIGFIAEVGDIGRFTDPKQIQKLAGLEIVKKSSGKKKGQPRISKRGRRKLRRTMYESVRALMTWSPAFQDVFLYYRNRTKNPLGGMQAKIAVACKAIRIFYVVLQTGCDFDEEKFRKDIIRPEAA

SEQ ID NO: 463593 - protein, 345 aa, unidentified
MYIASIGIDLGKTTFHLVALGERNKILLRKKFSRSQLLAYTANLPASLIGLEACAGAHFVGTALREQGHEVRLIPAQFVKPYRKSNKNDFLDAEAIAEAVTKQNMRFAQLKTQEQLDWQAMHRVRDRLVQRRTALINEIRGFLLERGITFAAQPIHLRKNLPTVIEDAEQNLSPRLRWLLDRLWQEWKQIESEVQAITDEIERISNEDARCRQLRQIPGFGPLISTATVAAIGNGAAFRRGRDFAAWVGVVPRQYSTGGKQKLYGISKRGNVYLRRMLIHGARAVLFRVKYDTAGFGQWVQRLAQRAPHNKVVVAIANKLARIAWAVLSSGKDYRHQPLLQLAAA

SEQ ID NO: 463594 - protein, 347 aa, unidentified
MDYVGIDLHKKESQICILSEGGQLSECRIRTEPQRFAEVLGARPRARILLEASTESEWVARCLEGLGHEVVVADPNFAPMYATRTRKVKTDRRDARALAEAGLLGAYRPAHRLSDAQRHVRGRLAVREALVRTRTRSIALIRALLRRHGWRVPTGSAETFSRRVVALPLPGRLLSEVAPLLAVMRPINQQLAYSDGAIETVTRPDARVQRLRTVPSVGPVTAAAFVATIDDARRFRRAHEVEAYLGLVPRELSSGESQRRGRITKAGNTRMRWLLVQAAVSMLRCRHAQPDALRAWATGIAARRGKKIAVVALARRLAGILSAMLRDGTTYAPGVVSRRAAEAAVPV

SEQ ID NO: 463595 - protein, 338 aa, unidentified
MYYTGIDLHKKTCFITTVDEVGGIVKRVQLQNVAEWIKAYFDGLKEQTKIVIESMASWYWLYDLLKENGFDVVISHPAKTKAIASAKIKNDKIDSHMLAQLLRADLIATIHVSNPKVREFKELLRHRQRLVQDSIRMKNRIHMLLMKNNCQVPCTDLFGLRGLNYLEEVVLPPGHRAQVDTYLDLYKHLQEDIEALTKTICQVAEGHPVAKLLMTIPGIGPITAMFIIAEIEDISRFPSYRHLASYAGLVPSLDASGGKEKRGRITKQGSPYLRVALIESAQSIARARKRRLNIFFRKRLVRSGYQKAIVATAHKLLQYVFYVWKNQTPYREHYSLCA

SEQ ID NO: 463596 - protein, 425 aa, unidentified
MNPTTKFAVTIGLDWADQKHDLWIRPADGSKAQHLQLEQTPEALHEWVAKLRERFGGQRIALGIETSRGPVISALMAYDFIVLFPVNPKALKDYRAAFCVSGAKDDRTDAQLLEEFIRLHRDKLKALEPDTELTRRLGALSENRRRLVDERTRLVNQLHSKLKTYYPLAETLLGKQMNKPMAADFLARWADLDSLKKAPLKTLRAFFYQHNSRSAATIEQRLQAVQKARALTTDPAIIVPARLLVTALVGMLRSLHQSIAQMDKEIQRALDQHPDAAIFRSFPGAGPALAPRLLAAFGTRRERFQSAAEVAQFYGIAPVVKQSGNSKTVHMRSRCPKFGRQSFHENAGCAIAEEPWTKCYYDHHKTKHDDKHHQACRALAYKLIRIYFACWKTRQPYDPERYLQALKKHGSPLHKKLQMPTPSPL

SEQ ID NO: 463597 - protein, 344 aa, unidentified
MNTIDYIGFDIHKKTISFCAKAQDGTILDEGTIPALRNKLLAWAQARPRPWIGAMEATLFTGWIYDFLKPWAQALKVAHPPMLKALTAAKKKNDRVDARTIADLLRCNLLPECYMAPVAIRDLRRVLRYRNLVVRQATRIKNRIAGLLMETGTPYNKQRLHGKAYFSDLLGSLQEVPSSVVELLKLSRGQVEFFAAMQRRLLKGLREHAELNQRVMRLQTIPGVGEILALTWALEVGEVKRFSSIGHAVSYSGLTSAQRGSAGKEQRGPISKQRNKHLQVVLIETAKLAPRHNPQLAAVHKRELQRGDRNRATLAVARKLVAYLMAVDQSGQPFTMRARTQEAA

SEQ ID NO: 463598 - protein, 352 aa, unidentified
MSQPHNPKEETKMKLYGAIDLHSTNNVTVVIDEQDRVVYQKRLPNDLALVLKELSVYQSELEGMVVESTYNWYWLVDGLMAEGYKVHLANTAAIQQYNGLKYTDDNSDARWLAHLLRLGVLPQGYIYPRADRPVRDLLRKRSQMVRQRTTNLLSIQNLLTRNTGSSLNANRVKGLDVQQVDELLSDGDLALAVKANLSVMLSADEQTKILERTVIERVQLRPQFCFLKTVPGIGKILSLTIMLETGDIRRFASVGNYASYCRCVGSQKISNSKKKGKGNTKNGNKYLAWAFVEAAHFAIQFNSTIKSFYQRKKAKTKGVVAIKAVAHKLCRASYYIMRDRVPFNITKAFGQK

SEQ ID NO: 463599 - protein, 340 aa, unidentified
MRQLYVGSDLHGNNNLLGIIDERGKRVFKKRLANDSELIKEVLKPYKEELVGIVVESTYNWYWLVDALMEEGYKVHLANPSAIQQYWGLKHEDDKHDAFWLAEMLRLGILPEGYIYPKEERPVRDLLRKRGHLVRLRTSLILSLQNILSRNLGRKVSVNDVKRLGEDRVTPLLERSEDLALAGRVSKETIDFLTYQIHTIERVVQKRITLKEEYRYLLSLYGVGKILALTIMLETGPIGRFETVGDYVSYCRKVPSEWTSNGKRKGSGNPKNGNKYLAWAYAEASEFSRRDYPEPRAYYQRKMQKTNAAVAHSALGHKLARAAYYVMRDQVPFKPEKLFG

SEQ ID NO: 463600 - protein, 404 aa, unidentified
MRVVHKRCCGLDVHKRTVVACFLADEESETRTFGAMTGDIVELSDWLSGKGCTHVAMESTGVYWKPIYNILEGTGLTVLVVNAHHIKAVPGRKTDIRDAEWIADLLRHGLLKPSFIPDRRQRDLQDLVRYRRSLISERAREANRIQKVLEGANIKLTSVISDILGVSGRAMLKGIIEGVDAPGELASRVSTHLKASPEELEAALRGVVSAQQRRLLAVQLEHIRFLDEQVAQLDVAIAEEMRPFLADLERLDTIPGVGVRVAQEIIAIIGTDMSRFPDAKHLASWARICPGTHESGGKRRRAGIGQGNTFLRTALVEAAWAASHTRNTYLAAQYHRLAPRKGPKRALVAVAHSILVTAYHLLKNGTVYEDLGDNWFDQRTRQATIKRAVQRLERLGCKVTVEAA

SEQ ID NO: 463601 - protein, 401 aa, unidentified
MIDTRDVAVFLGLDVGKGEHHATGLTPDGKQVIDKPLPNSEPKMRAMLDKLAKKYGTVLVVVDQPASIGALPLAVARDAGCEVAYLPGLTMTRSAHLYPGQGRTDARDGGIIADGTRTMPHTLRSSELTDETVAELHMSVGFDDDLAGEVSRVANRLRGLLTQIHPHLERVLGPRIQHPAVLALLERFGSPKAIRKAGRRRLVTLLRPKAPRMAERLVEDIFTALDEQTVVVPGTEAAAVIVPKLAANLTSLLDQRKELASTIEALLESHPLSELLTSMPGIGVRTGARILIDVGDGTAFPTAGHLAAYAGLAPVTRRSGSSIRGESPSRRGNKHLKRAFFLAAFASLSDPASRAYYERKKAEGKRHKQALMCLARRRVDVLFAMLRDGTFFESHTVPQAA

SEQ ID NO: 463602 - protein, 457 aa, unidentified
MVCKEMAAVMEPQEIEDEEHEQILERVAAVDVAKSAGMVCTRVPHEMRPGKRRTRVWQVDAATNAILELADHLRCQGIEKVTLESTSDYWRIWFYLLEAAGVDVQLVRARDVKQAPGRPKTDKLDAVWLAKLTERGMLRPSFVPPVEIRQLRDYTRLRTDLTRERTRHYSRLEKLLEDALIKVSAVASKLDTLPVRDMLEALIAGERDPQALARLARGKMRAKHDRLAQALTGKFDDHHAELARMLLDQIDALSAQIGKLTTRIEELIAAIPAAQGIDPGGTTGPAAGRGAGAPVLPAVDRLDEVSGIGREAAQALIAGVGLNMAQFPTAAHLVSWTKISPQTIQSGARNRAGHTGKGNPYLKGILGEAAAAAGKTDTFLGERYRRLARRRGKLKALVAIARSILVIVWHLLAGRSTRYHDLGAGYYASRIGKNRKTRSHVRQLEALGYTVTLTQAA

SEQ ID NO: 463603 - protein, 341 aa, unidentified
MEQATTIGLDIAKHVFQLHGADAAGHVLFRKRITRVRLLSFLAAQTRCVVAMEACAGAHYWAREIAKLGHHVRLIAPAYVKPFIKRQKNDAADAEAICEAAQRPSMRFVPVKTEEQQANGIVFRARDLLVRQRTQCVNALRGHLMEYGYVFPKGITHVETLVALVEDLQSSLPDSVRVILKLLVDTFTALEAQIAVLDAEINQRSKSDPTARRLMTIPGVGPIASTAITALVPAAEGFPAGRDFAAWLGLTPLQKSTGGKQKLGAVSKRGERTIRRLLIIGASAVVQQASRRGAPKGSWLAQMLARKPKMLVTVALANKTARIIWALLVKGGTYRTPAAAA

SEQ ID NO: 463604 - protein, 337 aa, unidentified
MMISRIGLDTAKHVFQVHGVDENEQTVLRRQLRRSEIKKFFGKLAPTRIGLEACGASHYWARLLRGLGHEVVLLPPQYIKPYVKRGKNDANDAEAICEAMSRPGMRFVPIKSAESQAGLTLLGVRDLLIKQRTMVINAIRGHAAEFGVIAAKGPVKVAELLRQAHSEETSVPALALDMLGLLAAQLDALDVKLKLIETRLMASHRENPLSQCLASQPGIGPIGAVSFALRVTDPKSFRSGRHFAAWLGLTPKDHSSGGRHRQGRISRQGNEALRKLVVLGATAVIRFARPGHTSPWLLNLLARKPKKLAAIALANKMARTLWAMMVSGEIYRRPLPA

SEQ ID NO: 463605 - protein, 364 aa, unidentified
MVNHIFVGIDLGDKNSVARIALQQERGQRVGFVNDRRGRERLFERVKRQADEAGGAKIVMAYEASSCGFILRDEAEARGIQCAVLAPTKMEKSVEQRKHKNDDRDAEDVLEKLRAHVLAGNRLPQVWIPDVQIRDDRELVRTRLELVEKQTRLKSQIQMLLKRQGLEKPSDCQGGWTVRRRRWLEALTEADGMGSGARAALSSLLRQLEFMEAEIARIEKPIQELAAEARHKPIIEELTQEHGVGLLTAMVYRTEIGYAGRFSRGRQVGKFVGLTPTSHESGEQTDRKGHISRQGPARLRKILCQAGWVHVLHDPDARQVYQQLLRRNPKKKKIAIVAVMRRLAVRLWHRMRQAEQRMQQPPAQ

SEQ ID NO: 463606 - protein, 347 aa, unidentified
MDQIIIGVDTHKSNHVGVAISRQGARLGTIAIPTTRQGYRDLEAWASELGTIKAFGIEGTGSYGAGLSRDLLAKGHTVLDVMRQNRQLRYLHGKSDSLDAESAARSVLNGQATALAKTQAGASEMIRHLKVARDSAVKSRSQAMITLKTLILNAPAELRDTLDLIKGPITLIRHIAALRPGKITSPIASAKTAMRAIARRWLNLHEEIQAHGQELERMVSEKAPGLMRSHGISTMTAAEMLILVGDNPERIKSEAALAKLCGVCPIPASSGKTKRMRLNRGGNRQANAALYLVAITRMRDHEATKNYVIKRTAQGKSKREITRCLKRYIVREIYCELCVPNSAQSTP

SEQ ID NO: 463607 - protein, 404 aa, unidentified
MKQLLYAGIDWATKTHAVGVVDDHGGIRARFQVANTGKGFGGLIRRLVKLQVAGVAIERPDGPLVEAMLDAGLRVVVITPRQVKALRSRYGAAGAKSDAGDALLLADVLRTDGHRLASLVPDSDATQVLRALSRTRKDLQKARVALCNQLTAQLERCFPGAVGLFADLHSATAITFLRRYPTGQAAAGLTQARLAAFLRRIHYSGRTPVAVLLARLQTAPPANLSPDQAAGRAVCVAALLDAIQACHGRERELEAEIIERLEAHADQAVFTSLPKAGRGIRAAALLSELGDVRTRFPDEEALAALAGVAPVTRASGKLRSVGFRWACDKKLRAAVIDFADDSRHGSPWAAKVYTDALARTHRHPQAVRILARAWIRVIWRIWQDHTSYDPAKHGGAVRLLATQG

SEQ ID NO: 463608 - protein, 311 aa, unidentified
MTILTSQTVVGIDVAKAEIVVYRADQQTLESIKNERAALKRWLKTLPAQSAIALEATNIYHLDTVELAHEMGHQVYVVDAYRVSHYRRGVGQRAKNDPCDARLLARYLESEQSKLRIWTPPPKAYSTLKSLLHRRATLIKNHTGLMLSWTSEPLLKKLQTAQQKAFKQADQAIQKLLRKVSKEAGIEENIERCKAIEGVGELTATGLAATYIRGDFANGDAFIAFLGMDLAVDDSGKKNGLRSLTKKGDPEVRRLAYNAAMAACRSAKWKPFYEAYLVRGFSKTQALVALARKLCRVAFALMKNQSEYLSA

SEQ ID NO: 463609 - protein, 359 aa, unidentified
MDVRDPAKRHVVGGVDTHKDLHVAAVVDERDRVLGSQSFATTRQGYRQMLAWMGSFGEVQRIGIESTGSYGAGLLRFVQTVGIEVLEVTTPDRHDRRRRGKNDDLDAQNAAHAAFAGQRTVTPRSRDGMVESLRVLSACRKTAVAARRVALQLIQNTIVCAPDGLRDVLRGMTRMQLIRTLAAWRPDLTAYRDVEAVYRITFKSLARRYLELHDEIADLDIMIGAIVDELAPDLVARNSIGHVGAAQLLLAAGDNPDRLRSEASFAALCGTSPVPASSGKTIRHRLNRGGDRHANSALHIIAIGRLRTDPKTKIYVAKRVAEGHSKLEAIRALKRYIAREVFTLIMRRHKTINQTQIAA

SEQ ID NO: 463610 - protein, 419 aa, unidentified
MKFSKTKKVKVINEKTMIAALDIGKGAHYAYFRDLKGKDIKPFPFYNFRKGFDKFWIKLCQFKREQKLEDVVIGFESTGPYAEPLFHYLRNKPVKLVQINPVHSKRLKELTGNSPNKTDKKDPRVIADVISLGHALTLVVPEGPAAQLRRLTQARERAIRSRTAMINQLQHLIFVIFPEFLRVFKNISTKSAMYLIKNHPTPESIVSIGVESLTVTLRKVSRYRLTQGCIKEIFEAAQRSIGIDEGKESILMEIEHLASNIENENRFIDDLEKQMDHYLDQIPYAHSILSIKGVGPITVAGLIGEVGDFKKFNTISEMMKLAGLDLFEVSSGKHSGKRRISKRGRSLMRKLLYFAAINVVKSHGIMHERYQEMLERGMPKMKALVAISRKLLGLIFALARDNTLYVENYSNIHHLKLAA

SEQ ID NO: 463611 - protein, 367 aa, unidentified
MKNHSSIDQSLSSSDLSVCTTLAVDLAKQVFQVAGEDVLGQVRYEQRIKSREAFYEFLQQLPPHVVVLMETGPGAQAWARQLQDQGNPVRILPAGLVATHRSGPKNDRNDALAILRADRDEKICAVPVKSVAALAMQALHRTRQGYVRRRTAVSNQMRGLLLEHGVALAQGDVAISQKIPRVLEDATQPVPGLLRELIDELLAEWRHLGERISVLTGRLEVAANADMTAKRLMTVRGIGPVTATALVAKETKPERFPNARKFAAYFGMVPDQHSSGNTVRLGDMTKRGDVYLRSLMIQGAHAVLQQLRPDSQQPDDRRLLRWMSRLGRKEAAIRLANRNLRIVWVLLQNDQTYRRHAGDGQQATMSH

SEQ ID NO: 463612 - protein, 421 aa, unidentified
MKPQAPEAFAAFIGLDWADAKHDICLQAAGAERREFLVLEHRPEAIDAWVQTLRTRFHGEPVAVCRELNKGPIVSALRQYDFLVLFPVNPFTLAKYREAFTPSRAKDDPTDAELQVELLLKHRDKLTPLTPQSPTMRALAQLVEHRRRLVGDKVRCTNRLTSALKNYFPHVLQWFQDKDTGIFCDFLSRWPTLKAAQLARRTTLEHFFREHHVRSADVIKTRIEAIKSAVALTTDGGVITPNALLVQALVAQLRVTLQAITDFDNAIADHAQGHPDFPLFDALPGAGAVFAPRLLVAFGEQRERYASAEELQKYAGIAPVTERSGKKSWVHWRLQCPKFLRQTFVEWAAESIRHSFWAQAYYQQQRDQGKAHQAAVRALAFKWLRILSRCWQERTPYDESIYLQALKRRNAPLLHNLANLS

SEQ ID NO: 463613 - protein, 349 aa, unidentified
MRFYTQQHRFYCGIDLHARLLAVCIVDQAGNIVLQKQIPDDQQQLRQLLAPYRPDVVIAVECLFAWYWVADFCATEGLPFVLGHALYMKAIHGGKSKDDDIDAEKISRLLRGGNIPMAYVYPKGLRETRDLLRRRNYLVHKRAELIAHMQIVNAQYNLPPFRKKLAYAQNRAEQKVAEHFPEGHVRKNIELDLALIDHLDEQIADVELYLKRTAKVEEPHTYFLLQTIPGVGNILALVLLYEIHRIDRFADAGDFLSYARLVRCLHHSAGKRVGAGGKKIGNAHLKWAFSEAVCLLIRFCPAVKAWQKRQEKKHGKKKTLGILAAKLGRAVYHMLRHNRAFDLRRFVGQ

SEQ ID NO: 463614 - protein, 326 aa, unidentified
MTLSHLTDNIFVGIDVGGVGLDVAWHRGDSAHYANRPDAIAALVERLRTGPRLTRIVLEPTGGYEKPLVKALRQAQLPVEIIHTTRFRAYRQLVGVKAKSDTSDARLLASYAAAPDEVRGRKAGHVELPEDAIREALSELASRRDQLKHMIHAETCRLGTVRMVELRQAIESHLETLKAEDKQVHQMMLELVRQRLDLRRDQRLLKTIKGIGPKSALAFLASVPELGRIDNKAAAALIGVAPFVRSSGTMIAPARIHGGRAAVRSILYMAAVTASRHNPVLRPFYERLIAKGKPPKVALIAILRRLVVFANAVIKSGQPWKGANAA

SEQ ID NO: 463615 - protein, 431 aa, unidentified
MLKINPLSTLYVGIDVSSKSNYVCALDFYKNKYINSSFANNQPGAEELALKILECLKEHPDITTIVAALESTSVYSIHIANYLSSCEELMRFKPYVFVLNPKCTANYKKSYIGLGKSDPIDAFVIADYARAGNIESEPWRGSQFLALKRLTRHRLHLVECMTREKTYLVSNLYLKFSELQMLEGDDQPFCDIYGATSSSVLMEYLSPEEILVSSEEDLIAFLAEKSRNRIKDISKTADLLKKAARDSYRLDKALYEPLNVSIASSFNCIETFKREIKVIDNAIEKEIKGLNPNAFIILQSIDGIGPVFAGGIIAEIGDITAFHSSDALAKYAGLTWKSNQSGDFDGEDTPMIKAGNRYLRYYLGEAANSMRKHNVEYGAYYRKKYNEVPKHQHKRALALTSRKFVRLVYGLLARNQLYSGVSLDTSIKNSN

SEQ ID NO: 463616 - protein, 307 aa, unidentified
MIGIDVGAHTLHIHDTDTGEVIKLPTPQAETYLRTKPPTTIVLEPTGHYGLAIAELAYLAGHQVLLATDNDTWALRRVVRRAHKTDRLDATMLSSLAQLANTAPDIVKHALTPYANVRPLFLARRSAYTARKLVTLAAAIQNRLRQHPDPELQELARTLKKLAEHYQQQTIEATPPDVIARLTTIPGVSAPLAALLWTYLGNAERFSSPNHAVSYVGLAPRNFPTSGATTRPPTRRRTAALLATHLHMYALRVAANPHKYDRFGQTYLRLRTKGGRIALHAVKRQLVRVAFALLRNKETYVSSQEAP

SEQ ID NO: 463617 - protein, 342 aa, unidentified
MGYFAGLDVSLEETAICIVDDAGQIVREARAASEPEALVAFFAACGMTMERVGLEACSLTAWLHAGLSEAGLPAICIETRQAKAAMGAMPNKTDRNDARGIAQIMRTGWYRAVHVKSPACRSWRALLTARRMMLNKRRDVENGIRALLREVGLKVGTPSRRDFPARVRDLAAGDPVLATLAESLLSVIEVMTREVEALTKRVLDEVKHEPTCRRLMTVPGVGPLTALAFRATIDQPGRFRTSRDVGAHLGLTPRRYQSGETDMQGRISRCGDELARTALYEAAHSLLMRSSKWSGLRAWGMAVAKRRGMARARVAVARKLAVILHRMWADGSEFRWGKQACA

SEQ ID NO: 463618 - protein, 402 aa, unidentified
MPMLSIGIDVSKGKSTVCGMKPGGEIVYTPFEVQHTREGMSELVSLLRGSGEEVRAVLESTGSYHCPVVAALLENGIFVSVVNSLRMKRFCSQSIRKVKTDRIDAMQIALYGLAYWQELQPTRLPEDTYRELQLLARQYYQMTSMLIKAKVDFNALCDQVLPGMQELMSDHAGRHKLSDFVLRYRHTTHILEMGETRFRKDYCKWAEKKGYRNCERMAVLIFATAQNGIPVLPNAPSTQIVITEAIRVLHTVEASRDAILTQMQALAKTLPEYSLVREMPCIGDTLAPRLIAEIGDVRRFHSKRALIAYAGIDAPPYQSGKFCANNRHISKRGNRYLRKTGYEVMQSYVMHKPANDPIFTFIEKKRGEGKSGKLAMVAGLNKFLRVYYGKVTELYRSLPTIE

SEQ ID NO: 463619 - protein, 437 aa, unidentified
MSEKKSVELRVSVDVGYRRHSVAIGLPSGEVLEEFEIAHRPEGFAEFFSRIERHQKVRDYEVAVAMEGFNGCARPLDAMVRRRGYRLYNINNLKLARFKEIFPGAAKSDRIDARKGLELFQLSDHLPLAKEVLQEVKGTPRENEVLKRLTRRRRRLVDERVRVISNLQTDLQAVCPGLLEITKNACNQWFLNFLISAPTLPQLARLRPATLRKVPAVGRKYASLIEDWQKRADFSEEVEWVSEMIQEDAQRCLDLDEKIKALRAKIKEVAKDSKIAKTLLSIPGFGTICTAELAGEIGTVERFSKEGSLALYIGMSTLDNSSGKYQGSKQPKHVNTRAKAAMMVALDRHRKYVPESQRYYEKKRSEGKKHNQAIRALGRHLCRIIYKMLTEEREYEMRPENGNTKSKVSPRSLIKPQIRKPKISAKGKNNKIYQQRA

SEQ ID NO: 463620 - protein, 339 aa, unidentified
MSKLLKNFVGIDISKTYFDAAVIKADHSFQSMHHQFLQCPDGFKKMITWLRQQDVVLNTETLFCMEYTGIYNVGLVNFLVEQKAQLWVEMPLRIKKSAGFERGSNDKTAAVKIAGYAFRYQDKIQLWQPIDSSIEKIKQLISQRDRVVNVITQLTVPVKELLECGCNKEAKELEKLQVKSLKALQKTKAAIEQLIIKTVGQDAVIAKKVQQVQSIKGIGQVTAVSLLAYTKGFTTFSNAKQLACYCGVVPFSKSSGTSIRFKPTVSPHANKKLKKLLHLCALSAIRNDIEIQTYFERKVAEGKNKMSVINAVRNKLIHRVFAVLRDDRTYEENYIRKCA

SEQ ID NO: 463621 - protein, 393 aa, unidentified
MRGFGGDYDVVVGVDVGKLSHRACAVTPDGRALFNVGFGNDERSIDRVLDRAAPRGRVLVVVDQRRNIGTTVIRRARAAGDDVAYMPGIAMHNASKLFPGDAKTDERDAEVIARTAVGMPSCLRPVPEEGSLEGARRLEAQRADLLKDRTHQANRLRAMMLESCPAFERAMRPCEPWCVRILERLGGPWNIRDAGRRRLAAAAKGAPPGAVEALWDSASTATRPTEEQVEAEAAMVPMIARRIREDTEDIRRLDALIGDAVRGDETYRCLLTVPGVGPRTAAQLVLDVDVDDFADHDHLASYCGLAPRNRQSGTSLNSVSSTPQGNRQLKNLLIFSCSSLARSSGYYRDYFESCRSRGKPYKAALKAVARKRLKVIFAVMRDRVPYDPGLQRG

SEQ ID NO: 463622 - protein, 340 aa, unidentified
MVLIGIDPHKATHTAVAVDSEETALAELTVKADRHQVERLLKWAIDFPDRRWAVESANGLGFLLAQQLVAAGEDVVDVPPTLAARVRVLGSGKTQKNDPNDALSTAIAAMRAKRLRTVVAENHGGVLRLLADHHHDLGSLRTQAVCRLHALVRCLIPGGTPLRLSAARAAVVLRGVRPTNAVDVERKRMALGRVADIRCLDAEIAASKARIVTAVAASGTSVTELYGVGPVVAAFLIGHSGDMARFANRDHYAPYNATAPIEASSGPRVRHRLNPRGNRRLNHAIHVIAICQIRHPTEGRKYFDRKVAEGKTTKEALRALKRQNLERRISPAGHRLSQVT

SEQ ID NO: 463623 - protein, 457 aa, unidentified
MSKASDKSKRRGRRERPLPVIHPKAAGIDVGSRFHVVAVGAEGSAEPVRSYQSFTGDLERLADWLEEVGITTVAMESTGVYWIPVFEILEARGLEVLLVNAHHVRAVPGRKTDVNDAQWLQRLHSYGLLQGSFRPRDQVVALRAYTRHRESLTQHAAAHIQHMQKALQQMNVQLHHAVSDITGQTGMAIIEAIVSGERDPAVLAGLRDPRCKQSPETLRAALTGNYRPEHVFALRQARELYDFYQTEIAECDVQIQHVLDELSAACEEPEEPLPPAKSKAQGGHGAGLAMRKALYTVAGVDLTRIDGLGPESVLRLIAECGDDMSRWPTAKHFTSWLTLAPGNKITGGKRLSSRTRRSANRAATLFRLAAVSAGRTATALGAFYRRLAARTGKAKAVTATARKIATLFYNLLRHGASYQDPGADLYEERYRQKVVANLVRKARSLGYQLVELPAPGG

SEQ ID NO: 463624 - protein, 368 aa, unidentified
MLIHVPPEAIVLAMDVHKNTISTGLLEPGSTTVLVDKVSTDDESIHRLIRRFDDPTRVWACYEAGPTGYELARTFRAAGMRCEVIAPSLIPTAPGQRIKTDKRDARRLASLFRGGQLSAVRVPMPAEEAVRDLCRARADMVIDRTRARHRLGKFLLRHGRIWRGGDNWTLKHEAWIRAQRFDERAAQETFDHYRATLSAREAAVTAIEADLLPWAERAPFADIVERFAAYRGVTPLGGLTLATEVCDWRRFPTAGMFMGFTGLVPSEHSSGDRQSRGGITHAGNIHLRTQLVESAWSYRARPQVGATLAKRQDGVHPDTVARSWTAQQRLCAKFRRLDARKNNRKVVVTAIARELAGFLWAEAIAEST

SEQ ID NO: 463625 - protein, 392 aa, unidentified
MIIVGIDIASQKHDYFMLQKETGVVFSSSSITIPNTLNGYKKLHKDIQSFCGATSDYTVRIGLESTGIYSTNITTFLVSEGYEVMMINPILTNMVRKASKVHCPKNDNLDSQTICKYLIDNEDKFSPYTSSLYHTFALKSLSRKRFYVAEDLRKAKLNVYNLVQLVFPEFKSFFSNIYGDSALSILKEYPSPQKLAKAHVNKVSSLIHGRCKCSALELIDAAKNTAGITSDYDSFQLIDAIEELEHIQKRVEKYDVQIENYVKQHFPNLLTIPGVGYITAGLIAGEIGDINRFHSPDSLVSFAGIDCTVYESGKYKSKHNIISKKGSKYLRYALFQVARIAWQWDPVFKEYYIKKQSEGKHFYVILGHIQKKLVRLIYSLMKSGLNYKIISA

SEQ ID NO: 463626 - protein, 339 aa, unidentified
MKYTPVGVDIAKHLIQVHFINEHTGEVVDKQLRSRDFLTFFSNREPCLIGMEACGGSQHWARELTKLGHKVRLLQARFVKAFVMGNKNDVLDARAIWMAVQQPGKEIAVKTEEQQSVLVLHRTRRQLVKFRTAQINSLHGTLLEFGESIHKGRAAMEREFPEALERMKERLPPYLITVLEDQYNRLSELDSLIDDIEKQLTSVARQNETCKRLLDIPGIGSLIATAAVATMGEASAFKSGREFAAYVGLVPKQTGSGGKIRLLGISKRGDTYLRTLFIHGARAAALLTREPAPWITELKKRRPASVAIVAMANKLARTVWAIAAHGRKYDKNHVSIRPY

SEQ ID NO: 463627 - protein, 343 aa, unidentified
MRTITTIGLDIAKSVFQVHGVDCAGQVVIRRQLKRRSVLAFFQKLPPCLVGIEACASAHHWSRELQALGHTVRLMPPAYVKPYVKRQKNDATDAEAICEAVTRANMRFVPTKTLEQQSGLVLHRARHLFIRQQTSVINAIRAHLAEFGIVAPVGRHGVEELLNVVADPNDRRVPEIARACLSAFGAQLRMIKERILEFDRLIRAWHRSNEMSMRLEEAPGVGPVLATALVAAVADPKSFRSGRNFSAWIGIVPKQHSSGGKNRLGNISKQGDRYLRGLFVAGALSVIRYAKIHGTKHRPWLTALLARRPTKVAAIALANKIARMVWAMMARGERYKEPVALAR

SEQ ID NO: 463628 - protein, 441 aa, unidentified
MSSVVVPSASCLPGNPGSRVTRTFAHRQDLIPNAYHFRLPHRPRRRNRHPHRYPHCCRHFGHRPAHRHRHLPATNPGYVAISEFMATYGVTTVGVDGTSSYGAGLTRHLRTQKYSVVEVLRPTRAVRRRDGKSDPVDAVAAARQVLTGEALSIPKDTSGPVESLRGLQITRRQLVMTAAKLMTTIKSLLVTAPDEIRRRHSAMSTLVMVEALSRCRPSADLADPRNGVLLALKTLATTYRDLQKQGTQLEKHISILVEMINPHVTSIFGCGSVVAADLIVSVGDNPGRIHSEAALAHLCGVAPIPASSGRTHRHRLNRGGDRRANSALHRIALVRMHHDQRTRDYVAKRTKEGLSKKEILRCLKRAIVREVYRVLCLGQAVLPTGQVEVDELKARRIQRQLSQAQVAEKLGCAPARISDIETGKRPLPELRLAYEELLKSA

SEQ ID NO: 463629 - protein, 353 aa, unidentified
MAYDYHIGVDYHKAYSHIVVQNTAGKTLRSGRVRNDSRSVAGFLSPFSGSAHAVLEATRNWTVMFDWLDGLCEEVVLAHPLKVKAIAEAKIKTDKIDATILAHLLRADLVPAAHASSQRAREVRLALRERMFYVRLRTMVKNRVVTAFDRYPEQIAVLKQCRDLFGAAGRKQLAALEVSAIDRIQIDRSLAFIDDIDRRIKECEATIKALSRGNANVTRLKSLPGIGEFFARLIDAEIDDIARFRSAAKLAAYAGLVPSTYSSGGKTWHGRIIKQGNKWLRWAFVEAVAPAVAGDPEIKAYYERLKATKGANRAKVATARRLLTIAFRLLRDGRSYQRCGARPKSEAKLSRLS

SEQ ID NO: 463630 - protein, 368 aa, unidentified
MHNNNGLENLLRFLIEVEGETGVRPTVIFESTGHYHTSLVQFLEENDYLYIMVNPLLSYQAKKSSLRKVKTDAIDAYNLCELFYKEELEPYKQRGIQLLNLRNLSRQHETVTGIYVQTKLQFHAILDQVFPEYRGVFGDLFSKVSLNTLLEFSTSEAVLKAGENRLSDKIASECVTRSERWAKDRAKKLVEAAHRNPFKNTLYQSHLISLQMYIQMLLQYQEHLSKLDDQIDALAEEIEEYKIIQSIPGIGGKIAATIISEIGEIERFNHPKKLVVFSGIDPSVHSSGKFTATINRISKRGSSRLRHALYMGALCGIRSSRNKRLREFYDRKREEGKPFKVAMIACTNKLVHWIFILLKRKETFLDLA

SEQ ID NO: 463631 - protein, 391 aa, unidentified
MIYIGIDVAKDKHDCFITNSDGEVLFKAFTITNNLDGFNDLYQKIETVMKDITKVKVGLEATGHYSYNLLGYLIDKGLPTYVINPLHTNLYRKSLSLRQTKTDKVDARTIASMLMSDVNLKSYSDISYHNEELKSLTRYRFDKVQERAKLKTSVSRLICILFPELEKLVPTLHMTSVYAMLSEFPGAKHVANAHLTKLSNLLSEASKGHYGKETAITFREAARISIGSNMPAKSLELKHTIKLIQELTSEIDEIENEIKIIMDKINSPILSIPGINYRMGAMIIAEIGDFSRFDSPDKILAYAGFSPSTYQSGQLDGAYSHMEKRGSRYLRYALYNATKYVCHWDSTFAEYLAKKRAEGKHYNVAISHAVKKLVRVIYHLEKTNQQYIKVA

SEQ ID NO: 463632 - protein, 422 aa, unidentified
MSDTIHTDTLHVIHACAAGLDVHKMQITASVRLARPGMEAELHTRTFSALPAGLDELVRWLLEHRVSAAVMEATGVYWEVVFEALESAGIEPLLVHAQHVKQLKGRKIDIADSVWLARICQFGLCRPSFVPPADFRALRKVSRQRHKVVRLRATLRTRIQQVLDGAGLRVGGILSDLLGVNGRRILDGLVAGQAPEDILATLSGHVRVHRDALGDALNAPLRPQARFVLEDQLAAFENAAARIADYDAVIRDHLAPYQPQIDLLMTLPGIDQSSAGAILIELGPDIRVFPSARHCAAWAGLAPGNNESAGKRRHGNTRKGNPHLRTLLVECAHGAARTHHCQFRGYHKALTVRRGKKRATVATAHKLLRILYRMLITGQPYRDPHTDYEALMVKRNAPRWIKMLKKYGCPTPDGATNVPAAA

SEQ ID NO: 463633 - protein, 358 aa, unidentified
MRIIGCDLHARQQAVAMLDTTTGEVVSMTLKHEGNNVREFYSSLPRPVRVGIEATGSMQWFVNLMEELGVECLVGHPAQIRAAEPRKQKHDRRDADLILKLLAENRFPAIWLPSKELQLLRHRHQWVRMRTRIQNALQSIALANGLRRGTALWSHDGQNMIASLPLAPHTAYRRNELQAMYAKFETEIEKLNQRVEEQACGRPRARLLMTHPGVGLVTALATEVFLGDPARFADSKALASYVGMIPREYSSGGRQRLGGLSKQGNPLLRFLWGEAGAHAVRRDPELQRFYRRKLVQKGFGKASVAVARKLGIRLWIMLRDQIEYSEFCRRGQKQQKSSEACAGMPETRNGANSHRPVD

SEQ ID NO: 463634 - protein, 468 aa, unidentified
MSKGSGMTRGDRRRNARRERLRAMLPRDGAVVGIDLAEEKQAIAVTDHDGRVLARKTVRVQAFRLGPALEWAVGQARARGYAAVTVACEPTGARWMQVQRLCAERGLPLVCIQPLVSHIARQQQDLTMHMRDESDCVLIARLAAELHCYVPEELDETWAQLRHLGRRRGQLITAATASVQRVRDFLSVAWPVAPAACAEPFDSLTWLAAVQVVAGRCGGQPERLAAAGLAQFTTAVREALGGWGGQRVSGRICRAVFAAAADTEGAVAWSRRGLFRRIADELGDLQRTRAQLRTVEADMVAVLGELGLSRLGDIPGLTAVGAAAILAETGDLRRYDGSSSLVKHAGLSPADNASGAFEGQAHISRRGRPGLRLAVWRAVWPLLIHNRVLAARYQAMTAAADAAQAAHGQPGTGPRQAGAAATARATRAKARVACAAALLRWIYSMVVHGTSWDPAAASGAPAAAVEAA

SEQ ID NO: 463635 - protein, 317 aa, unidentified
MAQKGTIVGIDVAKGKIDAAIRFGAEASFANSAEGRRELLAWLKEHGVCKAVMEASGGYEKSWATLLRGAGVEVVIADPNRVRHFAKSAGQLAKNDPIDARMIAWFGEVFGHASGQPHDEERQELDQIVTARLGIVRLKEQIENWGEHEQPKAVQKAQQALLKAVAIQLAKLETIIAAKIDKTERFAQRAEIIQSVPGLAGTAAAGLIAFLPELGLVDRQAAAALLGVAPFDADSGQRRGERHIQGGRHKLRKLLFMPVLSAATQHNPVLKACYQRLIAKGKKAKVALIACMRKLIGILNTMLARGEKWNPARHAIA

SEQ ID NO: 463636 - protein, 366 aa, unidentified
MESVAYVGMDVDKKKIAMAVIAGYESQPRIQRIVPNNLAAIQKFFGELAGQYENVHACYEAGACGFELYRRITEMTVACAVVAPASIPRKTNDRIKTDRRDAVKLAVEFRNGNLSPVYVPSRRDEAARDYLRLYEDVKIDLRKAKQRLVHFLNRHEIRYESGKKTWTGRYWKWLRTLEFDSVIDRETFDEYLAHVGHLEEKRGRIAKKIEEIAREPKYEKSVARLCAFRGIGTLIALSFILEIGDFRRFTRAEQFMAFLGLVPSENSSGDRRRVGGITKAGNSHLRKLLIEAAWHAPRFNARTQGVIKDRENLPAELMQYAERAGKRLHKKYWRLFHAGRPPQVAATAVARELAGFIWGAMVGQTV

SEQ ID NO: 463637 - protein, 329 aa, unidentified
MSALVCGLDVHKDSTYATILDARGKIVNQMRMNNERVLSYLSRFNVDRVAMESSNQVASLYRELVKRGYCVSVSHPKKTRYIAEAKIKSDRVDSKAIAELVRLDALPLAYMPDEETAALREKVRRRAFLVRERVKLRVKIKSILTYEGLKWPSEYGLFTRKGVEWLHSLNVEPVESYLRIMRMFDDEIRLLNRQLRGLAEKDEDVRLLMTVPGIGYYSALLVKSEIGDVNRFPFGERLCSYAGLVPSTHASGNTVRHGGITKEGSRWLRWVMVEAAQTHVHKYETAITRAYHRIAERRGRQVAVVAAAHKLLMCCWAVLKYRQPYHDQA

SEQ ID NO: 463638 - protein, 412 aa, unidentified
MKDLLEISCGLDVHKEKIVACILTGPLGKPTRSEIREFSTLIPDMIALRNWIVSKNCHHVAMESTGIYWMPIYEILEDAFYGDITLLVVNARHMKNVPGKKTDMRDSEWISTLLRAGLLNGSFIPEKRIREFRDLNRYRKSVIRDITSQKNRIEKFLQSSGFRLSSFISDIFGASGRNIILHLIEHGQIDKTALDSCLKTKTRNRIDEILMSVNGTLSEHQKAFLRILMTHYDSLKKHLAEIETSLEEDMPPFALQVEQLNSIYGISTTASCAIIAEIGIDMKPFKTAEHICSWAGLCPGNNESAGKRKSTSVTKGNPYIKSMLCEIAWVIAGKRNTYLSAWYWRIKQKKGAKKAIVALARKLLVIIYTMLKQGTLFDESCFETRRKHCEQKQLSRYIRELEKHGYHVEAQS

SEQ ID NO: 463639 - protein, 454 aa, unidentified
MKEPTSRTRRSSERLSTVNPDAAGIDVGSQFHVVAVPPGRDAEPVRTFQSFTGDLHRLAEWLVACGIQTVAMESTGVYWIPLFEILASWDLEVFVVNARDVKHVPGRKTDVNDAQWLQQLHAYGLLRGSFHPPADIAALRAYLRQRERLLDYAAAHIQHMQKALMQMNLQLHHVVSDITGSTGMQIIRAILDGVRDPATLAGYRDLRCKASTEKITQALEGNYRPEHLFALRQAVALYDTYQQHVADCDHAIEALLACLQVSPPPEEPLPVARHRTRQTNALDFDVRAALYAVIGTDLTQIHGFGPYLALKLVSECGTDLSRWPTVQHFTSWLCLAPSNQISGGKILSAHTRRSKNRASALLRLAAVNVGKTSSALGAFYRRLAARIGKAKAVTATARKLAVLFYNALRYGMDYCDPGAAYYEERYRERVLHHLTRRAKQLGYTLAPASVAGVS

SEQ ID NO: 463640 - protein, 356 aa, unidentified
MQTQVTKKIDFTGQSLFIGLDVHKKSWSVTVVVDGIEHRTFTQPPDPKALNNYLQRMFPGGSYNSAYEAGFCGYGIHRELNSLGIRNIVINAADIPTSQKDKLQKRDPVDSRKIARSLEKGFLHGIHIFDRELEELRSLNRTRFYLMRDLRRSKTRIKSFLQYYGEPIPGEFDNNQWTLKFVSWLKQVKMQTPGGQDAFSNLISSYEYHRGQLLTLSRQIRERIREYDRELYTLLKSVSGIGPLTASALMTELGDINRFKNIDQLGSYVGLIPRIRESGETTHTGGITFRCNSFLRTLLIESSWQAIRMDPALMQYYHAHLINNKGHKVVIKVARKLLNRIRYVMKNRKPYVTGVV

SEQ ID NO: 463641 - protein, 343 aa, unidentified
MNEVITIGVDLAKNVFQVHCVDAVGGVVVRRQLRRGQVLPFFKKQPPCLVGMEACATSHHWAREIEALGHQVRLMPPRYVKPYVKRNKNDMADAEAICEAVTRPTMRFVEIKTPDQQSVLMLHRTRHLFVRQRTTLINALRAHLAEFGIVAGVGRNGLENLLKVIEDGDDARVPSAARDCLLALRDQLEMVKRQILDADRRVLAWHRSSEVSRRLDDIPGVGPLIATALVASVPDPHAFKSGRDLAAWIGLVPRQNSTGGKERLGHISKAGNRYLRMLLVVGALSVIRRAKQTGCTRRPWLTKLLERRSTKIAAIALANKNARTAWAMMAHGTCYQEPVSQAA

SEQ ID NO: 463642 - protein, 407 aa, unidentified
MDVLIERACGLDVHKKSITACIVTPEGKEIKSFRTHTVFLLDLIDWIKQHRCTHVAMESTGVFWKPIVNLLEAEEIQFLVVNAQHIKAVPGRKTDVKDAEWICSLLRHGLLKASYIPDRNQRELRELVRYRRSLIQERSREHNRVQKVLEGANIKLAAVVSDIMGLSSRDMMNAMIEGEEDPEKLAAFARRTLKKKKEELELALRGNMSDHQRIMLKTMLTHIDFLNEQIVELDTEVAKRLDPFQQDIERLDTIPGIARRTAEQILAEVGTDIGSRFPSAAHLCSWAGLVPGHNESAGKRKSSKTRKGNKYLRSALIEVAHSVCRSDNYLGAQYRRIAARKGRHRAAVAVAHSIMTIAYHLLTRGEDYKELGGQYFEKRQQEAMVRQAVRRLESFGYHVALTTPEAS

SEQ ID NO: 463643 - protein, 410 aa, unidentified
MSLSLKFYLIERVVVMFYLGIDIAKVNHVASLIDFEGNVLIKAIKFTNSNEGFDKLLSSLNEYDLVNILVSMEATGHYWLSLYSALIDKGFNVSVFNPFQIKSYRGAYSNRKQKNDITDSIIIADYLRFFGSVNTKLPKDDILSLKKLTRFRSDLVSNIVTAKTNIIGLLDNVFPEYKKAFCDVFGTTSLALLKEASTAHDIANLNTKKLANILSNNSRGRFGTKEAKALKELAKNTFGFSYINTACSFEIKQLINQIIFLEEQVAETEVEIHNIYSKLDSHLLSVPGIGKTLAPIILAEIGDINTFDKPSKLTAFAGIEPTQNQSGNKSSTNEKTSKRGSPYLRHAIYNASLTAMKAEPTLRAYYDKKKAEGKHHSVALMGVSRKLLTIIYYVLKEDRNYTSYSELPSK

SEQ ID NO: 463644 - protein, 339 aa, unidentified
MKYTPVGVGIAKYVIQIHFINEHTDEVVDKQLRRQDFLTFFGNREPCLIGMEACGGSQHWARELTKLGHKVRLLQARFVKAFVMGNKNDVMDARAIWMAVQQPGKEIAVKTEEQQSVLVLHRTRMQLVKFRTAQINALHGTLLEFGETIHKGRAAMEREFPEALERMKERLPPYLIMVLENQYNRLNELDSLIEDIEKQLTSVARQNETCKRLLDIPGVGPLIATAAVATMGEASAFKSGREFAAYVGLVPKQTGSGGKVRLLGISKRGDTYLRTLFIHGARAVALVAKEPGPWITELKKRRPASVAIVAMANKLARTVWAITAHDRKYDRNHVSIRPY

SEQ ID NO: 463645 - protein, 387 aa, unidentified
MSKHNDLSRCLVALEQDATLIAVVEMGQASWLVAGIVPGLDRYPLKKLGPDRDALLHLLHRWREEAAKAGHAINRIAVAYEAGRDGFWLARWLRSQSIEVYVIHPSSVPVSREHRRAKTDRLDTELLKRAFLGWLRGEPKHCSMAAIPTLEDEDARRPGRERQILVEERTRILNRLKANLARLGIRGFRPNLARAPSQLGALRTPEGVAIPTNTFAEMRRDLDRLRFVKQQIKEIEKTRAERVANAPDERRHMAARVLTRVVGVGVETADMLVQEVLSREIRDRRALARYAGLTGAPDESGQRRRERGLAKAGNARVRRGMIELAWGHLVHQKGSPLSAWYRRRTADARRGVRKTMIVALARKLLIVLWRLATTGEAPEGLLLRPAA

SEQ ID NO: 463646 - protein, 343 aa, unidentified
MKEVITIGVDLAKNVFQIHGVDAAGAVVVRRQLRRGHVLRFFKKQPPCLVGMEACATAHHWAREIAALGHQVRLMPPRYVKPYVKRNKNDMADAEAICEAVTRPTMRFVEIKTPDQQSVLMLHRTRHLFVRQRTMLINALRAHLAEFGIVAGIGRNGLERLLKVIEDGKDERVPSAACDCLLALRAQLEMVKHQILDADRRILAWHRASEVSGRLDDIPGVGPLIATALVASVPDPHAFKSGRDLAAWIGLVPRQNSTGGKERLGHISKAGNRYLRMLLVVGALSVIRRARQTGCRRRPWLAKLLERRSTKIAAIALANKNARTAWAMMAHGTFYKEPASQAA

SEQ ID NO: 463647 - protein, 317 aa, unidentified
MDKPPAATCFVGIDVSKGHVDVHVRPDGTAFSCTTDPDGLANLITRLAPLQPQLVAMEASGGYEAVIAAALTEAGLPVAIVNPRQVRKFAGAIGRLAKTDAIDAGVIAHFVDAIRPAPKPMPDALMLRLRELLARRRQLVVMVNAEKQRLGKAADKLAQRSFKTILRSLEAERARIDRAIDTLIQQSPLFCAKQDLLKSVPGIGDIVARTLIVELPELGSVDRHQIAALAGVAPMNRDSGRYRGKRHIQGGRVEVRAPLFMACLTAIRHNPPLRSFYRRLRDAGKPARLAIVAVMRKLLTTLNAIIRDNTAWTHVHI

SEQ ID NO: 463648 - protein, 371 aa, unidentified
MKKSSMFIGLDIHKDSIEIAIAEAGRDGEVRSYGGIDGTLDALDKVIRKLVSKGCNLHFVYEAGPCGYDVYRHLTAQGFDCVVVAPSKIPRQSGNRIKNDRRDAQMLARLHRAGELTAVYVPFVEDEAMRDLTRAREDAKAVEKKAKQRILAFLLRHGHRYSGKSTWSRAHFRWISILKMPHPAQQIVLQESLDALAECTRRVDRLTEQIQTLSPQWRLFPVTQALQSMRGVSLIVATTTIAEIGDLTRFGRPAELMSYLGLVPSEHSSGQTTRRGSITKTGNGHVRRVLIEAAWAYRLPARVSRKLLIRQEGLSQEVCAISWKAQLRLCARYKRFTANGKSHQLVVTAIARELCAFMWAIAHEVQGPVKM

SEQ ID NO: 463649 - protein, 398 aa, unidentified
MSNNTPLEIRVGVDVGCYQHNVAIGLPNGDFLEEFEISHTSDGFREFFLRIGAHEKKYNCGVAVAMEGFNGHARPLDTMICVRDYRLYNVNNLKLARFKEIFPAAAKTDVIDARKALELFQLRDHLPSARDVLQEVKAVPQENAILKRLTRRRRFLVNERVRIINSLQTDLRAVCPGLLDITNDAGNLWFLRFLTSTDSLKKLARLRLATLLKIPGVGKKYANSIRHWQEKAIYSPEVDWVGDMIQEDALRVLELRDKIKTLEKRCEDIGRHSRTAALISSIPGYGPVCSATLAGEIGTIDRFRSEASLALYLGMATLDNSSGKHRSSKNPRHVNARAKAAMMIAIDRHRKVVPESQKYYVKKRSEGKAHNQAIRALGRHLSRVIYKMLKEDRPYQMR

SEQ ID NO: 463650 - protein, 446 aa, unidentified
MSTPSLPVLDPTAAAIDVGSEQLHVSIAGGPPKVFGTTTGQLYELRDWLLAHGVKSVAMEATGIYWLCPYEVLEKGGLAVVMVNGKYVKNLPGRKSDMKDCQWQATLHAHGLLKPGFVPPEHIRRLQDYLRLRTDHITMAGSHEQHMQKALERMNLKIHDVISDLTGVSGLKMIEAMLGGERNPVALLALCDAQIQKNKAGALRQALEGTWKDEHLFALRQAYELWQFYQKKIAECDQAIGTVLQELAGPEDPKNPAPPATKRGGVNAPQIAGLHGLLWRLCGGKDPSTLPGVADYVLLQLLSEVGTDLRKPWPTEKHFTGWLGLAPGSRQSGKRRGSQKRGRNRAGRLFCVIARSVGRSVDKALGGFYRRLKGRRGGLIANLALARKLAELFWRLMVHGIAYVEQGLKKYEQKVEQTEQRLLQKLASKYNLVLQPKAPGPSTLPT

SEQ ID NO: 463651 - protein, 384 aa, unidentified
MNLTQNDRLKQVTSDTLIVGVDVGSKTHFCRAFDWRGFELSRRVFKFSNTGMGFLTFLRWTEEIMNKTEMKKVIVGCEPTGCYWLTFQKFLQDHDVQLVTVNPFTVNRSMELDDNSPEKSDLKDPKTIALLVKDGRFSTSYLPSGVYAEIREASVCRDQIMKQHVRLSNQIQGWLQKFFPEYFECYADWDSTSGLMLLREAPLPQDILKIGAGGINQIWRDAKVRAAGIKRAQTLVEAAQNSVGLEAGEAARLEIWVLVNDYILKAEQLKRLDEYLEEKVKEVPNVEKLLAIKGVGMSTVIGFIAEVGDIGRFTDPKQIQKLAGLEIVKKSSGKKKGQPRISKRGRRKLRRTMYESVRALMTWSPAFQDVFLYLELFSIMVLVF

SEQ ID NO: 463652 - protein, 323 aa, unidentified
MQINSIVGGWAGIDVSKEWVDVAIGKEERRIHVGRFARDRKGLAEMARQLKKHAPEAVALEATGGYESAVMASLTEAGLAVVRLDPRRVRNFARAHGLLAKTDKIDAYVLALFGERMRPPIRALPGPERKKLAELETRRQQVVQHRATERTRLHQVEDPQLRKSLERSITFLGKELERLEEQLDQCLRASDQLLEQAALLDTAPGVGTRTASVITAHVPELGTANRRQIAALAGLAPIAQDSGKYHGKRRIQGGRAPVRSALYIAAWSATRVNGKLRDYYHHLIELGKPRQLALVAVARKLLIGLNEMMRKRQPWTENAITSA

SEQ ID NO: 463653 - protein, 344 aa, unidentified
MEYYAGLDVSVKETSVCIIDGTGWIVREVKVPTEPEAILAVFAGEPFSIKRIGLEAGPLSQWLYGELAEAGLPMICVETRHMKAALSAQVNKSDRNDARGIARMMRVGLYRPVHVKTLISQKRRMLLTSRQLLHAKARDIENDLRGTLRNFGLKVGIVGSAKFELRIRELVTNYSDLATIVEPLLIARKVLRDQLGVLHRLLLAVVRNDDVCRRFMTMPGVGPIVALTFRATVDVPARFKNSKTVGAIFGLTPRRHQSGEIDRMGGISKCGDAMMRTVLFEAAVAMLTRTIKWSWLKAWGMKIARHRGMKRAVVAVARRMAVIMHRMWVDGTNFEWKRKEVATA

SEQ ID NO: 463654 - protein, 345 aa, unidentified
MQYKSMKKVFIGIDFSKLKFDAAIYSIDTKAIVSTEVFENEQSGYDDFLKWVKENTHCQKSGMLFCGEHTGYYSCNLSVFIHDSGYDMWLVSGLEMKLSQGIKRTKTDSVDACKIAEYAYRFQDKTALFQPPTKALDEIRELLSYRERLVETRKVLATSAKEMKRVKDNASCDFIYQDSLVYIQSLGSSIRNCEKRIEVLIKQDISLRTNYKLMSSVVGIGLINSALILIATANFTQFSNARKFGCYCGVVPFEHSSGSSVRGKTRVSKVANKKLKTKLTLAAQNSVRYDPELKEYYQRKISEGKNKWLVLNNVKNKLIHRIFAVVRDGQMYEKQYIHPLKQQAA

SEQ ID NO: 463655 - protein, 421 aa, unidentified
MAGEGGILEPQSPFRFFVGVDWASEEHMASVLDATRREIDKKVYAHSGNGLNHLADRLTELSEGNPGTVAVGIETPHGAVVETLVERGFAVYSLNPKQMDRFRDRHCVSGAKDDSRDAYVIADALATDIHKFHRVQLDGPRIIRLRQLCRSEEEIKKSQRQAGNQLRELLNRFFPQILSLCPSVDEPWVWDLLEKAPLPDQAAKLPAARIQRILSNHRIRRIDGKQVREILQSAPLRLAPGGAEAASEHALMLLPQLRLYHGLLKQVANRIESVLDEISTDEQTIEHRDANLLRSLPGVGRCVAATMLAEASQALAERDYHALRSYAGVAPITRRSGKRQSVMMRQSCNERLRNAFYHWARVSAQNDPRSKLHYANLRAKGHTHGRSLRGVADRLLSVLFAMLRAGVPYDASRRMTAATPT

SEQ ID NO: 463656 - protein, 316 aa, unidentified
MTIIGIDVGARRCHVATDDTVTALTTDQTLELLTTTPPTTVVLELTGAYGRRIAEHAYQAGHTVLIAHHTDERAVRHLLRSSRKTDRLDARYLRRLAELAAHLPGPNPHLTPYTELRPILITRKLAHTWRYLIQLRAAIRTRNRVPDAEPIPLEEHLSALITEYERRTIAAVPPDILTLLTSIPGVTPPLAALLYATLGDITRFRNRDAVVSYAGVAPRHTPTSGATAGRPRRHRHAALLTTHLHMYALRVAAQPHHFDRIGETYRRVRARADGKRALHAAKRHLIRIVAGVLTTGQPYRYQSHQPTSRAAGDQPG

SEQ ID NO: 463657 - protein, 428 aa, unidentified
MNTEDLIRLKKYRQMKDQIRGSDQHMIVGIDVAKDKHHGFVGTATGKTLLRRLIFENTIDGFRRFLAHVDAIGVQNGLKETIFGLEPTGNYHKPLGSHLIRCDKNIVMVSGVMVKHNRELLDGRWDKNDDKCAANIADLISQGKFLFYESPSTGIEQLRELLSLRRRLKKQEHGVRMRIRNGLIAKYFPEMDRFFGRCESEGLSIVHWCLDPKKIIGMEFRNFLQIVTTRDRGEAQRSRLRKIYDFAPDSVGCPMGEAAEFEAKMLVERLTELRQRLKETADQLKAYSSEFPEYTYLLTIPGFGPYISSLVLAKIGDPYRFENRKQVIKLSGYDLCAKRSGKSSDQAVPVISKRGNSELRYGLYQAALIASCRNEHFIKYYTRTLKGRERERGIRTKMRVKLAAKMLVIAWTLMKKHQPFNPDCLNTE

SEQ ID NO: 463658 - protein, 351 aa, unidentified
MEIGVDTHKRSHVLVALDGEGRQLGTRTITNTPEGWAEALAWARGKQQQQRRWGIENGGSLGKGFAQFLLAQGEAMVREVSPQRTAQYRRRGRTQDKTDQADALAIARLLLAEGEHLPAIPRDDVSTELRLLSDHRDNLLVDRTRLINQLHAQMLQIDPDYQAHSGALTARRGLLYCRDLLLPEADGVTLTRQLIVRQLVGQILGLEEEIATITAALGARVRASRTPLLALCGVGEVIAARLIGELGIILRVHSAAALAALAGVSPVAVSSGGRGGFRLNRGGNRQLNRVIHLMALSQRRCDPRAQAYYAKKRAEGKTRRAAMRCLKRRLVDVLYRCFTRGTVEQTGAVAA

SEQ ID NO: 463659 - protein, 419 aa, unidentified
MQTQKKFAATIGLDWADAHHDLWLQPADGGQPEHIILEQQPEALHQWIAQIRARFKNQPVAIALETSRGPVLSALLAYDFITVFPINPKALSSYRDSFRVSGAKDDRSDALLLEQYLRHYMDQLKSLRPDTVLTRQLAGLVEKRRALVDLRTQLVNQLHAELKMYYPLAEIILDDLTVPLAAAFLKKWPTLEALQKAGAHKVRAFFYGHNCRSAKKLQARLDALASAVALTTDPALIVPASLTVQTLADLLGVLHGSIATLDQEIKTAMDAHPDAAIFRSFPGAGPALAPRLLVAFGTQRDRFQSAQEVQQLYGIAPVTKASGQSKVVYMRYRCPKFGRQSFHENAGQACKKEPWARAYYDHQRKSKKHHAAVRALAFKLMRIYFVCWRDRKTYDRNTYVSSLEKHDSPLAKAANKTRC

SEQ ID NO: 463660 - protein, 353 aa, unidentified
MTSTKYIGMDVHKESISIAVRNDAGKIVMECVIETKANIILDFIHGLRGELQVTFEEGTWATWLYDLMKPHVEKLVVCNPRKNNRQGDKNDRIDARELSDLLYMNKLSSVYHGGAGVRTLRELARSYLTISKDLGRVMSRVKAIYRSWGIPCAGKQVYAPRHRAEWLGKITEVGVLRRAEFYYQQLDALRPLRHEVRRELLAESKKHPEAKLLCQIPAIGPIRAALLIALIQTPQRFRTKRPLWKYSGFAIEMHSSADYRSVKGQLQKSRKRITVRGLNRDCNHDLKNLFKSAATIASVKPGPFQEFYAALLAKGMRPEMARLTLARKIAAIVLIVWKKGVSFDAKYLKSQTA

SEQ ID NO: 463661 - protein, 424 aa, unidentified
MKVTYQTCCGVDVHKSFLVATIVKTNGGIEPSYQKKRFSTFNNSILEFKQWLLDNDCHDVCMESTGKYWVPAFNLLEDEINVVIANPKWVKAVKGNKDDTKDSKWIGDLFRLGLVKGSYIPCKKVRILREYTRYRYKLVSCRSSEKNRYQNALTVCNVALDSVVSDIFGKSSSSIIDYLLEQSGTSINHEEIASKLLRSLKSKEDAVIESIEGYQMTDAQKYRMRLVRAHMDYITAEINDVDKMIENMISSNTDFENAVQFLCTIPGVKRDSAITIISEIGTDMSQFSSSKRLCCWAGLTPGSNESAGKKKSVRITRAGVYLKPALVQCAHAAVKSDKSPYYKKKYESLVKRRGKKRAIIAIARMILTAIYQMLSTGEQWNPCDLYKIDMPVALVEKQKAKAIKQAKKLLQREGLLPPDEPLAS

SEQ ID NO: 463662 - protein, 358 aa, unidentified
MTTVSKKQKWFNTIRLTKDDDLFVGIDAHKKSLHIALWLNDAPAIDFVMPPDSVKLINMLNKLRVALRMVVYEAGPTGYSLARMLQQANIPVSVVAPSKTPRQSAPDSKTDSLDARKLAEYAAKGLLRSIAIPTKYQEAQRQLTRFRQQLVGKQTRVKLQIKGFLLQHGLDQTNGLSHWSCKAIEKLKTIRLSEHLRYCLDMLIKELSFIAEQLKSTEQKIKDAFSEKPICTTVKLLTTHPGVGKTIATQFAAEIFNPKRFSDKTQLAKYVGLAPSVHQSGQTSRYGPILKTGRPQLRCSLIQGAWLWIRKDPNAYNTFCRLIHNTGHKNKAITAMARKLAVHLWKMACDNKPYSCAV

SEQ ID NO: 463663 - protein, 370 aa, unidentified
MNFEVRNNQNHLKSRTMTKVKQLSFEGETIYCGVDVHKTNWKVNARMNGLEIAAFSQDPDPLLLKSHFENKYPGAGLKVVYEAGFCGFGIQRSLAMLGADCIVVNAADVPVSDKDRKRKDDRRDARKLSTELAGGKLRPIYVPDKLMEHTRSLVRQRYRLAKDQARCINRIKHLMLSNSIRTDDLSDRISLKYIKKLQQLALESPALKMTLDFALEQYLQTRAILKKITTTIRKISKEEPYASVQRVLQSIDGIGLISGMVIQTEIIDIHRFKRLDSLCDYAGFVPDIYSSNDRMVIKGITPRANEFLRGIIVECSWILIRKDPAMLMKYNEYRHRMNANKAIIRIGKHLLSRIRYLWQNGQTYQRGIIG

SEQ ID NO: 463664 - protein, 367 aa, unidentified
MQNTIVHDEGATSLEGAVGKVKLSSSLIKLGLDIHAKQYVVVAQYDHLLPKAARRLRPSEFVPWVEALLRQGHSVHVVYEACGFGFTLYRELIAAGAHCYVIAPRKLDEERSGVKTDPRDATTLCQRLSRYLEGNTRELAVIRVPTEEQEQARHVSRQRTQLVHHRQKLEAQGRSLLISHALPAPAHWWKEQTWARLGKYLPAWMRARLQMARPALLSLQKQIELLTSELEAAAPCTLPRGLGKLTTAVLTREICDWRRFNNRRAISSYTGLCPGERTSGSKRVPGSVTKRGNPRVRAALVECAWRMVRFQPQYPPVQKHLAVLAKGSHAIGAVRKKAIVAVARRLAVDLWRLHTGRCTAEQLGLKF

SEQ ID NO: 463665 - protein, 345 aa, unidentified
MTKLIAGMDLHSNNVVIGLMDMDGKRVAHQKVECRLSEVVRFLAPYKKRLEQVAVESTYNWYWLVDGLQALRYPVVLANPAGMEQYSGIKHADDTNDAFFLAELLRLKILPTGYIYDPQLRPVRDLLRRRLTLMHQRTALMLSFKSLYTRTTGQEMTLSRLKGLEIREAQDLYDHPANQLIAGMQIKHIEQLSESIEKVEKVVLDCARELPFYSKLTTLPGVGKILGMTITMEVGDIKRFAEPGNFASYCRTVEAKRTSNSKKKGANNSKCGNKYLAWAFVEGANFARRYDPQCRRWYDRKVAKTSNVIATKALACKLAKAAWHVMAEGTDYDSQRMFGPAGSKK

SEQ ID NO: 463666 - protein, 348 aa, unidentified
MDTQSDRDAEIVGGVDTHKESHTVAAVDGAGRLLGTSEFPATASGYRALLDWLGKRGAVSRVGVEGTGSYGAGLARYLAQEGILVVEVIRPNRQLRRRRGKSDPVDAEAAARAALSKEADAEPKSADGPVEAMRMIRLARSSAVKARTQAANQIDALVTCAPQSLRSQLKDLTLLRLTQRARRWRPGDIQEPLSACRATIKGLARRWSQLGAEIAGYDEQLLRLTRLVCPELLARPGVGFEVASSLLVAAGDNPDRLHTEASFAALCGVSPLDASSGQQRRHRLNRGGNRNANRALWVVAMTRLRVDARTQAYAARRTKQGRTRPEILRCLKRYIARELYPILLGATD

SEQ ID NO: 463667 - protein, 343 aa, unidentified
MDHFAGLDLSVNETSVCIVDDTGRIVREVKVASEPEALLAVLTNPACHFKRIGLEAGPLSQWLFSALGEAGLPVICVETRHMRAVLKAQINKTDRNDARGIAQMMRVGLYRPVHVKTLRSQKQRMLLTHRKLMQSQAIAIENDLRATLRNFGLKVGVVGRVKFEARIKELVENHFDLVVLVEPLLIARRVLREQIDVLHRRLLAIVRDDDVCQRLMTVPGVGPVVALTYRASVDVPSRFRNSKAVGAVFGLTPSKHQSGENNRTGGLSRCGDEMMRTMLYEAAHIMLVRSVKWSWLKAWAMKIARHRGLKKAIVALARRLAVILHRIWVDGTEFRWTGQVAAP

SEQ ID NO: 463668 - protein, 345 aa, unidentified
MSSTNFIGLDIHKKTISYCVKDISGKVLSEGKIPATRQGLREWVGTLAKPWTVAMEATMFTGWIYDYLRPHAAAVKVAHPLMLRAIAVAKKKNDRIDAGRIADCLRCDFLPECYMAPMEIRQRRRTLRYRKLLVRQNVQLKNKIAQLLMESGVSYNKEKLHQQGYFHQVLPANPEIDPSLWPLLKLTREMIERTQKTERALLRSLEADPLLAARIERLMTIPAIGHVTALTWVLEVGEVERFHSVKQVISYCGLCSGETTSADSSRRMPISKQRNRHLQTVLLEAAHLAPRLNPELAVLYEREAAQSNHNQATIAVARKLAAYLLAIDRGERAFVTQQVHSSVAA

SEQ ID NO: 463669 - protein, 346 aa, unidentified
MKKIFIGIDFSKEKFDVVIIMAENLEEKAPRVHEQFANDKAGYRKFLKWVKVNSHGVDMSLWLFCGENTGDYSKGLANFLYGKGCDMWLENAKCIKDSCGIRRLKSDRADAAMIAEYAMRNHDRMTLYEPLSGPLAQLRELFLFRQMNVRKRSGYIVRKGEKGRTLDSSPAKSFMARKCKHMIAELDKTIKECDKMIEALIASDRDLQETYEIVTSVPGIGAQNAVCMMVYTDNFKRFDCNPRKIACYYGIAPFGHDSGTSVHCDPHVHYMANKTIKGILTQAALCAINHCPPVAHYYARLIERGKKTMVALNNVKNKLVRIVTALVRTKQKFIPEYEFAKRYAMD

SEQ ID NO: 463670 - protein, 386 aa, unidentified
MTQHSHIAASHQLDYERTLILAVEVSGRSWVVAAQVPGLRQKGVKQQLAPRADALMAAVEGYKRRAAAAGMAVERVIVAYESGGSGFWLARWLQQRGVEVYVMQPSSVPVDRRMRRAKSDRIDADMLLRTLLAWLRGEPRVCSMVPVPDEATEDARRPIREREELIRARVALVNRIEAVLTVLGAGEYNPLRRDCRERLGQLRTALDQPLPPHARAQIERLLDRLDLIRQQVADLEAQRDRAVEGETVGQAERMIQHLARVRGIGVQTATVLVHEAFVRRFRNARALGSYAGLTGTPYGSGGTHREQGISKDGNRRLRATLVELAWMWLRYQPGCALSRWFHDRLGGSRGRLRKVMIVALARKLLIALWRYLQDGAVPQGMELKPA

SEQ ID NO: 463671 - protein, 340 aa, unidentified
MTSLPNTPIQPHAAAQTRDAALLAQPLYVGIDVAKQSVEVSFGAHLPTLALSNDSQGVEALLTRLKTETVALVVMEATGGLEAVMACALQGAGYAVAVINPRQARDFARAMGQLAKTDRIDAHILSQLAGVLDRHPQRERYVRALPEAEQTELAALVARRRQLVGMWVAERNRLPGSHPKARPSVIAMIEALAQQLANIDQGMDRHVKAHYADVSSLLDSAKGVGRRTIATLIADLPELGKLGHREISALVGVAPINRDSGQMRGKRTIFGGRASVRQALYMAVLSGTRYNPTIKVFYQRLLKAGKPKKVALTACMRKLLTILNAMVKSGKPWQEHHHEA

SEQ ID NO: 463672 - protein, 332 aa, unidentified
MYVGLDVHKRVCYGTVMDEKGKVVKQDKFTNDLEALDKFMEGLDMVTVAMEAGYCWQPLYDRLLESGHHVKLAHPLKVKAIAQAKVKTDKIDSETLTHLLRADLLPESYVPPRDIRELREVVRRRAFLVGMRTMLKNRVQAELAKRGIKPRVPLWTREGRALLDGLGLEAVDQVIPVMDVLDRQIGEISRGMRRMCGEDPNARLLTTIPGVGYYIALLLVAEIGDVRRFPDAEKLCSYAGLVPSVRRSGGTTKHGGITHEGSRWIRWALIQAVHVHIRFDTELTTFYRRLAVSKPRQVAVTATARKMLKVVYWMLRNRESYRPWPGGVPREV

SEQ ID NO: 463673 - protein, 346 aa, unidentified
MHYIGMDSHISTLDFAVVNESGRLVKASRVATSVNGFIEFVKTVPPPRTIYMEEGTLAAWALETCVHFREKLVITDAKENHWIGSSGQKNDSIDALKLAQLARGGYIKEIHHPVGQRRRFRELMIAYHDAVRSTTRIKNKIKARFRQNGIQCTGTTVYSEAHREEWKGKLPQEATLLLILDGLWRQMEQSEQTEKEILAAARVQAKHYPEIKHFEAIPGIGFISAATISAILETPYRFADKRKVWMYAGLGLMKRSSGGKTYSEKLSKDYNRLLKYSIKQAAEAAIQAKDNPFRRKYLDMTLLHGIAPHRAKLTIARDMLATMWAMWRKGEKYSPEIREKAACKQG

SEQ ID NO: 463674 - protein, 391 aa, unidentified
MVYVGIDIAKDTHDCFIVSSEGEVFYDVFTITNNMEGFEDLFLKISSTSGDLEKVKVGLEATGHYSYNLLGFLLDKGLRPFVINPLHTNLYRKSLSLRKTKTDKVDARTIAVMLASDVSLKSYTDTAYHNEELKSLTRYRFTKVKERAKLKSSISRLVNILFPELEKLVPTIHLSSVYALLSEFPGAHQIAAAHMTRLKSLLYEASKGHYDRDKAVEFRYAAKNSIGSRMPAKSLEMQHTIRLIRELDAEIDEIEEAIKVIMDEMASPILTIPGIGYRMGAMILAEIGDFSRFESPDKILAYAGLSPSTYQSGQLTSSYSHMEKRGSRYLRYALFNATKYVCHWDDTFAAYLAKKRSEGKHYNVAISHAAKKLVRLIFALEKSRQSYLNVA

SEQ ID NO: 463675 - protein, 332 aa, unidentified
MLDGLGRQLGDREFPTTAAGYRSLHRWLAGHGDLEGVGVEGTGSYGAALARHLADEGVHIVEIDRPDRKARRAQGKSDPLDAYSAARAVLSGTATGEPKTRDGRVESIRALRVARLGALKARTQAMNQLKSLLTTAPADLREQLRTLRATALISTAVRLRPSADLDDPLQATKTALRRIARRHEHLSLEIAEADDELRELTADAAPRLLQLHGVGPEVAAQLLITAGDNPGRLRSESAFAHLCGVAPVPASSGRITRHRLNRAGDRQANKALYTVVVVRLRWDERTREYTRRRIAQGLSKPEIIRCLKRYVAREVFAALQPQHGEEPAPQHP

SEQ ID NO: 463676 - protein, 347 aa, unidentified
MRFYTQQHQFYCGVDLHARSLYVCILDQAGDVQVHRNLSASPEAFLQLIAPYRQDIVVAAECMFSWYWLADLCEREEIPFVLGHALYMKAIHGGKAKHDRIDAHKIAALLRGGLIPMAYVYPARMRATRDLLRRRMHLMRKRAELLAHIQNTTSQYNLPAFEKHIAYGSNRAGLPEHFDNPFVRKSIEADLALIDHYDRLLKELELYILRAARQHDPNTLYRLRTVPGIGKILSLVILYEIHDIRRFPTVQDFASYARLVTCAHESAGKRTGTSGKKIGNAHLKWAFSEAAVLSLRQNPQAQAWLKKTAAKHGKPKALSILAHKLGRTVYYLLLRDEAFDMHRFLAA

SEQ ID NO: 463677 - protein, 330 aa, unidentified
MEYFYCGIDVSKDSLDYAVCNQQDKNILLLEKTDNTISGIRKMIKLIERKVKSRQVWYCFEHTGHYGLLLAHILQSQQQKYSMVASIDIIKSSGLTRGKSDPIDAQRIAIYAATFTHKLKPTKLQSESVLRMKTMLTIRDQYVRIRTQLKNAHKSMIITSKVVPMKTEINDYKREIARYDIKITRLEKRIIELINQDNDLKQSYDKIIKVTGIGLITAASILLYTNNFKSFNNPRKFNCYCGLAPFEYTSGTSVKRKDKTSRYRNKELKKLLFNAANTAIRHDQQIKTYFNRKTKEGKHKMSVINAVACKIIYRVFAVANRDEPYVNFSV

SEQ ID NO: 463678 - protein, 357 aa, unidentified
MNAKTAVGWDIHRKFSQVSVLQQSEDGEIRVVKRMRLEHADRVNMRSELTKLPPATPIAMEGSFGWPWIADLLNELGLDPHLGHPPAIKVLAKNEAKADRMDADRLGRFWLRGIFPESYLATPEVRQLRERLRFRTALVRLRTGIKTRIHAILHRQGIMHGFSDLFGKAGRAFLASLALPEACRTAIDDWLAQLDLITAHVADVEAWMQSHLEEDEIVRLLQTIPGIGLILAHVIQAEIGQLTERFPSRRHLTSYCGLAPLAKDSADYQGRRHIAHACNHTLRWAFIEAATCVIKSKTCPANLRRLYDRLTHGGRTHKSQAKVAVARELCELVYVIWKKGEPYRETTSPARSRRTKR

SEQ ID NO: 463679 - protein, 417 aa, unidentified
MATVEIVYPTCCGIDVHKNFLVACVAKTDEHGHTSHVMKRFSTNSGDLRKLADWLVAHNCKDVCMESTGKYWIPVFNILEKTCNVCLTHPKYVKAIKGKKTDKKDAKWIAELFKCDLVRSSFIPPFDIRQLRDLCRYHAKLTYMMTSEKNRSQNCLTTCNFKLDAVFSDVFGKSASRILDNVIALGNSDFEIAPLLHKGCKATIEEVQAALDGELTFAQAEKLKIIRKHMENLENLKDALESLIYKLAEQYQSEITLLLSVPGISSPLTAIRILAEIGNDMSVFETAKKLCSWAGVTPQNNESAGKKKTTRISRAGAYLKPLLVQIALAISQSAKHPEIRDKYQALKKRRGHKKAVIAIARRLLTAIWHMLSKSELYNADLYRKADEPPANRVLTPEQAFALLRSKGYQIAEPEPAA

SEQ ID NO: 463680 - protein, 367 aa, unidentified
MKKISTVAVKQSKNISGQKLTIGLDLGDRSSWYCVLDEAGEVLLEQKLATTAKAMREVFSGMPHSRMALETGMHSPWVSRLLSDLGHEVIVAHARNVRLIGESRKKDDRLDARTLARLARIDPQLLSPVKHRSAKAQADLTVIRARAGLVRSRTALINTARGLSKSYGERLRGCNPRNMNPEKAEQLSPELQAALEPLLAAIEALSERIHEYNQQIEKIARESYPQVARLEQGKGVGTLIALTYLLTLEDPHRFRKSRDVGCYVGLQPGRRNSGKSEPQMHISKEGDPYLRTLLVQGAHHILGPFGADSDLRRWGLKLAERGGKNGKKRAVIATARKLAVLLHRLWVSGEAYEPLRNSHQRAMPAAA

SEQ ID NO: 463681 - protein, 331 aa, unidentified
MEEVKRFVGIDVAKVALDVFIGSAGGAFSVANNEVGIQELLRQMKPADFVIVEATGGLETPVASALAAAGIAVAIVNPRQVRDFARATGKLAKTDRLDAEVLARFGEAVRPEARPLADAQAQALEALVTRRRQLIEMLTAEKNRRARAPKVLHHSIDEHIRWLEKRLSGLDAELAELIRETPLWRERDELLRSVPGVGKVLSSTLLAQLPELGMLNRKQIAALAGLAPFNRDSGNMRGSRCIWGGRAQVRRVLYMATVAGVRSNPTIRTFYLRLRTNGKHAKPALIACMRKFLVILNAMLHNKTHWQTPALISPTAPPFPLLGAVSEHGCC

SEQ ID NO: 463682 - protein, 310 aa, unidentified
MGVYVGIDVSKQHLDWAVGAEGIVDQVPNSRAGVRQLVTALGRIELESIVVESTGGYERVLTEALAAAALPVVLVNPWRVRRFGEGLGVLAKTDPLDARVLAMFGERARPARRPLPGPKQREMADLVRRRRQLIAMIVAEKSRLDTASLVVRRDINSLVQLLERRVARLDERIDRAIADDPEKSEQWKRLQTAPCVGPGVARALIVDLPELGSLGRRQITSLVGLAPFAKDSGKKSGYRRIRAGRAAPRSALYLAAMNGARFNAVLKEMYQRLIAAGKPPKLALIALARKLLTILNAMVRDGTDWRQAAA

SEQ ID NO: 463683 - protein, 347 aa, unidentified
MSITMIGLDTAKSVFQVHAVDECGRVIIKRKLRRSELIPFFEQQEACLVVLEACGAGHHWARMLTALGHDVKLMAPEAIRPFVKKGKKNDAADAAALCAAASQPDVKFVPTKSLIQQGILALHSARSLLVKQQTMLANAMRGLATEFGLTTPQGIGKLDELMSLVNACKAFPEQARQVFCGFFDQCQALSESIRVFEAEIAAHARRDETARRLATIPGIGPITASLTVATVTDIGAFKSARHFAAWLGLVPRQHSTGGKTRLGRITKTGNREIRKLLVLGATSMVYRSLRWNSAAGVWTRSLLQRRPVRLVTVALANKMARIMWALMTRNEIYHAKGQFVTAVNAVA

SEQ ID NO: 463684 - protein, 346 aa, unidentified
MKYFAGLDVSLEETAICVVDEAGAMVREARIPSEPEALVAFFQGSGLVLERIGLEACSLSAWLHESLVAAGLPAVCIETRRAKAAMGAMPNKTDRNDARGLAQIIRTGWYRAVHVKSPACRSWRALLTARRLLLNKMRDLENGLRAVLREAGLKLGTPTRKEFAARVRELTAADPVLSVLAEPLLTIIAAMTRELAQLTKRVLEIVRDEPVCRRLMGVPGVGPLTALTFRATIDQPERFRHSRDVGAHLGLTPKRYQSGETDVQGAISRCGDELARTALYEAAHSLLVRSRRWPALRAWGMQVAKRRGMARARIAVARKLATILHRMWADGTEFRWGKEGPMPAAA

SEQ ID NO: 463685 - protein, 392 aa, unidentified
METSEMEVKMTVCAGLDIHAKTVVACVLTGSLDSLRAKKEIRTFGTRTFELRLLGEWLTEKNVEKVIMESTGQYWCPVWNVLEEFELNLALANPQRIKGIPGRKTDQKDSEWIAQLGRLGLVASSYVPSREIQELRSLTRTRKSYISERTQHRNRIQNVLQHANIKLADFITDIFTGSGRRCLELLLNGEKITEELVRQTISKRCKHSPADIAQAMDGTFSKTQRILLESHLRSLERIDEEIYVLNKAIEEITSEYVEVMEALKTIPGVKKQGAEIILAEVGPNVEQFASAKQLASWAGLCPGSYKSGGVSKSAHITAGNKYLKTILYQCGGSAGRSKNPTFSELYNRISRKGSKKKAIIACAHKILRIVYKILSEQTNRVNEKSSLEAANN

SEQ ID NO: 463686 - protein, 324 aa, unidentified
MKLQKSNFDRYIGVDVAKATLEIDDSYQLIPKSIDNDADAIVRLIVSSIESPRSTLVVCEGTGGYERKLAYAMHAAGIPIVIANPRQVRDFASGNGILEKSDPIDASVLRVFGEDARNLTLATPKSDDQEKLGAMARRRKQLLDMINQESNRLEQTVDPEIAELIRENLQTLKKQLKTVDQRLTRMINEQAQTNQTVRVLQSVPGVGSVTASTLLSELPELGKLSRGEIAKLVGVAPLVNQSGRKDGQRSIIGGRGYVRRVLYMATLVATRCNDTIKRFYTRLVANGKPKMVALVASMRKLLIILNDMVRNGECWRHANLSESK

SEQ ID NO: 463687 - protein, 341 aa, unidentified
MLKFTIGADISKNKINFALRFLNDYVLEKEVENTTSALNKFIKEVQSLVKSIAKEKKSEYILEFIMEHTGIYGNLLIECLAGHKLTMYVIAGLEIKNSTGISRGKNDKIDAKRIADYGIRFADKLKPYTLCDQTLTELKGLNTLRTQMVRIKAQLTQANDDIKKFQSKELQKKSDKLKKPVVNELDQAIEKIEAQMLELIKSDESIYENYKIAQSVPGVGKIVAVAFICATNNFTKFESAKALGSYCGVVPFGKESGKYKGKNKVSPIANKALKTLLHLGAVASIGGNSPFAVYYKRKVMEDKKNKMLALNNVRNKIVKTMFACIKNKTKYQADYTFSFAA

SEQ ID NO: 463688 - protein, 423 aa, unidentified
MDQSHNDQDRFAALVGLDWADQEHAGALCTAAEGTLEAFKLPQTPDAIEQWAAGLRRRFSGRPVAICLEQSKGALVYALLKYDFIVLFPVNPKQLARFREAMVSSGAKDDPGDAMLLLELLRKHRQQLRAWQPDDVTTRLIGQLAEDRRNLVDYGTRLSNTLKSRLKQYFPLALEVLGELDKELACQFLLRWPTFEELRSAEPAEIAAFYRTWRCYHPRLIEERLETIRQAMPLVNDPAVIESGRRLVQCLARQLLDLLEPLARYDRRLTELMQRHPDAAVFESFPGAGDVMAPRLLAAFGTDRQRFKSAADMQSLSGAAPVTRASGKTRAVLRRWACNKFLLQTFHEFAQHSMGRSAWAKTYYDQARRKGKRHHAAVRALAFKWIRILYRCWQNRTLYNEAFYFQQLQRKGSRLVASISSQT

SEQ ID NO: 463689 - protein, 456 aa, unidentified
MPRKTKSKKTTAVLPVLHSDAAGVDIGATEIYVAVPAGRDPEPVRSFQTFTADLMALADWLVQCRIDTVAMESTGVYWIPLMQVLEARGLEVFLVNARYAKNVPGRRTDVSDCQWLQYLHSVGLLRASFRPAPEVCAVRSLLRHRDGLVELASHHVQHMQKALDQMNLQLHHVISDVTGTTGLSILDAVLAGERDVHKLASLRDPRIRATKETIAKSLVGDYRPEHLFTLRQSLNLYRQYQKEIADCESEIQRFLRQLETKVDPAAQPLPPAKDSVKKCKVMPPARALALREEGYRVLGVDLTTIPGVSVLHVQAVVAEVGPDLSKFRTAAAFSSWMGLCPDNDVSGGKILWTGTRKIKNRLAAALRMAARSLQGSQSALGEFYRRMRAKLGAPKAITATAHKLARIIYHLLKTREPYDEGVFARLEIRYRQRVENRLKAQAHALGFSLVPVPCHA

SEQ ID NO: 463690 - protein, 480 aa, unidentified
MAKRKMSTYERVQKGLQLSQKQRQQLRQQLHSGDPGLMIVHPDAAGIDVGSKSHFVAVPADRDSQPVREFGSWTADLKRLSAWLKSRGIRTVAMQATGVYWIALQEVLEAEGIEVYVVNARGTKNLPGRKSDVQECQWLMKLHTYGLLRNSFRPPEQIRAVRTIWRLRDRLVGDAGRAIQQMQKALITLNLQLSNTISDISGVTGQAIIRAIVKGERDPWKLARLRDRSIRASEEELAHSLEGHWREDVLFELEQVVECYDFYRKKIADCDERLQKYLAVLPTRRLPVPGEAQAAVPGEKRKSKRKQGKPKNQPGFNLKAELERILGVDVTRVDGIDVTIGQVILSELGPELSAFPNEHHFASWLELVPRRNITGGKMISQKARESKSRIANALRMGAESLSHSDSYLGARYRRLRGRMDGPSAVKAMAHYLACLVYRLLTKGQEYVDRGAAYFERKRSEREIVGLKRKAAEHGMKLVPA

SEQ ID NO: 463691 - protein, 360 aa, unidentified
MHATTVAVDLAKSVFQIAVADEHWRIVETQRLTRTQFERWFANRSVDQVVMEACGSAHHWARWLNGLGIEVRLLPAQYVRAYVRRNKTDATDAAALLEAARACDIRPVRVKSVEQQALQGLHRIRSLWMGTRTSRINALRGFCREFGITIPQGARTGVETIGRVLADPRSAVPDLIRHTAGMLLEEIRLLEARVAQVERELAAVARHSPACTLLLSVPGIGLLTATALVAATSGDVTHFQDARHFSSWFGLTPREYSSGSSRYLGRISKKGDRYLRMLLTHGARSVLRAAKVAEGSGKDVCGIRRWALDVQGRSNHNKATCALANKLARICYATLRDHAPFDEAARLTKKQSRQSFVMPA

SEQ ID NO: 463692 - protein, 395 aa, unidentified
MRHILSFDIAKDKSVYCFIDELRNVIIDATLIEHKKDEFDLLFNKVKNYSNLIVIMESTSIYHLPVENYFRSKGIDTIVMNPKLVKQFKDTLNKSKTDKLDCFKIARCYLGTIDNFYQKQDEYFMYNPLARQYWSLIEGQTRLKNRYRQLIDIVFPEFALIFNDLYDDLALNFIHDFPHPVLFVNRRIDYLMNYLKEKNGTTQAFRFKNKVLKMKELASNSLCFVAFDSYQVQNLVQVIEMIQYHKSEINKIKNQLINDMKDKELFKIINSIPGFGEFSTALFLAEVGDITRFDDKYQFISFIGIDSVTSQSGVSAYHGPISKTGCKFGRTILFNIVTTVLQISAHTDKTNPIYLFFRKKQSEGKHHYKCIIACETKLCKIIYKLCSSNCLYENK

SEQ ID NO: 463693 - protein, 442 aa, unidentified
MEVMYARCAGLDVHKRTVVAARTRPAAAGEWEREVRTFGTMTVELLQLVDWLQAWDCSHVAMERTGEYWKPVYNLLEASFTVLLVNPQHIKHVPGRKTDVQDAEWLNELLAHGLLRPSFIPPVAQRDLRDLTRYRTTLVEERARVVNRVQKLLEGANIKLAAVASDVLGVSGRQMLEGLVAGQADPAVLANLARGRLREKLPELQQALTGLVRPHQRFLLATQLAHIDFLDEQVAAVSQEIIARIDHMSLPAEPPARLPPADIGPTPPPAEGAPPLSAAQAVALLDTIPGVDVRLAQVIVAELGTDMTRFPTDRHAAAWAGLAPGNYESAGKRYSGRVRDGNQSLRTALVQGAWAAAHTKDTYLAAQYHRLIGRRGKRRALVAVAHSIIVIAFHMLRDHVPYRELGGNYFDERKKEAVTDRLIKRITKLGYSVSLTPLPATV

SEQ ID NO: 463694 - protein, 371 aa, unidentified
MEEQPMKKIAYVGIDYHLHSLSIAVMAEGEKRFSDLIRLKNEDKLICKYMKKLSSHYEIKACYEASCNGYTFQRKMASWGYHCDVIAPSLIPKKSGDRRKNDFRDAKNLARLYANGLLTIVHLPTEYEESVRSLIRCRLACKESEKRAKQHINSFLLSQDCHWAHSKWTKQHRDWLSELRMPNAYVQHVLDEYVGHLEYLRTRLRYLDDQIEELARSELYAPSVTKLKAFKGISTLTAMVLISEITDFRRFPHPGALMGFLGLIPSENSSGDTHKGGSITKAGNHRCRRLLIESVQHYTKRPHLSLQMQHDLAQVDAHSATIALDCLKRLNKRYWALTMKGKIHPVAITAIAREFVGFIWAMMQPEPIAVS

SEQ ID NO: 463695 - protein, 371 aa, unidentified
MEVLYARCAGLDIHKKTVRVCVLIRQENGKRAKEFRTYSTTTQDLLNLLDWLLEQGCSHVAIEGTGVYWKPVYNLFEGQIEVLVVNAQHIKAVPGRKTDTKDAEWIADLLQHGLLKASFIPSAPQRALRELTRYRVKLSEERTREVNRVQKTLEGMNIKLGDVVSDVMGKASRMILRAMADGESEPSRLAGLAVGRVRASQAELEAALTGTISEHHRFLLREHLTQIEHLEAAVERITAEIARRFSPPDPPEDGEGEAGGSSEPKLASGEPSQPCLPSSKQGLSWEEAVILLCSIPGIGERAARAILAEIGVNMQQFPTAAHLASWAGVCPGNNESAGKRLSGKTRKGNPWLRRLGARKPRMWLVARSMAI

SEQ ID NO: 463696 - protein, 415 aa, unidentified
MTGGGIRGRGNGGAFGRGAKTVYWIGFDVGKAFHWVCVLGGEGEVVLSRKVEATEERTEKTLSEIAELGETIERVVGIDILGGPATMLEALLLERGERVRYVSGTAVNKLREVYAGGENKSDPKDAFVIADQLRLRWRSLPEVAVRREGLAELRVLVGYRRDLVQEQVRRTTRLRAMLNEVFPGLESALDLRKEGPLLALTKVATPAAARRLGEVRLARWLKARGALKANALAERIVTAAKSQRREMPAAEVKAALVAEIASEILRTRDRLRELDARLEALVETDPSGEVVRSLPGMGLVLTAEFLAEAGDASRFVSADRLAAAAGIVPVLRASGGVSYQRRERRGNRVLKRIFYRSAFSAISCHEPSQAYYRRKRTEGKTAQQAVIALARRRVNVLWAMLRDGVVYEDRATAAA

SEQ ID NO: 463697 - protein, 332 aa, unidentified
MDNFYFIGVDVSKKKLDFCVLFEGKVLREEQVSNHQQAVARLIGELKNDLEMDNEQFLICAEHTGQYTFPLVCACKSVECKLWLENPSQIKYSSGMQRGKNDKVDAKRIAIYASRFGDKVKYYDRPSEEIERLKQLERERALYVTDLAKYKGQMYDQKDFMPAALYRKKTKRMKGLIQELQAAIDAITAEMEKIIGSTEVLARQMELLMSIDGVGKVVALNVIIETEAFSRFDNPRKFCCHAGVAPFSYTSGSSQHSKNKVSHRANKNIKKLLHMAAVSVTHRKEGELKAYYMRKVEEGKNKMSVINALRAKIVARMFAVIKRNEFYTPIYY

SEQ ID NO: 463698 - protein, 344 aa, unidentified
MTNIVKQVVGIDVAQNELVVSLGRMNHDTGTDIFAFKTFPNNAVGFKYLLAWVSKLSAKEISVRYVMEATGVYHEKLAYYLSDQGQEVSIVLPNKISNYFRTLEVKTITDKTASQAICQFGLERKLEAWKKPKKIFKDLKQLTRERDQLIAERTALKNQLHAEKAEAFPNDSSIKRVIKRIQLNDKQELEIKAEIAAIVKQDLELVEKINTITTIPGVGKLTAVIVLAETNGFELIKNKKQLVSYSGLDVRLKDSGTSVKSKPKISKKGNRHLRKAMYMPALAAMRFNDQHKALFVRLVSKHGIKMKAAVAVQRKILELIYTIYKTDKAFDKNYTITNIQTETA

SEQ ID NO: 463699 - protein, 365 aa, unidentified
MSEASTTPTTLTIGIDLGDRKSHVCVLDAGGEVVEESRITTTPKAMRARFEGLAATRIALEVGGHSAWVSELLEELGHEVIVANARKLRMIFQSDSKNDRLDAEQLARVARLDKRLLYPIEHRNRSARADLAVMRSRDALVATRTRLVNHIHGVLKSFGHRVKKYAAAGFHRQVAGQIPEELQPALQPLLDTLAAIAERVLGLDREIRRLSTKAYPETALLNQVGGVGPITALCYVLTIEDPGRIESSRNVGAYLGLRPKQRQSGQFDPELRITKAGDRDLRRLLVQCAQQILGPFGKDCDLRRWGLKLASRGRATAKKKAVIAEARKHAVLLHRLWVTGEVYEPLRNANRCGAAQKQEPAAAAV

SEQ ID NO: 463700 - protein, 387 aa, unidentified
MPQPNDLSRSLAALDEDSTLIVVIEMSQSSWLVAGIVPGIERHPAKKLEPSEAGLLRLLHRWREEAGKAGRTIKRIAVAFEAGRDGFWLARWLRAHGVEAHVIHPNSIAVSREHRRAKTDRLDTALLKRAFLGWLRGEREHCSMAAIPSLVEEDAKRPSRERENLVGERTRIGNRLKSTLARLGIRGFKPTLRTAAQRLEQLRTPEGEAVPPNTLAELRREMARLRLLAEQIREIESARLQRLEQQPNSGAHPMVRLLAQVRGLGIETADMLAHEAFSRSLRDRRAVARYGGLTGSPDESGARRREKGLARAGNARVRRGMIQLAWRFLMFQKDSALAQWYRARTAEARGATRKTLIVALARKLLIALWQLVTTGEVPLGVVLRPAL

SEQ ID NO: 463701 - protein, 408 aa, unidentified
MRLYVGDDWAEDHHDVEVMNEAGKVLVKKRLPEGAAGMSQLHDLIGRHVPEDADDAEVVIGIETDRGPWVAALIAAGYTVYPANPLLASRYRERHGVSGAKSDGGDAHVLADMVRTDSHQLRPTAGDSPEAEGIKVVARTHKTMIWDRTRTVQRLRHQLREYFPAALEAFDDLDAPDVLELLAKAPDPARAAKLTRAQVAAALKRARRHHVPARTDAILAALRGEHLGQPAELTAAYAATARSLIAVLVTLNEQVRFLEAQVKEHFGRHPDAEIYQSQPGLAAIPGGRVPGEFGDDPRRYVTAKARKNYAGTSPITRASGKKKVVAARFVRNNRLIDALMAWAFTSMLSSPGARAFYDEQRAKGFEHNDALRRLANRLVGILHGCLKSRTLYDEDAAWGHREELKRAA

SEQ ID NO: 463702 - protein, 385 aa, unidentified
MSEAKKRGPGPSHVLTTPDHAGNVVGIDPHKRTLTATVADARGGVLGSAHFRVSGEGHRELEAWARQFGQIARWGVEGSASWGRHTAMFLTGRGHDVRDVCPNRTPRQGRARQRGKSDMLDSERIAREVLAHALLPKAFKRAGQERGPDEQHQLLALWHNRRRSILTSRQHLVGEAEYLLCELPLELSEQLPDTKAVKPRLAALARRNRRRRYDAPTRLRLQLLDGYRTQIKALDLEEKQVVAQLEALVDQSGSTLGELCGLSIRSVAELLVEVGDPRRFTEGGFARFNGSAPLPASTAEGPGEPVRHRYNPGGNRRINAILYRMAITQLRCEPRAQRIYTNARAGGHTKREARRILKRHLSDVIYRRMIRDLEAQLTDQHLLAA

SEQ ID NO: 463703 - protein, 330 aa, unidentified
MKKYEFILGVDVSKNTLDVYCWEKSEHLCIENGKKGFRTLTTWSRKNNIDLSTCLVVLEFTGGYEHKFLQFCEELSLAYTRLPGLQIKRSMGIVRGKTDKVDAKRIAQYGHEKRDSLEPSKPLNSKVLELKSLLRFRKRLVRERAGYEATVSERKHMYPMVTHDMIIIESKRRIKELKAAQVRIEEQITELIESEKAMKRNFILITSIKGIGSVNGWMTIAYTENFTCFPNARSYAVYVGVIPFDNSSGISIRGKKRVSHLANKELKSELSMAARTAMVWDNEIKAYAERKLINKPWGLVINNVKFKLILRMFAVVKRGAKYVENYQYAA

SEQ ID NO: 463704 - protein, 411 aa, unidentified
MEVLYPRCAGLDVHEAFIMVCRRVLHADGPVEKVVRRYSTMTADLLALADWLAEAGVTHVAMESTGVFWKPVWNLLEGRFTLLLVNPRDVKQVPGRKTDVADAAWLAQLLQYGLLKGSLVPPPSIRALRDLTRHRTTLIRDKTRVINRIHKVLEDANIKLTAVASDIMGVSGRAMLAALVRGDTDPQELAALAQRRLRRKLPQLEQALQGRVQPHHRLLLQSLLAQVTFLEQEITALDAVIETTLRPFAAPLQLLKTIPGITARAANVLAELGPDMRVFPTAAHCASWAALCPGHDETGGKRRSGKTRHGNRWLKGTLTEAAWVASRTKGTYAAAQYRRLAGRRGKKRAIVAVAHSLLIAAYHVLRDGVAYHDLGPQHFDRLNETHLTRHLVKRLEHLGHKVTLEPAHVAA

SEQ ID NO: 463705 - protein, 375 aa, unidentified
MQNKVRFLGLDVHAETISVAVAEADGEVRSLGIIANRSESVRKLIRKLGPVEQLRACYEAGPTGYVLYWQLSELGVECAVIAPTLAPVKAGDRVKTDRRDAERLARSHRAGDLTQVWIPDAASEALRDLVRAREAAKQDQLRARHRLSKFLLRQGQHPTAGVKAWTIAYLSWVRQLRFAQPAQDAVRLDYLHEVEHMSERITRLEESIREAVQQAPPQLGAVVQGLQAMRGIALISAVTIASEIGAVSRFPSARQLMSYSGTVPSENSSGKRTQRGGITKSGNAHLRRILGEAAWSYRRKPAVGPALRERQKGVPEAIRQIAWKAQVRLCKRYARLQAANKDPGKIVTAVGREMLGFIWAIGLRAESSIPQATAA

SEQ ID NO: 463706 - protein, 343 aa, unidentified
MQTITTIGFDIAKTVFQVHAVDAGGQVVIRRQLKRRSVLAFFQKLPPCLVGIEACGSAHHWSRELQALGHTVRLMPPAYVKPYVKRQKNDATDAEAICEAVTRTNMRFVPTKTAEQQSGLVLHRARHLFIRQQTSVINAIRAHLAEFGIVAPVGRHGVEELLNVVTDPNDKRVPDIARACLSALGDQLQRIKEQILEFDRLIRAWHRSNEMSMRLEEAPGVGPVLATALVAAVADPKSFRSGRNFSAWIGIVPKQHSSGGKNRLGNISKQGDRYLRGLFVAGALSVIRYAKIHGTKHRPWLTALLARRPTKVAAIALANKIARMVWAMMARGERYKEPVALAR

SEQ ID NO: 463707 - protein, 343 aa, unidentified
MQSISTIGLDIAKSVFQVHGVDAAGQVVIRRQLKRRFVLSFFEKLPPCLVGIEACASSHYWSRELRALGHTVQLMPPAYVKPYVKRQKNDSTDAEAICEAVTRPNMRFVPIKTIEQQSCLMLHRVRHLFIRQQTAVIKSIRAYLAEFGIVAPVGRRGVEQLLEVVADPAECRLPEVARACLAALGSQLRALKAQILDFDRRIIAWHRSNATSKRLDAIPGVGPALATALVASVADANAFRSGRDFSAWVGLVPKQNSSGGKDRLGSISKQGDRYLRSLFTAGALAVIRYAKIHGARHRPWLTALLARRPTKVAAIALANKLARMAWAMMARNECYREPAALTA

SEQ ID NO: 463708 - protein, 414 aa, unidentified
MQVLHPRCAGLDVHKDSVVAAVRLAEAGGTRCEVRSFDTTTPGLLALGAWLAECGCTHAVMEASGVYWKPVWHVLSDGDLTLVLANAAHVRNVPGRKTDVADAAWLADLLAHGLIRPSFVPEPATQALRALLRTRKQLVREQASHVQRLQKTLEDANLKLGSVLTDVMGLSGRAILEALVAGESNPDRLLALVHPRVKAEPARRRAALTGRVTDRHRFLLRLHLGQYDALAAALAEVDAEVERDLDPFRDAVRLLRTIPGIGDLAARTIVAEIGTDMGRFPTAGHLLSWAGLCPRNDESAGQRRSNRLRKGAPWLKTALVQCAWAASRKKDGYLRAQFQRLRQRRGPKKAVCAVAASMLAAIWHMLRDGTFWRDLGPDHFHRRSPEQQAAHLARQIAKLGFACSITPQVQPVSV

SEQ ID NO: 463709 - protein, 385 aa, unidentified
MLSEGGQPTQNGQGRGRSYNLEASEPEGELDRRVTANSAENPNSRRGRKREPELRKAGSGPNRKWVKVMSQYAELYVGIDVAKRSLEVALSSGESWTVSNEAAAIRKLVAELVRRKPALVVMEASGGYEREVWLALLAAAIPTARVNPRDTHHFAQANRQLAKTDRLDARGLTLFAAQVRPRPDVAPSAAAERLQELVGRRQQLVGMLTAERNREQQAITAANRRGIRGVIRFLERQCEAIERAIAEHLSKHAEYREVDQILQSAKGVGLVVSATVIARMPEVGTVSGGQFAALVGLAPYDRKSGDWDGRSHIFGGRADVRCALYMATLSAVRCDPALRAFYRRLLDRGKEKKVALTACMRKLAVMLNAMVKNRTPWRPLCPTAV

SEQ ID NO: 463710 - protein, 387 aa, unidentified
MSRNARVPVPVTTLDQDSTLVVVLELSARSWLVGARVPGIGRMSRYALAPSAEALAAWLGTAKARAGAAGRTVVRVVLAYEAGRDGFWLARYLEARGVEVYVIQPSSVLVDRRARRAKTDALDVEMLMRTLLAWLRGEPGVCSMVPIPEVAEEDGRRPVRERQGLIGERLALLNEIDGLLATFGITGYRPLRRDRRAQLAALRTPEGDPLATNAAARIGRILARLELVMQQIAELEQARDAVLAKEAASGAAETMIRGLARLKGIGAELATVLVWEAYVRSFPNRKALGAYAGLTGTPFASGSTTREQGISKAGNRRLRSSLVELAWLWLRYQPDSKLAAWFRTRTGSVGSRMRKVMIVALARKLLVALWRFCRDGVLPEGAALKAT

SEQ ID NO: 463711 - protein, 359 aa, unidentified
MTMLAEPNEKIEDPTVLDAVVGGDTHRDTHQLEMLTGAGVMISTISIDNDADGYAAAIAWIAQHAPGPRVLVGLEGTRSYGVGLCRAVQAAGLQVVEVEQPKKGQRRGRGKSDPIDAHLAALTVLRMPADRKALPRNDGDREAIRILLVARNEISTTRTAQINRLRALLLLGDDEDRALSRGAMSKAHLDRIGRRRGRRDETREQAVRRGEARRLAIAIRAADLELTANHKQLKTLVQAFAPGLLDRKGVGPFSGAQAIVSFSHVGRCRDDAAFAALAGASPLPASSGRTDRHRLNRGGDRQLNRALHTIMLTRWRDCTRTKAYIQKRRTEGLSDRDIRRCLKRYIARELFRALTAVGG

SEQ ID NO: 463712 - protein, 316 aa, unidentified
MSESMSFVGIDVSKNVLDVHVLCTGEHWQVGNDQAGCASLVERLKPLGKTMLVVMEATNVFWRMAAAALAGAGLACAVVNPRQVRDFAKSMGILAKTDAIDAQVLAQFAQRVKPPVRALPDAQCQVAAELLARRAQLMGMRVAEKNRLGTANARKVRKDIEATIAFLEKRLAALDEEIDRWLKSTPIDQSRADLLQSFTGIGQNAARSLLITLPELGRLSGKQIGALAGLAPFAKDSGGKRGQRHIAGGRAVVRAALYMPALSAITHNPVIRALYQRLVQAGKHHYVAITACMRKMLVILNAMLRSGKPWKASHHA

SEQ ID NO: 463713 - protein, 405 aa, unidentified
MSELEKDLVFAGVDTHKDTHTLCLLDHMGRAIGTFRFAADAKGYDALAGKIGGPATCVGVGVEGAGSYGAGLTRRLLELGYCVHEVMVPGRARRKPGRPKSDPADAEVAARQVLARVNLSKPKDQSGWTEELRQLMIARDRLVQATSAMINAAKSLIVTAPEDLRSSLEGLSRKNLRTALSTLDPAAGGIILALGSLGRAWELQDREADAIEERMKRVLEANAPALLAVYGCGTVSAAALAVAGGGNPERLESEAEFASLCGVAPLLASSGKTERHRLNRGGDRRANRALYQIAVTRMSYDQRTKDYVAKRKRDGKSKKETIRCLKRYIAREVFRALRRPLEVKGPSWKNLRPARQALGITLVEVGKALNVGFQRVSYAETGRLMNAKFLEEYDAWLKSQLRIVG

SEQ ID NO: 463714 - protein, 410 aa, unidentified
MDVLHARCAGLDVHRDSVVACARLATAEGTAYEVATFGTMAADLERLARWLSARGVTQVAMEATGVYWKPVWAALAAQVELTLANAAHVKNVPGRKTDVNDATWLADLLAHGLIRASFVPGQPIQALRDLTRTRKQLTREKAAHAQRIDKLLQAANLRLGTVLADILGASGRAILAALAAGETDPERLADRVQTRIRASRRQVIEALRGRLAEHQRQLLQIHLDQIAAIDRALGALDAALDHSLDPFQEAAGRLTTIPGVGALAAAGIIAEIGCDMTRFATPAHLISWAGLCPANDESAGKRRSTRLRKGAPWLKTLLVQVAWSAARAKAGYLPALFARLRARRGPRKAIIAVAAAILTAVYWMLRRGTSYQDLGTDYFERTDRQRLATKLVRKLDQLGFTVTLAQRQTT

SEQ ID NO: 463715 - protein, 416 aa, unidentified
MADDIQKSCGLDIHKKFVIATVLTRRKTMKIQKRFERDDDGILSLKNFVLAEKCEVVACESTNDFWMPIYDAMCDHVTVIVGNARDIKGQTHKKTDKVDSEYIALLALNGMIKPSRVFSRDFRQIRSHVRLRHKLVKKRTDLKNIIHSILSSEQFNLRSKLTDIFGKTGKTILEGIIKGLPVDTIIKKFPTCMIGKAEEFKELLEREISQDAIFRLKECMNCIFQLDKSIKILETRIYEWTSTNHKDKMKKLISIPGIGKTSAMTLIAEIGDFKDFSDGDKLSSWLGLVPNVYQSANKFYNSRITKRGSKVARWILIQVAHVIASKTKNNALRAFFDRKKATIGYNKAIVALAHKLARIIWHLIVNDEIYEDNVGFKKKNIKFTPPIYHNSISVDECITIIFQANAVLTQKDPDRI

SEQ ID NO: 463716 - protein, 371 aa, unidentified
MQKLRRHRQRFKGLSVGLDLHNQYTQVSVLDEAGDECRVERIVSQPQLLGRLIDQLTAAGSAVQVALEASGCFLWAYDWLVGRLGREHVHVAAPSKVRVIAQSQEKTDANDAWWLAYLLWEGRLPQAFVAEGDLRELRIASRELRSVIDQRSDLMRQMRSHLRQLGLTFAKRDWASVIGHHRIADLVAQTEATHGTRGQVIARLWTRIEQMDQQVAHWRDQVKAWSSKFDQIRLMQQQLPGVGPTIAAAVFAELGDPARYRSAKAYAKATGLTPGYRESGGRRSKLHITRAGSTHVRWALTRAVLACMRCRQGPGLAVQRWVERRSRRQAKKAAMVAAARKLAEGVWRLFAWGETFDLARAFGPPYPKLNV

SEQ ID NO: 463717 - protein, 415 aa, unidentified
MSKDEEFVALMSLDWADKGHRGCIQTRDLVEVEDFQLEQKASAIQEWAGQLRSRFRGGKIAVAVEQKRGPLIYALMKYEMFVIFPLNTTAVKNYRKALRASGAKDDPSDARLQLLFLRNHLDQLRRIEPDSTMTRKLRMLVEGRRKMVDASTALSNQITALLKEYYPTALELIGQLKTPLACDLLSKWPCLQAIKSVKAEDLKDFYYKRNCRNKQAVDLRVKLVSEALPLIDEKGIVATYSFVLRSLVTQLQVLLKQVKKYDCRIQKTFNHHRDASLYRSLPAAGPALEPRLAVVFGEDRNKFDNAAAIANLMGVSPVTISSGKYRFVAFRMSAPKFARQSLVEFAELSIRQSTWALAYYQKCRNEGKSHNAAVRALAYKWIRIIYRCWKNRLPYDESIYLAALKRKNVPWLQAS

SEQ ID NO: 463718 - protein, 349 aa, unidentified
MRTYYVAMDVHSATIVIAVLNGAGKVVMESVVETGAERVRGFLKQLRGKVYVTFEEGTQANWLHDVVRPLVTEVVVCDPRHNKLLQSGNKNDRVDAKKLAELLRNGSLKAVYHGDNGVRTLKELVRTYDCLVSDTTRVMNRLKAIFRGRAIACGGHEIYRQKRRGQWLAKLSEPGAKQRAGFLYDQLAALKPLRHKAKLAMVKEVRLQPAYLWLMSVPKLGSVSVAQLIAIVGTPHRFRSKHQFWTYVGLAVVTSSSADHEVVNGVLRRSTKPIATRGLNRNHNHQLKRVFKNAATSACHSGPFKAGYEVRVGRGMAPNLARLTIARQLAATTLVIWKRGEQFDPERKK

SEQ ID NO: 463719 - protein, 419 aa, unidentified
MSKARNRMRVKSHQLTVGIDIGKYHHVAVGLAGDGRFTKPMKLPNTREGYEQLLLRIMAWKKEYGADEVLVGMESTGHYWEVPARWLTAHSIPVVQVNALHTKRAKEIEDNTPGKTDPKDARIIAQLVAWGKYLDCHLPDGVVAELRQFVRQRSTLTNELTEKRNYLRYLLDCVFPELFTVFKKSSGKTLLHLLALCPSPHELIGADQADVARTLRQHCPTGAAKRLDRVYALARITVGIAPARHAYAVAIRRTATRILALREEKAEVEQQMTKLLIELPEAGSLLSVKGIGPVSAAIIVGETGGLHRFGHAEEVIKLAGLNLFEVSSGTHKGTVRISKRGRPLLRQILFVLATIQAKKGMPFHACYEELLNKKMPRVKALIAVARKMVRVLFALVRDGRCYQDEKPAALKMGRSSRYP

SEQ ID NO: 463720 - protein, 345 aa, unidentified
MIYVGMDIHQKTTTFCAIDQEGKVARRGKVKSGQAAWLEIVGQWPGQQVRVALETGAMTWWVVDVLREAGIEPVVVDARQFKLIAASKKKSDRRDARTLAEALKGGLADNCSVAVPSQRARRCRSLLRTRHLVVKQAGATLKAARSLLGSVGVSISRGDWEKEARWEKVLDHCSLPIWMKPLLLVYRNVWQALARELEDLNAMVREELSHWREADVLIQIPGYGPLVTLAVLSSLDDPHRFKYSGQVASYAGLVPSSRDSGGTQRRGGITHQGRSLLRHLMVQAAWSALHSRRLPPDLQKWTRRLIVKRGAMVAVVALARRLLILGHRLWKNGEAYNPTYPVVEV

SEQ ID NO: 463721 - protein, 408 aa, unidentified
MEVIHERCASLDVHKETVVGCLRVRERGQVRREVRRWATTTAELLELGDWLRQAGCTHVAMEATGVYWKPVWHVLEGEFELILANPAHIRNVPGRKSDVNDATWIADLLAHGLIRASLVPPGPIQELRDLTRTRKQLMREIVQHKQRIQKVLEDANVKLASVVSDVFGESGRRMLKAISAGQTDARQLAALGDGRLSASRETLAAALQGKVTTHHRFLLSQHLRMIEHLEQTVTAFEGQIEAAVQPFRAAREHLVTIPGVSATAAHVIIAEIGVDMSRFATVGHLRSWAGLCPELHESAGKVMSRRLRHGAPWLKTVLVQCAWAATRNKNNYLHAQFVRLRARRGSKKAIISVAASILTTAYFLLRNQVPYRDPGALYFARIDQERTAQRLARRIKELGYEVQIRKAA

SEQ ID NO: 463722 - protein, 413 aa, unidentified
MAIDTVVQRAAGLDIAKASLVACIRIPDGEGGWQIAKRKFTTMTADLLALADWLGEHGITRVGMESTADYWRPVFYLLEHRFDCWLLNARHMRAVPGRKTDMTDAEWICDLVAHGLVRPSFVPPAPIRRLRDLTRRRTILLAERTREKQRVEKLLEDAGVKLSVVATDIFGKSGRAILTALIAGERDGQVLAGLALGRLRKKIPALTEALVGHFDDHHGFLAAMICHHIDTINEMVTALDARIDTEMEPYRPAVELLDSIPGVDTRTAEVILAEIGTDMSRFTTAAHLASWAGVCPGNNKTGGKSKPARTRPGDRWLKAALGTAAMGAIRTKNSYAHALFRRVAVRRGGKRAQAAVAHSLLVAAWHVLTTHTSYHDLGGDYFIARDNPEHRRRRALLQLERLGYRVTLEPVVA

SEQ ID NO: 463723 - protein, 343 aa, unidentified
MQTIATIGLDIAKSVFQVHGVDAGGQAVIRRQLKRRYVLTFFQKLTPCLVGIEACASAHHWSRELQALGHTVRLMPPAYVKPYVKRQKNDATDAEAICEAVTRANMRFVPTKTPEQQSGLVLHRARHLFIRQQTSVINAIRAHLAEFGIVAPVGRHGVEELLNVVADPSDRRVPEMARVCLLAFGAQLRRIKEQILEFDRLIRAWHRSNEMSMRLDEAPGVGPVLATALVAAVADPKSFRSGRNFSAWIGLVPKQHSSGGKNRLGNISKQGDRYLRGLFVAGALAVIRYAKIHGTKHRPWLTALLARRPTKVAAIALANKIARMVWAMMAKGERYKEPVALAR

SEQ ID NO: 463724 - protein, 396 aa, unidentified
MAGPLKVVGGVDPHADTIHVAVITMTGKAVADREFATTADGYRSATAFLTATGAVVRVGVEGAASYGAGFTRALKTAGIDVVDVDHPARFDRRRAGKSDRLDAYHAARAVLAGRSNPVKGPAIEGVRALHLARRSAVKAQTAAMNQMIAILVMAPDPVRARYRRLHGDRLAIALTRSRSALDPVSADTLLALKALADRYRQLAVQVDALTTRLDHAVRQASPALRAAFGVGPDTAAQLLITAGSNPERLYSERSFAALCGSAPVQASSGKTHRHRLSRGGDRAANSALHRIALVRMANHPPTRAYVARRTANGRSKREIIRMLKRAIAREIYRLLTHPAEVPNYADLRAVRQAKNITVTLAARHFDVWPAVISRLERGLRRDDDLAQQYRTWLAAP

SEQ ID NO: 463725 - protein, 408 aa, unidentified
MNPLFVGIDVSSKNNVVYLMKPDGSKHSSFSVQNNLGGAKLLSGKIVSALGSMQLSDVVIGLEATSIYGDSLVYALREDGSLGRFQRKIHVLNPKQVRKFKEAYPDLPKNDWVDAFVIADHLRFGRIAKEVYMDDYRYQALRTLTRARFDVIQNLTREKQRFANYLFLKCSGIAQDKDIQNTSATTIALMEHFETVDDLANAELSELTTFISEAGRGRFVDPDATAKAVQAAARGSYRLPKTVNDTVNQAMAVSIASMRALKEQVKVLDKAIEQQFEIIPNTLTSIPGIGKVYSAGIIAEIGDVHRFSSQASVAKFAGLVWHKNQSGDFEAEHSQMIKSGNRYLRYYLLEASNSVRRCDSEFRRYYDLKFKEVNKYQHKRALALTARKLVRLVFRLLKDNRLYIPPEG

SEQ ID NO: 463726 - protein, 461 aa, unidentified
MAKQPGKRKKDGAGADATAGLPPLNLHAAGIDVGGAEHYVAVPADRDDEPVRRFGSFTADLHRMARWLKDCRIKTVVMQSTGVYWMALYDVLESHGLEVNVANARHTKTLPGRKTDVQECQWLQKLHTFGLLNNSFRPPEEIRVLRGYLRQRENLVAAAATCIQHMQKALTEMNIQLANVISDISGTTGLAILRDIIRGERDPHRLAMHKNSRIRASRQEIARSLEGTWRQELLFVLEQSLDLYQTYQEKIQTCDQRIDKQLRSMEPKIDPLSEPIPEPRRGKDARGHQSGFDLRGQLYRITGVDLTRIDGIEVQTAQTIISEVGVDMSRWKTEKHFASWLGLCPDNRISGGKVLKRGTRHVVNRASTALRLAASALLRSQSALGAKFRRLRSKLGAPKAITAMAHMLARLTYRMLKFGHDYVDRGIQFYEAKYQQQQLQPLTKQAAALHLQLVPVTSHVS

SEQ ID NO: 463727 - protein, 403 aa, unidentified
MTQPKARVNRFVGLDVHKRYLVAAAVDPDRNEVMSPRRVLLTRLDTWVQKTLTAEDAVVLEMTTNSFQIYDDLLPHVHSVTVVHPPHVALITRAQVMTDKIAARTLAKLHAVGLLPPVWVPPPEVRDHRALVAQRSKMVRLSTQAKNRLHAVLHRHHLLPPEGNPFTSAKREWWLGLEISELERARVQCDLEVLVFAKTQIAHLEETMTALAAQDERVPLLVQIPGIAWLTALTLLAAIGDISRFPTAKHLVGYAGLGVRVHDSGETHRSGRITKAGRRDIRAAMVEAAHTASRTHAHWREELARLEPRLGKNKAIVAIARKLLVTVWHVLSEGCADRFADPEQVARKLLKHAHKLGRKHRAKGQTPAQYVRQQLDRLGQGADVTTIRWGSGTIPLPPSRLGT

SEQ ID NO: 463728 - protein, 343 aa, unidentified
MQAITTIGLDIAKSVFQVHGVDAGGQIIVRRQLKRRYVLTFFQKLSPCLVGIEACGSAHHWSRELQALGHTVRLMPPAYVKPYVKRQKNDATDAEAICEAVTRANMRFVPTKTPEQQSGLVLHRTRHLFIRQQTSVINAIRAHLAEFGIVAPVGRHGVEELLAVVADPNDKRVPEIACTCLSALGVQLRRIKEQILEFDRLIRAWHRSNEMSKRLEEVPGVGPVLATALVAAVADPKSFRSGRNFSAWIGMVPKQHSSGGKNRLGNISKQGDRYLRGLFVAGALSVIRYAKIHGTKHRPWLTALLARRPTKVAAIALANKIARMVWAMMVRGERYKEPVALAR

SEQ ID NO: 463729 - protein, 343 aa, unidentified
MKITTVGIDLAKKVFQVHGVDEHGKTSLKKQLKRAQMLPYFANLPPCLIGMEACGSAHYWARKLGGMGHTVKLMAPQFVKPYVKTNKHDAADAEAICEAVGRPNMRFVPIKTDEQQAVLSMHRAREGLVKARTAQANQIRSLLGEFGIVVPQGISHIVGHLPATLEDAENELPGVFRELLHRLGDHLKELDRQVAEVDVQIQRWHRENAASRKLAAIPGIGPITASALMAAIGDAKAFENGRQFAAWLGLVPKQHATGGKQNLLGISKRGDGYLRKLLVHGARAVIRVKELKADQADDWLLGLIGRRNKNVATVALANKNARTVWALLAHDREFQPGYAAAFA

SEQ ID NO: 463730 - protein, 355 aa, unidentified
MTSAKYIGMDVHKESISIAVRNSVGKVVMECVIETKASMILQFIDGLRGDLQVTFEEGTSAAWLYDLLKPHVTKLVVCDPRKNKSMREGNQNDKIDARRLAELLRLDHLTPVYHGEHGLRTLKELVRSYLTITKDLSRVMTRVKAIYRSWAIPCTGKQVYARCHRAEWLAKISEPGVRRWAEFYYQQLDALRVLRQEARRDLLTESKKRKAWKRLCEIPAIGPIRAAVLLGILQTPHRFRTKRPLWNYGGLAIEMHSSADHHSVHGQLQRSRKNVLVRGLNRNCNHDLKNLFKGAAAVASSKPGPFQEFYTALVAKGMRPEMARLTLARKIATIVLIVWKRGVHFDAQYLKPQTA

SEQ ID NO: 463731 - protein, 411 aa, unidentified
MIKENYMYVGIDLHKETHTAVIIDCYNQKLGEITFPNRPADFPKLVTKVKKCNTDGKEVVYGLENAYGYGRALAVWLIDKGYFVKDVNTAISHRQAKHRGAMYRKSDSDDAKAIALATLNMLDKLPDACPNDAYWSLGQLVHRRDNIMKQRTRLVNQLHEQLCIVYPSYKQFFNDISRPTALYFWEHYPSRKYLKGKSVEDLRAELVPVSHNKCSTKTCEKILDAVASDKVKNNNFQDARDMVTLSIVSDIQHYDKQLVEVDKMLEQMYKMLGCTLTTIPGVNVITAVKILAEIGDIKRFGNANKLAQFAGIAPLHLSSSGKGKDVATKQGNRRLQATIYFLAIQMVQVSSKGIPRNPVVRAYYEKRKAEGKTSQQALICISRRLISIIYGMLKNGTEYRMPVVENAGENR

SEQ ID NO: 463732 - protein, 387 aa, unidentified
MPKPNDLSRSPAALSEDSTLIAVIEMGLASWLIAGRIPGVNRNPLRKQDPDPEALLVRLHRWRDEAVQAGHSISRIVVAFEAGRDGFWLARWLQARGIEAYVIHPTSIPVKRDHRRAKTDRLDTALLMRAFLGWLRGEADHCSMAAIPTLEEEDRKRPNREHQNLSGERTRIINRVKGALIRLGIRSFNPNLRTAAEHLKQLQTPEGAPIPPNTLAELDRDFARLRFVADQARAIEKTRLNQLKTAPHDGPNSMVLLLARVIGVGIETADMLVHEVLSRGLRDRRAVGRYAGITGSPDESGAKRREKGLAKAGNSRVRRGMLQLAWRWLMFQKDSALTQWYRARTENAPPRARKTMIVALARKLLITLWRYTTNGEVPAGVVLHPAV

SEQ ID NO: 463733 - protein, 422 aa, unidentified
MLGIGIDWAEEFHDIALGTLEKGVIEQFRIDHGPAGVSALIERALRLEPDPAEVRVVLETRHGLLVEALVDAGFTVVPVNPDVVARRRGPARKKDDAEDARICCLLALDRHAALKTLIPHGQIGGELRAIGRDDERAARDQRRLLNRLRADLQTTYPAALLLAGKDLGAPTVLRLLQRWPTQPELAEASRDELVGFARAGRHGWPETFADRVSAALAVPSLPTRDYLVRAKAAGIRLAAVQLLALHEARHGWQARMGELLLGGPRTGRDRTVKDPDPGKAFPGGEIYLSMPGLGDLLAARVAGEIGEHINQFDCPNGLQCYAGSAPVTRRSGKSDFVVARRLAHNHYLGAAVHQWAFCSLLRSVWAREFYDSKITAGKSHHAALRALSNRWLEVLWHCLTKGVLYDEAVHVANRNRALGHAA

SEQ ID NO: 463734 - protein, 407 aa, unidentified
MFAGIDWAADEHAVCVIDAEGLVADRFTIGHTADGFERLVRRLARHGDPAGLAVAIERPDGRLVDRLLDAGHPVVPVKTTAIKAWREAEVGSGAKSDPGDAQVIADYLRLRRLDLRELRPFSAETRALRAVVRTRGDLVDARISAGNQLTAILAAFWPGAGELFADVWSEIALAFLERYPTPAATAHLGEARMAAFLRKHGYSGRRSPAELLERLRSAPAGLADGPESEARRDAVLAMIRVVRALNQSIKDLDRSVVAHLDEHPDAVVFRSLPRAGQVNAAQMLAEWGDCREAYDGPEAVAALSGMAPVTRRSGKHLAVGFRWACNTRFRNAIATFADNSRHASPWAAAVYGQAIGRGADHPHAVRILARAWIRVIYRCWVEGVAYDPGQHGAARRLEEARPPSVAA

SEQ ID NO: 463735 - protein, 355 aa, unidentified
MARSAYQPRNYEAFLGLDVDKNSFSLTVTDHFQTNRSKKMPSNPEHLYNYIQKHFDVNKIICAYEAGPTGFHLFDYLNENGVKCFITSPASIPKASSDRVKNNRLDSIKITDYLMSAKFKPIRVPQGDYRELRDLVKIRENYARDRKAAKQRIKALLLFSNLYPALKDPDIKWSCNYLKELRKLECSFSTHQRLDMLLDDLEYARKKMLTIHRTLKSFCKEHDEINQYMNYLQSIPGIGFVVAVSILGKIGNPKQLQNPRELAGFIGISPSERSTGDSENRGSITHLGDKTLRFMLVQASWAAIRKDTQLEQFFNRIRHKNNPRYASKIAITAVARKLTQIIYRVLKDKRNYIQH

SEQ ID NO: 463736 - protein, 422 aa, unidentified
MLEETQETEEIIQRVAALDIGKAELTCCVRVPSPDAPGKRLQEVRAYQTMTRWLLVMTDRLRELGVTRVVMEATSDYWKGVYYLLEAHGFETWLVNARDVKHLPGRPKTDTLDAVWLCKLAERQMLRPSFVPPPAIRQLRDVARYRADLVAVRTAEKQRVEKLLEDAQIKLSVVASDIFGVSGRAMLAALVAGERDPKVLAQLARARLRAKLGLLVEAFSGFFTDQHAFLLAKMLARVDQLDADLAELDAKLQELIAPFAHAVERLDEIPGVGQVAARLLLAELGTDMTRFPTAGHLVSWAKFAPGVKESAGKPKGSGSTGHGNPYLARVLGEAAVAASKTDTFLGERYRRIARRRGKRRAIVAVGRSILVIVWHLLADPTARYHDLGPGFYDTRINADRAKRNHIRQLEALGYRVTLQPAA

SEQ ID NO: 463737 - protein, 340 aa, unidentified
MKKVSTIGLDLAKNVFQAHGADASGAVIFRKKLRRAQVLEFFATQPACTVAMEACGGSHFWGREIGNYGHRVRLIPPAYVKPFVKRQKNDAADAEAICEAAQRPTMRFVAVKSEAAQGAAVVFRTRDMLVRQRTQIINALRGHLAEFGLIVAQGPAHVAKLIMAVQDPKQPLPEAARPILCVLVDMLNLLDQRIKLLDIAIARRAKEDEVARRLMSIPGVGPVIATAVAALAPPAETFKRGRDFAAWLGLTPLQHSTGGKQRLGATSKMGERTLRRLLIIGASSVVRWAARKGAPAGSWLASMIARKPAMLVRVALANKMARVIWALMAKGGTYRAPVVA

SEQ ID NO: 463738 - protein, 345 aa, unidentified
MARFVGLDVSQKLTALCVVDETGRRLWRGQCATDPGQIERTIRGHVGGDAKIGVETGPMTPWLVHELRGRGLDVVCLDARHASAALKMQMNKTDQNDAEGLAQIMRTGWYRPVHVKSLDAHRARALLGARAQLVGMTTRLSNHIRGVLKTFGMLPGAMRGLSFDKRVEALLADHDDLAPIVRPMLVTWRQLREQIAAFDKAVRALVKASPTCRLLMSVPGIGVLSVLAYVSTVEDPARFARSRSVGAHMGLTPKQYQSGEIDRSGRISKCGDTLARTLLYEAAVVLLTRVKRASRLKDWAQALAKRSGPGKARVALARKLSVILHSIWKTGKPFRWSEQELPQAA

SEQ ID NO: 463739 - protein, 413 aa, unidentified
MSNKPMRAKRGGTGSSCLLKEERSDKMNYIGVDIAKEKHYAAILSADGAVVKKPFGFMNKAEGFSVLKDAITVFDKKEILIGMESTAHYGDNLLSWLLGKGYDVCVINPVQTAALRKTGIRKTKTDKTDALLIAKSLIVNKHRVYTERDNETSELKTLCRFFRNVMQSKSKLKTQLAAYVDVLFPEFATFFKGGIHLKTSYVLLKSYSSPSDITAVHLTTLTNLLRKSSRGRFSKSEAIALKALAKSSVGVHRPSMRIQISQTIEHIELLEKQLDELKSRIEYIMRCLDSPILSVPGIGYFLGGAILGEIGDITRFSNSAKLLAYAGLDPIVSQSGKFNAARTRMSKRGSSLLRYALMDAAFELTRHSSTFADYYSKKRNQGLSHFAAIGHLAHKLVRILFKILNDNIPFDLA

SEQ ID NO: 463740 - protein, 375 aa, unidentified
MSDHSEAFVAFDSSKLRNAVAIADSGRMGEIRFLGEIENSTAATRKLVRKLAGKYERLMFCYEAGPTGYELYRQIKDLGHECIVVAPSLIPKKPGDRVKTNRRDAVSLAKLLRAGELTAVWVPDRHHEAMRDLTRARDTAVDDLRSKRQQISAFLLRKGLHYCVGKKTWTQAHLNWLMSQKFEYPEHRLVFEEMMMAMRQAQERLERLEQAIRAAVPGWSLADLVTALMAMRGIDLISAATFLAEIGDLSRFQSPRELMAYLGLVPSEGSTGDSIKRGPVTKAGNHRARRMLVECAWSYQHPPRVSKDKQEKVAAAPRAVREIAWKAQSRLNRRYRALIGRGKLKTVAITAVAREFAGFIWAVARAATAARATAK

SEQ ID NO: 463741 - protein, 342 aa, unidentified
MNVTTIGLDIAKSVFHLVGAEARGKQVLKKRLRRKQVLAYFGNLSPCVIGIEACGGAQYWARELRGLGHEARLINPKYVKRFLRGNKNDYNDAAALCEAVAHPETRLVAVRTPEQQDVQALHRVRRGVQEERKRYVNRARGLLGEYGIVMPRGIGAFRRRVPELLEDAKNGLSELFRELLAQLYEQVRALDEQLAGYEKRVAQLARTDEACRRLDEVPGFGAVISTAMVASVGDGRAYCNGRHLSASLGVVPRQYGTGGRVRLLGISKRGDKYLRAMVIHGARSVVHHAKDKDDALSRWINRIRSESGTNVAAVALANKLIRIAWVILHRGERYRPALAARA

SEQ ID NO: 463742 - protein, 427 aa, unidentified
MSYRIAGIDVHKRMIVVVVADVDVAGDYEFERRQYGSSPAQLRLLAAWLVEQGVEEVVMESTAQYWKPVWASLERYWKPICEKREGAGPMSGSLHLAQAQSNRGARGRKNDFADAERLVRRLVAEELTLSFVPDAEQRLWRTVMRTRYQLKCNQVQLQNRLEALLEEAHLKLSSLVSDLLGLSGRRMLQAVAEGETDPAVVAARADCRLRATQEQLCDALGAYQELHPVYRRLLKTALEEWERIEAQIAQLGQEMASLIGPQQEQVQRLAEVPGLGVDSGQQILAEVGASAATFPSDRALASWVGACPGEEQTAGVNRNRRSPKGNRHLRRILNQAAHAAVKLKGSIFALLYRRYVVRFGHNQTIAVIAHRLCRLIWKILHEGVRYDERGPAVSQRAQQRRTARMIRQLRSLGYSVELLHAAAGVPA

SEQ ID NO: 463743 - protein, 344 aa, unidentified
MKMNYIGADVHCKMTELAVERNGKIVVRDRVPTDIRSLGRFLNSIPGKKVMVIEEGTMAGWLYRNLKAKVDDFIVCDPRRNKLISCEGDKDDTIDAGDLAVLLRGGYLREIYHPEDEDRLALKEVVALYHARVRESVRQMNKLRDCCRSPGVKIPAGAVKHLPVRSQWLKQLGPPVLARQLSIRWIGFDAVATQVKMARQEMTRRSKSYPIIGFWKDLPGVGPIRAITLFAYLDTPWRFGSPKKIWKYCGIGLKRFASGSDKEGRPKTGKLRLFRGVNRRLKDAIMGAALSAICQSSNPFADHYERMVRNGVTPSNARHTVARKMLLVMWGMWKANCRYHESLV

SEQ ID NO: 463744 - protein, 438 aa, unidentified
MWWNSQWLLSIFQKGALTMKVVYQTCCGVDVHKSFLVATIIKTTSGVQPSYQKKRFSTFNNSILEFKKWLLDNSCRDICMESTGKYWIPVFNLLEDQINVTIANPKWVKAAKGNKDDTKDSKWIGDLFRLGLVPGSYIPCKEIRILREFTRYRYKLTSCRTSEKNRFQNALTVCNVALDSVVSDIFGKSATSVIDYLLEQSDNSINHEEICSRLLRSLKKKSESVIESIEGYQMTDSQKSRMRLIHAHMDYITSTIADIDSMIDLLVEPYDNAVKLLGTIPGVDRNSAVTILSEIGTDMTQFSNSKRLCCWAGLTPGNNESAGKKKSVRITRAGVYLKPALVQVAHAAVKSGKSPYYKAKYERIMKRRGKKRAIIAIARMILTAAYHMLSTGEAWNPSDLYKIDMPEPLKEKQKEKAIKQAMKLLIAEGIIEEPLLVS

SEQ ID NO: 463745 - protein, 334 aa, unidentified
MDTHADMHVAAALDPVGGLLGVREFPATAAGYARLLGWLSGFGTVALVGIEGTGSYGAGLARHITAAGVRVVEVDRSDRQDRRRQGKSDPLDAVSAARAAQSGRARGAPKGRDGAVEAIRALMVAKRSAAGERTRTINQARALILTGPDDLRARFATHTAAALVAGIASLRPRPGDVPGYATRVALRELGRRAVFLGSQLERLNELIVPLVTARAPRLLALYGIGPNTAALLLIAAGDHPGRLRSEAAWAHLCAAAPIPASSGKVTRHRLNPGGDRQANHALWRIAFTRMGSHPATRAYVERRTKEGKSKAEIIRCLKRYVAREVYPHLRPAAD

SEQ ID NO: 463746 - protein, 422 aa, unidentified
MNPAMHVCLNTHSPGVQLNVAVDVGCIRHRVAVGLSEGKVLDEFDIAHDGPGLTAFFTRIEHHEREHQATSVAVAMEGFGGYARPLDARVLMHGWRLFNVNNLKLARFKEIFPAPAKTDAIDARRMLQLFQLQDRVPMAKAVLQEVAPIGETEAKLKALTRRRKQLVDDRMRLSRRLQADLQALCPGLLAVTGEADNLWFLNFLTMRDDLTKLKNVRLSTLLATTGIGKGYAAKIRQWQQEATFSNSATYLGAMIVTDARQILALRKQILALEAQLEDLAGQSVMARRIQTVPGFGLICSTELAGEIGSVERFAKTDSLAMYLGVAPLDNSSGKYKGSKVPRQGNRRARDAMMIAAVQHIRSVPASKAYFDKKRAAGKTHQQAVRAVARMLSKVLFSMLKHSEDYVIPDVSNTPESNSVTVP

SEQ ID NO: 463747 - protein, 347 aa, unidentified
MMVIGIDAHKRTHTAVAADQLGRKLSARTVGTTSSDHLTLLKWARAQADQERLWALEDCRNMTRRLERDLIAAGERVVRVPPKLMAHARDSARTYGKSDPIDALAIARAALREPDLPIARLDGVEREIRLLVDHREDLVAERTRAITRLRWHLHELDPAWTPPGKLERTSAYDRVASHLARFDGLVTRLAKALVEHCRRLTVEIDELPPEIGERVEQVAPSLLAIVGCAALTAAKIVGETAGVDRFKSKDAFARHNGTAPLPVWSSNRARHRLSRTGNRQLNAAIHRIALTQARCHPEARELLARRKAGGDGGMEALRILERRLSDVVYRAMLADIEQESAETTTAT

SEQ ID NO: 463748 - protein, 409 aa, unidentified
MQYFVGLDWAAHEHAVCVVDERGKVVTQFTVAHTAEGMTELVARLSKLAPPSELRLAIERPTGLIVDTLVESKFAVVPIHPNVVKASRPRYSAAQGKTDLGDAYLLADLLRTDGHRFRVLTPLSDETKALRSQVRVRDDFVHQRVAIANQLRCLLEQYWPGVVEMFPDIDVPISLAFLDEYPTPQAAAGLGEKRMARFLARNSYRGRRPAREFVERLRSAPPSVCRQLEAETKGTMLRAFVAVLRPLVEQIATLNTAIEQAVEAHADAKVVTPLFRQGRICAAQILAELGDDRARFSSSEQLAGEGGMAPITRESGKHRAVSFRWACNMRLRTAFAMLADTTRHTMPWARAVYQRARDRGHKHAHALRILGRAWCRVIWTCWQKREAYDPAKHRAAVPFHLNLDEQEAA

SEQ ID NO: 463749 - protein, 360 aa, unidentified
MPEWLFLFNHLNFGGESMSNITSLAVDLAKNTFQLHGTDAKGKIVLKKKISREKLLEFIVSLKPCNIHMEACGTANYWGRKFKEHGHKVKLINPRYVTPYVKRNKNDVNDAAGIAAAARDPDMRFCDVKTEEQQDMQSVHRIRSLLIQQRTALANQMRGLLAEYGVVIPQGISYIRSELPRIFGNNPNDMGGLILGCLMELYDHFGYLDNKIAAYDKKIEAIFKNNEGCQRLEEIPGIGVLGATILVSVLGNGGAFKNGRHFAAFLGLTPRQHSSGGKERILGISKGGDTYIRTLLVHSARSVLLRSNKKTDKQSKWINSLMSRSGYNKTAVALANKIARTAWAIVRNGENYSVNYKPVF

SEQ ID NO: 463750 - protein, 391 aa, unidentified
MGVQRRVVIGMDPHKRSVTVEVMEADETIVGRGRFGTDVAGFAQLVSFAGQWLDRVWAIEGCEGIGRHVAQRLLAVGEQVVDVPAKLSARMRMFATGQGRKTDDTDAHSIALVGVRISGLQPVVADDHLEMLRLLVDRRRRIGQEHVTKICQLHQLLLELVAGGAKKDLSAAQARKILAGVRPKDEVGKLRKRVALELVVDLERIYLRKKQANKELVTLLKTTGTGLLDLRGIGPTGAARLLVEVGDITRFPNRGHFASWTGTAPIDVSSGDRQHHRLSRGGNRQINMVLHMMAVVQLRNPTEGRAYYDRKVAAGKSPNEAMRCLKRRLSDIVYRAMLDDYVTTKATGPGGHRGASLQSSAAGSHPHTDTSDKSLPGPVTTKPTTTLPKAS

SEQ ID NO: 463751 - protein, 410 aa, unidentified
MYGKAGPMIYAGIDIAKNDHVVGATDERGRDASKPMKFANSAGGFDRCVAYLEGLAESKSDLLVGMEATGHYWLPLFCRLQDAGYAVVVINPMRTDAMRRFKGSSRVKTDIVDCVLVAETLRCGGFQPSRLGDEAVIELRQLTRLHQALKESVADLKRQVIVALDQVFPEYDSVFSDTFGESSKAFLKRCPTPEECLAVRADSLAKTLERASHGKLGRPKADEIKGIAKASCGIGLATSAFSFQIKLLIDQIDFIEGQASEVEARIRAGIEKVEPLILTIPGIGYTLGAQIVSEIGDVRRFRNASSIVKYAGINPSISQSGKFSSGENHITKQGSPYLRRALYLAAMAQLKLKSPFHDYYAKKRADGKSHREALVAVARKLVHVIYAVLSKQEPYDPNAAKSPELASRSE

SEQ ID NO: 463752 - protein, 293 aa, unidentified
MNITTIGIVIAKNIFQVHGVTDTGDVAFNKPLRRAWMLPFFAKLEPCLIGMEACSSAHYWARELTELGHQVKLMPPAYVKPYVKRGKSDAADAEAICEAVTRPTMRFVEMKSADQHAILCQHRAREMLVRQRTQLSNTIRGLVGEFGVTIRKSLEGIREFATKMNVGEGHDIPDIAGDIIHSLCGNLLSVHTRILKIDKAIAAVGKTDHRFKLLQTIPRIGPINASTIVATIGSAHQFIIGRDLADWIGLTPLNKSSGGKKQLGKISRMGDRYLRQQRPRNEPCQGRTISFIT

SEQ ID NO: 463753 - protein, 348 aa, unidentified
MLHAGLDLSRKKVDVCLLSEQAEIVEEFAAPPDVDGLRGLARRVACRQEPVRGVIESMTGARFVHDTLEELGWDVLIADAAKVKGLAPPACKTDKIDARVLALLSQRDLVPEIWLPDPSVRRERELARFRLHLVKHRSMLKHRVHATMITFGHPCPVTDLFGVAGRELLDRLKIPQPWRATVDASLALMDDLDDQIQSINKQLRALSPEHRYMPLLMTVPGIGFVLSYTIAAEIGDITRFSAPNKLVGYTGLCPRVNQSGDRDRRGPLTKQGPKYLRWAMLEATMHALRHDAYRERYQRNKRRLGKQRGAKVAQIDIARRLTEAIWHMLTREQPFTPSAGGSTLRLAA

SEQ ID NO: 463754 - protein, 343 aa, unidentified
MQAVTTIGLDIAKSVFQVHGVDAAGQVVVRRQLKRRYVLAFFEKLPPCLIGIEACASSHHWSRELQALGHKVRLMPPAYVRPYVKRQKNDAADAEAICEAVTRANMRFVETKTPEQQSCLMLHRTRHLFIRQQTAVINAIRAHLAEFGIVAPVGRNGVEELLGVVADASDKRLPEIARACLAALGAQLRMLKAQILEFDRMINAWHRSNETSKRLDEIPGVGPALATALVASVADPRAFRSGRDFSAWIGLVPKQHSSGGKDKLGGISKQGDRYLRSLFTAGALAVIRYAKIHGAKHRPWLTALLARRPTKVAAVALANKIARMAWAMMARGERYKEPVALAA

SEQ ID NO: 463755 - protein, 361 aa, unidentified
MVQNTSVGLDVHARTVVGCAIINGTGEVVERRFGPASAEVVGWVAGLPGPVTVAYEAGPTGFGLARDFAEAGVECLVAAPSKLLPKPGDRVKTDRRDARHLAGLVHAGLVTPVRVPTVEEESVRDVLRAREDASRALMTARHQASKLALRHGHVYPGKTTWNKTHMTWLSGLDMGHPAARTALGHAIASVADTTLRRDSLDQVIEQMAAESVSAPVITALGCLRGVSLLTGFGLAVEIGDWSRFTGATIAAFAGLVPSEHSSGRTRSQGGVTKTGNTHVRHLLVESAWHHRPAYDPARSQHLQARWAQAPAQIRQRGHEANRRLHAQWTGFERRGKKPTTANAAVARQLAGFCWSLAMMTG

SEQ ID NO: 463756 - protein, 343 aa, unidentified
MQDNIYDHYVAIDWSIKNMAIARMTKKSNKITAIDVPSDIEDLQAYLKNLRGTQILTIEETTTSQWLYTELKEYVDRILICDPNRNKLLNEGPKTDKIDATKLVQLLKAGLMKEVYHSTDKFLYLRRLVSGYEDQVKAGVRFKSQRYALLRACGKNGYEKIGSTLDSQGEQFVLGCLDRQIEAYEKEKEGYEKEFERLARKIPEIKHQKSLPGIGTIHGVKIVSRVVTPHRFADKGHYLSYTGLIKLEKTSGGRSYGKKNPRYSRQLKSVYKSGVLAAIQGNNPINDYYEHLIQEEGYPEHNARQKACRRLATLSLGVFKSGKKYQPYRRDHVKGSKESTSGL

SEQ ID NO: 463757 - protein, 340 aa, unidentified
MGEITTIGLDLAKQVFQVHGIDADGTTVLRKQLRRSQVLSFFSRLAPCLVGMEACATAHYWGRELAALGHEVRLMPAQYVKAYIKRNKNDAADAEAICEAVVRPTMRFVPAKTAEQQAALLLHRGRERLVRQRTGLVNALRGHLAEFGVIAPQGLRNVGKLIAVVRDVGDARLPDLARQVLEVLAAQIEQLEGAVAAVEKQLMAWHKSNPVSQRLATIPGIGPIIASAIAASVAEPGGFRSGREFAAWLGLVPRQNSTGGKHRLGGISKRGNQYLRRECHNETCANLLRSKATKADPWVIGLRRRRPSLVVAVALANKTARIAWAVMQRNENYQRMAAAA

SEQ ID NO: 463758 - protein, 314 aa, unidentified
MRTQVFVGIDVSKAQLDVAFRPEGRFSAPNDEAGCAQVLERLRAVPPTLVVLEATGGLEIPLTGVLAAAGVPVVVVNPRQVRDFAKATGRLAKTDTLDARTLAHFAEVMRPELRPLPDQQTQALAAILARRRQLVEMLTAEKNRLGSAPKPVRKSLRTHIAWLERELRHTDSNLAHAIRESPVWREKDALLRSTPGVGPVMTTTLLANLPELGTLTGKQIAALAGVAPLNRDSGTWRGKRTVWGGRAQIRATLYMAALVAARFNPVIRAFYQRLCATGKAKKVALTACMRKLLIILNAMLKHRTPWRTELVQCA

SEQ ID NO: 463759 - protein, 311 aa, unidentified
MVERFGGIDVSMDRLDVMVLPDQWGFSVENNAAGWTELIKRLQGSSLAAIGIEPSGGYERGIIRALLTAGLSVRRINPNKLRQFARARGVLAKNDRLDARLIAEYVAIMPTRIVQRDAGAERLAEVVTMRRQLCDERVTVENQATHVEDAVLRRLNKRRLTRLESDIRLLDKRMADLVTAELALAQRYQLLISMPGVGPVLAFTLIALLPELGQMSRKQIAALVGLAPYDFDSGKLRGHRSIYGGRMPVRNVLYMAALSACRYNPALKTFHKRLAGADKKSKVVIVAVMRKMITTLNAMLRDNAAWQIKTA

SEQ ID NO: 463760 - protein, 295 aa, unidentified
MCTYGPPGETFAVARDGKGLNELLERLRSIAPRLIAIEATGGYETIAAAAIAGAHLPLAVVNPAQVRHFAQAVGKRAKTDPIDAGVIARFAEAVKPEPRELPDEAARLLAELVARRVQLIEMIVAERQREKRADAVRVRKSIARHIASLEKELPIIDGDIDTMVRGSPVWREKEDLMVTFPGVGRGIARTMLADVPELGRLTRREIASLVGYAPFTRQSGQWKGKSMIAGGRPAARSAIFMAAMCAIRCNPVLRVFYQRLIARGKAKMVALVGVARKIVVMLNAMLRDKKQWQPA

SEQ ID NO: 463761 - protein, 339 aa, unidentified
MKYVGIDYHKDILAICIQNSRGKVEKEFETSADWEGIDGLIEIMGDEKYKVMGESSPYSINLHNYLIVKNVESILVDPWNIQLITKSDKKTDRHDASVLATFLRLMDRGEISLSISYIVSGNQRDLRDLCRYREMAANAKGQCLQRMKVHMRLHDQRLEDDYDDFSTMKGQSMLREFFSDDFVLMSMLDDYVYWSNRCSKIDRMFNESAFRTSEVELLTSIPGIGLLTAVQLMSMIVDIGRFGTSDKMRGYFGMSIRVKDSGGKMKHGHITKKGDPMMRSILARIFCQFQRLGTKNSIMAYYESHVDSMGAMKARMACMNKILDLIYAVLKRGTPYVSR

SEQ ID NO: 463762 - protein, 335 aa, unidentified
MALYCGIDLHSNNHVLVINDENDKTVFEKRIGNELALSLKYLAPFKDDLVGIAVESTFNWYWLVDGLMEHGYKLHLVNTAAVKQYDGLKHSGDVKDAFHLAHLMKLGILPTGYIYPKEQRMIRDLLRRRMQLVQAASKQLLSIQNQIWRSTGIRVSASQIKKKGFEITLLSGHLKMAADTNLRIYRSIREEIKLLESEVEKAIEEPESLELLQTMVGIGPILGLTILLETGAVERFSHVGNYASYCRCVQSIRESNGKKKGEGNAKSGNKYLSWAFSQAAHVAVRFEPKIKAFYDRKYQKRNGIVAIRAVAHKLARAAYYMLKNNERFDVYKAFG

SEQ ID NO: 463763 - protein, 368 aa, unidentified
MNTLARQTSAAQIEVAGGVDTHQDTHTAAVVDQAGRMLGHRTFRTTEAGYRQLLAWLGGFGTLRVVGVEGTGAYGAGLARYLRAHGQAVVEVDRPDRKARRAAGKSDPIDAESAARAALNRVRTGLPKQRDGMVEALRNLRVARHSAVSQRADCMRGIKTLIITAPQELRERLRHLSDTRLPRACAGLRPDLSLIGEPEQGAKVALRALGRRHSALSEEIAELEALIKPLVAQINPALLALNGVGPDSAGQLLITAGQNTERLHSEGAFAMLCGVAPIPASSGKTNRHRLNRGGDRQANAALYRVVLSRMRWDPRTRDYVAKRTTEGLSKKETIRCLKRLIAREIYYVLRQPVPTLVNTHRQMITTTP

SEQ ID NO: 463764 - protein, 334 aa, unidentified
MENIALIGIDLGKNSFHIHCQDRRGKAVYRKKFTRPKLIEFLATCPATTIAMEACGGSHFMARKLEELGHSPKLISPQFVRPFVKSNKNDFVDAEAICEAASRPSMRFVQPRTGSQQAMRALHRVRESLVQDKVKTTNQMHAFLLEFGISVPRGAAVISRLSTILEDNSLPLYLSQLLLKLQQHYHYLVEQIKDLESQLKRKLDEDEVGQRLLSIPCVGTLTASTISTEIGDGKQYASSRDFAAATGLVPRQYSTGGRTTLLGISKRGNKKIRTLLVQCARVFIQKLEHQSGKLADWVRDLLCRKSNFVVTCALANKLARIAWALTARQQTYVA

SEQ ID NO: 463765 - protein, 394 aa, unidentified
MGVRYGLTLFYLLEFEQNVRSCLFAQYPEYPSGEKTKGDLSLYKLIKMMNLLKQVLGIDVAQKELVVSLGRMNADLSIDLYAKRVFANKESGFIALIKWVGKLTDESIAVHYVMEATGVYHQKIAYFLDDRGYQLSIILPNKISSYMRTLDNKTITDSTCADAIAQFGLERKLDPWQRPNILYKKIQQLTRERSQVVDERVIAKCQLHAENAEAQPNDNSIKRLKSRIRFLNQQEKEIKQDIEACIKEDDAITKNIKNLTSIPGIGRLTAAIVLAETNGFELIRNKKQLTSYAGLDVREKQSGTSVKGKPRISKKGNRNLRKSMYLPALTAVKHINDYKELYARLVSKSGIKMKGLVAVQRKLLELTYVLFKNNTTFQNDYKQEKSATAKADTL

SEQ ID NO: 463766 - protein, 331 aa, unidentified
MTSLPNRTNEPPLTVGVDVAKATLEVGFSDRNATLAPTNDEAGHTVLLAHLAALRAKGSEIGLIVLEATGGLELNVATALQLAGYAVVIVNPRQSRDFARSMGVLAKTDRIDARVLAHMGQTLLQREDLRRLIKPLPDEGQRMLQALVTRRRQLLAMRIAEQQRASGPDKRMRRSLNIILKALDRELARLDKDMQAFIGEHHAELAALLNQVKGVGKATISTLLAEVPELGELNGREVSALVGVAPINRDSGTMRGKRTIFGGRPQVRKVLFMAALVASRHNPVIKAFYQRLLAAGKPKKLALTACARKLLTILNAMARTGKPFNAALHLG

SEQ ID NO: 463767 - protein, 344 aa, unidentified
MTRKNVAHREINGKSVVLENFDHYIAIDWSMKVMAIAHMTPCSKTPKVFERATDLKELQEYLRSLKGRIVLTIEETTTAQWLFLELFEHVDRIIICDPFWNKLLCHGPKTDKIDAGKLCLLLYNGLLHEVFHSASTLYELRLLVGSYKDLIRAGVSAQNQKSALVRGHRDQSSTASFIIEHLDTTIEQYRASKSEYEKQFNIIVRKNKLVAHLTRVDGIGDIGAVKIVACVIDARRFPNRGKYLSYCGLVKHEKLSGQRSYGRRQPRFNHMLKEVYKTAARAVIGNNNPINEYYESLRAKGVAEHNARHAVSRYIARITYGMLKSGEPYDPYRWRHSAIEQQNS

SEQ ID NO: 463768 - protein, 415 aa, unidentified
MEDLGLQPLHRRVAGIDVHRMLHVVTVLIEQTDGSMQRQTREFGGFRRDCRALAAWLSELGVELVVMESTGIYWKSVHAHLENAGIPAWVVNAHMIKHVPGRKTDIADSEWLAVLARFGLVRASFIPPKDLRELRLVSRYRRKLSAMCASEVNRLHKILDDGGIKLGGVVSDINGVSARAMVSALIEGKSIEHMLGLARGRLKQRREDLGASLEGDLSARHLFVLEHIHAHIETLQRELAQIDAYLLAAMQPYAWAHQLLQTIPGIDEIAAALILIEIGDDMARFGCAARLACWAALSPGNNESAGKRKSGRTRHGNSIIRFILCECANAARMTRSTLAAKYKSLMVRKSHKKAIVAVAHKMIRLIFVLLTRRQVYLDRGIDYAAISAKKNAPRWIKQLKIIGRWPSRETAAATA

SEQ ID NO: 463769 - protein, 310 aa, unidentified
MEHATVVGIDVSKDRLDVHVLPSEEAWAVARDADGLAELCRRLHGLSGVVALEATGGYENIVAASLSSAGLPLVVVNPAQVRAFAKALGQRAKSDPIDARVIARFAEATKPVVRPLPDRATQMLAALLARRRQIVEMMASESQRLRRTDLVRVRKSIERLLAILKRELADIDHDIDDTVRGSPVWREKENLLASVPGIGRIIARTMVADLPELGTLGRKQIGALAGLVPFVRQSGQWKGQAHIGGGRPTVRTALFLGAQVAKRHNPVLRAFYERLLAAGKSKMAATVAVAHKLLLILNAILRDKKPWQTA

SEQ ID NO: 463770 - protein, 351 aa, unidentified
MKYYTTTTEYNCGIDLHADQMYVCILDPKGQVLVHRNVKGNDFGHFLKLAGPYRHDLTAVCECTFNWYWLADACAAAGIQFVLAHALYLAHIHGGKNKNDRVDSEKLAHLLRTNLIPPAYVYPAERRPMRALLRQRLSYVWRRAEVLAHVSMKQSAEGLVPAAKSGHNRDVWEERILAQYANPLHKFAVGCDMEVVRAYDRQIDRLDLEVARQAKQHLGRDYHLLLTVPGVGQVLGLTILFEMDAVARFPTAKDFLSYCRLVKGSVASAGKVKGLTGGKMGNAYLRWAFGEAAVLAKRSHPLLKPYAERLVAKHGKFRGNAILAAKMARAVYHMLQSGTGFDAERVTATSI

SEQ ID NO: 463771 - protein, 434 aa, unidentified
MYENHKKLKHIYIGVDCHKHTHTAAIINAFKDELDLITFNNDKTGFDSLINLVSKYLDENITPVYGLEDCKHLGHALSGYLLSKNCNVKVVNATYTYNERKANPIISKTDNIDALSIAKVTLDKLDTLPNATTDDIYWTLKQVSKMRNVITNNILICKNKLHAQLLHHYPDYQKFFSDSASTTALTFWETYPNPNILKSTPINEVRDLLCKTSKNTFKPSKTKYILELVDNYGYATNEYQQERDTIIKTLVKQLKYNREQLEIIDEEIAVIVEKTGYKLHTFIGIDKVLAAKIISEIGNIDRFPNANKLARYAGIAPISFSSGSKDKEVNNKYGNRALNSYIFIIACVSISPGGRTNTKLCSPIFLDYYLKKISEGKTKHQALLQVMRRIINIIYGMMKNRTEYVHPQELDNKFQKIHRARIDKERQEQEKSKK

SEQ ID NO: 463772 - protein, 371 aa, unidentified
MDHSTFVGLDVHKKRTSVALAEAGRGGEVRFHGEIPSTPDAMRRLVEKLGRPGRRLAFCYEAGPCGYGMHRLLRGLSQDCIVVAPSLIPSRPGDRVKTNRRDAVALAKLHRAGELTEVWVPDDAHEAMRDLVRARATARRVLGKARQHLQGFLLRHGRVYSGKRGWTQAYRRWLTTVRFDHPAQQIVLQDYIHAVEDGEVRLACLEQQIEELLPSWSMAPVVEAVQAMRGVGLIVAVTVVAEVGDFSRFANPRQLMAYLGLVPSEHSSGASVRRGGITKAGSALARRVLIEGAWTYRMQARVSRKLLDRIEHLPKEVRDTAWRAQQRLCNRYRRLAAAGKPKVVVTTAIAREMVGFIWAIACMVQPRPAIR

SEQ ID NO: 463773 - protein, 372 aa, unidentified
MNYNTVYVGMDVHKESFTLCSCKYEDEKASHYQRTPASYKNVLRYLAFLRTIYGEYTRFVCGYEAGCLGYSLYHQLENFNVECVILAPTTMLEQRSKRRIKTDKRDAEIIARSLAQHNYSPVHIPTETDNQTKEFIRMRDDHKAELKKIKQQILSFCLRQGYQYDGSGNWTAKHVKWLRSLKPAGLYKEILDEYLLTYTILTDKLNRLDQRIEELAFKEEYKESVSKLTCFLGIKTHTALSVIVEVGDFQRFVSARKFAGYLGLVPGQHSSGDDRNGLGITKAGNTHVRRLLVESAQSYTRGKIGYKSRVLRSRQAGNSPQVINYADRANERLRRRYYKMVLKDGKKYNIAKTAIARELACFIWGMMTDNIY

SEQ ID NO: 463774 - protein, 339 aa, unidentified
MDYFAGLDISMDETHVCVLDREGVVVRESKTASTAQSIADELAKAPSCRRIVFETGRMAPILFHGLSQLGLPVVCVESRQAYQALKSLATHKTDRNDARGLAHLARTGFFKPAHVKSLPAHAVRSLISARKKLVGQRVTLENQIRGLAIVFGIRLPRALTAAFVNQAFKASEGIAGLSAAMRGLIAARTAVMTAVAAIDTDMRRMTRASAACSRLMTIPGVGQLTALAFVAAIDDPSRIRRSRDVGAYLGLVPRRHQSGEVDYVGSISKCGDRRVRTLLYEAANVMLTRYKGQLKLKDWAFAIARRSTMRKARVALARRLAIIMHAMLRDGTEFEFEFA

SEQ ID NO: 463775 - protein, 317 aa, unidentified
MSRVSFEQVILRGCGLDVHKDVVVATISGEGLSTETRSYKTFSSSLTELKEWLLSNGITHAAMESTGVYWKPVYKILECPQMKVWVVNARHIKYVPGHKTDKKDSAWICKLLLAGLLKPSYIPEREQRELRDLTRYRNKLIQHVSSNKNRIVRILEDCNIKLSSVMSHLDGVVATKLIDILIDKGHVTMDDIACVYHKRLEASPELLYQACEGFIEPHHTYMLQTIRKDIEQTESILSDLTSRIKEVLSPYENVIDLLRKIPGLDRKTVEDLIAEIGVDMEVFPTEKHLASWAGICPGNNESAGKKKVEEPLMATNS

SEQ ID NO: 463776 - protein, 407 aa, unidentified
MQTLVERGCGLDVHQATVVACLLIVLKSGKVHKQIRTFGTTTRELVSLREWLLSEGCTHVGMESTGVYWKPVYAILEGAFEIVVANAQHVKKVPGRKTDVKDAEWIADLLCHGLLRASFVPPKPIRELRDLTRYRRKLVESRSAERNRLLKVLETANIKLASDVFGVSGLLMLQALVEGQATAQEMAQLAKRQMRKKIPELELALEGKMEEHHRFLLKLQLDRLQAVEKDLAFLEQRIQEKLKPYAAEVTLLDEIPGVDATLAGAIIAEMGVDMSVFESVSQLASWAGVCPGNNESAGKRRSSRIPKGNVYLKTALVEAANAAAKAKGTYLRDKFYRLKARRGYKRAAVAIGHKILVAIYHMLSHCVCYNELGDLYLDKLNKHHLTRNLVHRLERLGYTVTLEQKAA

SEQ ID NO: 463777 - protein, 355 aa, unidentified
MAHDILLTADYHDRVCVIRRLNLTTREERMLPGVPTTPEALNRIVDDACLEAGSEGRVIWLQESTTGWARVKELIGDRVVFFVCNVLQMPLPPKARRRKTDKVDTARLQREFLNGDLPLAHQPPPEWGQLRRLVAYREGLVSRRTAVRNWINRYLAHETWVDRTRLWSPAGQARLRALLPKLSSTDAMIIELKLEELARLDEQLKPVLLELLAAYNNCPDAQRVDAIKGIDVVSAVSIVARIGPVDRFRKADSLIAFAGLAPGVHQSDETRRNGRIGGGGTDRHLRHYVIEATMWARNLPRYKPTYDRVKRRRGAKVARLVVARMMVRSIYKVLREGVAFDPAPARKATAAAAAC

SEQ ID NO: 463778 - protein, 345 aa, unidentified
MPIVGGLDIHRKQITFDYLDTVTGQVRRGQVSPADREHLRAWLARFNGCGDAAFAVEGCTGWRYVAEELAAAGVTVHLAEPADTAFARGRKRHAKTDRTDCRHLRLLLAEGRLPECWVPPSRVLECRALLETYHDLRAEHTAWVQRIHAVLFHQGAPALGQGTLRTGQGLAALRDVSAACLSPAGQLQVATALEVLEALEARLHAVRHQLLAEARHLAGAKVLAARLYGVGPFAALAMTCWLGGAGRFSSSRQAVRFAGLDVTVWSSDRKGPPGRLSRQGPPVLRWALYEAGKTHARAPAPDHAYYAAVKDRCNGKRAALSEARKILRQAHHILAELGDDALSAA

SEQ ID NO: 463779 - protein, 336 aa, unidentified
MHCHKVKLQKGDHANSPKRLIGGFIMYYIGIDVSKKDLSVFDGKDLKFINQEGLTSFKKYLKKKVNFSDLVIIFEPTGVYSLYLKEFCAENSIKAYIVNPKKSHNFTRALGRRSKTDKIDARILYQFHKLIDLKDIKVPKVDQQAKVLASYLVSYEFALKQRISLSHHLESLRDKGLIALMRKDLKRAKKLEDKIFDDIKEYLDNNQNLKEDYQRMLTIPGIGEKAAIALLTLFKTYQGTNRAQITALAGLDPVRRESGTSVKGKVRISKNGKRVYRKILYLPTLCATVHHQKIRVFYQRLLANHKPKKLAIIASMRKILLIAHAMYRDKTEYIAV

SEQ ID NO: 463780 - protein, 351 aa, unidentified
MEKVIKQCVGIDCSKEKLDVSFAVMNSSFDSSILSTTVFPNDRAGWKKMIKWAEQLGTKDLQTQFVIEATGVYHEQVCLYLFLLHRQISVLLPNKVKKFAGTLKIKTVNDRVSAQTIAQMGIEKKLDFWQPPHEVFNLLRQLTRERHQLIEERTQILCELHAEQSGAWPNKKSIQRMKQRINLILKQIAEIENEMKEQVNEHPWLKEKLAHLCSIPGIGFLTAVTVVAETNGFNLVRSKKQLVSYAGLDVIEKESGSSVRGKPRISRRGNKQIRRAMYFPAFSAIRTKSKMHHLYDRLEAKHGIKMKAAVAVQRKLLELMFLLWKKNEVYIENYDIKKLEQPKKAALIEMA

SEQ ID NO: 463781 - protein, 401 aa, unidentified
MVSDFKKGRYNLMKIFVGIDIAKLNHFAAAISQGGEIILEPFKFTNDADGFQLLVSKLKSFDKNSIIIGLESTAHYGDNLVRYLVAEFYQVCVLNPIKTCQMRKNNIRKTKTDKVDTFVIAKTLMMQDDLRFVSFYDLDMMDLKALGRFRQKTIKQRTRLKIQLTTYVDQVFPEIQYFFKSGLHQNAVYALLKEAPSPKEIASMHMTHLANLLKVNSHGHFTKEQAKELRVLAQKSVGANDSAISIQITQTIQQIELLDSQLDKIEAEMTDIMKFNDSVIITIPGIGYINGGMILGEIGDIHRFSNPNKLLAFAGLDPSVYQSGNFQAKTTRMSKRGSRVLRYALVNAAWNVVRNNATFKAYYDAKRAEGRSHYNALGHCAGKLVRVIWKMLTDEVEFNLE

SEQ ID NO: 463782 - protein, 348 aa, unidentified
MGRYIGVDLHKNTFTVCSLNAKGQELKNFQVSKNGMEDFKQTLCQSDEVAVESTGNSGYFVREIKGLVKAVRIINPTQFKIISQSVKKTDEKDAEIIAKYLSKGLIPEVRMRSKEEAQLASLIGTRDKFVKLRTTLKNKIHNILNANGIVTKREIFASEKNLEKVLSSDLDSASLFELRIIITELRNLNKAIVEIDKEMTDRGQKLKGHQNLTSLTGIGDISATILLNTIGDVNDFDGDNKLAAYLGIVPRVYVSNETSNYGHITKMGNKIARTTLVQCALIAIRYNPYLRAFYLKLKAKKGSGKAIIATARKLLTIIYRTLKNNWVFEDFNSFKLMPAKKVYRLSPA

SEQ ID NO: 463783 - protein, 342 aa, unidentified
MKLTTVGIDLAKNVFQIHGIDEHGKAVLRKQLKREQMAAFFVNLPPCLIGMEACGSAHHWARKLQTMGHTVRLMAPQFVKPYVKSNKNDAADAEAICEAVARPNMRFVPLKNIEQQSALALHRVRQSFVKARTAQANQIRGLLAEFGLVIPQGIANLAKRVPELIEDASNELTGAFRLLVERLMDHLKELDRQAGELEVQIKAWHRANEASCKLEKIPGIGPITASALVATIGDAKNFDNGRQLAAWLGLVPRQHSSGGKNVLLGMSKRGDSYLRTMLIHGARSVLFRVQQTADESSWLHKLMRRRNPNVATVALANKNARIVWALLANDREFRPDYAPTAA

SEQ ID NO: 463784 - protein, 354 aa, unidentified
MSNKSNATIATMGIDIGKNSFHVVGLDQRGAIVLRQKWSRGQVEARLANMPPCLIGMEACVGAHHLSRKLQSLGHDARLMPARYVRAYRKGQKNDFRDGEGIAEAVQRPTMKFVATKTAEQLDLQALHRVRARLVGQRTGIVNQIRAFLLDRGVAVRKGPRFLRTELPRILAARCDVLSPRMVHVIEELAGDWHRLDERIKSVSSEIEALADQDPACERLMTVPGIGPIISSATVAAIGNGAAFSKGRDFGAWLGLVPRQISTGDRTILGKISKQGNRYLRVLFVQAARVVLLKPNSWERYGLKSWIEAAKKRLHHNVLAIALANKLARIAWAVLNKERKFECVRTSAMAPRSA

SEQ ID NO: 463785 - protein, 352 aa, unidentified
MRTSQKTQGMITTIGIDIGKNTFHLIGLDKRGAIILQQKVSRSQLERRLANIPHCLIGMEACSGAHHIGRQLIAVGHDVRLIPAQYVKPFLKGHKNDYRDAEAIAEAVQRPTMHFVTIKTPEQMDLLALHRVRSRFVSQRTGVINQIRGFLIERGITVRQGPMPLRKALPEILSADTGVLSPRMVGLIIDLVQEWRRLDERIAAVSAEIEALAEQDDGCERLMTVPGVGPIISSAVVAAIGNGTGFKQGRDFGAWLGLVPKQESTGDRTILGKISKRGNKYLRTLFVQAAHVILARRPSAAMRGLWPWIEQASKRLHRNMLAIALANKLARIVWAVLARGGTYQPRITAHAA

SEQ ID NO: 463786 - protein, 430 aa, unidentified
MKSNTQNAKIEAITEKTLVLGIDVGSETHYARAFDYRGIEYSKKPFKFSNTEAGFVTFKEWILDLKERHEKDKVVPGMEPTGHYWFNLGKFLQDNEMKPVLVNPHHVKKSKELDDNNPTKNDRKDPKVIAGLVREGRYMIPYLPDGVYADLRTASNIRFQLQAELTRIQNRISRWFNIYFPEYKTVYGKPDAKSGMLILKAAPLPEDILTLGIDGVNQIWRDAKLRAVGKARAKTLIEAAEHSIGSKEGAVSARMEIRMLLEDYESRNTRLQEVMVLIEELVRKIPMAEKLLEIKGVGIRTVSGFLAEVGDISRFNNPKELQKLAGLALVENSSGKHKGETTISRRGRKRLRYLLFEVAMSLVSKNQEFRELHNYYTTRRLNPLKKMQSLMAIAAKLIRVFYAMLTKGVDYDPKKMISDIKRPAVYLQAA

SEQ ID NO: 463787 - protein, 410 aa, unidentified
MEVIVERAAALDVHKAQVTACVRMPADTGGRTQEVAEFATTVRGLLTLHDWLSAHHVTEVAMEATGVYWKPVWAILEEDFELLLVNARHVKQVPGRKTDVSDAAWLCQLLEAGLLKASFVPPKPIRALRNLTRYRKAQIRERQREANRLHKVLEDTGIKLDCVASDILGVSGRAMLEALVAGTTDPEVLADLARGRLRAKLPALREALEGRFNAQHALLVGAILAHLDFLDEQIERLSEAIREALAPFAAAVELLCSIPGVQQRTAENVLAEIGLDMSRFPFAGHLASWAGQCPGNHESAGKRRSGRTRKGSKWLNEALTEAAIAAVRTNGSYLQALYKRLRPRIGHSRALGAVKHSMICACWHMLSSGELYRDPGGDYFLRRDPERQTKRLVRQLEALGHAVMLQEPAA

SEQ ID NO: 463788 - protein, 347 aa, unidentified
MERVAGLDVGVKQSALCVVVRDAQSIRTLSRHRTATTPSSIGDWLVSQGIARVGLEAGAQSSWLAQALEERGLQVTVMESRRQKAFGAYNKVKTDERDARLIGEALASGLYTKVHVRSAWSQEVRTLLGARLQLKRQVHQSRQFVRGHLRAVGIELPRGTGQAWLTEAEERVARRGGTLGLALQAMLAGCRALADQIKVLDKEIRRVARQDEACRRMMTAPGAGLLSSLALRASLDDATRFRRSAEVGPYLGLTPSRYQSGKVDRVGGITKQGDGLVRAYLYEAAVSLLERQKRDCPLRRWGLDNQARLGKRRTRVAVARKLALLMHRLWVSGETFDWNRGGAPTSR

SEQ ID NO: 463789 - protein, 356 aa, unidentified
MIEKQSNTQIPESTIGMDVGDRTSCWVQLDVTGEIVAEGSVKTAMPQIQALFSQRQASRVIVESGNQSRWISQALVKWGHEAIVANSRKVELITKNQRKGDRVDAELLARLGRMDMSLLYPIEHRTQEQQEDLGVVQARALLVKTRGMLICHVRSSVKESGGRLESCSAESFSRKAAKEIPAGLQASLKPLLVQIENLTQQIRGYERRINRLCRKKYYQTQNLMQIPGVGPITALTYVLVLSNPHRFSKSRDVGAYLGLVPGRDQSGRKDPQLRISKAGHRLLRSLLVNCAQYILRKSSPESELKSHGEGIAERGGKNAKKRAVVAVARKLAVVGHRLWITGSVYDPWYQSQPTAA

SEQ ID NO: 463790 - protein, 418 aa, unidentified
MQAELSQFRAIIGMDWADKKHDVCVQATESKQRKTYQIQHQAEKIDEWARSLYGRYGGPIAVALELSKGPIVSALQKYDFFTIFPIDPTTLANYRKTFRPSGAKDDPTDAELALDLLLCHPDHFQALKPQSVEMRTLMTLVEQRRRLMNDRVRITNRLRSALKQYYPQALEWFDHIDTLLFCGFIKRWPSLAQARRARKATLEKFFHEHNMNRKALLERRVTAIKSAVPLTTDDAVIVPYRLQALTLVAQLEVALESIRIYDDEIAALAPQHPDYDLFSTLPGAGPSLAPRLLVAFGEQRERFSSAAELQKYAGIAPVTERSGQSTWIHWRWQCPTFLRQTFVEWAAQTINKSYWAGLYYYQQRAKGSSYQAAVRALAFKWMRILYRCWVTRTPYDEAKYLKALKDRGSPLLRNAQTA

SEQ ID NO: 463791 - protein, 341 aa, unidentified
MDQVSIIGIDLAKRVFQVHGASADGSVVFRKKLPRSQFLTFLATQPRCTVAMEACATAHGWGREIGTLGHEVRLIPPIYVKPFVKRQKNDAADAAAIAEAASRPTMRFVAVKSEEQQARSMIFRTRDLLVRQRTQLINALRGHLAEHGVVAPQGSVHVKRLADVIGDETVALPATVRQIGWLYLEQIDVLGERIDALGKKLRAEAGQAEPTRRLQTMPGVGPITAVAIESFAPPMETFRRGRDFAAWLGLVPRQNSTGGKQRLGRTAKMGQRDIRRLLIIGAMAVVRAATRHGVPEGSWLERMLAKKPKMLVAIALANKMARGIWAMMTKQEDYRNPAAAA

SEQ ID NO: 463792 - protein, 355 aa, unidentified
MNSEKYIGLDVHQATISVAVLDSTGKLVMESILETKAATILEFFAGLRGTLSVTFEEGTWAAWLYDLLKPHVAKLVVCNPRKNALLKDGNKSDRIDAHKLAELLYLNKLSSVYHGETGVRMLRELARSYLTIVKDLTRVMCRLKAVYRSWAIPCAGRDVYYTRHRAAWLGKIKEAGVRRRAERLYQQLDMLQYLRQQARRELLAESRKHAITVKLRQIPSLGPIRSALAVALIQTPHRFRTKRQLWAYSGLALETRTSAEYCYVKGGLRRSKKQISIRGLNKDHNHDLKGLFKGAATRASVLPGPFQDFYQRSLAKGIKPTMARLTLARKIAAITLTLWKKGENFDADKLKSQAA

SEQ ID NO: 463793 - protein, 411 aa, unidentified
MHNRQNYLYVGVDLHKEHHTAVIINCWQEKLGEIQFDNKPSAFSKFLLEVETYVSAGITVVFGLEDVGGYGRALAKYLVDHEQVVKEGNPALSFLERKSHVTTQKSDSWDAECVARILINKLNQLPDAKPNDLFWSIQQLVSTRNALVKAQSALKNQLHIQLNHHYPSYKKFFSELDGKTALAFWQQYPSPFCLEGANIKQLTAFLLDVSNNTCSVKKASDILKLVKEDGQTMKEYQETRDFLVRSIVRDIEFKKKEMKYIERELKRLVNLLDYQLETMPGIELVTASALIAEIGDVRRFPNANKLARFAGIAPVYFGSGGKGKTHKSKQGNRALHALFYNLAVQQVQVAKGSKLPRNPVFHAYYQKKLKEGKTKGQALVCIMRRLVNIIYGMMKYKTAYELPIVEEKEVV

SEQ ID NO: 463794 - protein, 343 aa, unidentified
MQAITTVGLDIAKSVFQVHAIDARGSVVVRRQLKRRYVLAFFKKLPPCLVGIEACATSHHWSRELRALGHTVRLIPPAYVKPYVKRQKNDAADAEAICEAVQRPSMRFVPTKTPEQQSCLTLHRTRHLFIRQQTAVINTIRAHLAEFGIVAPVGRNGVEDLLYAVADQRDKRIPEVARACLEALGALLGRLKAQILEFDRQINAWHRSNETSRRLDELPGVGPALATALVASVADPKAFRSGRDFSAWIGLVPKQSSSGGREKLGSITKQGDRYLRSLFTAGALAVIRYAKIHGTRHRPWLAKLLERRPTKVAAIALANKLARMAWAMMAKGERYREPLALAR

SEQ ID NO: 463795 - protein, 346 aa, unidentified
MPIVEAPRPVTGGIDTHLDAHVAAVVDVNGGVLAVESFPTTTAGFAELHDWLVGFGEMERVGVEGTGAYGAGLARHLRAHGLEVIEVDRPNRQTRRRAGKSDPADAIEAARAVLAGRATGIAKTGDGPIEAMRSLLIAKRSGREARITCLNQLRHLGFCGPDDLREAFRGVPRKALAARAAGLRPRAGSDDVTYATKLAMRTLGRRVLAIEADNTELDTLLADLVETTAAGLLAVQGVGVDTAAILLVAAGDNPERIRNEAAWAHLCGVAPLPASSGKLIRHRLNRGGNRQANHALWRIVFTRMASDPRTRTYVERRLNQGRSKPEITRVLKRYVAREVYRHLPRA

SEQ ID NO: 463796 - protein, 311 aa, unidentified
MTNDTIGVDISKDHLDAHRLSDGASRRFANDNPGHRAFVTWLGEPDAHIVYEPTGPYHRALERRLAAASFALVKVNPRQARRFAEATGRRAKTDRLDAAMLARMGALLDLEARQPRSPLLNDLKDLHMAREALVKNRIAARNRAKTLTLPILKRHNAQQLRQIERQTAAVEKAIMALIQADSDLSRRFAILVSIPGVSAITAFALLIDMPELGTLGQAQAASLAGLAPLTRQSGQWTGRAFIRGGRANVRQALYMPALVAMRFNPNLKTKYDQLRAAGKAAKVAITAIMRRLILLANALLRDGRNWTPSLP

SEQ ID NO: 463797 - protein, 308 aa, unidentified
MARNYIGVDLSRDWIDIFDPTRGTARLANTDAALGAYLGKLGPQDMLVFEATSGCDARLIRHASAAGQPFHRLNPLHAWHFARSLNLPKTDRVDARMLARLGAERQLEPSPEHDAARAELAELHGRRDQLKRMETQEKNRLKKAQCTSVKADIRDMLRLLARRIAKAEAAIEAFLAAHPALRAQAELLQTIPGVGRVTAVTLLSAMPELGQCDRREAASLAGLAPRARESGKWTGRRFTGSGRRHVRRALYMAALSALRHGSFCCGFAQRLAARGKAGKVIAIAVARKLLSVANAILRDQAPFLRNSP

SEQ ID NO: 463798 - protein, 370 aa, unidentified
MNDLIRIGIDTSKSVFVLHGVDAAEQPVLRSKLRRRQMPEFFAKLAPVQIGIEACGAAHYWARELMALGHEVRLLPPQYVKPYVQRGKNDAADASAICEAMSRPRMRFVPVKSADQQGALMLVGVRDQLVARRTQLSNTMRGYAAEFGVTAAKGLDKIEPLLARIACEPGVPEQAKALFALLGEEFAALKPKLRKLEADLLAWHRHNELSRRLAEIPSVGAVGATLMTMKVTDPHAFRGGRDFAAWVGLTPKDHSTAGKQRLGVITRAGDETLRRVLVVGATSLIQQVRKGRGNPSPWLTALLRRKPPKLAAVALANKTARIAWKLMVSGERYNRQHVGSGFVPPTGSLAPGARRQGRAAPPAAVACGQP

SEQ ID NO: 463799 - protein, 360 aa, unidentified
MQKPSTIDIDPVIYLAIELSASTWLVASKIPTSEKTGLHRMTAGDSQALLALVADLRKKVATKLGVEAAVVSCFEAGRDGFWLHRLLVEHRVINHVVEPTSILVNRRARRAKTDRLDAQGLLRILAAHAKGDHDVCSVVRVPTIEEEDAKRQHREREHLVQERVRIENRIAALLTTQGIRKRPSLRSWEKDMEEMRTGDGRPIPSLLRAEVNRLRRRLVMTLEMIRELEAEREQALQTQDDMASRMIRALCRIRGIGDNFAAVLTREVFYRPFQNRRQIASYLGLTPTPFQSGGMDRDRRISRAGNARARKTLIQLAWLWLRYQPDSSLACWFRERVGNLQGRTRRIAIVAMARKLLIAI

SEQ ID NO: 463800 - protein, 320 aa, unidentified
MAPDVVDVIIGVDVCKDRLDLFEYHSERSYWISNDAAAIKAWLDGFAGRLKLALEPTNRYHLGLAEAAYARGHEVYLIDPYRLSHYRAGLGRRAKTDAQDAQLLARFLERELGELRPWEPMIPGQQRFWQLLKRRAALVRCKVQLNQSLTGLGVLQEDAEALVQQCEQMIRKLDRALLKQAQELGWAEWIERCRAIPGVGPLTAMALVASWQRGQFRSVDAFVAFLGLDVRVKQSGRWQGRCKLTKKGDGEVRRLLYNAAMQGRRSSQWAPYYLRLRERGMSSTAALVALSRKLAKVSFALLRTDARFVPAAPEIACVST

SEQ ID NO: 463801 - protein, 400 aa, unidentified
MIYVGIDVAKDKHDCFITNSDGEVLFKSFTIANNREGFETLFQRIQSVSDDLTKVKVGLEATGHYSYNLLGFLLDNGLPTFVINPLHTNLYRKSLSLRKTKTDKVDSHTIASMIMSDVNLKSYSDTSYHNEELKSLTRYRFDKVKERAKLKSSVSRLVCILFPELEKLVPQLHMASVYALLSEFPSAHAVASAHLTRLTHLLSESSKGRYGKDMAIIFREAARNSIGSNMPAKSLELKHTIKLIRELTSEIDEIETEIKSIMDEINSPILTIPGISYRMGAMIIAEIGDFNRFNSADKILAYAGMSPSTYQSGQLDNCYSHMEKRGSRYLRYALYNATKYVCHWDPTFAEYLAKKRAEGKHYNVAISHAVKKNSFLQISPFLSVENDTLFVMQFSMFKYI

SEQ ID NO: 463802 - protein, 462 aa, unidentified
MKQQEAFLGIDVSKGYADFMFLDGQKQPIEKPFQLDDNFEGHRQLEALLKLVQQQHGIGMFYCGLESTGGFENNWYAMLQRAAKTFPLKVSRLNPAGVKANIEAGLNRNITDALSSRYIAEYLIAHPDKVNFNQGSSSIYNACRSLHRHIQLLTKQQTQLVNQLLQLLYSNFPELLIYCRHGIPQWLLTLLVKYPTRERIGKQNEKRLTQIKFITPEKARALLDKARQSVAADAEPVMEELIKSLAQQIIGKQAVIATHKKQLTTVCKGTEVDLLDSIPGFGCYIAAVMMIEIENINRFPTAKQLTSYFGIHPELKQSGDKAAFRMSKKGRSAPRAMLYLAGLSAVRHDEHIKAIYHRQRKLGKSHNQAMGAVMSKLLRMVFGILKSNKSFDAATDQANISKNAASKQPETKQQEEIKNKRRYQQLSSQAPVSNKQSKKRKVHLQSQTEQVGEVRDQVNAPS

SEQ ID NO: 463803 - protein, 401 aa, unidentified
MKKFNAATLEQVGPSVLMTPAGDPRERSYPAYIGLDVHKDTIAWAIALEGRSEPEYRGEIANRTKDIDKLIQRLNKQFKGEVLLWCYEAGPCGNGLHRQLQESGHDCQVVAPSKIPRQPGERIKTDRRDAIKLARLLRSGDLSGVWVPDIEQEAMRDLTRARGDIKAQQLKARQQLGAFLLRHGCLYSGGKSRWTKTHYNWLEELRFEYDLQQVVLQEYINAVKEADARLASMNTLMEKALPTWSMAPVVYSLKALRGVDTLAAMILMSELGDISRFESPRQLMSFLGLVPREHSSGPKRRQGAITLTGNGHARRILVESAWCYRFPARQTMHLKRKAADASDQAKDIAWKAQKRLCGRYRDLSQSGKNTKVVCVAVARELVGFIWDITCQEMPKVDQVAR

SEQ ID NO: 463804 - protein, 393 aa, unidentified
MGSDSATTRTGLHAWKLELMHVAVGQPTQEVKETPMNSVGLDVHKTRCVACVKTQEGRIVEEFAFQNNPHGHEELITHLKTYPQVQVAIESTGNLWIPIYNRLEDEHIHITLTNPKKTRLIAEAKIKTDKLDARILADLLRANLLSASYVPPPEIREQRSIIRERARLTQLRTIIKNRIHTLLDKHAYKSPFTDLFGKHGLEWLDKLELPAGDRILLEVNLEQLNSLNHSITRLTESIAASAIENPEVKLLMGFTGIDYYSAMFLINEIGPIARFPSPKKLVSYAGLAPSTRQSGNHTTHGPITKEGNSHIRWILIEAAHQAARHDPRLNQFYLRIMKRRGHNRAVVAVARKMLVTIYHVLNHHSQYRGLRPELFENKIRRLQRITESSLQTA

SEQ ID NO: 463805 - protein, 427 aa, unidentified
MAAREKVGEPEFVAFVGIDWADQKHVWCLQPANSTKREGGELEHKPEVVEAWVSELCQRFGHGAIAVAVEQVKGALVYMLGKYECLHLYPVPSTMSASMRQALYPSGAKDDPRDADLLLDLLLQHRDKLRRLTPDNEATRRVQNLVEERRKLVEEKTAQRNRLTGYLKVYFPQMLEWFAKLDTKLACEFLERWPSLEELQAAAPAEVRKFFRQHRGRHPELTEWRLQGIGQAMSAIRDRAVIEAKRMVVQVIARVLRTLLEGIAALDGKITEAAEAHPDFFIFQSFPGAGAALAPRLLAALGSQRDRYGSAEEVQKYSGIAPVTERSGKKKWVHFRWACPKFLRQSFHEWAGHSIAQSVWARAYYQQQRQRGKDHHAAVRSLAFKWIRIMFRCWQDGAAYDENRYLATLAKRGSFLIPVPAAAATSL

SEQ ID NO: 463806 - protein, 340 aa, unidentified
MEKATIIGIDLAKRSFQLHGVTREGRAVFRKKVSRGQLLNFLSAQPRAVVAMEACATAHDWGRAIKKLGHEVRLIPPVYVKPFVRRQKNDAADAEAIAEAASRPSMRFVALKSEDQQAQAMLFRTRDLLVRQRTQLVNALRGHLAEHGIVAAYGLAKVKVLAAALGEDSVHPLVRGLGQRYLDHIARLDVEIGELDKSLRQLCRTNETSVRLQTMPGIGPVTAAAIDAFAPPMVAFRRGRDFAAWLGLVPRQHSTGGKPRLGRTSKMGQRDIRRLLIIGAMAVVRWAARKGAAEGSWMARMLVKKPRLVVAIALANKMARSVWAMLTKSESYQGSALAAV

SEQ ID NO: 463807 - protein, 369 aa, unidentified
MNNKGNSLLYVGMDVHKESVVFAVFRGYEQKPFIQVSKKNDSYILKKYFNKLKEKGTLICCYEAGPCGFHMYRLLENLNISCIVAAPGLIPCKPGERIKTDARDAEALARNLRAGVLPSVHVPTKSDEAVRDYLRMRDDLIVEIKRYKQRTLSFVDRYGYRYKPGTNRWTIAHRSWLKELTGLEPLQRETLDEYMLHLNYLEEKQIRIDKRIEEIAEEDRYRDMTKQFTCLKGIGILTALSLVVEIGDFKRFSSAAKFMGYLGLVPSKHSSGMKRNQGGLTKSGNSRLRKLLIESSWHYSFPYQPSKRVRRRREGQRPQLIKYADKAGRRLSSKFSHLIFRGKPSQRAAAAVARELAGLIWGIAHEKYV

SEQ ID NO: 463808 - protein, 394 aa, unidentified
MAAVMIGIDPHKASHTATAIDGSEKMLGKVRVKATVDQSERLLEWAKGWPERTWAIENATGLGLLLAQQLLRAGERVLDVPPKLAAKARLLSDEGVNKNDPNDSRSVAVAGLRSAKIRPAVVEDHSTVMGMWSDRYLALSSARTQVVCRLHAVLCELIPGGYPRQLRANGAKKVLEQITPATPADQARLALCWQLLEDLVRIDAQRRETKKHMTAVVASSGTSVTEVFGVGPFVACAVMGHVGDIGRFASRAAFAAYNGTAPVEVSSGEKKIYRLSRRGNRRLNHAIHMAAVTQIHFDHSPGRDYYERKRAEGHSGKEAIRALKRRISDRIYAQLLADAKVAGRLKRGPGGQPGNVTESSVTGSHPEKPALRNSHSRTTTNTTTRPRKKLARAS

SEQ ID NO: 463809 - protein, 405 aa, unidentified
MGKVFVGHDWAEAHHDVQVEDEQGRRLTKARLPEGVGGVARFHELVAPFVEDPAEVVIATETDRGLFVGALVAAGYKVLAVNPMSTSRYRERHSTSGAKSDPGDALVLAELARTDGHNHRPIAGDSDLAEAVKILARAHQSMIWTRQRQTNQLRSTLREFYPGALTCFDDLDGGDALGVLAVAPTPILGRSLSRSKIAAALRRGGRQRRVEERAEEIQAALRADQLAAPDVVSEAMGATVAALVAVIAELNAQIARLEESLAERFEKHPAAEVIRSLPGLGMILGARVLGEFGDDPNRYADAKSRKNYAGTSPITKASGTRRVVLARFVRNRRLADACYMWAFASITASPGARAFYDQRRAAGDTHHRALRALANRLVGILHGCLRHGVMYDEDTAWGHRMEQAA

SEQ ID NO: 463810 - protein, 340 aa, unidentified
MRKLYAAIDLHSNNSVLVISDEQDRVVYEKRLPNNLVLIVSALSQYKELVQAIAVESTYNWYWLVDGLMEAGYSVKLVNTAAVKIYEGLKYTGDEHDARHLAHLLRLGLLPTGYIYPKAERGIRDLLRKRAQLVRSRTAHILSLQNLVSRNTGHGISVETIRTLTDKTIEGFCGGQAERTLAIQSTLAVIRCLQEQIQRLEKTVLVQAKMKPVFEKLLTIDGIGKILGMTIMYEAGTMERFSKVGQFASYARCVDSRRLSNGKKKGEGNAKNGNKYLGWAFVEAAHFGARWNEKIRGFYQRKKAKGNRIVAIKAVAHKLARACYHVLKDQVAFDVDRAFS

SEQ ID NO: 463811 - protein, 323 aa, unidentified
MMAEPAEIQCVLGLDVSRNTVTLCDGRTRHTVTIANDADALRAALQPYQGTTTLAVCEATGGHEDTLLGVLLELAIPAHRADPAKVKAYIKSFGKRAKNDPIDARWLSRYGRDRAATLPRWQPVDLTQQKLELLVARRLDLVAMRVQEQNRLKAPRSRLIADNIRDHLAELERHIEALNAEIGALIGESRDLALRAEQLRSVPGVGPVLAPLLLAVIPELGTLNRRQVASLAGVAPHPKDSGKASWHHSTTGGRRQIRPALFIAALAACRGDNPLAAAYKALLKAAKPKRVALTAIMRKIITIANARVRDAVRHQNEIMQINA

SEQ ID NO: 463812 - protein, 429 aa, unidentified
MSFRPIAGIDVGKHFSEMAILSPSNEVVARMKINHDSYADIERAVELLNRTEKDFASRPFVVMESTGHYHKILFHSLFKHGFEVSIINPIQSDSIKNIGIRKVKNDKVDARKIALLYRFQELKATNIPDEDIECLRYLCRQYYKLSDELTAYKNRLTGIIDQLMLNFKDVFPDTCSKAAIAVLEEYPTPALIIKADKNKLISLIQNNSRKSLEWAAAKCELLILKAKEFEPLSIDNTANVTMLGIYISMVKNLQENLDKVLKAIHQLITDDLSKDMPAISLMLQLLQSIPGIGFLTAATIIAEIGDFKAFSKPGKLVAYFGIDPSVMQSGEFTGTRNKMSKRGSRLLRRVLFTIALANIRTKRNKKACNPVLLEFYKQKCQSKPKKVALGAVMRKLVCIIFAVLRDRKPYQLRTPEEHARILSAKHHAA

SEQ ID NO: 463813 - protein, 417 aa, unidentified
MKAFPETIPIERYVAIDSHKHYVMVGGMNKQREWTLRPRQVQMHRFRAWAAQNLKAGDAVVLETTANVWDIYDIVAPLVSKTVVANAYKVRQIAEARVKTDKEDVKRLITLLIADIVPEIWVPPMHVRELRSLISFRWRLNKQITMSKNRLHSVVQRFNLTPPEGNLLAEKNQGWWTEQEFSELTGFQVKHDLRIVEQLETHKAEIDQKLAELSNTAPWADDMVYLMQIPGFGLLTSMILLAAVGDIERFSRPKKLVGYAGLGAGVHSSGQKHQEKSITKQGRKELRWVLVQAAWAAVRSDPYWKAQYQRLTKVKHPNKAIVAIARRLLVSAWHILIKRETYHRCDNETIAYKMMIWSQRMDEKALRGLTRQQFIKYGLLRLGVGQDLTRIVRKGVPRRIAPTGEVLKLRPDLKPPG

SEQ ID NO: 463814 - protein, 340 aa, unidentified
MKEITTIGLDLAKNVFQVHGVDEACAVVVRKQLRRARVLGFFAGLSRCVIGLEACATAHHWARELKALGHDVRLMPPNYVKAYVKRNKNDTADAEAICEAVRRPAMRFVPVKTADQQAVLMMHRARDLLVRQRTMLVNALRGHLAEFGVVGAKGLHKVEGLIAIVRNGSDECVPEVARRILGVIAGQIDDVEAKITEVEAQILGWHKSNPTSRRLATIPGVGPMIATAIAATVPDPNVFRSGRGVAAWLGLVPRQNSTGGKARLGGISKRGDGYLRRLLVNGAHAALSWSKAAKTDPWLTSLRARKHRLVATVALANKMARIAWAVMSKGEKYRLVTATA

SEQ ID NO: 463815 - protein, 357 aa, unidentified
MSPMMSLMREAERPEHMNPRELYIGVDVHEKESQIAVYEPDGGLIEEKRLPTEKLPAFIASLPGEKHVGLEAIGFIYPVYDALAEAGCDVAVANPHNIQLIARTRIKHDKVDARVLGELLRTNFFPRSHIPDAETREKRLLVKDRVRYGVRRADLKNSVKWLLKRRGLTVKSPFSGEGRERLRSLGLKEVEYRLRELELVDSIIEALDRRILFAASRDRGARLLDTIPGVGPYTALYLSTALDAVERFPGSKHACAHTGLVPGLHQSGDKAYMGHITRQGDRWLRRNLVECARWAVRKDPHLREFYLRVRHRKGGKRALVAVARKLVSYAYWMLKRDQTYEELSPWKTDWGSSPKLE

SEQ ID NO: 463816 - protein, 355 aa, unidentified
MDSTKYIGLDVHKETISIAVLNSSGKLVMETIIETKASMLVQFVQGLRGSLHVTFEEGTWAAWLYDLLKPQVTKIVVCDPRRNALLKEGNKSDRIDARKLAELLYLNKLKPVYHGEHGVRALKELSRSYLTISGDLARVMTRLKAMYRSWAIPCAGKQVYAPRYRSEWLGKITEAGVRRRAEFYYQQLDALRSLRQQVRRELLAESGKHKASKLLCQIPSIGPIRAALLIAILQTPHRFRTKRQLWAYGGLGIETHSSADHRYVEGQLRPSKRPVSLRGLNRNHNHELKNIFKGAAIIAATKAGPFQEFYAALVAKGIRPEMARLTVARKIAAITLLVWKKGVCFDAQHLKPQTA

SEQ ID NO: 463817 - protein, 429 aa, unidentified
MKIIYPRVCGIDVHKKFIVAVICISESVEPVYLKKRFSTFHNDLIRFRDWLIQNDCQNVCMESTGKYYIPVYNILESHISNIVVANPKWVRAVKGEKDDDKDAKWIADLFKLGIVKSSFIPQKDFRILRELTRYKYKLVNMRSSEKNRYQNALTSGNCKLDMVFTDVFGKSASNIIDLILSDNPYTDEDILSKVHKNCKASPDMILNSINGTDLTPVQKSRIELVNNHIKQLSSNIQRLDKLIDLMIEPYEDYISFLCQIPGVSRNSAITILSEIGVDMNQFTSSRRITSWAGLTPSSNQSAGKKKSVRISRAGVYLKPCLVEVAHAAVKDKNHSYYANKFNKISKRRGKKRAYIAIARKILVAAYHMLLTGEIWNPADLAEVETPVEQRIKYVKNNLKSDIKQLLDIGLTVEELTLMIQQNANNIATQ

SEQ ID NO: 463818 - protein, 319 aa, unidentified
MDDKIIGFDVSKKFFDFAFLKNDKKWFNQQLDYDKDGLNQLIKIIPSNSICVMEATGPYYIKLANFLYSKGFKVSVVNPLVIRRYSQMLLKRTKTDKADAQLIAMYGRDQIPDFWKPNSENIQRIRQINSVLESLIKERTSWINRIEAAKQDDNFDESSLKIMKQMVCLINRRIQKLEAELDKIIDTDFMQENDILRSIPGIGRKTSIMLLAITGGFTKFENYKQFSSYVGLCPRIFQSGTSVRGKARICKIGISRVRQLLYLCALTARKFNKACKELYIRLIEKGKPKKLALIAVANKLIRQAFGCVKNMTFYNAELC

SEQ ID NO: 463819 - protein, 381 aa, unidentified
MIDGEGAVIIKPFSFTNNCSGYNRLLAMLAKAKLPLDEVSFAMEATGHYWLALFTRLQKEGFRVQVINPVQTNSIRSFYIRQAKTDPRDALLIAEVIRFGHFSESTLHPENIYELRELCRGRHAIVSMQADVKRKVVALLDQVFPEYETAFTNLFGDTSMAILQACPTPKELSEMPLEALCHLIEVSSHKRFRMAKAQELQELARNSFGFAMAGDVFSTMIRLYAKHLDFLKQQVREMDRKIAEIMEALDTPITTITGIGPTLGAYILSEIGDISRFSSAAKLAAYAGIDPTMRQSGEYNGVRNRMSKRGSPYLRHAIWLAASSAVLHDPALKLYFQKKRDEGKPYMASVGHACRKMVSIIYAVMRDNKAYTPYIPNEISA

SEQ ID NO: 463820 - protein, 446 aa, unidentified
MNHARLSQHRQFLAGKIVVGIDPSKDKHQAAVVDPQGSQMGRSFSFPTTRAGYDRLLSSELPKILGTSAPERVVFALETACNLWETLAFFLHHRGYTVVLVSPLSTHHARPILSIEFSRTDPKDAYVVATVAQRGAFTVYERFPAANNATHLLAITYDKLRKELAQNRARVRAMLDRLFPEFPRIINPHTDSAVYLLKRYLFPDDFLALDIDLESEALAKISRRQLGREELLELRAAACTSIGVVRQDDERIAERLALDAFLATIETLEHQFTQLERELLKRVEPLEQHQRLTSLSGVGKRLAALFLAEVRDLSRYTHFKSIEKLAGFHLRLFDSGRFTGTRHISSLGNTRLRWILYKMAEETARRVPEVRRKYLRRQIKRRSHIRNVVACVPTLLQLIIAMEREKRPYQHRQDHLNELNELEAKYQALRAASPKNTKRKEAKAAA

SEQ ID NO: 463821 - protein, 344 aa, unidentified
MATYYIGADVHSNNTDLAIEQGGRIVARYSVPTSIPSISAVLNSIQGKKILAMEEGPMAGWLYRNLHEKVDKLIVSEPRRNKLISSEGDRDDKIDSGKLAVLLRGNYLKAVHHTSDNHRAHLKHWVNLYHDRVRDAVRDINKIRACCRMHGVRIPRKVVRNPVRRHAWLSELDNSVLKAQLHMLWIGYDATKEQVKIAKKQFSSYARKYPIIKSWSALPGIGIIRAATIFAYLDTPWRFKNRAKLHRYCGVGLVRITSGKDKKGRPKPARLKLPWAVNRRLKNAVMGAATTAIERGDNAFKDYYKRMISNGITPANARHSVARKLVSTMSAMWKTGNKYDETLV

SEQ ID NO: 463822 - protein, 343 aa, unidentified
MEYYVGLDVSLKQTSICVVDQTGSVVREGVVDSDPEAISVYVRSKAPDAVRIGLETGPTSTWLWTELKELGLPVICIDARHAKAVLKMQINKSDRNDAIGIARIMQTGWFKEVHVKDIDSHSVRALLASRALLVKIKRDLENHVRGLLKNLGLVIGRAKFNVFAVRTEELIEGRPELIATIRPLLEARNAVGQQVSELDRKVMRLARHDAQVRRFMTVPGVGPITALAFKATIDDPARFTRSRSVGAYVGLTSRRHASGEVDWTGRISKCGDAMLRSYLFEAAGVLLTRVPKWSAVKAWGVRLAKRNGLRKAKVAVARKLAVILHRMWIDGTEFNWSKEEIAA

SEQ ID NO: 463823 - protein, 357 aa, unidentified
MDKVKQMDFSGQDIFIGLDTHLKNWSVSIVVGESPFKTFSQDPRSEVLKNYLTRNFPNGNYYSAYEASFCGFKIHRDLLSLGIKNIVVNPADIPTTDKERKQKEDSRDSRKIARELSQKDLTPIYVPEIDIEGDRCLVRHRKTLTKEIARTKNRVKSQLYYFGIEIPTQFSGKKYWSKLFTSWLHSIELPSDSAKTALSAHLEMAETQRKKQYFINKEIRKLSEKEIYKNNYNLLISVPGIGTLTAMIILTELGDIKRFKNLDKLCSFIGLVPMTNSTGENERVGDITVRRNKMLRTAIVESSWIAIRNDPALMLAYQKLIKRMKPQQAIIRIAKKLVSRIMYVLKNKEAYVHAVVK

SEQ ID NO: 463824 - protein, 368 aa, unidentified
MMGWMAPLRHLGAKVLVGENQPADREPSMSEITTVGLDLAKNVFQVHGVDAEGSTVLRKQLRRAQVLAFFSGLPRCLVGMEACATAHYWARELRALGHEVRLMPAQYVKAYIKRNKNDAADAEAICEAVARPTMRFVPAKTAEQQAAVLLHRGRERLVRQRTMLVNALRGHLAEFGVIAPQGLRNVGRLIAIIRDEEDARLPGLARQVLQVLAVQIEQLEAAIAALEKQLMGWHKSNPFSQRLATIPGIGPIIATAIAAMVAEPSGFRSGREFAAWLGLVPRQNSTGGKNRLGGISKRGNQYLRRLLINGASANLLRSKATNADPWVIGLRRRRPSLVVAVALANKTARIAWAVMHRQENYQRMATAA

SEQ ID NO: 463825 - protein, 409 aa, unidentified
MLRIVYPICCGIDVHKNFIVACIASTDDKGVTSYRSSRFPTFTNGLRKLSDWLYSNYCTNVCMESTGKYWIPVYNILEDTCQVTLAHPKYVKAIRGKKTDKKDARWIADLFKHDLVAASFMPPLRIRQLRDLMRYRFKLTSFASSEKNRIQNCLTVSNIQLANVVSDTFGKSSMKIIDCLLENPDEDFDFATLLHGSMLHKADDIRLAMDGILTHEQQQKINIILCHYNEVKKCKVNLESLILSLSEPYASKCSLVSTVPGIKNPFSVIAIISEIGADMSVFTTAKHLCSWAGLTPQNNESAGKKHSVRISRAGVYIKPLLVQCANAVVRSEKHPEIKGRYLSIRKRRGHKRAIIAIARMLLTAIYHILLKDEPYNSELYKKAEILPKTRNITVDQAVLLARRYGYSVA

SEQ ID NO: 463826 - protein, 360 aa, unidentified
MNATTVAVDLAKSIFQLAVADASWKVVEQHRLTRTQFERWFANREVALVIMEACGSAHHWARWLNTLGIEVKLLPAAYIRAYVKRNKTDAADACALLEAVRSSGITPVRIKSVEQQALQGLHRTRSLWMGTRTSRINALRGFCREFGIAIAQGSRTGVEQISRVLADPNSKVPLLIRGAMKLLVEEIRLLEARIAQLERELTELARQSSACTTLLSIPGIGLLTATAMVAATSGEVTHFKDARHFASWLGLTPREFSSGGSRVLGRISKRGDRYLRMLLTHGARSVLRAASVARGAGKALDGLRGWALAVQGRTNHNKAACALANKLARICFATLRDGEPYGANQRLNKKMQRQAFAMPV

SEQ ID NO: 463827 - protein, 466 aa, unidentified
MTPRKRQRLSPEPLRVTNPHAAGIDVHANVHWVAVSPADAPAPPADHPANLPAHVRYFGACTADLIAIADWLAQCGVTTIAMESTGIYWIPLFELLESRGFEMFLVDPRQSRHAPGRPKSDVLDCQWLQRLHSYGLLTASFRPADQVVVLRSYLRQRQMLIRYAGQHVQHMQKALEQMNVKLAEVVSDITGVTGMAIMAGILGGQRDPLQLAKLRHDYCKRTEAEIARALYGNWRAEHLFALKQALTLYEFYRQQLQECDVQLQAHLGIFPDRSKGKPRPKRQRRYGQRSGKRTNEPAFDLGTALYQMSGVDLTVLEAIDVTTALVILSEVGSDVSRFPTVKQFTSWLGLSPQHQGSAGKIRSRRVPRGANRAGRALRMAVQGCYHAKHALGAFYRRVQARAGAPKAIVATARKLAEHRLLKYGAEYVRQEIEVYEAAYRARVVKGLARRAAEMGYRLEPAMAAGT

SEQ ID NO: 463828 - protein, 312 aa, unidentified
MSKIIGLDVSKQWLDICVYNTSDKPKYHRFANDAAGHEEVIKLAKEQEIKLIICEPTGGYEAEICQKLYNNKQQIHKVNTYSFNSFSKSVNLCKTDRKDAFKLAYYGDKMQLSANYIYQVESENLKRYQQRREDLVLMLSNEKKRLHHSIDGIDKESIEKHIKFLQNEIAELDKKLNKTIDESEELKEKVKILETVPGIGKCLATKLISFVPELGDKNYSSNELSAIVGIAPYARDSGNKQGRRFIRGGRKIPRDALYMAVLTGKNGFQYLKTLYNRLVNNFKPKKVAIVACMRKLLEVCHKLIQQKRCFII

SEQ ID NO: 463829 - protein, 325 aa, unidentified
MHILGIDIAKASFDTGLTEDNHSYEQESFSNNNKGFKRLAKWLAAHQVKELHVCLEATGRYGNALAHFLHSQGHQVSFVNPLRIHAYGRSKLRRNKNDRLDAQLIADFCFTQKPTPWTPPSQVQRESQEISRHITTLKQDRQRKRNQLGSGLTSSRLRRSITQTISFLDKEIKLLERDLYKLLCQDPGKAEDIKLLLSIPAIGLLTACRFLAEVDVSRFAQASQLAAYAGLVPTEHSSGTSVHKKPRLSKVGNRHLRTLFFMPALSAHRFNPIIANLRTRLTERGKPKMSVVGATMRKLLHLAYGVLKTRKPFDPNFMQSIPVGG

SEQ ID NO: 463830 - protein, 427 aa, unidentified
MPRFIGCDIHRREAQLAFLDERGVPVGQFRIPATAAALTAFARDHFRPDDRLALEATFHTWAVVELLRPFLEEVVISNPLRTRAIASAKIKTDKVDAHVLAQLLRSDFLPRVWQPDAETQRRRRLVSRRASLVGDRTKIKNRLHAVLHHRLIPVTLADLFNRPGRAWLAALELDAPGRFALDSELRLLDAVEAEIRSLDDQLASLAYADPQIKLLLTLPGVDFGIACTLVAALGDITRFRDGDHAASYLGLVPSTRQSGDHCYHGPITRHGNPHARWLLVQAAQHLAAHPGPLGVFFRRLLKKKNRNVAVVACARKLVVIARHMLSRQEPYRYAQPLPTQAKLSRLRTRVTGQRRRGGLPKGSGRHPNYGKGRTRRVPTLAEAYTNEDLPAPFSLAPGRTTHAARPFPCPFRTASPPILPHPQTRAL

SEQ ID NO: 463831 - protein, 330 aa, unidentified
MRVNVGIDISKDSLDFCLLLNQTKSGRKFRSFKNRKIDYFIINDWLLKQAKCQPHEIVITMESTGVYHEAIALFLHSSGFQIIISNPGKAKKFSQSLGLVHKTDKLDSYMLARYGDAQYEHVSFWKPDAENIRSIKMLVRRLSALEKDRLRESNRLEASTISGSYERVLLSIKRMIHILDDEIKEIEHEIDCIIAACPVMSKNHNLLMSVVGIGKVMSRELVYLFSAKSFSTAKQAAAFVGLTPRLNESGSFKGRTTLSKIGPSRIRSKIFLAAVSASKYNPDIKAQKHRLLSAGKTKMQALGAAMRKLIQICFGVIKNQTKYQSEITLN

SEQ ID NO: 463832 - protein, 496 aa, unidentified
MWYVGLDWDDTHHDVEVQDEAGKRIGARRFAHSHAGLHELKAFLLGIAASPEELACIVETNHGLLITFLLEAGIPVYPVNPKSANRLRKAAGAKTDRIDAHLLAKLGRFDLAELRRLEPDSPSVAELKTLTRDQDALIQTQTRLVNQLTACLKEYYPAALHLFTKVQQRSTLVFLQVYPTPQAAQAASIEEITATLRTSKHTNPRCAAAKIVEELHRPQLVASPVIVRAKSRLMLSLVKQLLVVIEEIASYDKAIRPLFLSHPDQELWSSLPRAGKRLAPRLLAEWGDDRSRYADATSVQALAGTAPVPFQSGNYAKAHKRFACLKPLRNALHQFAWQSTLQEGWARDYYQRKRAEGKTHSMAVRALANVWVRIIYRMWMSATCYQTATFGVAQPVPVTSLLPTVSRSRYSSCRSNVCRSPPPRSRLPVWVARYRPRRVKAGPRPGGVCTRVAGLGPLVLALTGVVDLLPHTGGSFTHAHLAFPFVFLALDIEGLA

SEQ ID NO: 463833 - protein, 374 aa, unidentified
MRSPNNMLYVGLDVHKEIIAPAYAPEEPGSEVIALGKIGTRQCDIDKLLRQLQSKGRHLRIVYEAGPCGFWLQRYLHKKGLECQIVAPSLIPKRSGDRVKTDRRDALQLARLHRAAELTPIHVPQIEDEAVRDLSRAREDAQRDLKSAKFRLKAFLLRQDIRYEGQARWTPAHLRWLARVVCPTPAQQIVFQEYLRTINEQNERLARLEQALREQVEHWWLAPVVVAIQALRGVQFTTAVTLIAELGDLNRFVHPRQLMSYLGLTPSEYSSGSKRQQGGITKSGNAHARRVLVESAWAYRHPAKVSAYLQKRIGHLPKELQDLSWKAQVRLSKRYRSLCARGKHVNEVVVAIARELAAFIWAIAKIVPVAPNAQ

SEQ ID NO: 463834 - protein, 369 aa, unidentified
MKKTVKYIGMDVHKNSISIAVADHGRNSEVRYYGKIAHDMDQLAKVIRKFISQGAELKCVYEAGGCGYHLYRYLTSNGIDCVVVAPSKIPRKSGDRQKNDKRDCLTLARLHRSGELTAIYVPNEEDEALRDLVRARSDAQNAHKRAKQQLAAFLLRYHIVFSGKSKWSKAYFNWLADLTMPHPAQQITLQEYIDAINTCSARVDRLTEQVRRLSEQSRLSELIKALQTMRGISLIVAATLASELGDFSRFERPSQLMAFLGLVPSEHSSGDRQMKGSITKTGNGHVRKALVEAAQAYRLPARKSRVIQKRQEGVGTEICAISWKAQCRLCGRYRQLTGRGKKVNVVKTAIARELAGFTWAIAMELPLAA

SEQ ID NO: 463835 - protein, 429 aa, unidentified
MNYTQNEKIAQVKETTLVVGIDVGSEFHYARAFDWRGYEYSKKAFKFSNTEAGFTDFMTWMLTIKNAFKKTEILTGMEPTGHYWFNLGKYLMDNEINPVLVNPHHVKKSKELDDNSQTKNDYKDPKVIAGLINKGRYSYPYLPEGVYADLRTASNMRFQIQSDLTRLSNRIQRWLSIYFPEHKEVYGSFNAISSLMILKEAALPEDIISLGSEAINQIWRDAKVRAVGMKRAKELVAAAKRSIGNKDGLIAAKMEIMILVEEYETKQKKLEDIMDLIEALCQQIPMTEKLLEINGVGIKTVSGFVAEVGDISRFNNPKQLQKLAGLALIEDSSGKHKGKTKISKRGRKRLRYLLFEVSMSLVSKNPEFRELHHYYTTRSENPLKKMQSLMAIGCKVIRIFYAILTKGVDYDGQKMLSDIKRPANHMQAA

SEQ ID NO: 463836 - protein, 386 aa, unidentified
MQASTVGTPTASHYGTIFITIELSQKSWLVTLHSPDQDKLSRHQLAGGDHAGLLALIGRIRDRAARALGGVPAVASCYEAGYDGFWLHRLLLAAGITNYVFDPASIAVDQRARRVKTDRIDGETMLRTLMAFLRGEPRVVRIVRVPSAEQEDARRASRERDRLVKEQTAHTNRIKALLRLLGMAIGNPRRRDWLSWLATQRDWQGQAVPPQMLGEIRHEHARLMLVRERLDALAKTPAQADPTPAAAQMIERSELLLRLKCLGPAFATTLTNEVFYKDFRNRREVASYFGLTPSPWRSGGIDRDQGISKAGNPRARCAAIELAWLWLRHQPNSKLTLEYRKRTLDAGKRIKRVAIVALARKLVVALWRYLTTGLVPEGAVLKTVKV

SEQ ID NO: 463837 - protein, 329 aa, unidentified
MNEILQVKKLYCGIDISGETLDICFQMQDGTLCFEKCANGPEGFKQIWRLTGKRYHFVMESTGVYQLPLCFFLETKKTNYSVVNALQIKRYIQMKLERNKTDKKDAQHICMYGLDNNPECYQMPDRLYFECRALNNAIETITKDITAFKNKMHAINKLEIDTKAISATYKKLLRELQAELKKLETELYKKLEAWQPAMVKQVRSVVGIGKRATAILIVNTQGFKHTESYQQLISYAGLSPKEYSSGSSIRGRVRICKQGGALLRHTLYMCALNAKETNAGCKALFERLVAKGKNKKLAVIAVANKLLKQVFGVVKNECLFDRNYYGKIA

SEQ ID NO: 463838 - protein, 372 aa, unidentified
MKSTTKFIGLDVSKEKISVAIADEGKDKPRYYGTIAHAPAALRKLIKELGPASSLSFCYEAGPTGYETYRWIESMGAHCVVIAPSLIPKRSGDHVKTDRRDAEQLARLFRAGELTPIYVPAREDEALRELVRARESAKEDAHRARQRVLKFLLGHQIHPPEQIKRRWTKKYRVWLGQLTFPNAPMQIAFTEYLHAMDEIEQRIGRLEKALIEEAATSSKADLIQILQSLRGIGFLTAVTLAAEIGSFARFRSPAQLMAYLGLVPREHSSGVRTQRGSLTKAGNGRLRRTLIESAWSYRHRPAIKGDLARRLEGLPADIQLISWKAQERLHRKFRRLVYGLNKHKNVAVTAVARELTGFIWAIARTLELPNAQ

SEQ ID NO: 463839 - protein, 318 aa, unidentified
MSRDAWDVHVLDDGRAWTSPTTAVALRQLLERLAPLVGRSFVVLEATGGLERPLAAALMDAGHAVAIVNPRQVRDFAKGFGRLAKTDRLDARVLALFGEKVQPRRAVPTSEQLAELEALVVRRRQLIEIRTAETNRRKQTASATARQSIDQVLKVLARQIDDVEAAIARLIHADDDWQRKADLVDSDPGVGPTTAATLVAELPELGQLNRRQIAALVGLAPFNDDSGRRQGTRSIRGGRAGLRHSLYMAACAAVRANTRPSPLQDFFQRLRQRGKPFKVAIVACLRKLLTTLNTMVHTNTPCSSSPSRGPTSNNIPLT

SEQ ID NO: 463840 - protein, 404 aa, unidentified
MYYVGIDVAKEKHYVCILDDTGEYAVKPFWIYTNVLGLRELIKRFGDLSLDNDDFLVGLESTGAFSENLYEYITDSDYKAVLLNSYQTAKFRDFSTMKKIKNDAIDALVIAELLFAGKYKESHISNDAYHSLKVLGRTKKSLMDKIKTLKREISTVIATVNPEISRVFPNIFTRTALEVIKVYPTATDIAQATPKKLTRLFRHIKGNNFSEDKAKFLIDLAKTSVYAGRACKARASLLSSYIRILELYCQEKKEIEAQIKQLIEEEIDTIDNTVENLQSIPGVSDKTISAILGECGDLRRFDSAKAFIGYLGLYPTQYQSGNSLSVGRLAKRGIPIAKHALYMAAVGSVLHNQQLNKIFRDKVSSGKSKKEALIILSKKIATIMYSIVKHNKPYDSHRVFIPNR

SEQ ID NO: 463841 - protein, 402 aa, unidentified
MNAVGIDVSKGKSMVAALRPMGEVALLPQEFLHTEVGLEQMAYAIVALGEDTRVIMEATGRYHEPIAAALHEYGIYVCVLNPLFIKQSGGGSIRKVKTDKADAMKIAKYGLDNWVELREYTPMDTVRQQLKLCSRQYNLYMKTVVSLQNNLISLTDKTFPGVNELFSSPERADGHQKWVDFVMTFWHCDCICRVSEKAFTDRYQKWCKRKGYHFSTEKALDLYAGSCGHFTTLPKNDNTKLLITTAAQQLLAGKTTLAALRTEMTRLAKQLPEYDTVRAMYGVGETTAAQLMAEIGDVRRFPRRSSIVGFAGVDPAVDQSGKHSAKSVPTTKRGSPHLRKTLYQIVCTYLKRSPADEPVYQFLDKKRAEGKPYFVYMTAAQNKFLRIYYGRVKEYLASLEGN

SEQ ID NO: 463842 - protein, 326 aa, unidentified
MQGQELSEPKAVTDTSVGIDVGKSWLDAHVLPANQNLRVANTPQGIRKLKRWLRRWPGARIVLEATGKWHRALHRSLYAEGWWVAVVDPFRVRMFAKAHGILAKTDRLDARVLAVFAAMMDPRARPPAPQALQVLQELVCARASAVAEQTALHNQRAAAQSAFLRRQLTRRVARLDRDIASLEAEIARRIADDPALAWRHRILLSIPGIGPANAALLVACLPELGAASAKEIAALVGVAPVCDDSGERHGYRRIKGGRQIVRNGLYLAALTAARHNPALRAFYRRLIDNGKAAKVALIAVARKIAILANTLIAENREWSSLPPNHA

SEQ ID NO: 463843 - protein, 340 aa, unidentified
MAIVAGFDVHRAQITFDALDQRTGELERGRIRATREAVRRWAARFAGEEVHVAVEACTGWLFVCEALREAGAVPHLAEPVETSALRGRKRRAKTDREDARWLRTLLCDGRLPEAWIPPAHVREWRTRARLRKTLVDERTTWLQRVQATLFHHGVWGAPDKLLSAQGREFLAALELPDSARERVEVSLAMIEALDRQLAPIEQQLRRLARRQTGCRALMAHYGIGELTAPTILCELGDVTRLSASRKAVRCAGLDIGVHRSDRRSRVGKLTRQGSPQLRWALYESAQAACRPTSPDRADYLALKARGLSHTRASLTIARKLARRCFHTLRELGPDALEPVT

SEQ ID NO: 463844 - protein, 384 aa, unidentified
MILVGIDVAKDKHDCCITNTDGEMLFDIFTITNNSESFDILYERIRSVAPDLSKVKVGLEATGHYNYNILSYLLDKHLTAYVINPLHTNFYRKGLSLRKTKTDRIDSRTIALMLLTDLSLKPYSVSSYHRENLKSLTRYRFSRVQERSRQKSSISRLVTILFPELSQLVPCIHISSIYTMLEELPGASYVASVHLTRLTNILSKASKGRFGREMAITFREAARTSIGAKIPAKSLELRHAIESEIREVETEIQKLMDEETTTITSVPGIGTQMGAIILAEIGDFSRFDSPDKILAFAGMSPSTYQSGKMISSYAHMEKRGSRYLRFALFNVTKHVCNYDPGFAAYLAKKRAEGKHYNVAISHAAKRLVRMLYAMETNGTLYEAA

SEQ ID NO: 463845 - protein, 482 aa, unidentified
MKHKRHEKTKKAICGPTQGNWQQMNRKQRREMTRKIQSEDISLEVIHPDAAGIDIGNESHYVAVPPQRDSQPVQRFGCTTAELKDMAGWLKQCGIRTVAMQSTGVYWIAVYDILEEAGLEVYLVNARDTKNLPGHKSDVQESQWLMKLHTYGLLRNSFRPSQEIRTMRTYWRQRNDLVQSAGRHIQRMQKTLTQMNLQLANVLSDISGVTGQAIIKAILAGERDPDKLAEFRDPRVKARKGQIARSLEGNWQEDLLFVLQQEQDGYEFCQKQMTECDQRLEHYLQQRDDRSAGASLPEEKRKERRKKRKGNKPRFDLRTGLFRMTGTDVTRIDGIDVMTATTILSEVGWDMSKWETEDHFVSWLRLCPDNRISGDKIIGKGRLPTNNRVSTALKMAASTLRTSQTYLGAQFRRLRSRLDTPVAIKAMAAKLARLVYRMLRYGMKYVDRGAEFYEAQHRQRQIKHLKSKASKLGFQIIQVPAA

SEQ ID NO: 463846 - protein, 402 aa, unidentified
MNCVGIDVSKGKSMIAVMRPFGEVVVSPFEVRHTASELSELARLLKSLDGETRVVMESTGNYHAPVAWLLHGAGLYVSVVNAMLVHDYGNNSLRRGKTDKKDAVKLANYGLDHWLTLPRYVPDEDTRLMLKTCYRQYQQYSKVQTMLKNNLISLLDTAFPDANRLFTSPPRADGSEKWVDFVATFWHCECVCGLSKKAFTAKYQKWCRKHGYNFSQDKALDIYASACGRFGVMPKTNTAKLLVEQAISQLQTTSAALAALKQEMQSLAASLPEYPVVMEMFGVGPTLGPQLIAEIGDVRRFHSKKALVAFAGIDAPPYQSGQIDVRSRSISKRGSASLRRTLFLVMGVLLQCAPMDEPVYQFMNKKRSEGKPYRVYMMASANKFLRIYYASVKAYLDSLEHD

SEQ ID NO: 463847 - protein, 369 aa, unidentified
MEKNTIYIALDDSKRKLVVAMLRPGATEPEEREIPKDPSPIQRLFRRLQREGPVQACYEAGVSGYDLYRQLTACGVTCQVIAPALTPRRPGQRIKTDRRDARKLVRLFRAGELTPIHVPDEAEEAARDLVRCREAVRRDVVRWRHRLLKLLDRHGRLWVTEKNWTQRHWTWIRAQHFALPALQRAFEATVFALEQALARQAELDKEIEALAATAPYREPVGWLRCFRGIGTLSAMVLLAEIVDFQRFRRPRELMAYLGLVPSEYSSGETQRRGALTKAGNTHARRVLIEAAWHYRHRPTVGRALASRSQAQPEEVVGQAWRAQQRLHRRYRHLIGHGKRPPVAVAAIARELVGFLWAAMTRRETRVQVA

SEQ ID NO: 463848 - protein, 347 aa, unidentified
MHFYTGQHRYYCGIDLHARTMYLCILEHESGAVVLHRNLRCEPDLFLRSIEPFRDDLVVSAECIFCWYWLADLCLRENLPFVLGHALYMKAIHGGKAKNDRIDSRKIAVLLRGGAIPMAYVYPQGMRATRDLLRRRLFFVRKRSELFSHVRTTFHQLNLPAPAGKLREKRNRTGVAETIHDPVVRASVEADLAVAAGLDVTIHFIEAEIGRQAKTENLDTLELLQSIPGVGPTLSLTLLYELHDVARFARVQDFLSYARLVKSQKASAGKILGTSRDKIGNAHLKWAFSEAAVGFLQKNPRGQKLIQRLRSKHGKGKALSILAARLGRASYFMLRRSTPFDMDRFMN

SEQ ID NO: 463849 - protein, 344 aa, unidentified
MEISVLGVDLGKNVCSVVGLDASGAVVMRRKVRRETLIALAEKLPACIVGMEACCGAHHLGRVFSAHGHDVRLMSPEYVRPYVKAQKNDDRDAEGIAEAATRPTMRFVELKSQDQLDTQTLHRSRDRLVGERTALINQLRAILLERGFVAPQGKRKLEGFLALLMDEQGGAGLTPRIILLVADARKQWAELDRRIAAFDAEFVRWVKENDEARRLTTIPGIGAIVASALVAAVGRAESFDRGRDLAAWLGLVPRQFTTGGRPKLLGISKRGNKYLRKQLIHGARAALPYVAERDTPLGRWAKGLMSRAHRNVAIVAFANKLARIAWAVLRRHERFAAIRTPVAA

SEQ ID NO: 463850 - protein, 309 aa, unidentified
MLSSVGIDTAKATLEICIKPQKIRFEVANNSAGFEALLERLKDFNISRVLIEATGGYEKDVLIALASAGLETICINPARARKFADAMGKKAKTDKIDAEVLADFAAHLSVPQSQPISPEREELRELVKQRAQFVQSRDDDKRRRQQCRSATVMAHFDEHIEQLKVLIKRLDEEIDQAMVQLDDTRARQLLAVTGIGRVTAANLLASLPELGQLDRRQIAALVGVAPYNNDSGSHRGHRQIWGGRAHVRRVLYMSSWIIIRHNTEFKARYEALRARGKCAKVALVACIRVLIVRLNAMLRDNTPWREQTA

SEQ ID NO: 463851 - protein, 348 aa, unidentified
MLTYCGVDFHSRQQKVVFCDLATGEIQRKELKHQSDEVRQFYTQLPKPVIVGLEATGSSQWFEKLLAELGHEVWIGNATEIRRRARSRQKNDWRDAELVLDLMVKNEFPRIYRLSEESLEILRRLRYRHRLVKMRTMAKNGLHAIALSAGLSMKSKLLTKAGRAKLELLDLSPVLKEQQREWLDLIDQLNHRITRLDSEVEQEGQTDPRVQLLRTHRGLGPLTALALVHTLEPVNRFSTSRKVTAFVGLEPCEESSADKVRWRGISKAGSRLLRFLLIEAAGVAIKYDDELKRFYLHLLHRRDWRKAKVAVARKLLVRAWIMLRDQIDYAEFLKRGVAVRSARTGRRP

SEQ ID NO: 463852 - protein, 323 aa, unidentified
MTRIICGVDVASKSLEARIGQQGAASSFINDPEGIAALGAFCLTYQVELVAMEATGGYEQQAFAQLSGQGLAVTILNPRAVRQFAQSMGSLEKTDAIDAGMIAWYAEVKKSQPVCLAPENQQHLRALVTRLRQLTEMRVVQLNQQRLVTDRKVQASFKKLLALLARQIGELEKSIAVLLEKDPLWRELDQAFRTIKGVADRTVARLMAEMPEIGTLSNKTISKLAGLAPLANDSGKHQGKRSVRGGRAAVREILFIVASVVGRYEPDFIAFRERLRAAGKPPKVVRIALAHKLLVRLNAKAREVRQRLTAVQMHPIALPAGCL

SEQ ID NO: 463853 - protein, 435 aa, unidentified
MLNIIKFDSFISVGIDVGADFSWMSIALPNQTFVGKPFKILHSDLNSLSIAVSKIKEAEELYSLESRIFLESTGIYHYPLFCYLRDKGFCVSIINPIITKNSTNINIRKVHNDKFDSQKAALIGLKPDLKVSLMPSDLALDLRNLSREYYDLMDNRSAYVNKLQGELRMVFPQYLKIFSKITTNTALTLLEKYTTPDTFLNVSKDEIVNSISSTARFGIAYAENKYNAIIQAANDAKFFGHSVNSNFKRILLYIRFIRQYDEEISAILSDMHEFVDANKDTEFVKQIYLIESFKGAGFLSAVSLMCEIGDFSAFRSPKQLFAYFGLDPTVKQSGNFNGTKVNMSKRGSRIARRVIHTMALVSIALNRNGSPNNPVLREYYLKKCQSKPKMVALGAIMHKVCNIVFAILRDEKEFEIITPEEHQINYSKAKCDIAA

SEQ ID NO: 463854 - protein, 350 aa, unidentified
MQYVGIDWAYRRAAWCAKQADGTIFGEGFVPADEDGLARLVIELGPEVRACLEMMSGAVWVRDQLAGAGWQVEVADARKVKNVAPLACKTDKVDARVLAELCRRELVPALWIPSLEERALRERLKRRLHLVRLRTSAKNRVFGLLTQWGLRIPCDRLRRPDAMELLETRGVPEVWRRSVAEALAVIELLDERIAPLDRELGPLARADRRVCLLTTIPGIGPLLGLTIAAEIGDVARFPSPRKLIGYSGLAPRVKKSGERSRTGELSKAGSRTLRFAAVEAAQGAWRETNPWHRLYSDVKARTGKANPAKSAVARKVLIACWHVLSLDEPFKPPHPPTDLVPASSLCFLAA

SEQ ID NO: 463855 - protein, 407 aa, unidentified
MGMYCGIDWAEGHHDVALVDDDGVVRANRRINTEAEGFSDLLAMLAEHVDDPTEVAVAIETDKNLMVVALRAAGITVYAINPRSVARYRERYRQAGGKSDAVDALVLANILRTDRHAHRALPTISEHALAVRALARQHQEAIWARQLTVNRLRSVLLEFYPGALQAFPNLTHQAALTILKAAPTPGDGQKLTRRRIVALLRRSGRGDRVGLAETIQAALRIPQLRQPACVEVALGHTLVGLVEIVLTMQASIAQLESELAVEFHAHPMAAILKSAPGLGPVLAARVLAEIGDDPTRFTTADGLRAFAGTAPITRASGRTRIVSARRIRNKRLANALHWWAFSAITKSAGARGHYDRRRAAGDSHNAALRNLANKLLGRMWWCLANGCLWDEMAAWPLLESERERVAA

SEQ ID NO: 463856 - protein, 438 aa, unidentified
MQVTYSHCAGLDIHKTSVVACIRVVAPDGRVITQQRTFGTMTTDLLALGTWLVGFEITHVAMESTGEFWKPVYNLLDSSFTVFVVNAAHMKAVPGRKTDVNDAAWIADLLAHGLLRPSFIPPAPQRALRDLTRQRTHLIRERATEVNRMQKVLEWANIKLSSVVTDITGVSARAILEALVGGQTDVTVLADLAKGRLRSKIADLEQALQGVLQPHHAFMLSQHLALIDTFEEQIAAFDTQIAAAIAATRPQPPADGGTTSSTGAPAAQAPDGAAAAQLILDAIPGIGMRAAEIILAELGTDMSRFPSAKHASSWAGLVPGQHESAGKRKPTRLRDGNGYLRATLVQAAWAAVKQADTCLGRFFRRVAARRGRPKAIIAVAHKILVIVYTLLKTGQVYCERPAPVLDDQAKERLVARMQRRIEQLGYRVKLEPVTAGAP

SEQ ID NO: 463857 - protein, 322 aa, unidentified
MSAPVLGIDIAKQRVEVALLVQGKIKHKSIRNTPDGFETLALWLGKLGMERVHACLEATGNYGEELAVYLHEAGHRVSVVNPARIKGFAQSELIRTKTDRIDAGIIARFCLAMQPEVWAPPSAEIRLLRALVRRAGSLIDMLTQEKNRLGTAHDSVIPLIKEHIGYLEGEIEKVRAQIAELIDRDPDLKQKKDLLASIPGIGKATIAAILAELDDLGRFKHVRELVAFIGLAPKETLSGTSIKGKPRLCKTGNARLRRALYMPALVSIRYNPLMIAFYQRLKEKGKNGKVIVCAIMRKLVHIIFGVLKSGKKYDPNYKSALA

SEQ ID NO: 463858 - protein, 368 aa, unidentified
MIVIGADTHKRNHTLVAVDGQTGTLRGQRQIPATDAGSLDALRFAVGLDDERVWAIEDCRHVSSRLEAALMAAGEHVIRVPAGKTMQARKVSRQAGKSDPIDARAVALTVVRDGVDSFPVAFTDEHALEIRVLCDFREQLIAERTRMINRLRWHLVTIAPHIETSIAQAALKGPHVCARVTRQLARLPISPQLRVARRLMRRITEIGREERELLADLKILIQAHTPLLLEQQGCGTVTAAIIIGHTAGARRFSTDAQFARHTGTAPIPASSGNTQRHRLHRGGDRQLNRAIHIIALCRAQWDPQTRAYLDRKLAERKTKLEALRCLKRYIARQIWRLLYSAEPLLTDPTTESSQRTAVGAPGLMPCTG

SEQ ID NO: 463859 - protein, 342 aa, unidentified
MDHVDIIGIDLAKNVFQLHGASKQGRVVFRKKLSRGRLLTFIASIPRCIIAMEACAGAHYWGREFASIGHEVRLIAPIYVRPFIKRQKNDAADAEAIVEAALRPTMRFVAVKSAEKQASGMTFKTRDVLVRQRTQLINALRGHLTEYGVVAPAGRQNLPRLQMALERHENDLPNQVRELCIMMLDQIAGLNNRISVLEKDIRRRAKQDEVASRLMTIPGIGPICATALEALAPTASTFQKGRDFAAWVGLVPSQNSSGGKARLGRISKMGQRDLRRLLVIGASSVVRWAIQRGAPEGSWLRQMLERKPRQLVIVALANRIARVAWALIANGTTYRTNLSAVA

SEQ ID NO: 463860 - protein, 403 aa, unidentified
MAKVFIGVDPHKLSATIEVVDERETVLATGRFDTDKAGYAAMRKTVSRWPDRVWAVEGSNGAGRPLAQRLLADGEHVVDVPAKLSARARLFDTGHNRKTDAHDAHAVAAVALRTQGLRVLSYDVELETLRMLADRREELTRARVQSVNRLHRLLSELTPGKSKKDLTTGQAKTILASVRPRDLAGKTRRRLAAEQLAELVVIEKKIKTITKELKGMVLAGGSTLMDPPGVGPVVAARILADVGDVARFADRNRFVSWTGTAPLDASSGEQIRHRLSRAGNRKMNHMLHIAAATQARLDTPGRAYYRRKLAAGKTRMEAMRCLKRRISDAVYRQLLADTRAGQAGPVGADPGGHCGATQESSAVDLPPHIDTSDQPLPGPAQPTLQPTPRPRKTLIDRPLVPAP

SEQ ID NO: 463861 - protein, 355 aa, unidentified
MSQTANTAIAVIGIDIGKNSFHVVGHDARGAIVLRQKWSRGQVEARLANIPPCLIGMEACVGAHHLSRKLASLGHDARLMPAKYVRPYSKGQKNDFNDAEAIAEAVQRPTMKFVATKTAEQLDLQALHRVRERLVSQRTGIINQIRAFMLERGIAVRQGIGFLRTELPTILATRTDALSPRMLRVIEELAGDWRRLDQRIDGLSGEIEALARQDQACSRLMTVPGIGPIISSAMVAAIGTGDVFSKGRDFGAWLGLVPKQISTGDRTILGKISRRGNRYLRVLFVQAAWVVLVRIKSWERYGLKSWIEAAKKRLHHNVLAIALANKLARIAWAVLAKGRAFELTRTDDAGVVRPA

SEQ ID NO: 463862 - protein, 369 aa, unidentified
MNKEIYVGLDVHADTIAVALAEGGRGGEVRFFGTIKHSGDSVLRLTKKLTETGKTPTFCYEAGPCGYGLHRLLTKLGFDCAVVSPAMIPRKAGDRVKTDRRDAEMLARLWRAGELTPIWTPDEEQEAMRDLIRTRKQAMDARKVAKQQLLSFLLRHGLRYRNGKYWTKRHRRWLAELRRFPYPHQQLSFEELKRAIDQVETRVATLDKTIDEAVRHWHFGPVVDALRALRGVNTTVAATVVAEIGDITRFENPRQLMAWLGLVPSEHSSGSTTRRGRLTKTGNALARTMLVEASWSYRHPPKEGHPYLKRSAHLPQQIRDIGWKAQVRLCKRFRHLSRTGKPQPRVLAAIARELSGFVWDIARNTPLPA

SEQ ID NO: 463863 - protein, 316 aa, unidentified
MATNVVARIVGIDISKAHLDVYVLSAGESARLDYTDEGLAELTGGLGDPADTLVVMEATGKLEARCAVHCAQAGFQVAVVNPRQVRDYARATGRLAKTDAIDAEMISRFAKAVDLQASPLRSEEEKHLDELVTRRRQIVDMITSEKNRLETTVVKTLRHRIEVHIRCLERELRSADGDISDVIEMSPVWRAKEALFKSVPGVGDVLARTLIAEVPELGSLNSREIAALVGVAPMNRDSGKMRGKQMIWGGRREVRRVLYMAALTASTYNADMSLFHQRLIADGKPWKVAITAVMRKLLIVLNTVAERGTPWEHRIA

SEQ ID NO: 463864 - protein, 393 aa, unidentified
MVYVGIDVAKDKHDCFIVNADGEVLYDVFTIQNNMDGFEDLFFKIKTASRDLNKVKVGLEATGHYSCNILGFLHNKGLTTIVINPLHTNAYRKSLSLRKTKTDKADARAIASMIMSDVSLKPYSDTVYHNEDLKSLSRYRFDKVSDRSKLKQSVSRLVNILFPELEKLVSTLHTKAVYELLSEFPGAHQVASANLKHLTALLSTASKGHFGREKANEIREAARRSISTYLPAKSLELKHTINLIRELSSEIDEIETEIKKIMDSIDSPILSIPGISYGIGSMIVSEIGDFSRFDSPDKILAYAGCSPTTYQSGQLYSSHAVMEKRGSRYLRWALINAARYVCNWEPTFAAYLEKKRSEGKHYYVALSHAAKKLVRLLYHLETTGEKYIPQTLS

SEQ ID NO: 463865 - protein, 342 aa, unidentified
MTMIGIDPHKAGHTAVAVDDNESVLDEFELRASRTQADRLCAWADGFGKREWAIESANGLGYLVAQQLVAVGETVFDVPPVLASRVRLMGSGRSQKNDPNDARSVAIAALRSDRLGIVRRDDHARVLRLLAKRHRDMARLRNKHCTRLHALLLELEAGGIASEITVTKANALLSRVVAEDQVTRHRVMIAGELIDDIARLDTALKASKKRVGVAVAASGTSLTDIVGIGPICAAIVIGYAGDITRFPTKGHFATYNATAPIEASSGPKAKHRLNPRGNRKINHAIHIAAISQLRYDSEGRAYYDRKIAEGKSSKDAIRALKRRISDRVYRHLIDDARRAVTT

SEQ ID NO: 463866 - protein, 308 aa, unidentified
MLRPDGRHRSKKFANTPGGHDELVSWLQGHQVIHAHICMEATGTYMEDVAAHLSDAGYQVSVINPMLSKAFVQSQGIRSKTDTVDARQLAYFCREKRPAIWEAPHPVERALRALVLRHQALTEMHVQEQNRRESARDVQLPSIDMHLLWLDTELKRLEKQIKDLTDDDPDMKHRRKLLDSIPGIGPKTSAVLLAYVGLKERFREARQFAAYAGLTPRQHESGSSIRRVSRMSKMGHVSLRRALYMPAMVTLYKTEWGREFRERLEKNGKNAKLIIGAMMRKLAQVAYGVLKSGRPFDATLHTKNACMA

SEQ ID NO: 463867 - protein, 351 aa, unidentified
MLIIGCDFHTRYQQIAMANDETGELLLERRLDHESGEAHTFYRNLQGPVCVGIEATGPIHWFERLVAELGHELWIGDSARIRASEVRKQKTDERDARLILDLLLAKRFPRIWVPTPAERDLRQLLWHRHKLVSLRTMLGNQIHFLAMSQGLCRKQKLFTKKGRGEVAGLALGPWASRRREELLKLLDQLESPIAELDRAVLEEAERREDAVRLMTHPGIGPVTSLAFVLAIGPITRFRRSKKIASYLGLNPSEESSGGRRRLGAISKQGNTMVRWLLIEAVYPAVRKDPALRQDYQRLKFRRGHAVAKVAIARKLAVRMYWILRSGADYAQLVRRQGSPGATLVSASSSLG

SEQ ID NO: 463868 - protein, 428 aa, unidentified
MTPPKDYCLAAPCPPTPLLPPLPVLSDALQVCNPHAAGIDIGEAEHWVAVPPGRDPQPVRRFGTFTVDLDALADWLIDCGVITVAMESTGVYWIPLFELLEARGLQVFLIDPRQTKRAPGRPKTDRLDCQWLQRLHAYGLLAAAFRPADQICVLRSYLRHRQMLLTYGAHHIQHMHKALQQMNLKLSQVVSDLTGATGMAILKAIIAGERDPLTLAKLRNPHCQHSEDDIAKALQGTWRAEHLFAFQQAVELYQFSHPGVDLTTIEGIEEGTALVILSEIGTDMSRWPSVKHFCSWLGLSPQHNMSGGKVLSRRVRPGAQRVALALRLAARTVHKAHTALGAFFRRLRSRLGAPKAITATAHKLARLVYSLLKHGSASVQQGLDAYESQYRERKVKAMARQAQALGYTLVALGTPEGASLNAVTAPIP

SEQ ID NO: 463869 - protein, 440 aa, unidentified
MEVVNPNAAGIDIGSRSHFVAIGQGEEDVREFGVYHENLQALSQWLLENEIKTVAMESTGTYWQNLYAVLQSHGLEVILCNGKFTKNIKGKKSDVQDCQWIQKLHTLGLLSGSFLPDDATEQLRTYCRHRANLLEQAADTTRKMQKYLRLLNLRLDVVVKDVTGLTGLSIIDAICKGEVNPEALASFRHGNCKKSASEIAKALQSNGRKDYRFALTHEYQLYLNLQSKIAECDQEIERMLNEQINRDDNKREHFIEKKVHKRVNKNTPKNMDINLLSYQYFEGVDLLSIEGVSHSTVLTLISEVGAGIHKFPSAKQFTSWLRLSPNNKISGGKVLSNRIPKGSNRLKIALRNAANAIGNLNDTALSNFFKRIAFRKGRVSAISATARKLAVIIWNMIVKRIPYRPVAEYQFLDQKRKKITQMKKLITKFDISMNDLSFQL

SEQ ID NO: 463870 - protein, 309 aa, unidentified
MEHFVGIDVSKDRLDVHLRPSGESFAVARDGEALAGLVERLRTLAPALVVMEATGGYETVVASAIGAAHLPLAVVNPRQIRDFARATGRLAKTDRIDAAAIAHFAEAIRPPARPIAEPEAQALGELVARRRQVIEMIVAEGNRRRMARQRRVIRAIERHLALLQTELSELEDDIDGAIRNSPAWQAEADLLTSVPGIGPATRRVLIVELPELGRLTRRKIAALVGVAPINRDSGTLRGRRTIAGGRATVRAALFMAALVASRKNPIIAPYYRKLRAAGKTGKQALTACMRKLLVILNAILRDRKPWQPA

SEQ ID NO: 463871 - protein, 250 aa, unidentified
MDIGKAELVCCSRVPSPDRAGRRLQEVTTYSTMTRSLQGMADRLLALGVTRVVMEATSDYWKPAFYLLEAAGFEVWLVNAKDVKHLPGRPKTDRLDAVWLCKVAERQMIRPSFVPPKPIRRLRDLTRYLASWARFAPSIKESAGRHKGSGATGHGNRYLAGALGEAAASAAKTDTFLGERYRRIARRRGKRGRGSGRPLHPGHHLAPAVQPRHDLGADYYENRNGTRAASVSHVRRLQALGYRVTLEPVA

SEQ ID NO: 463872 - protein, 434 aa, unidentified
MTTVHPTASNDEPAWFVGFDWGSEKHRIALFDRAGNLIGRRDVAHSAAAYAELGDWLLRTTQASPAEIAVAIETTHGPVVDALIDRGFRVYAINPKQLDRFRDRYSVAGAKDDTRDADTLGRSLRTDPEAFRALSPDNPLIVQLREASRTAAELTRDLGRLTNQLRDLLWRYYPQMLALDDNLAAPWLLELWQHAPTPAKGARLHKETIARILKTHRIRRLDADQVRTVLREPPLPSAPGVTEAATGHIRLLLPRIRLLNSQIKAVHTEIDALCQQLAGPQTIDPGGEPGESVPGQSIEQRDVAILHSVPGVGRIVGATLLAEASEPLRRRDYHAIRTLAGQAPVTKRSGKSCFVQRRLACNKRLANAMYHWARVAVMCDPRSKQRYAALRARGCSHGRTLRSVADRLLKLLCTLLQRQVSFDPNHNAKQAAAG

SEQ ID NO: 463873 - protein, 403 aa, unidentified
MQQIIIGVDPHKLSATIEVVDKHEQRLGSGRFTTDRAGYAAMRTYAKSWPERVWAVEGANGAGRPLAQRLLEAGEQVVDVPAKLAARVRLFDTGHNRKTDALDAHSIAIVAVRTTTLRVLQVDGELEALRMLTDRREALTRRRVQTVNRLQALLAELLPGQAKKDITPLQAKGMLASVRPRDVAGKTRRSIAAEELAELVAVDAKIKKATAELKSIVLARGSHVMALHGVGPVVAARVLADVGDISRFADRNRFASWTGTAPLDASSGEQNRHRLSRAGNRRMNHMIHIAAVTQLRLNTEGRAYYRRKRAEGKKPMEAMRSLKRRISDGIYRQLIADQQRPGAAKRGAGPGGHCGASQESSAVDLPPHIDTSDQPLPGPATTTLRPASAPRKTNRRRNLQTTG

SEQ ID NO: 463874 - protein, 331 aa, unidentified
MGCDIAQDTFSFCLRNQAQILLEGVIPNSKTTIRKWLHELKRIHGVELTSVIFCLEHTGIYGMLLMRILHERSLTVCVEGASNIKLSLGLQRGKNDKVDARRIAEYAMRYTDRLKQWKPKRDVLEKLQLLSGMRSRLIKARHVLSSHTQEVKRFMNKEEYMLLNKGTQEALKAIEKSIINADQKIAIIIRSDEHLSHLSKLITSVDNIGMVTCAAILIWSNEFQDFKESKKFSCTAGIAPFEHSSGKSVRGKTRVSHQAHKDLKTLLHMCAVSAITREGELREYYLRKVTQGKNKMLVLNAVRNKLVGRIFAVVRDGVMYQKNYRYNLVVS

SEQ ID NO: 463875 - protein, 391 aa, unidentified
MQKLNDLSRSLTPLESDGTLIAVIEMSLSSWLVAGIVPGVERQPLKKLEGDESALLKLLNRWREEAKKAGHRIERIAVAFEAGRDGFWLARWLRARGIEAHVIHASSVAVSREHRRAKTDRLDTELLKRVFLGWLRGERDHCKMVAIPTIKDEDAKRPNRERESLVGEQSRIVNRMKAALIRLGIRGFNPKLKKAAGRLEDLRTPEDEPIPPNTLAELRRDMERRRLVSDQIRQIEEARRERLKQAPYDGPHAMVRLLARVIGIGIETADTLVQEVLSRNMRDRRAVARYAGLTGSPDESGRKRREKGLARSGNARVRRGMIQLAWRFLMFQKDSALAQWFRARTENARGTRKTMIVALARKLLIALWRLVREGIVPEGIVLASGTMNGGR

SEQ ID NO: 463876 - protein, 347 aa, unidentified
MRFFNSQHQFYCGVDLHAKTLHVCVVDSQGEKRLHKNFQCQDVDTFLEALQPFRDNLVVGCESTFNWYWLADLMHRQNIPFILGHALYMKAIHGGKTKSDAIDSEKIARLIRGGNFPLAHAYPQAHRASRDLLRRRTFLVRRRAEALTHIQMIHHQHNQPKPVNIKYKANRIGIGQRLPDAHTQMLVDVDLQLIEAYDTQIQRLELELVRQVKVTHPQLYYRLTSVPGIGPVLGLTLMHEIETISRFPSVGNFLSYCRLVKGSHTSAGKNYGSPGGKMGNAYLRWAFGEAIQILKRESSEVKQLSERLEKKHGKGRAMNTLAVKLGRAIYYMLRDDHAFDLKRFVGA

SEQ ID NO: 463877 - protein, 356 aa, unidentified
MKVVYQTCCGVDVHKSFLVATIIKTISGVEPSYQKKRFSTFNNSILQFKNWLIENQCRDVCMESTGKYWVPVFNLLEDDINVTIANPKWVKAVKGNKDDTKDSKWIGDLFRLGLVPGSYIPCKPIRILREFTRYRYKLKSDSVIESIEGYQMTDSQKYRMRLVRAHLDYITSTINDIDTMLDSLIAPYENAVQLLCTIPGVDRNSAITVISEIGTDMTPFSNSKRLCCWAGLTPGNNESAGKKKSVRITRAGVYLKPALVQVAHAAVKSDKSPYYKQKYERIMKRRGKKRAIIAIARMILTAIYQMLSTGEAWNPTDLYKIDIPEPLKEKQKEKAIKQAKKLLIREGILSESQLAS

SEQ ID NO: 463878 - protein, 407 aa, unidentified
MPLFVGIDVSSKNLDACLMDGMGETLATQTVTNNLPGASELRDAILQHAEADDTIQIAMEATSVYSWHPAMFFHEDPELKQRRTKVFTLNPKLVRNFKKAYAEMDKTDPKDAWVIADRLRFGRLPKSVIQSEQYLALQRLTRMRYHLIQSLTREQQVFLNHLFFKFSAFNLEVDTPVFGHAITEFLLEAYSLDEIAQMPLEDLAMYLQTKGHGRFSDPEDLAASIQKAARSSYRLSKCVEDSVDLVLGSSIEIIRHLKRQIKDLDKAIARVLDGIPNTLQTIPGIGPVSCAGILAEIGDIERFDDQAAIAKFAGLFWPRHQSGDFEADDKMLARTGNRYLRYYLVEAANLVRRHEPEYRAFYQKKYREVHKHSHKRALVLTARKLVRLIDALLRNDQIYAPKKKVTR

SEQ ID NO: 463879 - protein, 461 aa, unidentified
MKHKQGVSPRRAKLRLTKHLDQVNLYAAGIDIGSREHYVAVPEGLDDEPVRSFGCFTADLEQLADWLVRIGIQTVVMESTGVYWIPLFEILEERGLETHLVDARQTKHVTGRKSDVQDCQWLQQLHTYGLLRSAFRPPEAICTLRAYLRQRSNLVSQVGTHIQHMQKALRQMNVLLDNVISDITGVTGMKIIRAIVAGEHNAKRLAQYRDGRCKNDVATIEKSLRGHYRKEHLFALRQAVELYDIYQEKIHACDEAIERHLDCFESKAVPRDLPKKPKRKHNNATAFDGRGHLYRITGVDLTQIGGIDESIALKALSETGMDMNRWKTKKHFSSWLALSPHNKVSGGKILSSRTKRTSNRATEAFRMAAYSVTNAKSALGAYYRRMRSRLGGPKAITATAHKIAHIYYSMLKHGTEYVDKGQQYYERQYQDRALKNLRRRAADFGFSLTPNAGNDAATVPV

SEQ ID NO: 463880 - protein, 419 aa, unidentified
MRIIGMDIHRVAAEVVSLLDGEIVKLGRVQMLRDKLEEFARRELTHDDHVVIEATGNAAAVAEVLSPYVDRIVIANPKQVHMIAHAKVKIDTIDATVLAKLYASGFLPEVWVPDPGTLALRRQVTRRTQLVRQRSRLKNLIQSILHAHLIPPCPHGNLVGISGRKWLTRQILPADERAAIERHLGLINQINEALTVVEADIAVHALQDPTIRRLMTLPGIDVTVAASVAAAIGDIRRFSDPQRLVAYLGLHRGRRHRAQACNDHLAHAEQGCRLHLGPAGLACPQVQIGRAACRPSDQPCQARHRLRLQHPGQAPKNDPASRRRKLPMQPRLPDGERGRKGRRLWKSRRMREGAVLQHPSALGCPARCSAIPPRSFDQARMAFEVNLRSRPVVPSQGATRKIPDHLAITTHKRTGPQPR

SEQ ID NO: 463881 - protein, 470 aa, unidentified
MAAVMIGVDPHKASHTAVAISVAEEPLGELRVRACAAQAERLLAWAAAWPQRIWAVEGAGGLGHLLARQLLAAGERVLDVPPKLGARVRLLAAGDTNKNDPDDARSVAVAALRSAGVREVRPDDHAAVLKIWSKRYRDLGRTRTQVVCRLHAVLCDLVPGGVSRPIYAARAARILEQITPPDAVAAARCELAAAFLEDLRRIDAQIRETRKKLAAVVAATGTSLTGLFGVGPVIAAAVIGDVRDVSRFPGRNHFAAYDGTAPIEVSSGPRKIYRLSRRGNRRLNHAIHMAAVTQVSHRHSDGRAYYDKKLAEGKTRKEALRSLKRQVSNAIFACLQAGARRAAAHAKGPGGQQGNDSAACAAGSHPRHRLFGQATPGPGAHPTTPAASPAPGPASARGRAGHSSIAATLPPATPQVQVERPQRSEDERPGGAARQRPYSAARKALGQKFPLKAQRPKGTSHAAKRTDGTP

SEQ ID NO: 463882 - protein, 346 aa, unidentified
MQHCGFDLAKTSSQLCLRTEDGQLVEHRLKTTREELTRFFAERPPTRILIEAATESEWVAQHLEGLGHEVIVADPNFAPMYATLSKKIKTDKRDARALCDACERGTYHPAYRSTDAQRQVRAELIARETLVATRTKYISVIRSMLRREGIRVPSCGAQYFRAHVEAMSLPTHLKAATAPLLEVLRVLGEQIGQADEQLAAVSKSEPLIKRLCLIPSVGPVTSITFVAILGEASRFSSAKQVRAYLGLVPKEDSSGERQHRGPITKAGNSRVRSLLVEVAWSMLSSKKSEVQELKQWALRIAERRGKRVAVVALARKLAGILYALWRDGTEFDPARLRQAVVGDAAS

SEQ ID NO: 463883 - protein, 351 aa, unidentified
MEIVVGLDLHRSQITFRTVDLRTGEVQRGKIYPGAREAVREWLERFEPDSDAHFALEGTTGWRFVVEEIERGGFTAHLADPAELSTLRGPKRRAKTDHADCELMVNLLLEGRLPESWIPPAHILELRTLVRLRKTLVDQRIEWQQRLQAQVFHQGVVPGLHLLREEDRRRLLKMQMSAAGRQTMQTGLLMVDAFDSQLQPLGTQLVGLAKTQPGCRALEHNLFGVGWLTSVAILSELGDCRRFHSADQAVRASGLDITVYESNGKRPGGHLARQGPQVLRWALFEAALCAARKSSPDHDYYVKVRDRIDHNRACLSVARKICRRACHILKDLGDAAMAPPEPSASHGPKAA

SEQ ID NO: 463884 - protein, 368 aa, unidentified
MATLESNDAEGFQRLLKRLAEVTRRPQVLIAMEATGHYWHCLHDFLCRCGYDVVLLNPIQTAQQAKMGIRKTKTDKISARHIATLIRNGQHRPAQVPGELATTCRLTTRTRYALLTHQRRTKQLIRSRLHPAWPEYETYFRDPFCATSRKLLQAAPTPEDLLAIPPQELTDLLQKTSRGKLGAALAQRIRASAELSVGIRRGREGLRICLRTLLQQLEALAAVRQQLESQIERLAERLPAYLLTLPAATPFYVASLYGEIDPVQTFGTPQQLVAFAGLDATVCESGEGGAIRRHISKRGSPFLRRTLWLMAHRAVYLEGDLREYFLRKRKAGLHHLAAVAAATVKLCHRVWRIMTDEREYLRVAPPRT

SEQ ID NO: 463885 - protein, 323 aa, unidentified
MSLPALGIDVSKLKFDVALLRESGKFKHRVFPNTPAGFAQLSAWVEKQQTGRVHACLEATGAYSDSLATYLHEQGHLVSVVNPAQIKAYAESHLARVKTDKADATLIARFCSERHPPEWRPLPREVRELQALVRRLDSLLEMRQMEANRLGVANTAAVKESLAGHLAFLDAEVARTEALIRSHIDSHPGLRGQRELLVSIPGIGETTAAKILGEIMDVKLYESARQLAAFAGLAPRLHESGSSVRKRAKLSKVGAPRLRKALYFPAIVAIKHNPYIKELSERLRRRGKCSMQIIGAAMRKLVHLAYGVLKSGKPFDPELLKTA

SEQ ID NO: 463886 - protein, 356 aa, unidentified
MDSVKYIGMDVHKEAISIAVLGSSGKLVMECIIEAKAVTILQFFQGLSGSLRVTFEEGTWAAWLYDLLKPHVTEIVVCNPRRNALLKEGSKSDRIDARKLAELLRSNNLLRSVYHGEHGLRTLKELARSYLTISKDVARVMSRLKAIYRSWGIPCTGKQVYALRHRSEWLGKIQEAGVRRRAEIYYQQLDALRPLRQEVRRELLAESEKHSATKLLRGIPSIGPIRAALIVAFLQTPHRFRTKRQLWTYVGFGIEMHSSAEHRYVHGELQRSKKQISIRGLNRNHNHDLKNLFKSAAAIAAAKAGPFREFYTALVAKGIKPEMARLTLARKIAAITLVIWKKGVSFDAKYLKPQTA

SEQ ID NO: 463887 - protein, 317 aa, unidentified
MVQSKGINFDGQNIYIGIDVHLKTWNVTILTQSGYKKKHSQKSSAKELFEHLKKHYPNGNYQAVYESGFSGFSTYYALQEYGISCMVIHAADVPTTQYENVMKSDPVDSEKLAKALKAGTLKGIYIRRKENLDNRSVVRIRKTLKQQLGGYKSRVKHLLYNNGVQLPDCFASPNTHWSKRFMSWLREDVVLLSSSRIGLDLLLEQVDLFRKSLLKANRLLRDLAGSPLYADRYSLLISIPGIGVNTAMCLLTEIDDISRFNNQREFASYLGLIPTMHSSGEKSCNGEKTFRGNKKIGPMLVESSWVIIRHDSVMAAA

SEQ ID NO: 463888 - protein, 432 aa, unidentified
MHPPEPIVPNPAIAAYVGIDWADQKHDVILCAQAEPTVVEHQVITHSPESLLDWVGNIQQRFGTKGKILVCLEQSRGALIYHLMGYECFELYPINPNQLANYRASFKTSGAKDDRPDAELLCELVRCHRDRLIAWKPDTELTRKLATLNEGRRQAVDRRSRLANEIKSTLKIYFPLALQVLENDTTTALAADLLLRWPSLEALQKQSPSKLRKFFYGHNCRGEQKMLERLKLIKEALALTHDGAVIEPAALRVQMLAEQLKSLLPYIARYEKQIAQLFDSHPDSFLFRDLPGAGSALAPRLFSAFGSDRSRFQCAQQLSSLSGIAPVRRASGKKSGKKGEKKASIHFRQACPKFLRQSFHEFAACSIRYCSWAERFYEAHRARGKTHHVAVRALAFKWIRILFVCWKERSPYQESRYLHALQNRGSAHAQSC

SEQ ID NO: 463889 - protein, 425 aa, unidentified
MNSKLNEKINQVMNTTIVVGMDIAKRKHYATFVDDRGRQLVKAFPVHQSKEGFDFFYERLVSAMKEFGKTDVLVGIEPTGHYWLNLFHFLNDHGIPLVMTNPMHVKRSKELDDNLQTKNDQKDALVIARLVKDGRFSYPRALEGMEAELRVGATLRSQMTEEFGAIKNKMIRWLDRYFPEFVQVFPTFGKMALAALERTPFPSDITGKEVEELLALYRTVDGMKSPQRPKAKQLIELASSSIGITEGKKMAQLEIATLLRRYRQLEKELDELTLELTAMIQTTPEYEYLSTVPALGDPTIIDLLSEIGSFSHYSDPRQLIKLAGLTLRENSSGMHKGQKRISKRGRRKLRALLFRVMMPMIRHNEAFKKLHEYYTTRTHNPLRKKQSIVVLCGKLLKVLHTLCTKEIHFDTKRMMNDSLCLQEAA

SEQ ID NO: 463890 - protein, 341 aa, unidentified
MNDSKTVVGIDIAKRVFQLHWIDQETGEIMSLQLKREKFLEHFANRVTCLIGMEACGSSQHWARKLTAMGHHVKLIPAKAVRPFVGGNKNDAHDARAIWIAVQQPTIKAVAVKSEEQQAILALHRMRQQLVKFRTAQINGLRGLLTEYGEVMPKGKKGVEKGITEALQRLSDRLPAMVIDTLREQWRRIGQVEGQIGEIERRLKAWQKEDLACQRIAKIPGVGLLTATAAVATMGDARVFKSGREFAAWLGLVPRQTGTGGRIKLLGISKRGDTYLRTMLIHGARAALTKAKDPLPWAIALRQRRPLNVAIVAMANKMARTIWALLAYGRTYQKEFVSRPV

SEQ ID NO: 463891 - protein, 341 aa, unidentified
MKLIRVGVDLAKNVFQLHGVDRSETTVWRRKLVRGDWINVLLDRIEPGCEIGMEACSGAYHWARLLQAKGYTVKLIAPQFVKPYVKSNKNDANDAEAICEAMSRPSMRFVAVKTVEQQDIQAVHRVRSGLMDQRKAKANQLRGLASEYGLVAPKELLHLRLAIPRWLEDQENGLSERFRWLLHGLWRDLLAFDERIEELDREIAQIARHDPVAIRLQQVRGIGPLTATALLATVGDASQFSNGREMAASFGLTPKQNSSGGKERLLGISKRGDAYLRSLLVHGARAVIRTAQAKTDRLSVWVMRIAMTRHPNIAAVALANKTARVAWAMLTRGTDYQPQAA

SEQ ID NO: 463892 - protein, 414 aa, unidentified
MIVTEEPTAKRVCAGVDWAKDDHAVCVVGPEGEALQRFMIKHDRAGLKDMVRRLLRAGVDEVGLERPDGPIVDALLQAGLTVLVIPPGQVKNLRSRYGSAGNKDDRFDAYVLADVVRTDRRRLRPLELDTAATTALRTTVRARRDMVIHRVATANQLRAHLQIVFPAAAGLFEAIDSDVSLRFLERFNTQGQADWLSVKRLGSWLTSIGYTGGTDPAVIYARITAAPRGTTGPEADILAVSTRSYIAVLRTLNTQIRTLATSIAEQLDVHPDAKIFTSLPLSGSVRAARLLAEIGDSRGRFPTASSLACLAGVAPSTRQSGKVKAVTFRWGANKELRDALCDFAGDSRRANPWAADLYDRARARKCDHPHAVRILARAWANIIWRCWQDNTAYDPAEHGGLQRILNQDQQPAAA

SEQ ID NO: 463893 - protein, 408 aa, unidentified
MNPLFVGIDVSSKNNVAYLMKPDGSKHSSFSVQNNLGGAKLLSERIVSALGSMQLERVVIGLEATSIYGDSLVYALREDGRLGRFQRKIHVLNPKQVRKFKEAYSDLPKNDWVDAFVIADHLRFGRINREVYMDDYRYKALQTLTRARFDVIQNLTREKQPFANYLFLKCSGMAQDKDIQNTSATTIALMEQFETVDDLANANLDELTAFITETGRGKFADPDATAKAVRAAAKGSYRLPKTVNDTVNQAMAVSIASMRALKGQVKVLDKAIEQQFEIIPNTLTSIPGIGKVYSAGIIAEIGDIHRFDSQASVAKYAGLVWNRSQSGDFEAEHSRMIKSGNRYLRYYLLEAANSVRRCDSEFRRYYDLKFKEVNKYQHKRALALTARKLVRLVFRLLKDNRLYIPPEG

SEQ ID NO: 463894 - protein, 345 aa, unidentified
MSKISVVGLDLAKNVFQIHGVDEAEEVVLRKQLKRSQMQPFFAGLSPCLVGMEACGGALYWARVLTELGHTVRLMAPAFVKPYRKSNKNDRNDAEAICEAVQRPNMRFVATKTPEQQSVLHLHHSRQLLVRQRVALSNHLRGILLEYGFSLPQGVKVVSRRLPALLEDGENALPMLTRHLLAALKEQHDQLVERIKFLETQLKAWHGNDELSQRLEAIPGVGVLTATALAAQVGDGQNFRNGRQLAAYLGLVPRQASSGGNDRLLGISKRGDGYLRGLLIHGARAVIHHVRRRLKAGQPSGNPWVEQLLKRCHINEVAVALANKMARTAWVLLARGETYRAASAA

SEQ ID NO: 463895 - protein, 318 aa, unidentified
MMQPILNVGVDVAKDAVVVACAEHSFPVHSVPNHRAPLRAWLKSLPAGSRIGLESTGAYHELLADLAQAHGHTVFLLNPLDTRHYAKAMGTRAKTDRVDAELIARLIAQEHTRLRAYTPPTANQRKLDRLIRRRATIVRLKGTLKLTMRHLGGFAAELKAVMGKLDALIAKIDATMAAIAACSPQHQEAQHRLQTIVGVGPLVGISLTNTLERVPFRKADAFVAFIGLDPRANDSGHKTGRRRLSKRGPAELRRLLFNAAMSAIKTKVWKPIYEAYRTQGWSTTASLVIIARKIARAAWSIHHYRTTFNPERITKCLT

SEQ ID NO: 463896 - protein, 343 aa, unidentified
MYNAVGIDVSKGKSTVAVLQPGGTVIRKTFDVSHTSQNLNELADYLSSLDGTTKIVMECTGRYHEPMVKALSEAGLFISIVNPHLIKNFGNNSLRKVKSDPADARKIARYTLDNWTELRQYSGMDNTRTQLKTLNSQFSFFMKQKVAAKANLIALLDNTYPGVNKLFDSPTREDGSEKWVDYAYSFWHADCVRKIGLKAFTERYMSFCKKHHYIFQQDRPEKLFNASKELVAVFPKEKTYKLLIQQSIQQLNLASEHVERLRREMNELASTLPEYSTVMGIYGVGKTYGPQLIAEIGDVSRFTHREALTAFAGVGPGVDESGQHKSKSNRASKVGSARHCFRS

SEQ ID NO: 463897 - protein, 462 aa, unidentified
MKKQEAEGSTSRRRQLQGLPLIRTDVAGIDIGSERHWVCAPTIDGQGREIASFGATTAELIRLAEWLQARHVKSVAMESTGVYWIAPHEVLEAKGLEMRLVDTRQLARVPGRDKKTDPTDCEWIQRLHSCGLLRGCFRPPEAICKLRTLVRDKGVLVAESGDWLRRMQKSLDQMNVRVHRAVSDINGTTGLAIIRAIASGERDVQKLAELRDPRCHKSVEEIAEQLRGHWREDHVFSLCQALKMYDAIAERITAYEKEIQGKLEAMEQPGQSGQTAPPLSSGNKAKKIKSRGQEDKRQALFRMSGVDVTQIDAVGVETVEVVISEYGCDLSRFPSEDEFASHATLAPHVPKSGGHPIKKKKRRNSASTRVAGALRMAAQSLRQSNTALGAYFRRLAQRKGADIATFATARKISKLIYRLLRWGQPYIDEGASAYEKRHKEQTFKNMASKAKRMGYRLVPADV

SEQ ID NO: 463898 - protein, 341 aa, unidentified
MTKNIYYVGVDIAADKFVVSIYRSPQKPVITKEGFDNTFDGFHMLITWFEKQKINPTNCVTCMEATGVYSEGLAHYLVTQGFNVSVEPPLKVKRAFDPVGHKTDPVDSRQIAEYAYRYSDELRFWQPKDEIIEKIRHLLTAREQFTKQSVALQNSMSAYKKHVVQVNLITNAHAHILKELKKQIVEIDKELEQLIRKNPTISNIKNQLVSLPGFGLLLSSSLIAMTDAFNEITSYKTLAAFIGICPYQHQSGSSVYRPPHIRPFGPAYARKLLMLAARSVVTHNADFKKYYLRKLAEGKAKKLVLNNVANKLIKIACAMLKNNSRYISTYRSVNPICFISA

SEQ ID NO: 463899 - protein, 508 aa, unidentified
MRRAGIDIALTAAHKAAVYDDGERRGRPFSVPQTRAGIDELVRRTTAGEQGACEFVMEPTGLAWLPLAAELSRQGHRVYMPKPQKTHALRKFLAQHAKTDGIDACAAALVRHVDKDTHELQVPTATETTLRLVVKQRARLVVEAAKAKGRIQSYLVLANPHLGKALGRDRTSEVATAFLRRQLDPFEVVARGKAELRRFWQRHARGLSSEAQLEAVWQACVTTHDLYAALCEGKRLPFEYRSLQLLVRQSLEHIEFLEEQLDELDGVVARCYAELDPERFLEREVCGFGPTIAAAVQAFAGDVERFSSVKRYTAFFGITPRTKQTGAAGEKPRQRMTKGGHNLLKQYVFLAAETARRHDPELAATYADAIARGKHHYSAVIIVAHKLVRRVYGLLKARAEARAAGAPAPTYRLQRPDGQPLSKADARSFVAKHYPSKAAKEAARRAAQAAPRSRTLPRDTGSSEDAAKAVAAALPTALVAEPLACEKSEDNSVSNSTNSQANISLDET

SEQ ID NO: 463900 - protein, 429 aa, unidentified
MKNSVANKLKQVPVGYLVIGIDPHKKKHAAVIMTQDFTTHSKFKFNNSKEGFEMALERIRMEMVRTVSRGAIFAIETGGHYWRNLAYFLDERGIPFRFINQFTLKRRREGKDLNRRKNDYRDSEVAAQLLCTGEFTDTKLSYGVYAELRAAHNAYRRLVKERTRIINLVKGLLDGLSPEFTQVFKDPCGLTALSVLSICPVPKGIAAMTEDEFVNTIRTGHRGLLMRKKLRALHYAAQTSIGVKADAQSVSYELSFLVEKLQLIKRHICRIDETLVRLVNETEEGKYLLSIIGLNYISVAGILAELGSFRSYKSAKQLIKMAGSNPTESESAGKRSSHTPMSKKGRPVLRYCAWIAVIPMLRFNPDFHAWAKKLRERPVHANPLSGREIVGAALNRLLRLAFVLVKNQTFYQVPEIESMPEPELLPVAN

SEQ ID NO: 463901 - protein, 347 aa, unidentified
MRIVSHSCAVYGVDLGKTTFHIAGADQHGRPTLRIKLRRDALLQFFATASPALVGMEACPGSHWLARKLIAFGHDVKLIPAQFVKPYLKSNKNDTLDAEAIAEAVTRPTMRFVPVKRHEQLDMQALHRLRAQFVHQRTALVSQFRCFLLEYGIAIHTGIGMFRRDATRILADDSNDLTPTMRQLLTDLWSDFLRIDERVTALSGQIEVSAKHDDVVQRLTTIPGIGPLGASALCAAIGNGKQFRSGGDLAAWIGLVPRQHTTGGKPTLLGISKRGNTYLRRLLVLGAQSCLMHLDCSRDRLGRWLDTLESRMHYNKVVIALANKLARVAWVVLTRPGALYEKMDPRF

SEQ ID NO: 463902 - protein, 355 aa, unidentified
MNEQAIQYVGLDVHQATTVASVRDERGRVVMHATVPTEARALLALIRGLSGRVEVAFEEGTQAQWLHDLLVPHAARVVVCNVRGHGEKANKNDQLDADDLSERLRLGSLKAVWHGSPAVGTLKELVRCYDNLVDDSTRVMLRLKAIYRGRAIGTSGKSVYRPSQRKAWLAKLKTRGARTRAESLLTQLDTLTTLRHAARTAMIAEARRQPGWKILRSMPFFGPVRVAMLLAVIGTPHRFRTRRQLWPYVGLSVVTRTSGEGEFVDGKLQRKQRAPLTRGLNANHNRMLKNVFKGAANAAAAKTGPLKDLFDRCVAGGVRPTMAKLTLARKLAAIVLRLWKKGELWDPEKLTMQPT

SEQ ID NO: 463903 - protein, 329 aa, unidentified
MTNATRNSAPATLGFVGVDVAQQSFAWTLHREGGLHRASNDATGFAVLLEALRGRQVGLIVLEATGGFERALATFLLQHGLPVAVVNPRAAREFARSMGHLAKTDAIDAVALAHLAQTLAAKADQTGVRFVPPRAEVEALQAMVARRAQLMGMRTAEKSRLAGTVRVLHKSIETVIKTLDKAIAKLDRDIDAHLQRHFKEQAPLFSAIKGVGTTTCATVLAFMPELGSISGARAAKLAGLAPLNQDSGKTRGKRHTWGGRSIVRSALYMATLSAVRFNPVINAFYQRLLAAGKPKKVALTACSHKLLRILNAMARSGQPWNEKLHAVTP

SEQ ID NO: 463904 - protein, 481 aa, unidentified
MAADKRNRKQRKELRRQLQSANPGLEVVHPKAAGIDVGNGAHYVAVRPDQDPEPVRRFECFTADLHRLADWLEACEVTTIAMQSTGVYWIPLYEILEERGFEVYLVNARHTKNLPGRKSDVQESQWLLKLHTYGLLNNSFQPAAEIRVARTYWRQRGVHVRGASTCVQRMQKALTQMNVQLANVISDLSGLTGQTIVRAILAGERDSKKLAELSHPQIRASREEIAKSLEGNWRSELLFVLKQEMEMYDTYQRRIAECDQELEAHLKSFADNVPSKLTEEEPPSEQRQGKKVRASETTKLTQRGKKAPGNRPQFDLRSELYRISGVDLTRIDSINVLVAQTVVSEVGLDMSRWNTEAHFASWLGLCPDNRISGDKVLSKGTRHVINRAATALRIAATTLLRSRTYLGAQYRRLRTKLGAPKAITAMAHKLARLVYRMLKYGQEYIDKGMQYYEERNRLQQLEQLKKKAAKLGLQLVEAEPA

SEQ ID NO: 463905 - protein, 430 aa, unidentified
MKSNTQNAKIEAITEKTLVLGIDVGSETHYARAFDYRGIEYSKKPFKFSNTEAGFVTFKEWILDLKDRHEKDKVVPGMEPTGHYWFNLGKFLQDNEMKPVLVNPHHVKKSKELDDNNPTKNDRKDPKVIAGLVREGRYMIPYLPDGVYADLRTASNIRFQLQAELTRIQNRISRWFNIYFPEYKTVYGKPDAKSGMLILKAAPLPEDILTLGIDGVNQIWRDAKLRAVGKARAKTLIEAAEHSVGSKEGAVSARMEIRMLLEDYESRSIRLQEVMTLIEGLVKQIPMAEKLLEIKGVGIRTVSGFLAEVGDISRFNNPKELQKLAGLALVENSSGKHKGKTTISRRGRKRLRYLLFEVAMSLVAKNPEFRELHNYYTTRRLNPLKKMQSLMAIAAKLIRVFYAMLTKGADYDPKKMVSDIKRPAVYLQAA

SEQ ID NO: 463906 - protein, 367 aa, unidentified
MTTAATHNEQRNTTAATLFVAFELSEKTWKLGFTTGHGQKPRERTVTARQQERVLDEIAQAKHRLGLPAAAPVVSCYEAGREGFWLHRFLQGHGITTHVVDSSSIEVNRRRRRAKSDGLDVRKLLSMLMRYEQGERHVWQVVKVPSVEAEDQRHLHRDLETLKQERASTTPRILGLLSSQGLRVTSLTTLPEQLEALRLWDGSPVPPGLRRRVLRVYAHHTFLSEQIAAVEAERRAQLQASTDACIDKVRQLMQLKGIGINGAWLLVMEFFGWRAFKNRREVGGLAGFTPTPYQSGESAREQGITKSGNRHVRWMTTELAWSWLRFQPDSALSCWFRQRFGSGGKRLRRIGIVAVARKLLIALWRFR

SEQ ID NO: 463907 - protein, 423 aa, unidentified
MDAMHERVAGLDVHKETIVACVRIMAGGKATRECRTFDTTTAGLEALLNWLTESGCTQVVMEATGVYWKPVWNILSDGKFELLVANARHIKNVPGRKTDMNDAMWIADLVSFGLIKASFVPEQDMQQLRSLLRTRKQLTREQTRHVQRLQKTLEEANIKLDSVITDIMGLNGRRMIEAMISGIRNPWKLAELADRRIKASRKELYDALHGRLTDHHRFILGLHLRQYDTLEESIAEIDKQVDAAIGQMDTEVAAGQATFRALIALLSTIPGISDLAAKTILAEIGTDMSRFPTAGHLLSWAGMCPGQNESAGKRKSSRLRKGSPWLKTLLVQCAFAATRKKDSYYKAQFNRLRGRHGAKKAVCAVAASMLTAIYHMLKDGTEHQDLGADHFDRRSIEIKAKRLAAQIAKLGYHVELRPLPEAA

SEQ ID NO: 463908 - protein, 353 aa, unidentified
MKKLFIGIDFAKEKFDAAIIEACGLKEFGNREYGTFTNDKKGYRQFFKWVKTNADKSVENEWLFCGEDTGSCSLGLSKWLYGKGLDIWIENAYSIKHSSGIQRVKSDKADSSMIAEYAWRHQDKAVLFEPLSESLSQLREVFLYRHKLVQQHIAMDVRKQDKEAAEPSKAISFIKRKSKHLMSEIDNAIKECDLMIDRIIESDAELKENYAIITSIKGVARQNGACLLIFTNNFRRFDLDARKIACYYGVAPFGKDSGTSIHSPAKTSHFANKLIKSLLGQAAHCAQKFNPEIREYYNRLIGRGKKPQVALNNVKNKLIRIIVALVRKKVYYDPKTYMFYNAKFTDVKKVLNS

SEQ ID NO: 463909 - protein, 419 aa, unidentified
MRNSNTKKLKRISEQTLLVTVDMGKVKHTGYYRFPDGTDGKTFEFCNSRRGFEEMWQQVCRAKRFRNLTEVVVGFESTGPYAEPLLHFLRRHDVRLVQVNPLHTKRLKELQGNSPNKTDQKDPKVIADIIGLGHALTVIIPEGTVAELRRLTQARERSIQRMSVLMSQLQDLIFLIFPEFMPVMKDITIKSTQYLLKNYPRPHDVVETGVELLTQILKKVSRGRLGRERAEELYHAATESVGIVEGQDSIVLEIKEIVSTIEDIERFASKLEKHMSKHLEEVSYSRFILSLKGIGEITAAGLIGEMGDFRKYRTISEVLKHAGLDLFEISSGKHKGNRRISKRGRPLLRKLLFFASINVVRKSGILHRQYQRHLQKGMPKVKALVAISRKLLSIIFALVRDHCIYTVNYSKLKQLKEAA

SEQ ID NO: 463910 - protein, 370 aa, unidentified
MGEITTFVGLDVHKATIAVAVARGGLRDAADFLGTIENTPAALGKLLVKLGRKHDQLSFCYEAGPCGYGVHRQLIQAGHTCSVVAPSLIPRRAGDRVKTDRRDAVSLAQLHRAGELSAIWVPDAAHEAMRDLVRARLVAVHAVRRGRQQLSGFLLRHGRAYDGKKAWTRSYRIWLAGLRFEHAAQQIVLQDYIAVVADSERRRDALGEQIRVLLPEWSMAPVVTALQALRGVALVVAATLVAEIGDLTRFDNPRQLMAHLGLAPSEHSSGATTRRGGITKTGNAAARRAMTEAAWTYRLPARIGRALLDRNDAVDKTVREIAWKAQVRLCARYRRLSAAGKPPQAVVTAIARELLGFAWAIARHVQTVHA

SEQ ID NO: 463911 - protein, 338 aa, unidentified
MQLYAGIDLHSNNSFMVISQADDTVVYQRRLPNDINSIVSELKQYQDQIEGVVVESTYNWYWLVDGLQTAGYKVHLANTTAIKQYSGLKHTNDKKDARWLARLLQLNILPTGYIYPKEERAIRDLLRKRCQLVQQRTLHLLSLKTLVERNTSIQLSGSSIKKLTSQELKDILPEDNIFLAAESNLKIMQYIDKQMMVVEKTVLKQSRPNDVYKRLLTVDGIGKILALTIMLETGDIKRFSKVGNYASYCRCVDSKKISNDKKKGENNRKNGNQYLCWAYVEAANFAIRYNSTIKKYYQRKKEKTKQIIAIKTIAHKLSRACFYIMKDGVDFDVEKSFR

SEQ ID NO: 463912 - protein, 359 aa, unidentified
MKEELSISRVVIGGVDTHKDLHVAAVVDEHDNVIGAESFPTTRVGYRSLLKWMRQHGEVSRIGVECTGSYGAGLLRHLNNADVEVLEVTAPDRSDRRKRGKDDTLDAISAAHAAFARVRTVTPKTRDGMIESLRVLRITRKTAVGARRVALQMIQMQIVCAPEELRDQLRNLTRMQLIRMLAAWRPDTTGFRDPMTANKIAMKHYARRYLELHDEIADLDVMIKAIVDDLAPELVERTGVGYESASQLLITAGDNSERLKSEASFAMLCGTAPLPASSGKTTRHRLNRGGDRAANSALHMIAISRWRVDPATKTYVARKRAEGHSNPEILRCLKRYIAREMFYLIRQRDREVKSLRSVA

SEQ ID NO: 463913 - protein, 338 aa, unidentified
MTIVHVGIDLAKNVFAVHGVDEAGKPALVRPSVARARLRELIAGLPPCTVAMEACSGAHHWARLFAAHGHTMRLIAPKFVTPYRMSGARGKTDAADAAAICEAVQRPNMRFVPVKSEQQQSQLMVHRARQGFVQARTACINRIRGLLAEFGHVLPLKAETVRRQAAGLLEALPGWANTVIGDLLSELHRLDERIAQYDRHVAQIARADERARHLMQLPGIGATTATAIVAMIGNGHKFKCGRQFAAWLGLTPGQYSSGGKTRLGRITKAGDGYLRSLLILGGRSVLALAKGRSDPISSWALALQERRGYWKAVVAIAAKNARLAWAVLRRGEDFKMPA

SEQ ID NO: 463914 - protein, 369 aa, unidentified
MAKSITYVGLDVHKDTIAVALAAAGLRGEVREHGKIPNAPGALRALAVKLAAAGRELRFCYEAGPCGYGVQRQLTEAGHECAVVAPSLIPRKPGERIKTDRRDAINLAKLHRAGELTPVWVPDQAHEAIRDLVRARQAAVRTLRQARQQLSGFLLRHGRHYHRPAWTQLHRRWLASLKFDQAVHHIVLEDGIAAVEAAMARRDRLETHIEAVLPEWSLAPVVEALQALRGVRLVAAATLVAELGDITRFTNPRQLMAYLGWVPSEHSSGRTRHQGGITKAGNGAARRMLIEAAWSYRFPARISRELLLRQERQVKPIRDIAWKAQERLCRRYRKLARAGKQPTVITAAIARELAGFIWAIAKQVPPMAT

SEQ ID NO: 463915 - protein, 418 aa, unidentified
MDHRPGCRKGIDKMEVLHERCCGLDVHKKSITACLLTSKRKEIKTYGTMTDDLLEMADWLVAEGCTHVAMESTGVYWKPVYNLLEGLEMEIILTNARHMKAVPGRKTDVKDAEWIADLLRHGLLRGSYVPNRESRELREVVRYRQKLVRERAAESNRIQKVLEGANIKLGSVATDILGKSGREMSGSIIKGTDDPAELAGMARGKMKSKREELEKALKGLIGEHQRKLLSVQMKHVEFLDEQIAGLSEEIKERMRPFEKALVAIDEIPGIGIRTAEQIIAEIGVDMSRFPTAEHLASWAGLCPGNDESAGKRKSGKTNKGNMHLKATLVECAQAIGHTKGTYLAAHYNRIAARRGSKRAKVAVAHTVLVIIYHMLKEGTAYQDLGGNYFEKRNETAIVRRMTRRLESMGFNVTIEKAA

SEQ ID NO: 463916 - protein, 391 aa, unidentified
MILVGIDVAKDKHDCFITNSDGEVIFDPFTITNNKAGFNDLLKKIQSVSKDLSKVKVGLEATGHYSYNILGFVLDKGFPTYVINPLHTNLFRKGQSLRKTKTDRIDARTIANMLLWDQSLQPYSLESYHNEELKSLTRYRFSKVQERSKLKTSVARLVNILFPELEPLVPTLFTASSLSLLSELPGASYVADCHLTRLTHLLQEASKGHYGREKAIEIRDAAKNSIGSVMPAKSLELKHTIALIRILDDEIREIESEIKTLMDKTNSTITSIPGINYRIGSMILAEIGDFKKFKSPDQILAYAGLSPSTYQSGQLTSSYAHMEKRGSKYLRYALFNAAIYVCHWDPVFKAYLDKKQKEGKHYYVAISHAAKKLVRLIYAMEISGRPYFKVA

SEQ ID NO: 463917 - protein, 345 aa, unidentified
MNATTVAVDLAKNVFEVAAADGNWRVIERARLTRAQFERWFANREVARVVMEACGSAHHWARVLRARGIEVRLLPAQYVKAYVKRNKTDAADAVALLEASRAADIKPVAVKSVEQQALQALHRTRSAWMGSRTGRINMLRGFCREFGLEVAVGAVRGLAQMARFIADEHSGIPAMLRTPMRLVLEEIRLMEARIETLEREFAAIARESPACHALASVPGIGLLTSTAMVAAVGDPKSFASGRRYSSFFGLTPREFSSGEHRYLGRISKRGNRYIRMLLTHGARSVLRAATVARRLGRPVDRLRSWALAVQERTNHNKATCALANKLARIAWAVWVKHEKYQSAAA

SEQ ID NO: 463918 - protein, 340 aa, unidentified
MKKQIFKQSVGIDISKDSFNTCFSQQEAGQPFRVLSSKKFDSNAKGFRQMHQWIQKYRCESVELHLLMEATGVYYEELAYFLHKNNYRLTVILPNKTHAFAKSLDYKSKTDKIDAKMLAQLSLERNLRQWEPPSDTMLVLKRLCRERAELKVASGEFKNRLHAKNHSYAPHTTGTTRTKATIKHFEKQVKEIEALIRQTVAKDPEVARKVDQVCTIPGVGFITAVTVIAETNGFELFKNKAQLVSYAGLDVVHFESGSSVHAPGRISKRGNSTLRRSMFFPAITAVKHNPKMADIYNKLLERTQIKMKAYVAVQRKILVLIYTLYKNDSIFDANFISQKN

SEQ ID NO: 463919 - protein, 392 aa, unidentified
MIYVGIDVASQKHDCFLLKDTGEVFSKTSFTIKNDFEGYKKLHNSIQQFVESTKDSNVRIGLESTGHYSKNILLYLIKQGYQTTLINPILTNMDRKASTVRKTKTDKIDAETICKFLDKNRFDFKPYTLLSYHIDALKSLTRQRFSLVKQMTQQKLIFQRLVNVIFPELLSHFSNDYGESVLNILYSYPTSKKLAKAHKESITKLLHSRCKITSSEILELAKNSIGQSEEYLGFELKHTIDMILFYQSQIEIYNKQIEIELNETEYGKIITSIPGVGIITGAMIISEIGDINNFTTSDQLLAYAGLDPSVYESGKFESSHNKPSKRGSKYLRWAIHQASSVIWQHDNTFKDYYLKKIKEGKHHYVAIGHIDKKLIRVIFSLLKNKSMFIPQK

SEQ ID NO: 463920 - protein, 391 aa, unidentified
MTRISVGVDVSKNRSTVCIMDQDGKFIMRPFLVWHSTEELDFLADTLKRLNGEVRVIMESTSIYQYPIALHLKEKGIFISIVNAYEMKQFANIDFRGGKTDKKDSRTIASYGISYWYKLVEWQIPKDTYFNLDLLNRTYMNAKKHRQIILQELQHYIDCAMPGMDKELHSLNLSTKKDFMLDFVEKFWHRDEIVNKTETEFTEVFTAWAKKKGYRPVEGKAAKIYAIAKSCIPYYPANPTVKTILQCIVDKLSGVNRTLVTIVTQMIEEAKKLPEYQIVREMPGVGDPLAARFFGSVGDIRRFKNSKALVAYAGIDSPPDESGDFSSTHRHITKKGSKVFRDTGYEIMMALRAQKRTWEKVRKNPEVYDYMLKKEAEGKPPPKLNELARFN

SEQ ID NO: 463921 - protein, 353 aa, unidentified
MEQFIGCDAHKKFSVFVAVNEKGQAGEALRVAHDRELYREFLARLPAHSAIALEASGSYSWLVDEMERSGHHPKLCNPLEAKRRMALTKKTDKLDARGLAILLRNGTLPEVWIPPSELRDQRELLRLRIFLVRLRTRVKNRIHGTLSRHNVQVPGADLFGVAARLELGTRLPELPAHSREAVEQELATLDFLETQIESAEQRLEAIMKVSVEADLLKTLPCVGKILSMVLMLEIGRVDRFPTAAHLASYAGLVPRVHSSGGHTRMGQVCGNVNRNLKWALVETGNLIVINQRRLAGAHVVRLYQRIKRAKNHQKAVVAVARHLAEAAWWVLTKQEVYREPQGSRQQALSSTHG

SEQ ID NO: 463922 - protein, 403 aa, unidentified
MELLIGIDWSQDHHDVRVLNEAGASLLRFQITHSPEGLAKFEEHVAKLNVSPTDCLVALETAHNLIVDFLWSRQYQVYVIAPSIVNASRGRYTSSGASNDDKSALLLADLLRTDRQRFAPWKPDGLLVTQMRAKLSLVDALTQSITRYSNRLHAVLQRYYPQVLGLFCNLQTQIGLQFLIAYPTPDHARALSYSQLAHFCHSHSYTQPARLPELYAHLHRPALAPDPTIVLAYRDETIFLAQLLLNLVQHKGQTMREVQDLFALHPDAPIFASLPGAGELLEPKLLVMFGDQRDRFPSPAAIQQLAGTCPVTDQSGKKRRVYFRKACNHDYRNTAQQFAKESILQSEWAATYFGDALGRGMSKSHAYRCLANRWLAIIWHLWQTRQLYDEAYHLQQINQHRKR

SEQ ID NO: 463923 - protein, 342 aa, unidentified
MAIIGAFDVHRRQVTYDVLDTVSGQVRRGQVRPACRATLRQFLARYAGETDVSFAVEGCTGWRFIVEELERAGFAVHLADPAATAAARGRKRRAKTDRTDTRQLGQQLVEGRLPESWIPPTLIREVRAKLECYHDLREEHTAWVQRIHATLFHHGVPVIEGALSTVAGRARLEAGEGLSPAARQTMGVALRVADGLQTELDALYRELSRFARRQPGCRALAAQYGVGPITAVAIWAFMGDTRRFSSSAQAVRHTGLDVTVYSSDGKRSPGHLSRQGPPVLRWALYEAACSAARATSPDLDYYHDTKERIDHKRAAISVARKIARRSHHILRNLGDTAWQDAA

SEQ ID NO: 463924 - protein, 326 aa, unidentified
MARVTWIGVDLAKASFVAARRQQGKCITEEFANDSAGLALFGAWLPRRSRVCVVFEPTGPYGRQLEAWLGLRGPRMSYVLANPRRVRNFARAAACASKTDVIDARRLLEFAEAFQPAAHPRPTPITLELRALWRHQLELRKLLDGLRDRRQKAQVDPHIPATLVEGLGKLADQLAAELAKIQAQALALVQTDRSLRPRFDLLVSIPGVGRLTALALLAEYGPQLAHASPRQLTRYAGLDPVLRQSGSSVRGKTRISKQGSSRLRKALYMAALVGVRWNPVLRRFYERRLHKGLTPKPALVAAMRKLLHICYGVLKNDQPFVAVATP

SEQ ID NO: 463925 - protein, 415 aa, unidentified
MSENIITAVGIDVSKGKSMVAVRQPGGKILLGPFQVEHNALGLKQLTETLKCIDGEIRIVMEHTGMYWRPVALTLKEAGLFVSVVNAILIRKFSDNSLRKVKTDKADSLKIANYALAFWNELEEYSLEEENRQMLKVQSRLYERTIKGSVALRNGLISLVDQVFPGANDFFSGSPKESNGHFKWVDFIRHFWHKDCVTRLSLNGFAEKYRKWCNREGYRFISSDVARIYKAALESTATFPKSDSTKILIRQAADSLNAVYDTLHILRAEMLRLARLLPEFDVVLSMYGVGNITGSQLMAEIGDVRRFHSKSALVAFAGIDAPPFQSGNFEGSNCHISKRGSPHLRRTLFQISSTILKKSNPDSSIYQFMDKKRAEGKHFYVYMVAGAAKFLRIYYARVTGYLDAIEATENNNLTG

SEQ ID NO: 463926 - protein, 320 aa, unidentified
MMAQNDRVVVGIDVAKDKVDACIRSLSQRRTFPSTAEGRRQLISWLRKHKATKAVMEASGGYEREWAKALREKDVEVRIVDPKRVRHFARSAGRLAKNDDIDSDTIAWFAETFGEAKGQAYDAARETLVQTVNARQGLLELQTSLQNRGEHAAPEPVQKMQGRLLKKIVLEVARLEAAIAVMIKATPHFAELAEIIESVPGLAEITSAGLIAAMPELGQVSNKVAPALLGAAPYDDDSGRRRGERHIKGGRRKVRNLFYMACLGAATRHNPVLKAFYQRLIAKGKPPKVALVACMRKLIVILNTMIARGEKWDATRYVLS

SEQ ID NO: 463927 - protein, 497 aa, unidentified
MPTKANIYSDCNPQVLKLFEQAGHPARVLCVALDYAKTQHMALVCNGLGDLLKGAFAVDNTPAGATQLLQQVRQCAKQRRIPTQQVFFGGEDYPTFAENFLRHLRKEKFLVVRVNAWEAKQQRSNFQASSDELDLLGIARCCLNRRGQSVQDLPVAYANLRIATRDRNELVRLATATSNRIHTYVDRLFPGFLSADKSGLAPFCQASLDLMAERFSPAEVRRRPRGALGQWLARRAVEEPHAVAAQLKELARGALGPAPEQTALLQRTLAQLVGLYRGLEGSISGLDRELAYWLARTPGALLTSISGIGITLAAGWMAELGPPQQWRAVRRICSYAGVVTKTKQTGGPEKEPMPSYVQQRCNKRLKNVVLQAVEKVRQYGPEDLRRSAEELEANGSHTEFGMAKRLVRLAKYLVVTGTIYRPKTLLDPDTPKEKLVLYYQTAWDKFLLKWKGKSDLKDVFAPGHPLGQWRQMVKELYALELRLPQQRAAPTPGASAP

SEQ ID NO: 463928 - protein, 429 aa, unidentified
MDGVDGIRLERFRQLRKDIRGSKKHLIVGIDIAKEKHYAFFGTANGKTLLKRLVFENDLDGFKKLMTHVRAVKVQNDLDKVVFGFEPTGNYHKPLAEHLIKCAQEVVLVAGTAVKKNRELLDGRWDKHDTKDSANVADLISQGKCLFYEYPIMALRELRSLLSLKRRLKKLEHGTKVRIRNNLLAQYFPELDRYFGNMSKCSLGVVKWCLEPAVIVGLEYEEFLRRVAPGKLTLKQREHVKRIWETAVYSVGCDAGESMQFEAKMMVEELQHLRDRISEVEKRIEDICLQFPEYNYLLTIPGFGKDISSKVLGAIGNPFRFDSAKQVLKLAGWDLSANRSGKNSARAVPVISKKGKADLRYGLYQAARVASCKNQYFIKYYTDKLSQRVREKGIKTKMRVKLAAKLLVIAWTLMKKQEAFDPAYLELST

SEQ ID NO: 463929 - protein, 337 aa, unidentified
MNVSLLAIDLAKSTFQVCGVNRQGKELFNRAINRKKLTALIAQYPGTPVAMEACGGSNYWGRTFQKNGHEVLLIPPPHVKPFVKGNKNDRNDAFAISEAARRPKMRIVAPRSLEQTDMILLHRIRERRVRARTALMNQMRGLLSEYGIVLPAGAATLRKALPLLLEDAENGLTMAARRYMQDLLNEWRDLDERIQADKHSIHVIAREAPAACRLVNVRGVGDRIATAALAKLGRGDQFKNGRQFSACLGLVPREHSSGGVQKLGGISKRGDDYLRRMLIQGAWSVLRYAEGRQDRLSRWALEVKERRGKHKSVVAVANKLARIIWSLVRHETTYCPA

SEQ ID NO: 463930 - protein, 310 aa, unidentified
MDTIAVGIDVSKDRLDVAVRPSGETFAVERNGSGLDRLVGRLRELSPQIVALEATGGFETVAAAALGGAGLPVVIVNPAQIRAFAKAIGQRAKTDPIDAAVIAHFAEATKPQVRPLPDEASRLLADLVARRRQIVEMIGAERQREKRMILPRLKKSIARLVKALEKELTSVNTDIDDAVRGSPAWCEKEDLLASVPGVGPIIARTLIAELPELGQLNRKEIAALAGLAPFTRQSGQWRGRSFIGGGRKAVRTALFMGAMVAKQHNPVLKAFFDRLVAAGKPKMVALIAVARKLLTILNAILRDSRSWQNA

SEQ ID NO: 463931 - protein, 401 aa, unidentified
MQDTQQHGAVDVFIGVDVGKGQHHAVALDRNGKRLYNKALPNDEVKLRALIAELRTHGRLLFVVDQPSTIGALPVAVARAEGVLVAYLPGLAMRRIADLHAGEAKTDARDAAIIAEAARSMPHTLRSLRLADEQLAELTMLCGFDDDLAAQVTQTSNRIRGLLTQIHPALERVLGPRLDHPAVLDLLERYPSPAALAGTSEKTLANPLTKLAPRMGKGLAAEIVQALSEQAVTVPGTQAATIVMPRLAQQLAALRKQRDEIAAEVERLVLAHPLWPVLTSMPGVGVRTAARLLTEVAHKAFASAAHLAAYAGLAPVTRRSGSSIRGEHPSRRGNKVLKRALFLSAFAALRDPVSRAYYSRKIQQGKRHNQALIALARRRCDVLFAMLRDGTIYQPKSAPNA

SEQ ID NO: 463932 - protein, 379 aa, unidentified
MNNYSKYVGLDVHKVTVVVAIAKAGRGEAMHYGEIDNTAEAIKKLAKKMSAQGERVLYCYEAGPCGYGIHWQLKEMGYECMVVAPSLIPKKAGNRIKTDRRDAVTLARLLRAGELTAVWVPDKEQEAVRDLTRAREDMKAIERRAKQRLGAFLLRHGKTYCGKRTWTQAHFRWLEGLRFEHTSQQIVFQEYVDMVKHTQKRIEEFEQQMIATLETWSMKEVVISLMALRGVQLVTAMTVVAELGDISRFESAGQLMAYLGLVPSEHSTGQTKKRGGITKTGNGHVRRVLVEAGWTYRFPARKTTTLQRRAEKTSEEVQEIAWKAQKRLCMRYQHLVLKGKLKVEVCTAIARELAGFIWAIACEVMRTRSNKTAITAKAA

SEQ ID NO: 463933 - protein, 464 aa, unidentified
MTKQAKTGTKKTAATTLTSLSTVQPLVAGIDIGSSEHWVCGPARGSDGKPVIRKFGTTTADLQELAEWLIAQGTKSAAMESTSVYWIPLYELLESRGIEPVLVNARQLHNVPGRKTDVSDCQWLQVLHSCGLLRGSFRPSEAISRLRALQRQMANLVAERSRCVQWMQKSLDQMNVQVHRAVTDLTGKTGMAIVRAIVAGERDPARLAMYRDGRCRKSSDEIAKYLTGHWREDHLFNLASALRLHDVLETELTAYDARLMQEIQTLQPPERQDQPVPPHPNRGKETAIKARGEQPSRTTLWRFAGVDLTRIDGISAGAAQIVLTEVGSSVASFPSEDHFASWLRLCPRTPISGGKPLKKRRNGLGANRIAGALRMSAASLQRSKTALGAAFRRIARHKGGAVAVFAIARKLSLLIYRMLRYGQDYVDIGEKAYDAQFEARRLASLKESARSLGYTLVEEPLAQG

SEQ ID NO: 463934 - protein, 429 aa, unidentified
MTRISVGVDVSKNRSTVCIMDQDGKFIMRPFLVWHSTEELDFLADTLKRLNGEVRVIMESTSIYQYPIALHLKEKGIFISIVNAYKVKKFANTDFIGGKTDKKDSRTIASYGISYWDKLVEWQIPKDTYFNLDLLNRTYMNAKKHRQIILQELQHYIDCAMPGMDKELHSLNLSTKKDFMLDFVEKFWHRDEIVNMTEAEFTEVFTAWAKEKGYRPGKGKAAKIYAIAKSCIPYYPANPTVKTILQCIVDKLSGVNRTLVTIVTQMIEEAKKLPEYQIVREMPGVGDPLAARFFGSAGDIRRFKNSKALVAYAGIDSPPDESGDFSSTHRHITKKGSKVFRDTGYEIMMALRAQKRTWEKVRKNPEFYDYMLKKEAEGKPRKVAKIAALNKFLRIVYARIKELYDNMALAERAKAKTKSKTKAKTKATA

SEQ ID NO: 463935 - protein, 423 aa, unidentified
MERYDDSRLHEFRQLKDHIRGSKDYLVVGIDMAKDRHNAFFGMPTGRSLLRRLAFDNNKAGFEKLLFHADMILRQNTLKKTVYGMEPTADYHKPLAEYLISRGHTVVLVAGAAVRNNRELLDGRWDKNDTKDAANIADLICQGKCLFYDHPSPLIRQIRSLLSLKRKLKKQEQSYAVRIRNHLVAQYFPELDPYFSYSEGPAIVRWCLDPRELHALSFEEFSRMVLSRNGGVRQRERLEEIRRKAAASIGCAVLPSVSYEAGVLVNALRQVREMIGETDGKIASVCSSFPEYPCLMSIPGFGPDISAKVLGALGDPDRFENHRQVLKLAGLDLSGDRSGKRSDVPVVISKRGKADLRYGLYQAALVASTKDRSFIRYFTDRMAGRERERGIGTKIRVKMAAKMLVIAWTLMKRKEMFRAEHIG

SEQ ID NO: 463936 - protein, 356 aa, unidentified
MTKILAIDLGKFKSVTCLLETETNETEFWTLTTDQPYLEAVLKNYEPDLVVMEACGLAGWVHDVCTAAGYKVLVCNPAQEAWKWKNVKRKTDRDDALKLAKLAALDQLVPVYIPCQQQREYRRLVKYRKVVVSRVNRVQNNIRSIFAQRGMAMERGQKAWALERLDQIAQHRKLLSECSVDELWRGELDLELAELLRLREHQHELHKKLKALAAKDERVQLLQTIPGVGRKTAEVVVAFIDDPHRFKNARQISSYSGLVPKRYQSGEMDRSGRVHKRGPRLLRAALVEAAWMMLRYNPWARSVYDRLCSKQKTRKKKAIVAVARKLLVRCWIMLLRKEPWNKEAGLPKPAAVALVP

SEQ ID NO: 463937 - protein, 362 aa, unidentified
MSYRIAGVDVHKKMLAVVVSNVEIESEFQFERRVFGSNPEQLRSLAAWLVEQEAEEVVMESTAQYWKPVWGALERYWKPICEKREGARRKSGTLHLAQALSNRGRRGRKRDFVDAERLVKRLVARELVLSFVPDAEQRLWRTVTRKKYQLRCDRVRLQNQVESLLEEAHIKLSSLVADLLGVSARRMLKALADGETNPAALAALADERLRATPEQLCDALGACRELNPVYRQLLKMALEELRLIDEQIGQLDQQMASLLSQHQDAVERLAEVPGLGVDSAQQITAEVGPTAATFPSEKCLSSWVGACPGDDESAGVNYSHRSPKGNRHMRRLLNQAANAAARTKGSIFEIVYRRSVPRLGHN

SEQ ID NO: 463938 - protein, 387 aa, unidentified
MSHIDDLSRSRTAFDQDSTLIAVIEMGLKSWLIAGIVPGVGRGPLKKLEADEAGVVRQLHRWRDEATKAGRKIKRLVVAFEAGRDGVWLARWLRSRGIEAYVIHAASVAVPREHKRAKTDRLDTELLKRAFLGWVRGEPEHCQMVAVPTLAEEDARRPNRERECLVRERTRIINRMKGALARLGIRGFNPKLRKAAERLDDLTMPEGERLPPNTLVELRRELARLALLREQIKAIEVTRLQRLERQTRSRGPHAMVRLLARIIGVGIETADMLVHEILMRKLRDQRAVARYAGLTGSPDESGRRRREKGLARAGNSRVRRGMIQLAWRFLRFQGDSSLAKWYEARTKTAPNTRKTMIVALARKLLIALWRFVTRGVIPDGVALHPAA

SEQ ID NO: 463939 - protein, 374 aa, unidentified
MNEFSKYVGLDVHKATIAVSIANGAGGEPYFHSEISNTSVAIAKLMTQLAKGGAKLSVCYEAGCCGYVIYRQLTKLGHFCQVIAPSLIPKKTGDRVKTDRRDSLSLARLLRAGEISGIWVPDGMQEALRDLTRAREDMKDLQRQSKQQLLGFLLRHGVDGFTGKTNWTQAHFRWFETVKFDQPAQQLVFQEYVDVIKAGTKRVQGLDEHIERTAQASKVWPIIEALMALRGISLLAAAIIMAEIGDLSRFAGAPQLMAYLGLVPSESSSGANRRRGGITKTGNAHVRRVLVEAAWTYRHPARKTRTLQRRAEKTSDAVQEIAWKAQQRLCSRYWTLDARGKLKVQACTAVARELAGFIWAIGQAVPSPAHSLSA

SEQ ID NO: 463940 - protein, 348 aa, unidentified
MLHAGLDLSRRRLDYCLVDEGGVVVETGASAPDADALAGLVGLIELRHGPVAVCAVIESMNGARFVHDVLERCGWVVQIADAQKVKGLAPLACKTDRIDARVLAELSRRDLVPAIWLPSFAQRQERERARWRLHLVKHRSALKQRVHSELMAHGHGCPVSDLFGVRGRELLERLEFPEPWRTSVLCAVELIDELESEVDGIERELRALGADHPYVPLLMTVPGVGWVLAYTIAAEIGDITRFATPTKLCGYSGLCPRVYQSGESDRRGPLAKHGPRYLRWALMVAATNAAKHPLYRDRYQHTKQRLGRQRGAKVAQIQLARTLTEAIWQMLTRNQSFAPAGAAFPLAA

SEQ ID NO: 463941 - protein, 341 aa, unidentified
MNDTIYDHYIAIDWADKNMAIARMTKKSNKISVIDVPSDLEELKFYLKQLKGSKVLTIEETTTSQWLYTELKSHVDKLIVCDPHRNKLLNEGPKNDKIDASKLVQLLKAELLKEVYHSNDEFIQLRRLVSGYDDLVKSGVRLKNQRSSLLRACGQKKSKQEIEKLGSRNEDYVLASLNRQISAYEEEKAGYEKEFKHLAQKHPAIRHQKSIPGIGPINAIKIVAQVVSPYRFVKTGHYWSYTGLIKHEKISGQKSYGKRTPRYCRRLKEVYKTSVKAAIGGNNPINDYYQHLLKEKGLPEYKARHKACRRLATLSLGVFKSGQQYQPYKRDTATKTKQSGL

SEQ ID NO: 463942 - protein, 398 aa, unidentified
MKGQDIMIYVGIDVASQKHDCFLLKDTGEVFSKTSFTIKNDFEGYKKLHNSILQFVESTKDSNVRIGLESTGHYSKNILLYLIKQGYQTTLINPILTNMDRKASTVRKTKTDKIDAEAICKFLDKNRFDFKPYTLLSYHIDALKSLTRQRFSLVKQMTQQKLIFQRLVNVIFPELLSHFSNDYGESVPNILYSYPTPKKLAKAHKESITKLLHSRCKITSSEILELAKNSIGQSEEYLGFELKHTIDMILFYQSQIEIYNKQIEIELNETEYGKIITSIPGVGIITGAMIISEIGDINNFTTSDQLLAYAGLDPSVYESGKFESSHNKPSKRGSKYLRWAIHQASSVIWQHDNTFKDYYLKKIKESKHHYVAIGHIDKKLIRVIFSLLKNKSMFIPQK

SEQ ID NO: 463943 - protein, 399 aa, unidentified
MAASRRVVIGADTHLETNHLAVITDAGQPLADAEFPTCPAGYDAAVKWAQSFGSIVIAGVEGTSSYGAGLTGVLQAAGIEVAEVSRPDRAARRRKGKSDPLDAYAAARAALAGDGLAVPKDEHTTALRALLTARRGAVKACSAATNQIHALLVTAPAELRERYRRHSIAALVKVLARCRPATHSDPTTVAVLMAAKALAQRIEFLERQKHDLTAQLDVLVQQINPALRATYGVGPDTAAQLLVTAGTNPHRLRSEASFAALCGAAPVPASSGKITRHRLSRGGDRSANNALYRIALVRMSAHPQTRDYVERQAANGRTKKEILRLLKRAIAREVFRLLTRPYLIDDYTDLRPARQAKNITLATVATHFGVPIITVSRHERGHQRNDTLANNYRQWLTAA

SEQ ID NO: 463944 - protein, 409 aa, unidentified
MEKLIERCGGLDVHKATVAACVRIPGPKGKREQHVRIFGTTAAELLALRDWLLAYGITHVAMESTGVYWKPVFYVLEEAFTCLVVNAAHIKQVPGRKTDVQDCAWIAQLLEHGLLRGSFVPPAPIRELRDLTRYRKVLVQERTRAANRLHKVLQDAGIKLASVATDILGVSGRAMLGALVAGTSDPNALADLARGSLRKKLPALREALVGRFRPHHAFLVAQLLAHVDYLEEAMATLSARIEQLMAPFAEEQARLETIHGIKRRTSEVVIAEIGVDMSVFPSARHLTSWAGICPGNNESAGKHKSGKTRKGNRWLRAALTEATLSGVQANNSAFGARYRRILRHRGHKKAVVAVAHAMLRTIYHVLANCRTYQNPGADYFDRRHAQRVTRRAIHTLERLGYRVTLEPAA

SEQ ID NO: 463945 - protein, 410 aa, unidentified
MQTLVERGCGLDVHQATVVACLLIVLKNGQVQKQVRTFGTTTRELMGLREWLLSGGCTHVAMESTGVYWKPIYAILEGAFEIVVANAQHVKKVPGRKTDVKDAEWIADLLCHGLLRPSFVPPSPIRELRDLTRYRRKLVESRTAERNRLLKLLETANIKLASVATDVFGVSGLLMLHALVEGKATAQEMAELAKKQLRKKIPELELALEGKVEEHHRFLLRVQLRRLRTVEEDLGILEQRIQEKLKPYAAQFTLLQEIPGIDETLAAAIIAELGVDMGVFESVSQLSSWAGVCPGNNESAGKRRSSRIPKGNVYLKTALVEAANSAAKAKGTYLRDKFYRLKARRGYKRAAVAVGHKILVAIYHMLSHQVCYNELGDVYLDNLNKHHVTRNLVNRLERLGYAVTLQQKAA

SEQ ID NO: 463946 - protein, 339 aa, unidentified
MELYSGIDLHSNNSHVAIIDDQQNRVFYRKLANDPEIIANAFAPYRERLKGVVIESTFNWYWLADLLIERGYSVHLANPCGIQKYSGLKHADDRHDAFWLAQMLALNILPEGYIYPKEDRPLRDLLRKRAHLVRVRTSLILSLQNIVLRNHGIKIRSSDLKKLTQDPVAEILKDQEELALAGKASKESIDFLTRQIQRIEKVAQNKAILKEPFSKLLTLPGVGEILGMTILLETGPIERFKQVGHYASYCRKVPSRWTSNEKVKGKGNTKNGNPYLSWAFSEASDHARQTHGLSRDFYNRKLNKTNASVAHNALAHKLSRAAYFIIRDHVEFEEAKMFR

SEQ ID NO: 463947 - protein, 342 aa, unidentified
MTEVSTIGFDLAKRVFQVHGVDGDGAVTIRRQLRRSEVVTFFAKLSPCVVGMEACASAHYWARTLAKLGHEVRLIPPSRVKPYVKRGRKNDAADAAAIAEAVTRPHMEFVPVKSEEAQAVLMLHRTRRLLVTQRTMLGNALRSHFAEYGIIEPEGQGGLARLVVCALDAPDAALPQAAREAMAMLAAHVREIDSKIDALDHEILRWHRNDADSQRVASIPGIGPLIASAIVAAMGDPKRFKTGRDFAAWLGLVPSQNSTGGKTVLGPITKAGDRYLRSLLVVGATGTLWRRRKEQGTWLAGMMARGKTARQISVALANKMARTAWAILAKGGLYHEPAAQAA

SEQ ID NO: 463948 - protein, 376 aa, unidentified
MERGSLMLNTTTFVGLDVHARSIKAVALDAMTGEVRCAAFGYDAVAVADWVKSIDPKAKCVYESGVTGFDLQKKLAALGVDCIVGAVSKMIKPAADRKRKNDRNDAEFLARMLSVGNVVEVWVPDDGCEAARDLSRALDDAREDLKRCKQRLSKFLLRHGYVFSETTPTGRRKGSWTAAHWAWIKSISFPEKADNDVLAYYVDAVRQAMEDKARLERLVEAEASKPRWKRRIDSIRCLKGIDVTSAADLVFEAGEFSRFKNARSFAAWLGLTPSEHSSGESVRQGGITKAGNKHLRRVLVESAWHYLGCSPHSKDLAKGQVPDPAARRHAAKGVRRLVERRRAMLERGVHKNKANVATARELACWCWAVGRMIENG

SEQ ID NO: 463949 - protein, 414 aa, unidentified
MSYKIAGIDVHKKVLMVVVMDASTPESKPERRRFTTMPSDLRRLLLWLREQGVEEAVMESTAQYWRSVWLELEPYMRLQLAQAFSNRAPRGRKHDFKDAERLVRRLIADELILSFVPHGEQRTWRNLTRMKLQLTRDQVRLQSQMECLLEEMRIKLSVVVSDLLGASGLRILRALAQGETDPKKLALLGDDRLKCTEEQLIDALTGRPQPMHREMLALQLERLQLMDEQIAKLNGLIAQAMKPHQDAVIRLAEVPGLGVDSAQQVIAEVGVQASTFPSAAEFTSWVGTCPGKDESAEENHSSRSAKGNKYLRRVLNQAAHAAVKKNGSHFQTVFRRLLPRLGYQSAIWAIAHRLCRVVWKILHEGVRFIEQGTEPDPKAKKQRARMLARALRKLGYDVAITPMNPATAENGMQI

SEQ ID NO: 463950 - protein, 464 aa, unidentified
MNKRKRSSEKKVVPAALPVIRPKVAGIDIGSREHWVCGPARVDGEPNVKVFRSTTAQLRELVDWLVEQGVESVAMESTSVYWIPLYEMLESRGIEAVLVNARQLHNVPGRKTDFHDCQWIQLLHSCGLLRGSFRPGDAIVALRATQRQMSNLVEERTRYVQWMQKAFDQMNVQVHRAVADLTGTTGLAIVRAIVAGERDPVRLAQHRDPRCHKSIDEIAQYLTGNWREEHLFNLASSLRLFDAVEEQIASYQKRLLHVIDSLQHAGRQNGSVPPHHNPAKEKDLRSHGEQQLRTALWRFSGVDLTRIDGIGVGAANTILTEVGQDVSDFPNESHFVSWLRLCPRTPISGGKPLAKKRNGLGANRVATALRMAASALRRSKTALGAAYRRIARHKGAAVAVFAMARKLAQLVFRMLRYGADYVDTGEKAYELQFEKRRLAGISEAARSLGFALVPTQPTPATAPG

SEQ ID NO: 463951 - protein, 370 aa, unidentified
MKQNSIRHPSRKPSTACPEGPITIGMDLGDKSSRYCVLGEKGEVVREGSVGTSKKAMRQEFSEMRRCRIAMEVGTHSPWVSRLLASLEYEVIVANAREVRAISDSSRKNDKLDARLLARLARVDPELLRPIQHRSEEAQTDLMTIRIRAALVEARTALINAARGFAKALGERLPACDTDNMGVEKLEALPDPIKERLKPLLEQVETLTEKIHQLDSTLEQIARTKYPETELLRQVSGVGTLIALTFVLTVDRERFHKSREVGCYVGLRPKQSESGQSQPQLRISKEGDVYLRQLLVQGAHCIVSRRGPDTDLKRWGLKLSERGGKNAKKRAIVAVARKLAVLLHRLWVGGEVYEPLRNSHLARSSKKAAA

SEQ ID NO: 463952 - protein, 384 aa, unidentified
MTTTTHVPESTASAIPPPTIHLLVAFELGERTWKLGFTTGLGQRPRVRQVPAGATHRVLEELGRAKRRLKLAEETLVVSCYEAGRDGFWLHRFLLAQGVVNYVVDSSSIEVNRRARRAKTDKLDLAGLLSLLARYQLGDRRVWRVVRVPSVADEDARQLHRTWESVQQDRSRLLCRLRGLLVTQGVRLPVTARFLEELASVRLWDGSTLPPGLVARVERVWVQLTLVDEQLAELATTRAALVSDGRTATGRYAARLPTLRGIGPIGGWVLATEIFGWRQITNRRQLGALVGVVPAPYQSGEANHDQGITRAGNRHVRRLMVQLAWSWVRYQPESALTRWYQRRFGGGSRRLRRIGIVALARKLLIALWRYVEHGEIPEGAAVKA

SEQ ID NO: 463953 - protein, 342 aa, unidentified
MEITTVGLDLAKNVFQVHAVDAAGQVAVRRTLRRAQIVPFFAKLPRCLVGMEACGTSHYWARELIRLGHDVRLMPPAYVKPYVKRGKTDANDAAAICEAVTRPSMRFVPVKSTEQQAALALHRTRDLLVKQRTQLVNMIRGLLAEFGIEMARGLRHALELAARLSAGEAAEVPPLAQRVVTGLADQIGALQVQLTRLEKELLAWHRSNDLSQRLATIPGVGIVSATALAASVSEPERFRSGRQFAASLGLTPLQNCSGGKERLGRISRMGDRYLRRLLVVGMTSLIRRAKTSPASVDPRLPALLQRKPARVVTVAAANRTARVAWAIMTRGGTYRAPAAAVA

SEQ ID NO: 463954 - protein, 394 aa, unidentified
MRFYNQQHKFYCGIDLHARKMFVCIIDHRGKTKVHENIKTDPELLFDIIFPYLEDMVVCVECMFSWYWVADFCTEHKIPFVLGHALYMKAIHGGKTKNDKIDSYKIAKLLMGGNLPMAYPYPAEMRATRDLLRRRTYLVRQCSLLVGHILNTNTQYNLPAFNKKLSRKFNHEGVVERFDDPSVRAAVDADLTMIEAYNRLIKPLEWQIEKTACHHDHNSLYLLRTIPGVGQILALVILYEVHEIRRFGSVQRFCSYARLIRPEKESDGKWAGKSNKKIGNAHLKWAIRTAAMISLRESDQAKKFVDRLSRKHNKGKALGIYTHKLGRAIYFRQQAACQRSFLAMRSLSIDVWCRPRAAPYFSGACYLSDTHGRKLKPNRSPCCLGLVSVSEERK

SEQ ID NO: 463955 - protein, 397 aa, unidentified
MYIVGIDIAKRKHEAAVIDGEGAVIIKPFSFTNNCSGYNRLLAMLTKAKLPLDEVSFAMEATGHYWLALFTRLQKEGFRVQVINPVQTNSIRSFYIRQAKTDPRDALLIAEVIRFGHFSESTLHPENIYELRELCRGRHAIVSMQADVKRKVVALLDQVFPEYETAFTNMFSDTSMAILQTCPTPKELSEMPLEELCHLIEVSSHKRFRMAKAQELQELARNSFGFAMAGDVFSTMIRLYAKHLDFLKQQVREMDRKIAEIMETLDTPITTITGIGPTLGAYILSEIGDISRFSSAAKLAAYAGIDPTMRQSGEYNGVRNRMSKRGSPYLRHAIWLAASSAVLHDPALKLYFQKKRDEGKPYMASVGHACRKMVSIIYAVMRDNKAYTPYIPNEISA

SEQ ID NO: 463956 - protein, 323 aa, unidentified
MTPPTPIVVAGIDVGKSGLDAHILPGSLQRHFNNDQPGRRALRNWLRKHGVTRAVFEPTGRYHRRLHQGLFEAGLETVLVNPLRSRRFAEALGQQAKNDSVDAAMLARFGLLGCLVTTPPQEPNLRMLSDLLVLRRKLVAQLGALRKLVSEVAPEVADGPAATLTALQADIAACGQRMLDCIAADAQLARRAAIIQSVPGCGPVTAACLCAALPELGSIGRRQAAALLGLAPFDRDSGQWRGSRSIRGGRAQPRHVLYMAALSAVRHEPGCTACYQRLVADGKPHKVAIVAIMRKLACLLTALLREDRCWQAEPPSRELEAAA

SEQ ID NO: 463957 - protein, 371 aa, unidentified
MAQATQTQDSAKRLYVAFELGAASWKLAISSGGATVREKAVEAGALAELTRELAAARARFGLAVDAPVASCYEAGRDGFWLHRWLTGQGVTNVVVESSAIEVNRRARRAKTDRLDARKLLGMLVRHERGEDVWRVVRVPSVAQEDARHVHRELERLKGERTGHTNRLGGLLCLHGLRLTPGRRFRAELEAARLFDGRAVPAALKAELLREYERLELVRAQVTALEKERKERLAAAPPCDGKVAVLMQLRGIGMNGAWVMGHELLWREFQNQRQIGSYVGLTPSPYQSGNSARDQGISKAGNPRVRRLLIELAWGWLRYQPDSALSRWYREKFGGAGRMRRIGIVALARRLLIALWRYVKDGVVPEGALMKA

SEQ ID NO: 463958 - protein, 404 aa, unidentified
MLYVGIDWARKNHQVALVNSSGKLLESFSAPHSGQGFQLIRERIEHYQQDPSSVRVAIELHDGPLCNWLPDQGYQVLGVNPKSAAQARTLLRPSGCKDDVFDAYTLATVAALPAFPLQPLSPSDDTLLALQTLLDLREDLVEQKTTLLKQIRTLLDEWAPALSALCKDLNSRWQRQLLHRWPLERDLADAHPNAVASFAKKHRLRVATRELIRGARSQMPLPIGADHADALRRKMAHLLTRLDSLCGELQDLEAEIDQRSAEDENAALVDSLPAVGIVSRAAWTVALRCARVHGLDWEALAARCGVAPLTRQSGGSRSVHRRRGHDRTLRRLLTYYAFITTNCEGCWAHDDYQRRRARGASHYTALRAIARRWLKIACALVRHHDPYSEQLRRQAQSNDLKQAA

SEQ ID NO: 463959 - protein, 419 aa, unidentified
MATVDIVYPICCGMDVHKNFLVACIATTDERSNTTHQVRRFSTFTGDLRRLADWLLENHCCDVCMESTGKYWIPIFNILEKTCNVCLTHPKYVKAIKGKKTDKRDAKWISELFKCDLVRASFIPPPDIRQLRDLCRYYVKLTYMNTSEKNRAQNCFTMCNLKLDAVFSDVFGKSATRVIDAFFEHNGPDFDIAPLLHKHCKASAEEVRAALEGELSLAQSEKLNFIKQHQECIDSLQASLESLILKLAAKYQPTIDLLLTVPGISEPLTAIRIMAEIGTDMSVFETAKKLCSWAGLTPQNKESAGKKKTTRIGRAGVYLKPLLVQIALAVGSSNKHPELRDKYQALKKRRGGKKATIAISRKLLTAIWHMLSKKEPYNAELYHKADKPPVNRELTPEQAIALLRSRGYIIRDAAPAVSA

SEQ ID NO: 463960 - protein, 412 aa, unidentified
MDVIHERCAGLDVHKLTVVACVVTPGPRGRPHKEVRTFGTTSEALLQLADWLRERGVPAAALEATGIYWRPVWNVLEAAGVDLLLANPQHIKAVPGRKTDVKDSEWLADLLRHGLLRGSFVPPRPQRELRDLVRYRTALLQERTAEVNRLHKTLEAANVKLGAVASDILGKSGRDILAALVAGVTDPTALAELARGKLRAKLPQLERALAGRFGPHLRFLVAQQLAHVDALEETIGRVSAEIAARLQPHAATLERLDAIPGVGRRTAEVLLAEVGPDVARFPDAAHLASWAGLCPGTHASAGKRRSGRTRKGNPWLRTALVEAGQAAGRTKHTYLGARYRRLIARRGKQRAALALGHAILTIAYALLRRPAATYRDLGEHYVDERARQAVERRLVQRLEGLGYRVALEPRTA

SEQ ID NO: 463961 - protein, 440 aa, unidentified
MGKHKDRVCGADVHKDLIVATITDRDGSYLQESFGTSPPELERFKEWMMINKCEQVAFEATGVYWLPVHEVTSQSIDTIVANPYQIKSLPNDKSDAKDADRIAEYCLNGQIKRSRVFSQEYRDLRTLTRARSGYVRTRTQIKNRIHKHLSSNGIKLSSCIEDIFGKSGRHILDGLAHKRRTSDIIKGIPSGQIRKKSDLVGVSINNGLDETSRMIVKDLLELLDITESKIEKTANMVANKMLTKSEDLAIVMSIPGIGFTAGTTILSEIGDIRDFKTPESMANWGGLIPGSYESAGKKKSLGITKRGPKQIRTVLVEVAHVIARTGDSRLHRFFQRLRARKNYNVAIVALARKLICLIHHLLTNRELYQENDCEKKKPETSECDVGSSSLTEESLGDRVAAIVDAIYSLKDRSRKRIQRKRTAKTREFKRLPKWLSNGGG

SEQ ID NO: 463962 - protein, 353 aa, unidentified
MHTHQKSSDPIATIGLDIGKNTFHLVGLDKRGAIAMRIKVSRNQLVRRLVNLPSCLIGLEAGSGSHHIARQIEPLGHDVRLIPAQYVKPFLKGHKNDFRDAEAIAEAVQRPTMHFVAIKTPEQSDLLSLHRVRSRLVRQRTAIINQIRGFLIERGITVRQGPVPLRKVLPEVLSSPPEALSPRLVRLIAELDEDWRRLDERLEALSAEIESLSEHDTACQRLMTVPGIGPIISSAIVAAIGTGSGFKQGRDFAAWLGLVPKQESTGDRTKLGRISKRGNKYLRTLFVQAAHVVIERRPAAAMRALWPWIEKASKRLAHRNLLAIALANKLARIAWAVLARGRDYQPRITTNAA

SEQ ID NO: 463963 - protein, 357 aa, unidentified
MVDKVTEAAVVGGVDTHKDLHVAAVVDQNNKVLGTQYFSTTRQGYRQMLAWMTSFGTLKRIGVECTGTYGSGLLRYFQNAGLEVLEVTAPDRMERRKRGKSDTIDAECAAHAAFSGIRTVTPKTRDGMIESLRVLKTCRKTAISARRVALQIIHSNIISAPDELREQLRNMTRMQLIRTLGSWRPDASEYRNVTNVYRISLKSLARRYLELHDEIADLDVMIAAIVDELAPELIKRNAIGYESASQLLITAGDNPQRLRSESGFAALCGVSPVPVSSGKTNRYRLNRGGDRAANSALHIIAIGRLRTDAKTKEYVARRVAEGHTKMDAIRCLKRYISREVCKRRLSTVWQILIFLRG

SEQ ID NO: 463964 - protein, 330 aa, unidentified
MNSQILFAGVDVSSETLDIHYNLENGKELTLQVPNSPVGHKEVVQKLGTRCYVMEATGPYYLRFAFVLKASGADVRLENPLVIKRYIQMHMERNKSDKKDASWIFRYALEQKAPVWNPPTEQSLKCNAILASIDLYSRQHTQLSNQIHAFSQLPADTKEIIKGLQKTIDHIDKEMTKLELRLQEILQSWKAEQLKCLTTIPGLGKRATALLIIYTDGFTKINNHRQLIALAGLAPREYSSGSSIRGKRGICKMGNDHLRNVLYMCSMSAIKCNKACKDLYERLKAKGKRGKVALIAVCNKLLKQAFAIATKLQMYQSEYVSKKPEKLLGF

SEQ ID NO: 463965 - protein, 497 aa, unidentified
MARNILPERSQGAADLLARAEPRRVLIVPIDFAKETHVVQFAKGSAGYLLKRPLNVRNDLSGSQFLQDRIAGCRAKYRIPMGNVLIGGEEVPEYAMNFVLSLELAGYRVVRVNAKDARKYRTNSRAASDALALDGIAEAIRLRRAYDIQAHDGLYGALKMAGRARRTLRRQITATRNRIHKDVELLCPGLLNEKLSGLPAFGPGSLALMESGCSVQRLRRMSAAVLARRLAKAGTHKPCEVAARLKAFAASALAPDPELVPYRQGTLARKVGLLRTLQTALADEEEEMARCLVRTPAFLLTSIPGLGVALAGGIVGEYGDPERWLDTDRMMSYVGLAVRQHQTGGPGSAPVVVGLPVDANHVLKDLLLQAAFHVGTTVHPAWRELGLPGCHPLREYYRRLEQRGGHSRMGTARKLLRIAGAMVRGRSVYLPAEALHPAADGPMPPARLCEYLRVVRGMLLEKWKPYDLSGIPDEENQLKLWLQEIDRIVAFVNTQDK

SEQ ID NO: 463966 - protein, 417 aa, unidentified
MDEPRWFVGFDWASAVHCAHLIDADGNFVREYKVKHEGGALGGFYGELLQVTGAKAEEIAIAIETPRGPVVESALERGFQVFALNPKQLDRFRDRYTVAGAKDDSRDAEALGQSLRTDRKVFRRLHGEDPLVIQLREWSRMHDELMQERTRLANKLRDQLWRYYPQIAQLTEDVADDWFLDLWEHVPTPAKAARVTEKSVARILAARRIRRIDAAQVLSTLRQPPITVAVGTTEAATAHIGALAERLRLINQQIKQGERQLDLLCDAIEAAAESEPGQICEQRDVAILRSCPGLGRITLATLLAEAREPLQRRDYHVMRATSGVAPVTRRSGKSFIVLRRLACNNRLRTALYHWARVAAQNDPASRRQYARLRARGHKHARALRSVGDRLLKVLCTLLERQELFDPNHDTPPTQSAL

SEQ ID NO: 463967 - protein, 471 aa, unidentified
MRCADRKQGRTARIRAAAHTRPGGKPPARKQGVQTRGERWKFSAWSGTGLELEVEVEEADSELGCTKLPRKRTQKVQKGRNRPMKKNSKNETMKSKRETKKVAELEAGWTRLDEREANTLVIGIDLGDRTSAYCVRTLGQQIVKEATVATTATAMLEAFQGLRRQRVVIETGTHSRWVAQLLELMGHEVIVANARKLKLISENNQKSDKVDARLLSELGCMNVEWLHPVYQRSQAAHSDLLLARARQALVDARTALINHVRGSVKSFGSRVEKCASERFVEVARGALPEALKPALSGVLATLEELNEQIYGYDCQIEHLCHTKYREAAKCLLQVNGVGPVTTLTFVLTIENKDRFEQSRDVGPYLGLIPKKRQSGQRDPQLGISKEGDEMLRKLLVNCAHHILGAKGQDSDLRRWGLELVRAVERKGKKGARKLAAAAVARKLAVLLHRLWVTGAAYEPLRNRGAQQAPAA

SEQ ID NO: 463968 - protein, 353 aa, unidentified
MKRDKYIGMDVHQATTVVTVLDANGKVLWEKIIPTQAGPIIELLESLSGPLHVTFEETTQAEWLYEVVRANVAEVIVCDPRRNKLLTEGSKADKVDARRLAELLRVGMLRSVYHGNEGARKLKHLARGYQTLLSDMQRTMARIKAMYRSRGIDTPGRGVYQTKQREHWLSQLQDPGVKQRTVWLYEQLDQLGPLRRQAKLVMLAASRKHRAVGLLRTIPQLGPIRSALIVAILDTPHRFRTRRQLWSYSGLAVVTHMSSEYEIKEGRVVRSRKPIATRGLNRNCNRVLKDVFMGAATGGGQREPYRQYLQGLKDRGMRKEMARLTLARKISSIALTIWKKGETFDPKKLNWAT

SEQ ID NO: 463969 - protein, 473 aa, unidentified
MANQSKELPMLPEESIYIGVDIGKFKHVAGFVSTILLERHQHFEQCPAFLFEQSREGFRAFVERIRAYCPLEHCFIVMEQTGHYHRPLLHYLLELDIPVYVMHVQRRETRMLKTDKRDALVLANHLYNQLALGVQVENKLQVIRRAVPPSEAAAQLKGLMRHRYELVNEATQRKNKLTAICDELFPELTKVFKNPNLQIALDLREKFPTPQAVATASLGALREVRRRNRPSEADLLLLQQLAAESIGTKDHARQRGLLLEQELLIKELRLMQTHLEQLEEEIYHIVEHCREGKILLSIPPVTPLAAATILATIGHIANFEDAGHLKSYFGWAPKRAQTGVSFDWESLTKGGSREMKKVMYLVAWNAIKSETEWANLYKRLLPRLCTYDEKTQTYKGKGKALGHVIGRLITLIYALLRQDDEVLSHLPPGTNPPDPILYDPELHKRHRSGHYRPIRREYLKNRIEQIEPQRNVI

SEQ ID NO: 463970 - protein, 334 aa, unidentified
MKSDAVYIGVDVSKAKLDVYIPPKKEGLRAEIKELENNLAGLRKLRSIARSAKGTICVEPTGGYELELIAFMHKFDVPVAYADALRVRQFAKAEGNLSKNDAIDAALISRFAAKVGVRIIDKKDIDIVELKRKTKFRQALIESRTALISRLDTEFDDEIKEMIKAQIKHLNKLARKIENSCIEIINNNERIKELLPRFTMIGGVGDLTAVSILAQLPEIGRLDDAKLNRLVGISPEQRQSGTKEWQRRIGGGRKDVRNALYMAATAGLMWNSILSDYYRKKRAEGHSHKWAMVPTMRKLLSLLNRIARDPNFIPLPEPESTRKNAGAGRKKKSA

SEQ ID NO: 463971 - protein, 439 aa, unidentified
MNKRRDRVCGADVHKDLIVATITGDDVPTIRENFGTTKAELKKFRNWLVANKCEQVAFEATGVYWMPIYDALSQTIDTIIANPLQIKTIPNDKSDSKDSKRIATLCLNGQIKRSRVFAEEDRDLRMMTRARSGYVKTRTQFRNRIHKYLSSSGIKLSSTMDDIFCKSGRYILNGLAEEKPIEEILKGIPSGKIRKKQDLIRAALENGLNDTNRMLVRDALEILDNLESKIEKLSHEVLKKVQQKSKDLAIVMSIPGIGFVSASVILSEIGNYRDFQTPDQLAKWCGLNPGENESAGKKKKCGITKKGSKHIRVILVQAAQTISNMNKTALSRFFQRLNKKKEHNVAIIAVARKLICLIYHLLINQELYQEDECRKRRSSQDKSCQAPSFKEENLTDRVAAIVDAFYHLKESSRKNALMREIADISGIKVGQKRPSKGGG

SEQ ID NO: 463972 - protein, 402 aa, unidentified
MTYDYVIGMDVGKYFHHACVLDIDGTQVLSKRINQNEKSLRALFSTFSAHDHKVLVVVDQPNNIGRLTVAVAQDIGIDVRYLPGLAMRQLSRIHAGNAKTDIRDAYIIAHAAKNLPESLRSVDRVEEAFLQLKVLNGIDEDLARSYTRLINQIRSALVGCYPQFEQALRGQIIHRKWVLHLLARYGGPTKIKRLGKAKAAAFARRYKARNPEPVLDAIFAAISEQTVDIAGVHYAEMGVAMSAKDALLKLEHRKQIEQEVIELINDIPHTQILLSMPGIGPKTAGQILMAAGDMSDFPTAGHLASYAGLSPRTNQSGTSIMSNALNRAGNKKLKNALWQSSFASIRFHERSRQFYERKRREGKRHNAAVVALARRRLNVLYAMMRNHEHYRDPDQSQEVKAA

SEQ ID NO: 463973 - protein, 387 aa, unidentified
MPQRNDLSRSAASLDHESTLIAVIEMSQSSWLVAAIVPGIERHPLKKLEANEEALLQLLRRWQGEAAGAGRTIARVAVAFEAGRDGFWLARWLRAHGIEAHVIHPTSVAVSREHRRAKTDRLDTGLLRRAFLGWLRGEPDHCSMVAIPTLEEEDAKRPNRERESLIGERTRIINRMRGCLARLGIRSFRPTLRKAPGRLETLRTPEGVTLPPNTLAELRRDMARLRFVTGQITEIEQARLERLRQAPAERPHAMVRLLARVIGVGIETADMLVHEVLSRDLRDRRAVARYAGLTGSPEESGARRREKGLAKAGNARVRRGMIQLAWRFLRFQEASGLAVWYRARTADARGGTRKTMIVALARKLLIALWRLVTTGETPEGIVLRPAA

SEQ ID NO: 463974 - protein, 417 aa, unidentified
MEVLYSRCAGLDVHKDTVVACVRVASEGKVSREMRTFDTTTAGLLALSSWLAESGCTHVAMEATGVYWKPVWHILAADGFALILANAAHVKNVPGRKTDIADAAWLADLLAHGLIRASFVPEPALQEIRTLLRTRKQLGREKTAHVQRLQKTLEDANIKLDSVITDVIGVSGRAMIEALIAGESDPAALARLAHRRLKASPGKLSEALRGRVTPHHRFLLRLHLQQVDAVDTAIAQIDQEVEANLAPFRAAAQNLTAIPGVGALASRIIVSEIGIDMSRFPTAGHLLSWAGLCPRNDESAGKRRSTRLRKGAPWLKTTLVQCAWAAIRKTGSYLQAQFRRLRARRGTKKAICAVAASMLTAAYHMLKDGTEYQDLGASHFDQRSKQSQARRLIKRLQDLGIAVDIKPSHEPPVLVSC

SEQ ID NO: 463975 - protein, 456 aa, unidentified
MRREKKAVQELSLEFIEPNAGGIDVGAREIYVAVPRDRDSEPVRCFSTFTEDLRAIAEWLKQCGVVTVAMESTGVYWIPLYEVLEEAGLRVCLVNSRHVKHVPGRKSDVSDCQWLQYLHSVGLLRGSFRPEAAICALRALSRHRSNLVEAAAVHVQHMQKALTQMNLQIHHVLSDITGKSGLAIVDAILSGKRDPEQLARLADGRIRAERETVIKSLVGNYRSEHLFTLRQSLEAYRHYQKMLVDCDREIEQHMGQLPNQPSGGQPPASLEGDKRGKRRKNQFHFDMGKELHRVLGTDLTAVPGLSALTVHTLVTEIGTDLGRFPNVAAFTSWLTLCPGSKKSGGKVLSSKTRKSNSRLAAALRLAAQTLHKSHSYLGAYYRRMRARLGAPQAITAAAHKLARIVYHLISTRTAYDESVFAQEEQKQTIRRQHRLHKQALALGFQLVPLPHSEVVH

SEQ ID NO: 463976 - protein, 428 aa, unidentified
MSALFISVGIDVGADFSFMSIALPNQTLIGKPFKIVHANLSSLEKAVSVIKEAEELHSMRVRIIMESTGVYHYPLFCYLRDKGFDVSVINPIISKNSTNMNIRKVHNDKFDSKKLALIGLKPDLKVSVVPSEAVFDLRNLVREYYSLMDSRVSYVNKLAGVLKVSFPLFGGVFSKITTKTALSLLEYFQSPADFLSAGEEVIVGIIRKTARFGETYAKAKYQALVEAANAAANFGHFVSSNAFQIRSCVSFIKHYDEAISAVLLAIRKLIDYHSDKAFVRQIRLIESIPGAGFLTAVTVIAEIGDFSAFSSPKQLFAFFGLDPAVKQSGKFVGTQVKMSKRGSAVARRAVYTIALVSIGVNRKGVANNSVLRDCYLHKCNSKPKMVALGVVMHKVCNIIFAVLRDGKEFCIVTPEEHKANYLLGKSVA

SEQ ID NO: 463977 - protein, 347 aa, unidentified
MFPFYLGIDLHLKRTYMVLMDHEGEVIDKRRLKNTEIETYISRNVPKETYAVMEATRNWPFFYDLLAKHVDRVELAHAKGVRMIAAAAVKTDQIDASVLAHLARLNFLPIAYAAPKEIRDLRQHLRYREWLIDERRRAKNRIHAVLAGYNLASPVTDLFGRAGREWLQEVAEKELRPVSRRVVLETLTMIDQLDDQIKELAKDIPLPEDLKPKAEILMSMPGIGKLLSAVILAEIGDISRFNSPKALCNWAGLTPRVHKSDTVVRHGRISKQGSRYLRTAMVCAAMTACRISPRWYGVYEHLARKIGRRAAKVAVGRRLLTVVYYMLKRNQPYEEDYEQRRAVEQGA

SEQ ID NO: 463978 - protein, 333 aa, unidentified
MATWVGIDIAAKEFELVSRIDGKSSRSMKFKQTSEGHQRAIKHLRALAPSGVVMEATGVYYLDLAVALFRAGLPVMVINPKSFHHFAKLMLKPSKTDGIDTALLAEYGERMTPARWIPPDTTCLGLRDIGRQINRLTASRTQAKNRLHALQAKGMTLSLLLEDEQEGIALLDRRITRLQEAALTLVADSEELSVQLQHLTTAVGVGTASAIALLGELCVLPREMKAPQVSRYAGLDVRLNLSGTSVHRPARLSKAGNAYLRAAMYMPAMSAVRHDERTKAFYDALVGRGKKKIQALCAVMRKYLTGLWACLQLGTPFDSTKLFSDCHQANACN

SEQ ID NO: 463979 - protein, 342 aa, unidentified
MEHYSGIDVSLECSSVCVVDASGKILREAKVASEPEALIAWFRSCGLDLDRIGLEAGPLSQWLFAALREAGLAVELLETRHVRKAFEAMPVKSDRNDARGIAQLMRLGWFRPVHCKSMSAQETRTLLTARKLVQSKLRDVENSLRGILRGFGLKVGKTTEREFAGRIEELVAGHPHLQVIAKALLSVRTVLRSEFAAFEKQVRKMARSDLRTRLLMSTPAVGPIVALTYASAIDDPTRFKSSKQAGAHFGLTPKKYQSGETDYTGRISKIGDAGVRTALYEAAHVMLTRPVKGCSQLKSWAMRIARRAGMSKAKVALARRLAVILHRMLANGTPFNAAAAAA

SEQ ID NO: 463980 - protein, 409 aa, unidentified
MQPILESCGGLDVHKSMILACIAHGPLNKPPKFEIKKFPTMTNDLRKLREWLKEYGVTAVAMESTGIYWKPIFNILEDDFDIVLANAQHIKNVPGRKTDVKDCQWIAHLFRNGLISGSFIPPREIRELRDLTRTRKKLVGAMASEKNRVQKVLEDANIKISSVVSKVFGVSALAMICALMEKDELSADEIAEMAKGKLKKKVNQLVEALNGNVTDHHRFLLKQHLGHIDFLVEVIKEFDEEIQRRLVPYQKEFKDIQSVTGIKGVSAASVIAEIGVDMSRFPDEAHISSWAGVCPGNNESAGKKKSGKTRRGNNYLKATLTESAWAAARTKETAFSAMYRNIAGRRGTKRALVAVGHQILIEVYRVLKTGDRYQDAGAEAVTERRLKNREQRMVRELKRCGYDVSKVVA

SEQ ID NO: 463981 - protein, 421 aa, unidentified
MLPGDHLPSTYFNQVYEDKRLWIVTASNTLGKEGFMIYAGIDIAKLNHFASAISSDGEVALKPFKFTNDYDGFSKLKSSLDSFDPDQLIIGLESTAHYGNNLVEFLVNNNYKVCVINPIQTSTLRKNNIRKTKTDKVDTLVIAKALMMNPTRFFTKYDITLLHLKELGRFRLKQIKKRTQAKIQLTSYVDQAFPELQYYFNGIHHKSCYALLKEAPTAAKVASMHMTHLSHLIEVASHGHFNKETAKELRVLAQTSVGIDDSSVALQITQTIELIELLDKQVKTVESDMESLVKSLDSVIMTIPGIGYINGGMILGEIGDISRFSNPSKVLAFAGLDPAVYQSGFFEARSTKMSKRGSKALRFALVNAAHNVVKNNKTFKDYYAQKRSEGKSHYNALGHCAGKLVRIIYKMLTDNVAFNLD

SEQ ID NO: 463982 - protein, 346 aa, unidentified
MNQINRIGMDTSKHIFQLHGVDSAERPVLRRKLRRSEMLGFFAKLPPTVIGMEACAASHDWARKLRELGHEVKLMAPQHVKAYIKRNKNDGRDAEGLCEAMSRPTMQFVAVKTEEQQAALMLLGVREQLVKRRTQLGNVIRGYAAEFGLITAKGLDKIEPLLARIAQDQSLPELAREMFATQGRDYARLQVELKTIEARLRAWHRANADSRRLAKIPGVGLIGATALVMKAPDPQAFPSGRHFAAWMGLTPKDHSTAGKTRIGKITRAGDEMLRSVLVAGSTAVIQQARKGRGRPSPWLVALLARKSPKLAAIALANKIARIAWKLLTTGESYDAARWLGASAVAA

SEQ ID NO: 463983 - protein, 347 aa, unidentified
MLYAGLDLSRQRLDVHVLDEDGRTVEVTAVRPDADALRTLVAVIGRHGEPVTAAIESMNGARFVHDQLELAGWDVEIADAVKVKGLAPLAAKTDKIDAWVLAELARRDLVPAIWLPDPTVRAERERARFRLHLVRHRTALKNRIHATLIAFGHPVPVSDLFGVAGRELLAGLAIPEPWATTLTRSLSFVDELDHEIERCEAELRAMGADHPYVELLRTVPGIAWVLGYTIAAELGDIGRFASPNKLAGYTGLCPIVRQSGGRDDRGPLAKNGPKYLRWALIEAATHAARHAQYADRYERTKQRLGRQRGSKVARVELARELATAIWHMLAKNEPFAPGRPHVRALVA

SEQ ID NO: 463984 - protein, 342 aa, unidentified
MERVYVGLDLGSSSFQQVGLNEGGVVRGEQEFRTSEANLIKAFVDLEGELHVHLEAGELAPWAVSIITPLVHRVVCSHPQANAWIAKDADKCDRLDAYKLADLLRLNRFKEVHYPPQQSRRDFKTLVQHYDELTQQQARLKTKIKARLRMQGVIVRGEQPFSATGRKAVLTAVKSVAVRTAISQLYAVLDQSLESQTEARLLMRRAAQAFPEIRIFETAPGVGPIGACRFSAYIHTPQRFSTTRKLWKYCRLSVSHRSSNGKPLRRPRLDHNGCGRLKDVSRKAFEAALRTKSDNAFKRAYQRALATTHDATHARLTVQRKIVSTLRAMWINQTPYREELMR

SEQ ID NO: 463985 - protein, 375 aa, unidentified
MTVTRTLTGSVSEPTLYVAFELGKKEWKLAMTSGFGVQPWVRTVASRDWPAVERAIAQGRARFGLAAGAPVVSCYEAGRDGFWIHWALVQRGISNRVVDSASIEVNRRARRAKTDRLDALKLVMMLVRVWHGEQRVWSEVRVPTIADEAARQVSRERTALTQERTSLTNQMGGWLATWGCALPSRRRDGWWTTVRDWAGATLPDAVQARLTRAEARLAVLEGQIAELDGQQHAAVTTAAPTSALRQLVQLKGVATTSASVLLDEGLVWRAFRNRRQIGGLLGFAPTPYTSGNSAREQGISRAGNNRRQAISIQLAWSWVRWQPDSALTQWYRAHFGTGKRARRIGIVAVARKLVIALWRYVTTGVVPAGAILKVA

SEQ ID NO: 463986 - protein, 443 aa, unidentified
MARKNQKRFEIIHHDCAGIDVGSREHWVAVNPGRGDNPVRKFSTFTDDLIALADWLASLKIKVVAMEATGVYWIPLFEVLDARGFEVYLVNSRATRQTSGRKSDVLDCQWIWQLMTHGLLSGAFRPSDEICSMRSLVRQRANKVCDQAKSINRMQKALSQMNIHLANVISDITGVTGMKILNAINQGERDPLVLAALRDRRIKADQATIARSLHGNWRAEHLHALSQELACHDFLETQIADCDKAIAQALERLPRLQEAVPVAGKVLRSPHRSAAQQSALHQALGQVMGVDLTAIPTIGVDTALVLASELGPDLSRFPTSQHFCSWLGVAPPTRISGGKALPGKTPKVINRASQALKQSASNARNDKSFIGASHRARLTRMDTGCAIKATAHQLARLIYAMLTKGQPYVEKGIEAFEAKSRSRQLRALEHKARKLGMQLVMAG

SEQ ID NO: 463987 - protein, 431 aa, unidentified
MTKFPREVTHMNFTNPRAEKSRSQSKNNQETQFRISYTATGQELIYGYVPVGIDLAGRKFQVCYYNEDNELVNITLDICALRQFIADTHQKLLISMEGCTGSSYWANYAIAHGHKAVVLDARAIKNRKAQKDDFNDAFFIREALLTHYQTCRIRTQEEIDLKSFYVQREQYIKSLNAVCSNVRQRLIAAGAYEHVVTGADSALLAIKYYKKQINRKAEVGSSSLTLKTLDSFVEDINYLTQKIDRINQDIIDAKARESQVAKQLMTIPGIGPQLALLLSLDISDISRFKTARALQAYFGLFTAHSGSGGKIEMGKMSRNGDPVVKRMLYQAVLTLLHCGNKLQISPRSEYIQRMYSRNTVAFKRGVISICAKIIRVVFGVLHHGTAYDPQIDDSLGNKKARIHAYSNRCLTKVSADALLQEQYGYTEATLD

SEQ ID NO: 463988 - protein, 412 aa, unidentified
MEVLYARCCGLDVHKSSITACVLIAQAGKPLKHIRRFGSTTRELRELVGWLREFGVEHVAMESTGVYWKPVWNILEGHFHIVLANAQHIKAVPGRKTDTKDCQWIAELLQHGLLRASYIPSVLIRDLRDLTRARTSLSQEHSRIASRVQKVLEDANVKLASVASNTLGKSGRAMLEAIIGGEESAERLADLALGHLRAKIPQLQTALEGQVRDHHRFLLQSLLRQLQFLEAEIALLDARLDQIGREHLDLAVALDRWITVPGVDRVAAWSFIAEMGTDVAQFPSAAHLASWAGVCPGNNESAGKRISSKTRKGSPWLRRMACQSAWAAARTKNTYLSAQFKRLAARRGRKCAIIAVAHSILVIGYHLQRKHCTYADLGSSYFDRLHADGLKRYLVKRLESLGHSVILQPRTA

SEQ ID NO: 463989 - protein, 444 aa, unidentified
MQKHITKTKKLTIKQELRNIRHNVAGIDVGANSIFVCAGCIGGKMEIREFSTFTVDLKAMVKWLKSCGVVSVAMESTGVYWIVPYDMLEVAGFEVVLVNPASIKAINRTKTDVMDCQWIQELHSYGLLKGSFRPDTQGVTFRAYVRQRKKLVELSSMQIQLMHKALTQMNIQLRQVLSNIAGVVGMKIIRAIVTGERNPNVLAQFRTNNCKHSKSKMAKSLQGNFRDEHLFALHQALEVYDLYQKQISECELEINKMVKNWTNNDNISTDFENDSDHSDISTNITKIFGVDLTEIPGLNENLITQIVAEIGTDISKWKTAKHFASWLGLSPSNKISGGKILSSKTKPTANKAAQALRLAANALYRSKTSLGAYFRRIRARLGTPKAITATAHKIAVILYSMIRRKTNFKESGQDIYEQRYLERTIAKIKNKASLLGYSLVKNES

SEQ ID NO: 463990 - protein, 392 aa, unidentified
MLYLGIDIGKNTHVASLIDETAKPLFKAFSFSNTTEGANNLLKKLSLHINNSSEIEIGMEATGHYWLSIYSFLVENDFLVHVVNPIQTDGWRHGTEIRKRKTDAIDSILIADLIRYGNFVETSLSDEDTMSLRNLSRFRSYLISSVGDLKRKVICVLDQVFPEYQSAFSNIFGETSKELLSHFQTADDFEHISSEQLETVLENVSLKRFARNKISQISQLAATSFGLKFCRDSFSLQLKLLIEQIRFIEAQASDVESEIKNILDKMDSPITTIPGIGYINAAVILGEIGNISRFSNASKLAAYAGIDASVSQSGEYQATNNKMSKRGSPNLRKALFQAALIAAFHDPVFSAFYQKKRSEGKHHLTAVGAVARKLCNTIFAVLKHNTPYIPQI

SEQ ID NO: 463991 - protein, 355 aa, unidentified
MNQEKYIGMDVHQATISVAVMDSSGKLIMECILETKAATILEFIAGLRGTLSVTFEEGTSAAWLHDLLKPHVRHLVVCDPRRNALLKDGSKSDRIDARKLAELLHSNKLHAVYHGEHGLRTLKELGRSYLTITKDLTRVMSRIKALYRSWAIPCSGATVYAPRHRAEWLAKILEPGVRLRAERLYQQLDLLQPVRQEARRDLLGESHKHHAVKLLRQIPSIGPIRAALLVALLQTPHRFRTKRQLWAYSGFAVETHDSGEYRFVRGKLVRNRERITVRGLNHNHNHDLKNLFKGAALSASTRPGPLCDFYVALVEKGMRPTMARLTLARKMAAITLTIWKKGVEFDAKPLNRQAA

SEQ ID NO: 463992 - protein, 368 aa, unidentified
MTETVYIGMDVHSTNYTLSSYTRETDNCFSTVTLKPEVKSILKYIKRIKEDHGDDTAIVTGYEAGCLGYSLYKDLEKEGIKCIIIAPTSLPKQKAGEIKTDKRDAQKIARALAAGTYKSVYVPDQEDEDVKEYIRMRDDHKQTLKKTKQQINAFCMRNGFVFTEGKSKWTQKHIKWLRTLKMTAMQRLILDEYLITFDYYTLRIKQMDEKIEEISNRERYKEDVDRLCCFAGMSVHKSLCHIVETGDFDRFPKAPAYSAYLGEVPGESSSSTNVNRLGITKAGNRHLRMLDIEAAHAVGRTRKTKSKALIKRQQKCSPEVIAYADKANERMRKMYLDLSLRKNKNIAAAAVARELSCFIWGMMTDHIS

SEQ ID NO: 463993 - protein, 366 aa, unidentified
MKKTSTVRVNGNMVFKGHKLTIGVDLGDRSSNYCVLDEAGEILLEQKLATIPEAMKQTFEKIPRSLIAMETGTHSPWVSRLLKELGHEVLVAHAQKVNLITKSTRKDDRHDARTLARLARIDPELLGPVRHRSAKAQIDLTVIRARAELVSARTALVNGARGLVKSYGERLPKCGTEQVSRELAAELSAELREVLEPLLKEIESLNEHIKEYDARMEKIARESYPQVALLKQVKGVGTQIALTYVLTLDDPQRFAKSREVGCFLGLKPGRRDSGLSQPQMHISKEGDPYLRTMLVQGAHYILGPFGEDSDLRRWGLRLAERGGKNAKKRAVVAVARKLAVLLHRLWVSGEVYEPLRNSHKAMRAAA

SEQ ID NO: 463994 - protein, 460 aa, unidentified
MTPRKDHFPHPQPPRRRRKLPVTNPDAAGIDVGAEEHWACVPADRDPEPVRRFGTCTLDLEALADWLQGCGVTTVAMESTGVYWIPLYELLEARGLQVLLVDTRQVARAPGRPKTDAKDCQWIQRLHSYGLLSAAFRPADQVVVLRAYLRQRDMLVTYAGQHIQHMQKALEQMNVKLTEVVSDITGVTGMGIIQAILRGQRAPVELAQLRDPRCKQSEATIARALHGNWREEHLFALRQAVALYDFYHQQISNCDQAIEEHLRTFADKSAGQRLPYRPRRRKREANEPRFDARARLYCVCGVDLTAIEGIDETTALVLLSEIGTDMSRWPSLKHFCSWLGLCPQHKISGGRVLSRRVRRGASRAKRALRLAARSLHHSKSALGAFFRRIRSRHGTPAAITAAAHKLARLVYSLLKNGTDYVAQGMAEYEAKYRERKLQGMARQARELGFQLVPVVAAAEG

SEQ ID NO: 463995 - protein, 341 aa, unidentified
MEKATIIGIDLAKRVFQVHAASKDGRPVLRKKVSRAQLLGFLAKQPPTIVAMEACATAHEWGRAISGLGHDVRLVPPIYVKPFVRRQKNDAADAEAIAEAASRPTMRFVALKTEEQQARSMIFRTRDLLVRQRTQLVNALRGHLAEHGIVAAQGLAKVKVLATAMRDTGSLHPLVRELGQRYLDHIARLDVEIAELDKRVRRPSKDDEAAKRLQSMPGMGPITAAAIEAFAPPMATFKRGRDFAAWLGLVPRQHTTGGKPRLGRTSKMGQRDIRRLLIIGAMTVVRWAVRKGAAKGSWLARMLAQKPRLVVAIALANKMARSVWAMLSKGEEYRGSALAPA

SEQ ID NO: 463996 - protein, 345 aa, unidentified
MQITTVGLDLAKRIFQVHAVDAVGDVVVRKALRRSQVLPFFTKLPPCLIGMEACGTSHHWARTLTELGHEVRLMPPAYVKPYVKRGKNDAVDAEAICEAVTRPTMRFVAMKSAEQQAALSLHRSRNLLVKQRTQLVNMIRGQLAEFGIDIPEGLERALRLARQIAAKKSTLDVPAMAMQVLCLLCDQVLDTHARLQTIDRSILAQQRTNEVARRLSTIPGIGPIGATALAASVGDPGQFRSGREFAAWLGLTPSQNSSGGKDRLGHITKMGDRYLRKLLVIGATSLIRRARHKPEAADPRLLALLARKPTRVASVAMANKMARVVWAIMARGETYQARHAPNLAA

SEQ ID NO: 463997 - protein, 354 aa, unidentified
MKRMTKYVALDVHQATTVASVRGESGRVLARTILPTEGSTIVEFFRGMRGAVHVTFEVGTQSQWLYDLVAPVVDRVVVCDPRQLTRQGNKGDRVDADRLSELLRLGGLRAVYAQSAHRADLKELARTYRTLVEDGTRVMLRIKALFRARGIKTPGAAVYHPTKRMQWLAQLTERGVRFRAEVLYAELDVLRELRPKAKAMMVAEARRDPAWPVLQTIPFYGPVRVALLLATMQTPWRFRTKRNLWAYAGLAVRTSSSADHRFIEGQVVRRRRAPMTRGLNRNHNRVLKDVFKGAATAAASQPGPLQEFYAAMVARGTREEMARLTLTRKLAAITLRLWKRGEQYDPSKLTRQAS

SEQ ID NO: 463998 - protein, 344 aa, unidentified
MKIVTIGLDLAKNVFQVHGVDERGITVLRRQLKREQVAPFFARLEPCLIGVEACGGAHYWASKLGALGHRVRMMAPQFVKPYVKTNKNDALDAEAICEAVARPNMHFVPLKSPEQQSVLSLHTVRESFVRARTAQANQIRGLLMEFGHIVPQGIRHLYVRVPEVIEDASNELPGRFRLLMDRMLQHLKELDRQVQELENEIELWHRNSEVSRRLQTIPGIGPITASALVASAGDPSNFKSARQFAAWIGLVPHQHSSGGKTRLLGISKRGNVYLRTLLIHGGRAMVKSATTRPGQADSWLGRLLARRHHNIAAVAMANKNARLAWALLSTGKAYEPEHVPAVAS

SEQ ID NO: 463999 - protein, 337 aa, unidentified
MSQASSSPSPSSSTPRFVGIDVAKATLDLAVRTDGQAEGEPWQVANTSEGHAQVVSQVAVLAPALVVLEATGGYEVAVVAALAAAELPVVVVNPRQVRRFAQATGRLAKTDRLDAQMLAHFAEAVHPAPRPVPDAQSRELTALVARRRQLVQMRVAESNRLTPTTSGRVQQQITAHLDWLDAQLASLDDELREQVRTSPLWRERDDLLQSVPGVGPVLSCTLLAHLPELGTLSAKQLAALVGVAPLNDDSGRLRGRRLVWGGRAAVRAVLYMATVRATRCNPVVQTFYERLRAAGKAPKVAYVACMHKLLTILNAVLRHRTPWAPASPPAHRAPVLA

SEQ ID NO: 464000 - protein, 404 aa, unidentified
MKTAIGYFGIDVAKTFHVVCVKDAHKRSLIPSLKINDDEQGYEQLRHCLDTLKDKYRIHLFVTGLEATGPYHRKLVEVLRQWSDIALTVLNPLQTAHYLKSDLRRASTDKISAEGIAQYLVEKKPASTQFVSEACDTVKHIVRHLNGLSKQKTAAINRLHDQLVQIWPEFERTYRNLNTKQVLALLTVAQTPTQANALDFDAHKHLTIGGNQYTLRSDFITAVQELARSSQPRYVKLALEPIIKSLAEEILFILSQIDQITTVLQGFFTDPDNNDKPLLSTINGVGDVSAALFTATIGDVNRFRSGSQVVAYFGVNPGVKTSGDTVHCKGYIQKRGNSIVRYYLFNCVLAMIRLKNHPIQRFYQHLVNRGKTKMVALTACMHKLVLIMYAMLKNNTPFSMNYAR

SEQ ID NO: 464001 - protein, 315 aa, unidentified
MSDVPCFIGIEVAKAQVDIALRPSGERWAVPNDASGVATLVDRVQALHPTLIVLEATGGLERAVTSALATAGLPVVVVNPRQVRDVARATGPLAKTDALDARALAHCADVIRPTPRPLPDAQMQELRALLGRRQHLIVMRTAEQNRLAGTSERLTKDIAAHMTWLDAGIATLDDDLEAMLRASPLWRENDDLFQRAPGIGPVCARTLVLELPELGTLTRQQIAALVGVAPLNCDSGTMRGRRTIWGGRAHVRTVLSMGTLVATRFTPVIRAFYQRLLAAGTVKKVALTACMHKFLTILNAMLKHRTPWQAQEVQS

SEQ ID NO: 464002 - protein, 312 aa, unidentified
MTTLICGVDVSSAALDVRLGRDGVIRRFANDAAGIAELVGLCKEHQVDLVALEATGGYERLAVAMLWGAGIATAVVNPRAVRRFAEAMGFLEKTDRIDSGIIAWFAEVKQVMPQRPAGETQRRLAALVTRLRQLTELRTAQNNQRRLVTDPVALASFAELLGVIARQIKAIAEDISKLIASDPLWRKLDLAWREIKGVADRTVARLMAELPEIGTLSNKAVGKLAGLAPLARDSGKLSGNRPVRGGRSGVRSILFVVAELVRRHDPDFAAFHRRLTLAGKPKKVIRVALAHKLLVRLNAKARAVRAQIASPA

SEQ ID NO: 464003 - protein, 352 aa, unidentified
MKKILFVGIDYAKANFVASALLGEDPDPVCLPKSFSNDDKGAKALVSWIVKLLPETCSLSDVLVCGEHTGSYSLLLPRRLFDAGIDCWLENAVCIKNGSGRIVREKSDSADATMIAEYARTFYQKRVRLFVPESPVLSELRECNDIRRRLVKEHTGLMCKKHDAEVRLKAKPGSKAIVMNIKILDRQLAYIKEQIAKVDRQMYSLIRSEKKLSRIYDIIVSITGVGPVTAIALIVLTSGFTTFGSKRSLACFLGIAPFRSESGTSIQNGSHRSRQADSYYSGLLYMVAVSAMIWNPEIALYKERLLKKGKPKLVIINNFKNKLITIIWAIVKNDTLYDPDHHLKVAQQYQTA

SEQ ID NO: 464004 - protein, 346 aa, unidentified
MPETEVDTFAGIDVSARELSVALRRGKGEDKPAMAKFSNHPSGHKALIAHLLRGSRRVRVCLEASGNYSLDLALTLQAHRQVEISVINPRRARRFAESLGQRSKTDPVDARVLCDYAARMPWVAWQPPSSVALHLRAVARAIADLGVIHTQQNNRAHASAASQALPVLVVKEMQRHQKYLEQRMTRLRREALRLIAGDSELDRRFRLMLTTTGIAETSALQILGELAVLPDMLDARQWVAFSGLDPRLFKSGKSVEKRPRISRGGSRHLRRALYMPALVALRRDPCLRRFYQNLLARGKARLQAVVAVMRKLLHALFAMFRTNQPYDGSKLCCAVDMAGNAIAACA

SEQ ID NO: 464005 - protein, 408 aa, unidentified
MNPLFVGIDVSSKNNVAYLMKPDGSKHSSFSVQNNLGGAKLLSERIVSALGSMQLERVVIGLEATSIYGDSLVYALREDGRLGRFQRKIHVLNPKQVRKFKEAYSDLPKNDWVDAFVIADHLRFGRINREVYMDDYRYKALQTLTRARFDVIQNLTREKQRFANYLFLKCSGMAQDKDIQNTSATTIALMEHFETVDDLANADLEELTAFITETGRGKFADPDATAKAVRAAAKGSYRLPKTVNDTVNQAMAVSIASMRALKGQVKVLDKAIEQQFEIIPNTLTSIPGIGKVYSAGIIAEIGDIHRFDSQASVAKYAALVWNRSQSGDFEAEHSRMIKSGNRYLRYYLLEAANSVRRCDSEFRRYYDLKFKEVNKYQHKRALALTARKLVRLVFRLLKDNRLYIPPEG

SEQ ID NO: 464006 - protein, 457 aa, unidentified
MYRELQPLRRALSVELKADLPPAPPGIEAEHLLQTYLDRLTMYVGCDVADQTFTLLAVDAAGEELGHLSDVPNNPFGFEQAWGWLESLRCQHRLRIIVLAMETSGIYYWAWWDFLAGRPNLARVLYNPRTTEHMTEVLSKRVRNELVDAYALAEQVRLGSTPEVVLMEDTDLLTARLCSRAARDLAQQINDKKNQLRSLLRAYNPALCQVFPQAKLHHRAVYALLQHYVLPDEFIAAGPTPITAILTDHCRTAFGREQAEQLIALCRQTLTHPIGREVITYRVRQLIQDISTAQEHKQYFLKTGYGLIEDRTETRLLRLVKGAGVSNTLALVSETGDVHRFPDGPHLASFLGLTTSKHISGTTLFQSKHITKQGSPNARYAAVNLAGHLKQYVPKYQQMYQHIKNRKSQGGHFIALVAIARDFVTNVLYDMWRYQRPFFLEVEDYRAYRRAHPRAND

SEQ ID NO: 464007 - protein, 347 aa, unidentified
MMVVLGVDAHKRSHTIVAADQAGVEVGSVTVVTTPAGDLRALRWAGRWNQRRWAMEDCRHLSRRLEADLLAAGESVVRVPPKMMAGARRSARTRGKSDPIDALAVARAALREPGLPVARLDGPAREVKLLGDYRENLIRERTAVQNRLRWRLHELAPGFDPAPGSLDRLVILGHIDGLLEAHHGVVAILARAEVARIRHLTAEANRLQADITRRVTAIAPSLLDLPGCGALTAAKLVGEAADITRFRNRDAYAMWTGAAPIPVWSANTQRFRLNRGGNRQTNAALHRIAITQMRIHPDAQHLIAKHLAAGKTKTEALRILKRRLADVVYRTMLNDTQSQQAAQTRAA

SEQ ID NO: 464008 - protein, 358 aa, unidentified
MKIVGCDFHPSYQQIAILDTETGEVVEKKLMHAHGEAEKFYGELERPALIGMEATGNALWFELLLQKFGHQLWIGDAAKIRASYVRKQKTDKRDAGHILTLLTEQRFPRLWLADSHQRDIRQLLIHRHNLVGVRTRLKTELQHLALNQGVQKKRQLWNEKGRVLLSTLALEGWTRQRREDLLQLLAVVEPQIAQLDKAVEQAARASSQAVLLMSQPGVGPITALAFTVTIGEVARFPRSKQVASYLGLIPSEHSSGSKRRLGSISKGNVFLRTLLVEAAQSVVRHDPDFRKQYQHRCHHKAKGIAKVAAARKLAVRLYWMLKSNKPYPEVLLIEGSPRHPVAAKAKAVQLNGYPRISH

SEQ ID NO: 464009 - protein, 312 aa, unidentified
MANLVYAGIDVGKDKLFVNIHLDSQVRDFPNTHSGLERLSRFLIKNAVNLVVMEASGGYERLPASDLRARGLSVAVVNPTYVRRFAQGMGTLAKTDTIDARLIAHFASVKQPKPQQAKTVEEEELAALVERREQLVSLLSVEKNRLSKASDYSKASLQISIQFLTGQIASIETEIKALVTKSPERLARMRCMCSFIGVGDITAVTLLTEMPELGMESGKHIAALAGVAPINRDSGKMKGKRRTYGGRARVRRTLYLAALSASRHNPIIRAFYERLLAAGKEKKVALVACMHKMLTILNAMLKKGELFNPEYS

SEQ ID NO: 464010 - protein, 444 aa, unidentified
MRAIGLDIHRDFCEVAIAEGGRVRGAGRVGTAPAEIEAFARGLGSDDTVTLEATGNALAIARILEPHARVVLANPKATKAATRLRAKTDRIDARTLAQLLASGFLPEVWTGDEATHALRRRVGRRVHLVRQRTKAKNQVHAVLLRNLAGRPPVSDVFGTRGRAWLERLVLPADERETLDACLRTVDFLDAEVAALDRALAPLVLGSSDMRRLLTLPGVSATTAATLAGVIGDIARFPTPARLVAYLGLDPRVSQSGNDAAHHGRISKQGASEARHVLVEAAWVATRTAGPLRVFAHRLAARRGWNVAIVAVARKLTVIAWHMLTRGEDYAFARPVLVRAKLREIELRSGAPRAKGHSIGVAPTAAERQLERELAAAAEAAYERLVKDWVPSRKQVREPQAGRASHDAERQPARQGSAPALRFGSASLPHQRDYAPDLGPRQDAT

SEQ ID NO: 464011 - protein, 324 aa, unidentified
MDTPATTIATALRVIGCDVGKAKITVFDTLTGQTGEVANEPEPLEGFVQELDGNCLVVCEATGGYERKLLVAAAEAGIPAHRADARKVKAFIRSLGRMAKTDAIDAQGLARYGQERHRDLAPWQPAADVLEELQTLVRLRRQLVGYRTALTNQLKAPGGKAAKPHLQSLIDTTAERIRGIEADLDTLVDQDPEIAKRVEIITEIPGCGLLTAISIAALIPEIGTTTKRRIASLAGLAPHPYDSGNHHGYRHTRGGRPEVKQILFMAAMAARNYNPELKAFYTRLVENGKKPLVAITALMRKLITIINARIRDAEKTPQPQPELS

SEQ ID NO: 464012 - protein, 313 aa, unidentified
MIITLRCIGIDVSKRHLDIFDEGIGVSERVANAPHAITKLVARWRCDVLVVFEATGVYDLGLREALRAAGIRFARINPARARDFARASGQLAKTDPIDARMLAAFARAMRPAPEQVSTPARNALARLAKRRDQLVHMRAQEKNRRSEAGDRAMVERIGRLIEVLDREIAEIEADISALIKAEPEISHDAQLIRSLPGVGPVACMQLIAQMPEIGHVGPKQAAALAGLAPFNVDSGAYRGKRKIGGGRKRVRNALYMAALNAVRRADRFKAFYARLRQAGKPAKLALIAVARKLLTILNAMMRDRKAYIPTQQT

SEQ ID NO: 464013 - protein, 415 aa, unidentified
MQFIILGGTNMYNAVGIDVSKGKSTVAVLQPGGAVVRNPFDVAHSSCELKSLTDYILTLEGETKVVMECTGRYHEPILHALSDAGIFVSAVNPHLIKNFGNNTIRKVKSDPADSKKIARYTLDNWAELREYSSMDTTRAQLKTLNAQMTFFTNQKVAAKTNLISLLDMTYPGLNDLFDTPTRDDGSEKWVDYAASFWHVDCVRKIGIKAFTDRYRAFCKRHGYNFRKSKPEELFNASKELVAVFPKEQEYKDMIQMSIKQLNIISANVEHTRQEMNRLASTLPEYSTVMAMRGVGATFGPQLIAEIGDISRFSHREALTAFAGVDPGVNESGKFKSKSNNASKCGSSRLRKTLFLIMKSLIQTKPIDDPVYLFLDKKRSEGKPYHVYMTAGANKFLRIYYGKVKECLKAQSETKD

SEQ ID NO: 464014 - protein, 334 aa, unidentified
MKLKYFVGVDISKLTLDLTLLQGNTFVIHRCIKNESHAIKAFIKELMANKGLTFGNTVFGMESTGIYSAKLVTFLHQKKAKVVLENPLHLKNSFGLIRGKTDKDDSERIASYLYKSRNELRFFAARRDIIGHLSSLMTLRRKLIALRVSIVNTLKENAGFVKKGLILESNRLCSGSLRALVTDIKNINASIDATWKSDESLSRLMKILLSIPCIGPVIALHAIIATNEFRSITTAKRFASYCGVAPFRHRSGTTISKRAKVSQTANKRVKALLHTAAILSIRFVPDLRGYYKRKVEIEGKHKMLVINAIRFKIISRMFTCIAQDRFYQTHYQVK

SEQ ID NO: 464015 - protein, 352 aa, unidentified
MVIVIGADVHKATHTFVAVDEVGRKLGERTVRATTTGHEGALRWARGQFGGELRWAVEDCRHLSARLERDMLAAGQEVVRVPPKLMAQTRASARERGKSDPIDALAVARACLREPDLPTASHDDTTRELKLLVDRREDLVNERTRQINRLRWHLHELDPEFDVPVKGFAIVKQRRRTHEWLEGKPGLVAELARDVLADINAGSAKIDELEKRITTLVQDRYPHLLALPGCGPLSAAKIVGETANIDRFRSEACFAMNAGVAPLPVWSGNTRGRVRMSRTGNRQLNAALHRIAITQTRLPGLGQAYYRKRLDGGDSKVEALRCLKRRLARVVFHALLAEQKPQEHTPDLPLAA

SEQ ID NO: 464016 - protein, 472 aa, unidentified
MGRFNIGVTAFLYVKIAFPSTNKCDFEHADLSLYKQYSFIARQSVNAVYPRNFLKGILSMALKIVYQICCGIDVHKTFVVACIASTNKGVTTYKSHRFSTFTKGLKELLQWLCDNNCKDVCMESTGKYWIPVFNVLEDSCNITLAHPKYVKAIRGKKTDKKDAKWIADLFKHDLIAGSFMPPLAIRQLRDLMRYRFKLTNFMSSEKNRLQNCLTVSNIQLGNVVSDTFGKSSMNIINRLLANPLDNSFDIAPLIHSSMKNKLPELELAIDGLITPEQAEKLKVIKQHYEDLKLRKADLEKIILSLSAPYAEEINLILTVPSFKNIFSAITVVSEIGANMDVFPTAKHICSWAGLTPTNNESAGKKKSVRISRAGCYLKPLLVQCATAVVKSAKHPEIRNRYLRLKKRRGHKRAIIAIARMLLTAIYNILKKKELYNSDLYRKADVLPVTREITVEQAILLAKTQGYRIMTAS

SEQ ID NO: 464017 - protein, 323 aa, unidentified
MSVVGIDIAKYSFDIATVQANGKHRTKGKLANDPAGFEALQQWLLKHADPQAWIVMEATGVYHEALAEWLYERNYRVSVLNPAQVAYYARSQLQRVKTDKVDAKLIASYGDKHQDELRIWKPDPPSLRRLKALVRRLKDLQELEQMEQNRLDVTSDARVVESIRSVLEHTRQQIKETLEAIKKHFDDNDDLRGKRDLLMSIDGVADKTAALLLAELGDLDRFDGSRAVTAYAGLNPRLQESGKFKGQTRISRTGSATLRAGLYMPGVVSITHNTAIRAMAERMRAKGKTGKQIVCAAMRKLLCIAYGVLKSGMPYDAELALAR

SEQ ID NO: 464018 - protein, 460 aa, unidentified
MIRSVGIDLSRTGSHQVRCLDEQAKPCDSFSFESTLGGLEAFEKRVFSEGATPTIVFEPTGLSWIPMAAYLRARHPECRLVKAKLQKVAALRRYLRSHAKSDRVDGVTLAKMPFIDAEQLDEAYLPPAEYHALQRLTRQRERLMKGLTTRKNRIGSIINGYLPGLRKAFSNEWSVRARAFYRQRLNPYGVVREGERALETFLTSVKARGALTESHHLYQACQKLVEFYNRSKAAGMVNEGFFDDLQDEIACELRLMETEEAEVERVSKRIEELYRHLHPSDHLRTIPGIGVRTAQVFMALVGDPHRFRSQAAFANWTGVVPGARQSADTEGKGLRMTKAGPSMMKRALFQAGDIARRYDPQLADLYYREMVHHGKTHLQAMGAVMSHLAARILVVLREGRPYELRDTQGRPISDRGARDLIRSEHKVPEETRQARRHRKSNEGRLTDPRTREAAKLLVLD

SEQ ID NO: 464019 - protein, 336 aa, unidentified
MTIIRVGLDTSKHVFQMHGVDENEQPVLRRQIRRGAVEKFFAKLPSTRIGIEACGASHHWARLLRGLGHEVLLMPPQYIKAYVKRGKNDKIDAEAICEAMSRPTMRFVPVKTAEQQAALTMLGVRDLLVKQRTMLINAIRGHAAEFGVTTAKGPKQIAELLARLASDEDVPVLAREMIGVLASQLNGLDIKLKAIEARLMTWHRQDQTSQCLATIPGIGPIGGVSFALKVPDAKAFRSGRRFAAWLGITPREDSTAGRQKLGRISRAGDEDLRRRLVIGATAVIRAAKPGRTAPWLMGLLARKPKKLAAVALANKMARIVWAMMVSGETYRRPAQA

SEQ ID NO: 464020 - protein, 402 aa, unidentified
MFFVGIDIGKRNHEAAIIDEQGKPIGKPIRFSNSKAGSEKLLEFINDHDLLPDNSLIGLEATGHYWLSVFSFLTALEFSVVPFNPIQSDTLRNFYIRKTKTDTIDAVLIAQVVRMDLPDQTYLPSEDIVRLKQLSRFRYSIVDQTSDLKRKVIASLDQVFPEYETLFSDMFGKSSTQLLLQSPLPEDLLETDAQKLIDLLNEASNGRLSIEKSTEKVHQLRELAQDSFGIRVATDVYKLQIQLLLQQILLLEEQLKTIEDEMAELVATQDQYLTTITGIGPITAAVILSEVGDIHRFERPNQLLAFAGLDASVHQSGDFTGTRNKLSKRGSPYLRRAIWQAAFIASNRDPALSIYYKNLRKRGKHHGTAVGAVCRKLVNIIFAVWTKGKPYEVHINPDLKAN

SEQ ID NO: 464021 - protein, 335 aa, unidentified
MKRYAGIDLSMETTHVCVVDAEGRRIGAQCVDSAPEAIAAALEQYGPIERAVIETGRMTPSITLGLRELGVAIVCIDARQAHQSLKAMKANKTDPHDAAGLAQLARTGFYKEVHVKSPAAHGVRSVITARGHLVEARVRLDNTIRGLCATFGIRLGVGQGERFLARMRLAAPVPGLGEAVASLLRARERLVVEIGKLDRQLKAISTASPVCQALMSIPGVGVQTSAAFAAAVDDASRFKRSRTAGAYFGLVPRRHQSGELDWTGRITKRGDSTVRKLLYEAANSILTRTKQSFALKTWALKIAKRRGLRKARVALARRLAVIMHAMLRDGTLFEA

SEQ ID NO: 464022 - protein, 343 aa, unidentified
MEQITTIGLDLAKSIFQVHGIDALGVPVVRRQLKRRRVLPFFAKLPPCLVGMEACATSHYWAREIAKLGHEVRMMPPRYVKPYVKRNKNDAADAEAICEAVTRPTMRFVPIKTPEQQSVLMLHRTRQLFVGQRTTLINAIRAHLAEFGIVAGVGRNGVEVLLELIAKGEDERVPAAARECLMALAAQLQLVKRQILEADRRVLAWHRSSTTSKRLEAIPGVGPLVATALVANIPDPSIFRSGRDMSAWIGLVPKQNSTGGKQKLGSISKAGNRYLRKLLVVGALSVIKRAKKLGYTKHPWLVQLMERRSTKIAAVALANKIARMAWAMMTRNESYRTPLPQAA

SEQ ID NO: 464023 - protein, 408 aa, unidentified
MRIIALDIHRVFAEAVMLDKGQISRLGRVGMTRDHLVAFARKLHRADHVVIEATGNAHAVADAIRPYVGRLVIANPRQVRLIAEARIKTDVIDAGVLARLYASGFLPEVWIPDAHTLSLRRQVTRRNQIVRQRARLKTIVQSILHAHLVPPCPHADLFGPSGRSWLIRQHLPADECDAVQRHLREYDRLSDDLRVVERELASDALANPEIKRLMTIPGIDMVVAVGLVAAIGPVERFPDPDRLVSYLGLNPTVHQSGEGRPRHGRISKQGRTHARTMLVEAAWQAVRGPGPLRAFYQRVARRRGTHIAAVAVARKLAVIIWHLLRRQEDYAWVRPALHAKKLRDLELRSGNPARRGQRGPTYAYNLKRTRQAEKHRAEQAETAYRRLTEGWSRRRRQAPTGAAKEERL

SEQ ID NO: 464024 - protein, 404 aa, unidentified
MNAVGIDVSKGKSTVAVLRPYGEVVVSPFDVAHTGSDLRALADLIKKLPGETKVVMEATGNYFESIARYLHEQNIFVSVVNPVLISDFGGNTLRKPKTDKKDSVKIASYALTYWLDLKEYTPQEDLRKSLKLMNRQYQQSIKLKTMMNNNLISLLDLTFPGINKLFTSPSRESDGHEKWVDFILEFSHCDMISKLTIKAFAKKYKKWSDKNSYHFTESSCEKIYAFAKDCVSSVSSDKAIVFSVVQAAKMLISATENCHAIQSEMNRVASKLPEYDTVMNMYGVGKAVGPQLMAEIGDPRRFHSRKAITAYFGYDSENNDSGQKTTRSNPMTKKGSGALRRTLFIIMQVLLQTKPQDNPVYDFLIKKKSEGKHYYSYINAAANKFLRIYYARVKEVLNVSEQMT

SEQ ID NO: 464025 - protein, 355 aa, unidentified
MKYYTSTTEFNCGIDLHAHQMYVCLMDRQGKKLLHTNIRNNDFDYFLKLVEPYRHDLTVCCECMFGWYWLADACQASGLTFVLAHALYVKAIHGGKNKNDRIDSEKLTHLLRSNLIPPAYVYPADKRPLRALLRQRTFFVWQRSDLLARIQSHQLAHNRPPIRQTRSNRDPWEQKLLAHEDNPLRQLALKNELAMIRHYDAQIAQLEEQLHRLTKESAPREYALLQTVPGIGEHLGMTILYEIGDIHRFPTVKDFLSYCRLVKGTVASAGKIKGLRGAKLGNPYLRWAFGESAVIAKRDHHIIGPLAQRLEAQMNGNKFKANTVLAIKLARAVYFMLKNKTVFDPQRLVAALTNK

SEQ ID NO: 464026 - protein, 362 aa, unidentified
MDVHKESFSLCAYTIEAEKASHYQRTEADYKKVLNYLEFLRTIYGDDANFICGYEAGCLGYTLYHQLTANNVKCIILAPTTMLEQRSKKRIKTDKRDAEIIAKCLAQHNYSPVHPTAKDEETKEFLRMRDDHKLALKKVKQQILAFCLRHNYRYDGNSHWTAAHLKWLKALTLGALYKEILDEYLLTYHTLSDKLERLDKRIEELSTQDEYKEAVKKLCCFIGVKTHTALSVLVEVGDFNRFASAQHFASYLGLVPGEDSSGNDQNRLGITKAGNRHVRLLLTEASQCYARGQVGFKSKELKARQSGNTPAVIAYADKANERLRRRYYKMVLNKCKKHNVAKTAIARELACFMWGMMTDNIA

SEQ ID NO: 464027 - protein, 334 aa, unidentified
MAKSVFQVHGVSRDERKVWRRRLARERWLEALVEKLEPGCEIGMEACAGAHHWARELQKKGFTVKLIAPQFVKPYVKSNKNDATDAEAVCEAMARPSMRFVAVKTLEQQDIQAVHRVRSGLIEQRTAKANQIRGLVAEYGLVAPRELGQLRIALPRWLENTENGLSGRFRRLLAGLWDDLKLLDDRVLELDREITSIAQSDPAAKRLQQLRGVGPIVASALVAAVGDARQFANGRQMAASFGLTPRQHSSGGKERLLGISKRGDRYLRSVLIHGARAVIRTASNKNDRLSQWVTALAARRHPNVAAVALANKTARIAWAMLRNGTDYRPDLVRG

SEQ ID NO: 464028 - protein, 386 aa, unidentified
MKRDDLSRSLVAFDQASTLVAVVELGLRSWLVAGLVPSLTRQPLKKLRSDPDALLGLLLRWRDQATKAGGRIKRMVVAFEAGRDGFWLARWLRARGIEAHVIHPTSIPVSREHRRAKTDRLDTGLLMRAVLGCLRGEPKHCSMAAIPTIAEEDSRRPNREREKLVGEQTRAINRIKSTLVRFGIRAFKIKLRQASKHLEELRGPEGEPLPPNTMAELRRDLARLQIIRAQITEIERARLERLKRVPRQGTNPMIRMLTKVMGIGIETADVLVHEVLTRKLRDQRAVARYGGLTGSPDESGIKRRERGLARAGNARVRRSMIQLAWRWLMYQKTSALAQWYQARTAGAKSGLRKAMIVALARKLLIDLWRYVTIGKVPPGAVLRPAT

SEQ ID NO: 464029 - protein, 339 aa, unidentified
MRLYAAFDLHSSNSYLGISDEKGKRIFKKKLPNDPATIKETLKPFKADIEGIVVESTYNWYFLVDLLREEGYRVHLANVMKTQQYSGLKYSDDKNDAFWLVEMLRLGILPEGYIYPKEERPIRDLLRKRGHLVRLRTSLIVSLQNIIARNLGGRLKSNDVKILTTDRVTPLFQGNEDLALAGKVSKEAIDFMTRQIKAIETTIGGRIHLSNPYDRLLSMPGVGKILAFTIQLETGSIDRFQKVGNYVSYCRKVPSGRFSNDKKKGTGNRKNGNKYLAWAFSEASDHARLFDSESRRYYQRKLQKTNAPIAHNALAHKLSRAAYYIMRDGVIFMPDKAFS

SEQ ID NO: 464030 - protein, 400 aa, unidentified
MLSIGIDVSKGKSTVCGMKPGGEIVYTPFEVQHTREGMSELVSLLRGSGEEVRAVLESTGSYHCPVVAALLENGIFVSVVNSLRMKRFCSQSIRKVKTDRIDAMQIALYGLAYWQELQPTRLPEDTYRELQLLARQYYQMTSMLIKAKVDFNAICDQVLPGMQELMNDHAGRHKLSDFVLRYRHTTHILEMGETRFRKDYCKWAEKKGYRNCERMAVLIFATAQNGIPVLPNAPSTQIVITEAIRVLHTVEASRDAILTQMQALAKTLPEYSLVREMPCIGDTLAPRLIAEIGDVRRFHSKRALIAYAGIDAPPYQSGKFCANNRHISKRGNRYLRKTGYEVMQSYVMHKPANDPIFTFIEKKRGEGKSGKLAMVAGLNKFLRVYYGKVTELYRSLPAIE

SEQ ID NO: 464031 - protein, 387 aa, unidentified
MPQPNDLSRSPAALDQDSTLIAVIEMSQSSWLVAGIVPGIERHPAKKLEPDEAALLRLLHRWRDEATKVGRTISRIAVAFEAGRDGFWLARWLRTHDIEAHVIHSSSIAVSREHRRAKTDRLDTALLKRAFLGWLRGEPDHCSMAAIPTIEAEDAKRPSRERESLVGERTRIGNRMKSTFARLGIRGFKPTLRKASQRLEGLRTPEGTPLPTNTLAELRRDMARLRFINDQIREIEAGRLERLAQCADEGAHPMVRLLARVIGVGIETADMLVQEVLSRQLRDRRAVARYGGLTGSPDESGARRREKGLARAGNARVRRGMIQLAWRFLMFQKDSALAQWYRARTADARGATRKTMIIALARKLLVALWQLVTTGEVPHGVILRPAV

SEQ ID NO: 464032 - protein, 430 aa, unidentified
MTTHTYSTSPRAIIASHNQKISQNRAVQPLTVDLADQSIIKELNGKRPLGLDLATKKYRLCYQDDFGRMINVELRKNELRKMLRETPGKYHLCIEGCSGASYWERFAIENGHKVKVVPGYVTRKLGWNQPKDDFNDAYNLYNALFNPLVPSCQTRTEDELAISALISQKEALLKSLNEQVNKTRSFLIETGEYDCVVKGGGSAVQAIELYISNHIHAASEHKRSIRCLEGFKRMILSLTREIDEINETLSEYGQTNKQVKLLLTIPGVGIETAVPIAIGAKNIERFESARQFQAYWGYHPTHGGSGGEIEIGKMSSNGDRALKRTLYESALSLNHQGRYKDEPRSEWIYTKVTQNKAAFKKGMIVIGAKILRTAYGVLKTGMPYNPAIDNSLGRIKTKIHKRSNPKYKEQNINAVLQNKYEKELTLAALG

SEQ ID NO: 464033 - protein, 319 aa, unidentified
MAQNDLVVVGIDVAKDKVDACIRRFTLRQTFPNTAQGHRKLVAWLRKYKVGKAVMEASGGYEREWRNVLHKAGIEVRIVDPRRVRSFAQSAGRLAKNDPIDAEMIAWFAETFSQAPGQIPDAAREELAALAKARTALVGVKIRLQAQDEHAAPEPARKAYARVLKSLAAEIDKLEAAISAKVKATPEFAERAEIIESVPGLAQATSAILVAGMPELGQVSDKVAAALIGVAPYDDDSGKRRGERYIKGGRRWVRNGIYMPCLGAATQCNPVLKAHYQRLLAKGKEPKVALVACMRKLIIILNTMLARRQKWNPGRHAMG

SEQ ID NO: 464034 - protein, 347 aa, unidentified
MSIVAEQFDHVVGIDTHARTHTYCVVHSRTGAVVDTATFPTSAAGCQRALAWIRRRATTTVLAAVEGTSSYGAGITAVLVEAGIDVAEVRPGARSSHAHAGKSDLLDAEAAARAVLGRDYATLARPRHRGDRVALRVLLAARSLIDQQRSANRNALTALLRSVELGVDARKPLSNAQIKTIAGWRTAQADTATVIARAEARRLAASVVDQTRQLADNMNQLRTHAEQLAPGLQTTSGIGPMTASVIICAYSHRGRVRSEAAFAALAGVAPLPASSGNTTRHRLSRSGDRQLNRAFDTIVRTRMTFDPATRDYLQRRTAEGKTRREARRTLKRYVCRSVFRQLEVCMA

SEQ ID NO: 464035 - protein, 315 aa, unidentified
MNQVPPSVGIDVSQGTLDVAVCPGGEQWQLTNDDAGIGQLVERLRTLQPVRIVLEATGGYELAAVAALGIGGLPVVVVNPRQVRDFARSTGQLAKTDALDAQVLALFAARIQPQLRPLPDATTRELSAVLARRRQLIDMRTAETNRLKLALEAVRGDIREHLRYLDKRIQDFDRELHDRLRNSPLWREKDNLLRSIPGVGPILTTTLLADVPELGTTDHKQIVALVGLAPLNRDSGRWRGKRSIWGGRGHVRAVLYMATLSAVRRNPVLKALYQRLLQAGKPRMVAIVACMHKLLRICNAILMHGIPWRYQPLDN

SEQ ID NO: 464036 - protein, 414 aa, unidentified
MSLIINKACGLDIHKHFVIATTLSRTGEKEQKRFERDDEGILALKSWVISERCNVVACESTSDFWVPIYDTLVNYVCVIVGNARDMKAFTHKKTDKIDSEFIAQLALNGMIKPSRIFPPEHRQFRSLVRLRFKLVQKRTDIKNQASSILSSQMLHLNDVLTDIFGKNGRKILSGICAGQSIENILNGLTHTVRKKAEQIRDVFKNEIPQSVLIRLKSCLEVIGNIDAQISVLENYIFSYVYKYHKREMDILTSCPGIGELSAATLIAEIGDFRDFSSGDKLASWLGVVPNVYQSADKYYNGRITKRGSKVARWILTQVAQAAARTKNSNFKMFFSRKIKTIGFQKAIIALARKIVTIIWHLITNDEVYSDEAGYHKGETQKKKIVEVLKISVDEGISIISEVVSVLSKKDPDVT

SEQ ID NO: 464037 - protein, 350 aa, unidentified
MTIIGCDYHPGFQQIAFVDTETGDYGEQRLAHSEGAEKFYRELAAQGKKVRVGMEASGHARWFERLLAELNFELWIGDATEIARKRERKQKTDRQDAQHILQLLMENRFPKTWVPSGENRDLRQLLWHRHRMVQTRTRIMNQLQAVALNEGLRCKKKLWREKGRQQLEAFRLAPWASRRREDLLQLLDRLNPTISDLTQAIEQEVEKCPEARRLRTHPGVGALTALAFVLIIGRAERFQCGKQIAAYLGLVPLEDSSGNRRRLGHITKQGSSILRFLLVEAAQVTARSIPEWRNKYVHLTMRRGRKIAKVAMARRLAIALYWMWRKGWDYEQLRKFGSHAGQPGNRDGVK

SEQ ID NO: 464038 - protein, 275 aa, unidentified
MRIIGVDLHTRQQSVAMLDTDTGEVIEKTLEHEGDEVREFYSALPGPVLVGIEATGSMPWFLKLMEELKIECRVGHPAKVRAAEPRKQKHDRRDARLLLNLRAENRFPAIWMPSTEQRDLRKLLRHRHQWVRMRTRVQHTLQSLALANGLRRGATLWSQVGQHALQALPLAPFAGQRRAALLALYPVFQKAIDDLDQRVSEQALLHPQARRLMTHPGVGPVTALATEVFLGNPLRFVDGKAVASYIGLIPSERSSGRRQRLGKLSKEGNALVRYL

SEQ ID NO: 464039 - protein, 343 aa, unidentified
MQTITTVGLDIAKSVFQVHCVDADGKVVLRRQLKRRYVVAFFQKLPPCLVGIEACASSHHWSRELQALGHTVRLMPPAYVKPYVKRQKNDAADAEAICEAVTRPNMRFVPTKTPEQQSCLTLHRTRHLFIRQQTAIINSIRAYLAEFGIVAPVGRNGVERLLEVVADAKDTRLPEIARACVAALGTQLLALKAQILAFDRRIMAWHRSNETSKRLDAIPGVGPALATALVASIADPKAFRSGRDFSAWIGLVPKQNSSGGKDKLGSISKQGDRYLRSLFTTGALAVIRYAKIHGTKRRPWLTALLARRPTKVAAIALANKIARMVWAMMTRGERYKEPVALAA

SEQ ID NO: 464040 - protein, 361 aa, unidentified
MAKSLKTRSRRSLSRELLKEKKFFVGVDVHKRSYHVSLWNEEHGLLGSWVQPASPRLLILKLEPFAANVGRIVYEAGPTGFTLVRALRSKGFSADVIAPSKMLVVPGPDAKSDRIDSHRLAMYAAKNLLTAVHIPTEEQEGDRQLVRLREQMTRKSRSIQQQIKSFLLMHGIDEPAGLANWTKAGIASLRQLHLSAQLRFCLDVMLDEFDHVKVQLVCILKQIRQLASEERHRKTIDLLQTVPGVGLLTAIVFRTELVNPQRFSDGGQISRMIGLAPGIRESGDTRREGSILRSGNARLRWVLVEAAWRWVAGDLAAAKIYHRLVANTGSAKKAIVAVARRLGIVLWKISIQQREYTPQPT

SEQ ID NO: 464041 - protein, 333 aa, unidentified
MVKYIGLDAHSSSCTLCVTDAHGREIDSVRLETNGKVLKEYVRSIAGTKKLTFEECELSRWLFGILSPEVDELVVCNPVANRQYKEAKTDKLDARKLATLLRGGFLTPVFHDGSERERFRALMSSYQDIVDEGVRLKNRYRSLFRKNGRRIRGETLYHDESLLEGLPRSDDRFIGSHLYRLLTMLEQSRQAYVKEICRSTTRFKELTLLKTVPYIGDIQAAKIVSQVVNPHRFRTKYKYYSYCGLVRHARISGDRNYGTTKIWGNRVLKCVYKMAGHAAVRGTGELRAYYDALRQRGISDQNAYNAVCRKIAAITLSMWKHNTRYDKQMIRAI

SEQ ID NO: 464042 - protein, 336 aa, unidentified
MSKVTVFVGLDYHQDSVQVCVMDREGSVLANRRCPNCWSTIRSVVHRHGRQVRAAIEACSGAAELAEELVSRAGWSVDLAHPGYVARMKQSPDKTDFADARVLADLERVGYLPQVWLAPFVIRELRRLVRFRQQLAGQRRNCKLRIRALLRDGRVKPPGVRAWTVAWMKWLQTTREVSEQTRWILDRQLVQLAYYSGEIKAVEKRLDELVADDPVVEKLLSLAGVGPVTAVTLRAEIGRFDRFRDGKQMARFCGLSPRNASSGQRQADAGLIKAGNPELRAVLIELAHRLARCDLRWASLAGRLRANGKPGSVVAAAVANRWVRWLHHQMQTVQAA

SEQ ID NO: 464043 - protein, 340 aa, unidentified
MEWTVAVGVDTHKDAHVCVALDRLGRQLERASFPASEAGYGACLAWALALGEPAFAVEGCGSFGAGLARVLTGAGLPVWEAERPRRRERRRGKSDTLDALRAARRLLSDGEGLSELRSLPGREALRVLLVERRSAVSARTQALNQLHGLALTAPTRLRERLETLAGERLAEAALRLRPAERADVDERVLVEVARRLGRRAQALTRELAALDARIAELVRSLAGKLLAEPGVGPVCAAQLVVSSGDPARLRSEAAFAALAGTSPVEASSGRQKRHRLNRGGDRRLNEALHVIALNRIRHHPETAAYHARLLERGKTRREARRCVKRVLARYSYRQLCALLA

SEQ ID NO: 464044 - protein, 474 aa, unidentified
MARTRSRPASPPVPGDAGAEVTDEPVQVISRAAAIDVAKGSGMVCLRLPHESRAGRRTQKVWEVTATFASVVALMDHLVCQGVERLVLESTSDYWRIWYYLAEAAGLEVWLVNARDVKHLPGRSQTDRLDCVWLCKLSEWGMLRRSFVPPEPVRDLRALTRLRANLTHDRVRHQNRIEKILEDALLKVSSVISDLMGGSGRRFLQALADAERSPAALAALGDYRLHASKAELREALTGRFRDIHGFEIGMLLELIDDLPAKITELDERIEAQLENVPGLGGVCTSCGQPGPDGPCTGCGEPVLGVIARLDEITGIGRGAAQVIVAELGTDMTQFPTPGHAASWAKLTPRAIQSGATSKAGRTGKGDPYLRGATGVAVMTAARTGTFLGARYRRHARRRGKQKAIVAGSRTIIEIAWRVIADPGFRYIELGPDYHDQLDPGRKTRDKIRQLEKLNPGMTVTLTPRPERGGQSPAA

SEQ ID NO: 464045 - protein, 412 aa, unidentified
MDVMVARQGALDVHKASVTACVRVPGADGVRVQQVKQFKTTVGGLLVLADWLKAHGVTDVVMEATGDFWKPVWHILESDFRLMLVNARDVKNLPGRKTDVGDSVWLCQLAEAGLLRASFVPPKPIRDLRLLTRYRRTQIAERRRETQRLHKALEETGIKLDCVATDILGKSGRAMLDALVAGTTDPEVLAELARGKLRPKIPALREALEGRFEPLHAVLISAILQHLDFLNAQIDQISTGIEEQMRPFSAQAELLCTIPGVAARTAELLIAEIGVDMSVFPSAGHLASWAGQCPGNDQSAGKRRSGKTRKGSKHLNATLTDAAMAALRTNDSYLQALYRRKKPQLGHARALGAVKHSMLCAIWHMLTTGELYNDLGGEYFARRDPERQTRRLVKQLQRLGHTVTLQQAPLAA

SEQ ID NO: 464046 - protein, 316 aa, unidentified
MADQQTVEFKQMASRCCGLDVHKKEIVATVEGEGISKETRSFSSTTRSLTELKDWLLALGITHVAMESTGVYWKPVLNILEPGGFTILIVNARHIKYVPGHKTDKKDSAWICKLLRAGLLKGSFVPDQSQRDLRDLTRYRRKLVQNLAAEHNRLIRIFEDANLKLSSVFSDVTGKTCTAVIDNVIKGNTDPEFLASLCTHWRLKSTQEEIALAVEGKFREHHKFMLQAIRRSMENLTAEIKELDEEITRRMKPFEEEIARLCQIPGISKTSAKDLLAEIGVDMEVFPNAAHLASWAGVSPGNNESAGKKKLAHEPW

SEQ ID NO: 464047 - protein, 343 aa, unidentified
MDHFAGLDVSVKETSVCVVDDTGKIVREAKVTSEPAALLAVLANPAYRFKRIGLEAGPLSQWLFSALAETGLPVICVETRHMRAALKAQINKTDRNDARGIAQMMRAGLYRPVHVKTLRSQKLRMLLTHRKLLQSKAIAIDNDLRGTLRNFGLKVGMVGAAKFEARIKELVKNLPDLAVLVEPLLVVRRVLREQIGVLHRRLLAVVRDDDVCRRLMTIPGVGPVVALTYRTAVDVPARFRRSKSVGAVFGLTPAKYQSGESDRTGAISRCGDEMMRVMLYEAAHIMLVRSTKWSWLKAWAMQIARRRGLKKAIVALARRLAVVMHRIWVDGTEFRWTRETAAA

SEQ ID NO: 464048 - protein, 314 aa, unidentified
MNTEPLVIGIDVSKAEFVLVVHPTGETWTSDTTPPGIDQTVTQLVARHPALVVLEATGGYEATLAAACATADLPVAIVNPRQVRAFAQALGRTAKTDAIDAGVLALFGARVQPSPRALPSAETQALAALVARRRQLLEMLTAERQRLQLVDRGPVARDLRNHIRWLAKRVGDVDDEITGQIQRSPLWRAQEDLLRSVPGVGPIVARTLLAELPELGTLDRRAVAALVGVAPYNCDSGQFRGRRLIWGGRAPVRATVYMAALAASQHNPVLARFYQRLRTAGKPPKLALVAVMRRLLTILNAMLKQQTPWRAPAT

SEQ ID NO: 464049 - protein, 343 aa, unidentified
MKIYALGIDLGKTVFHLVGLDSSGQVVVRKRCSRTQLLAFTGNLQVQLIGMEACSGAHFLGKALRAQGHDVRLMPAQYVKPYVKTNKSDYIDAEAIAEAVQRPRMRFVPIKTEEQLDLQALHRVRERWVMRRTAVVNQIRSLLLERGLTLPKGRSHLGQMLPRILEDAELKLSGAFRVLLAQLKLELEQLAARIEQMDMVIQQEARENESCQRLTTIPGVGPVTATALIAAVGNGSAFGKGRDLSAWMGIVPGEYSTGGKQKLLGISKRGNKYLRRLFVQGARSVLQHRDKQAPGLSCWLAQLLARTHQNVVVVALANKLVRIAWAVLSKNENYRAPVLAGTT

SEQ ID NO: 464050 - protein, 425 aa, unidentified
MEVLFTRCAGIAVHKRTVVACRVVLTDDGAWLRETRTYATTTDDLLRLSDWLTAGGCTHVGLERTGEYWKPVFNLLEGRCAVWLRNAQHIQAVPGRKTDVRDAEWIVELLRHGLVRPSFLPPRQQRDLRELTRHRTTFVRERATLANRVQKVLEGTNLKLAAVVTNVLGASGRAMLAALLAGEEDVTVLADLAKGKLRTKRDELARALRGRLRPHHRFLLTALLAQIAGLDATIARFDAAIARLCAANEEEDVVTLLDTIPGIGRAMAELLVAEVGVDMRRFPTAAHLAAWAGVAPGKNERGGRQRAGKTRTGNAWLKTALVQAAHGAARAHGTALAARYRRIVARRGAQRASMAVAHRLLIIAYHVIAQRAPDRERGADYLDRQQPAALADRLLRRLRQLGVELQVLPTTRPPESADNALARAT

SEQ ID NO: 464051 - protein, 347 aa, unidentified
MLHAGLDLSRSRLDFCLLDADGQLVRRGVASPDRGELTRLVEDMQTVGGPVVAAIESMNGARFVHDTLELAGWDVEIADAQKVKGLAPLACKTDRIDAWVLAELSRRDLVPAIWLPDPGVRTERERARFRLHLVKHRIMFKNRIHSTLIAFGKPCPVSDLFGPGGRQLLQELDIPEPWRAHINTALVMLDQLDEQVVVCEAQLRALGADHPYVPLLQTIPGVAWVLGFTIAAEIGDISRFASPKKLCGYTGLCPRVYQSGSKDHRGPLAKNGPKYLRWALIEATIHAAHHPAYATHYERTKQRLGRQRGKKIARIEVARKLAEAIWHMLTNGEPFAPARSHVSPLAA

SEQ ID NO: 464052 - protein, 316 aa, unidentified
MERSSEIIGIDVSKARLDVAMYPSGKRQSLVHDKTVIKELVKGLTKVKPTLIVLEASGGLERQVTRALASAELPVVVVNPRQVRDFAKATGQLAKTDSIDAWVLARFGDAVRPALRPLPEEATLEIRALTARRRQLVEMTVAEKNRLARASKSVRKGIKAHIAWLEQQLERADNDLDRSIRQSPVWKEQEELLRSVPSIGPTTSRVLLAELPELGTLNRKQISALVGIAPLNRDSGTLKGRRMIWGGRATVRSTLYMATLVATRFNPVIRDFYKRLRSKGKAAKVALIACMRKLLTILNSMIKHKTRWSETFLQTP

SEQ ID NO: 464053 - protein, 342 aa, unidentified
MNIPVRIGMDTSKSVFQLHGVDENEVVVVRRQFRRAEMIRYFERLPPVLVAIESCGSSHHWGRLLQSFGHEVKLIPPQYVKAYVKRGKNDAADAEALCEAVTRPSMRFVPVKSKERQAACMLMTVRERLVSVKSQLSNAFRSYAAEFGIVGPAGRQNVAALIKRVLEDDSVPEMARDLFRLQADEYAAVEARLAKIEAKLMKWHREDDISRRIATIPGVGPIGSSMLSMKAPPPETFRSGRDFAAWLGLTPKDHSTGGRQRLGGITKAGDSILRSTLIVGATALLRHVRKGRHKPTPWLASLLERKPPKLVAVALANKFARIAWRLMISGGVYNQPVAAMPT

SEQ ID NO: 464054 - protein, 340 aa, unidentified
MGNVTTIGLDIAKNVFQVHGVDADGAAVVRQRLTRGRMLKFFAKLPRCLIGIEACATSHFWARELVALGHDVKLMPAQYVKPYVKRGKNDAADAEAICEAVTRPTMRFVGIKSPEQQSAMMLHRVRLILNRQRTQLSNAMRAHLAEFGIAAPIGRNGIEQLLDVIADPTDDRVPADARFCLEMLAAQLRIVKEQILENDRRILASARETELGRRLMEIPGVGPLLASAIVATVPDAAIFRSGRNLAAWIGLVPRQNSSGGKERLGSITKVGHQYLRQMLIVGAMAVVRYAERNGAKRPWLVQLLARRKAKVAAVALANKNARMIWAMMASGERYREPQIA

SEQ ID NO: 464055 - protein, 346 aa, unidentified
MSYSTTVGVDLAKNVIQVAVVSAGGKELLNRALTRRKFAEFLCKQKPSLVAFEACATSHHWARAAKRHGHEARIIPAKFVAPFRQGHKTDSNDALAVAEAARRPSIKEAPIKTVEQQGLQAIHRSRQLLIQECTALSNHLRGLLMEFGVVIPQGFASLLRCLPEVLEDGDNELPDLYRPTLHRMYTRLLELREQIEAMTKEVGLLVKQHPICSRLMALEGVGPIGALLLYATMGSGAAFSGSREFAAYLGLAPKQYSSGGKTNIVGLSKKIGNCRLRSILILGARAYTYRLKEPKSAKDRWLKDAIDRNGHSRAAIALANKNVRTAWAMVTQGTDYQRRGQLKVAA

SEQ ID NO: 464056 - protein, 344 aa, unidentified
MNKTIVGVDLAKNVIQVCIYRNKKVQSNTEMTPDEFLSWLVTSKAVLIVFEACGMSNYWKQRATEKGHDARLISAKLVSAIRQNQKTDKNDALAIVQASLLPEVRFISGKSVKQQQLQSIKRLRELAIKHRDALKKQIVALLLELNIRVPNGSARLINKIDDILEDAENELSIEFRKALQVAQQQLNTAIKSVLIYDDCSEKSIQAHPECKKLLKLEGVGPINAINLYIALGCADLGTFNKGKDASACIGVTPAQHSSGGKVKIGTIGKIKNSTLRSQLISGAMSVVKQVVKREARTKKEVWLKSLIQRRGNKCAAVALANKTVRTAFAMLTQGTEYKAELLAA

SEQ ID NO: 464057 - protein, 338 aa, unidentified
MEYKRISIDTSKHVFTIHGVDEAERPALRRDLRRSQMEKFFGKLEPTEVALEACGGAHHWGRRLSAMGHRVKLIPPQYVKPFVKRNKNDRNDAEAIGEAASRPSMPTVPVKSVEEQAATVIVKHRELLVGQRTAAINALRGHAAEFGVIAAKGTANVEALLAMLAETSEIPPAAKVAFAAMGAHIADLDTKLAAMEKQLLEQHKSNPISQLLVKVPGIGPITAITLALSVNPTNFESGRHFAAWLGLTPRENSTGGKHRMGRISKAGSKRLRSLLVVGATSVIRVAKPGRPSSSAWLLGLLARKPKKVAAVALANKIARVVWAMMARGEAYRRQPSAA

SEQ ID NO: 464058 - protein, 428 aa, unidentified
MNEVDRNRLEEFRQLRQEIRQSEEHLIVGIDIAKDRHHAFFGTATGKTLLRRLVFSNDGEGFGKLLDQTEALRVRHGLKKVVYGMEPTGNYHKPLGEYLIHMGRMVVLVSGVTAKHNRESLDGRWDKHDDKDSANVADLISQGKCLYYEYPPAQLRGLRGLLSLKRRLKRQEQSYRVRIRNHLIAQYFPELDSHYGRSEAQGLAIVRWCFPASHITEIDVDPFIERVTSRRVRVEKRRRLEALWEKSGESIGCDEVPGLDHEVKVMVEGLRQVREMIKETKDRIEELCKRYPEYPFLLTIPGFGPDVSAKVLGAIGDPDRFENGKQVLKQAGLDLSANRSGKNSAQAIPQISKQGKADLRYALYQAAFIASTKNRGFMRYYTSKLRGREKEKGIDGKRLVKLSAKMLLIAWTLMKKKEAFNPAYLNAE

SEQ ID NO: 464059 - protein, 416 aa, unidentified
MNAVGIDVSSRKSTVAVLRPLGEVVCLPFDVTHDIVGLASLAEKLKTIDGETRVVMEHTGRYYEAVAKALHEAGFFVCAVNPLLIKEYGANSLRRVKTDKADAIKIARYALDNWADLRDFTPMDAIRYDLKTLNRQFQLASKQRTASANNLIALLEQSFPGIRKCFDSPVRSDGTQKWVDFAHSFWHVDCVRKQPFPAFCERYRKWCKRHAYLFKLSNAEEVYALAKRAVVLTPKSKVVKVLVQEAANQLISISRSVEVYRAEMDRLAAMLPEYPVVMAMYGVGKSYGPQLMAEIGDVRRFERKQALVAFAGIDPMPNQSGDKNVRSNKSSKRGSPYLRKTLFNVIRTYLQCAPQDEPVFQFLNRKRAEGKPFYVYMLAAANKFLRRYYAKLRDYFASLDTLQSVDPIPATLKASL

SEQ ID NO: 464060 - protein, 359 aa, unidentified
MFTERTSVGLDVHARSVAAAAIDGVTGELIQTRLSPAHDHIRSWIGALPGPVAVTYEAGPTGFDLSRMLSAAGIRCEVAAPSKLQRPAGDRVKTDKKDALHLARLLRMDEITAVVVPSVADESARDLVRAREDCRRSLTQAKHRLNGLLLRHGLVYYDGRPWTGRHDRWLQGLRFDQVGTRLAFEDNYETVVAALARRSRLDAQIEQMAAECEQVDLVRRLACLRGVAVLTSFALAVEIGDWHRFTGNSLGAFVGLVPSESSSGGAISRGPITRTGNGHARRLLVEAAWHHRRAYVAGKTMRARWEQATPAAAARADEGNRRLHRRWARFDARGKKAVVANTAIARELAGWCWSLAVMD

SEQ ID NO: 464061 - protein, 324 aa, unidentified
MTELVLGIDISKLKFNVCLINREGKLRHKLFSNTAAGFEQLRDWLSKQQVESVHACLEATGTYGDSLSLFLHQAGHTVSVINPAAIKAFAQSRLSRTKTDRADAELIARFCLAQAPPAWTPLPAQVRDLQALVRRLESLIEMRVMEENRLSSGITVGSVRQSIEEHLTYLNHEIKRTEELIRSHIKNHPTLKQQSELLNSIPGIAETTAALLLSEITDIKQYRSARQVAAYAGLVPRERQSGSSVRGRTRLSKIGNARLRRALYFPAITALRCSPFFQAWAKGLQERGKSKMSVICAVMRKLIHLAYGVLKNDKPFNPEWAKSA

SEQ ID NO: 464062 - protein, 349 aa, unidentified
MGEVSTIGVDIAKSIFQIHGVDAEGAVVTRRRIGRAKVLEFFTGLPPCLVGMEACATAHQWARELKKLGHDTRLMPPTYVKAYVKRGKNDANDAAAICEAVTRPSMRFVPIKSVEQQSALMLHRTRDLLIRQRTQLINALRAHLAELGLVAAKGHEGLHQQVTAVAESSDELLPSNARFACQAIVAQLSAVQTQINGLDKRITQAHRANADSKRLEAIPGFGVILSTAVVATITDPKAFKTGREFAAWIGLVPRQNSSGGKERLGSISKQGDRYLRRLLVLGAISIVGTARTRPDKYPWVTELLGRRPAKVVAVALANKMARVAWAVLAKGETYRAPTRSSGAAIAVAA

SEQ ID NO: 464063 - protein, 361 aa, unidentified
MRIIGCDLHARQQTLAMLETTTGEVVNLTLMHEGNEVRDFYSQLPRPVRVGIEATGSMQWFLNLMEELGIECRVGHPATIRAAEPRKQKHDRRDADLILKLLAENRFPAIWLPTKELLDLRALVLHRHQWVRMRVRMQNALQAIALANGLRRGPGLWSYDGQAKIAFLPLLPHASYRRSALQTMYKHMEEEIENLTKQVAEQAGHRSGARLLMTHPGVGPVTALATDVFLGDPKRFVDGKALASYVGIIPREYSSGERQRLGGVTKQGSPLLRFLWCEAGAHAVRRDPELQRFYRRKLVQKGLGKARVAVARKLGIRLWIMLRDEIDYEEFCRRGQKQQSGAACAGMLEVRNGANRHRPID

SEQ ID NO: 464064 - protein, 389 aa, unidentified
MKKMINCIAKNQIIFVGLEDSKRTWKLCVRSGGIVIQETSMPAQYAVLLAYFRNGFPGCKIKVLYEAGFKGFTLHDRLAADGIECVVTPPHTVTQEKDSRMKCDKIDARRLAINLENGDFKTCYVPDKELREDRQASRMLIQVQKDITRQKNRIRKFLDFHGYEEEFPAGAWYDRDYQKLEELSIAEPLQYCLTLFLNTLRHLEETKKKLVCRLKELSKKPRYAPTFQLFESAPGVGWYTAIRLVLEWGTDIAKRFSSEKKIAAFTGLTSSEYSTGETVRRGRITGQGNRAVRAWLVKSAWTAYKKDPALLHKFQDIYSRTSSKKKAIVAVARKLTVRLRTLVVTNTPYQLGRCPLKIALKTKTMKRQPRQVSEGSVQRSASCAIAARH

SEQ ID NO: 464065 - protein, 422 aa, unidentified
MSYCPVAGIDVSKQFSDMCILSPDNKIFAQEKIYHDETSINRANALLQKAERLFFSKPVIVMESTSHYHLILFQFFSEHGYDVIVVNPLQSNSMKDFSIRKRKTDRVDAFKLAMMYRTKTLRPSQIPQTATRALRQLCRHRAELLNDVSSYKNRLTALLDQTFPGYDKVFSDVGGVTSCAVLVRFPTPTILLVEEESELVEVIAAACKSGYSFAKKKAGLLISAAQKAQTLGIHSCADETLIVCTIQMLRTLSESVLQIETAIDDLLAQIKEMRNNVSLLQSIPGIGSHSAAFLLGEIGDISLFKKPKQLAAYFGLDPTERQSGSFRGTKNKLSKRGSPYARAALHMGVVNSICKRGKDSAANPVLLSYYEKKCKNKPAKVAQAASMHKLVFIVFAVLRDQMPFELKTPEQHAVEQGFVKAA

SEQ ID NO: 464066 - protein, 383 aa, unidentified
MIVIGADTHKGSHALAAVDVGTGKVRGHRGVKADDAGHLAAVRWARGLDNDRVWAIEDCRHVSRRLEQALLSAGERVVRVPPNRMGVSRKGEREAGKSDEIDALAVARAVVKDGVEQFPVAFLDERAMEIRLLADHRGDLVAERTRTVNRLRWHLLELCPELEASLKRGALNRTRVLARVDRRLHKLPAGARVQIAREQLAQLRSLNRRIDRLHGDLATLVTAYLPKLLAEQGCGVLTAAILIGHTAGNERFHSEAAFGRQTGTAPIPCSSGKQTQHRLNRGGDRQLNHALHIIAVTRARHDPATKEYLARKAAEGKTTKGALRSLKRHLARRFYRLLAEPPADQLQAGIDNTITEDESALTLRSQRATEQITSAPAPMLCIT

SEQ ID NO: 464067 - protein, 392 aa, unidentified
MRAVFGIDVSKASSEVAILVNGEKVHGYTMSNDALGFARLLGDLRTVHKPEIIFEATGVYSRRLQAFLDEHGYAYTRLNPLEAKKQLDSLRVRKTDQIDAEKLAQSQFVLNRKPTYVQEEVYQNLRALSRFYQNLTEDIVRAKNRLHKVLQVTFPELENILSTPSGEQYWNLVTAFPCKDELSESIRQSTSKRISDKRVAYLAEKLIALANQSYCAVKKTSPILEEVRYYGKELLRLSEQRQTVLDQMVELAQPLPEYDILLSIPGIAETTATSIIGELGDIRRFQSANQINAFIGIDLRHYESGNFLAKEHITKRGNPYARKILFKCIHNIASASHTNPCHIADFYEKRKRQSQTTSTKPHTIASIHRLIRTMYYLITHNKLYDYRSTQNQ

SEQ ID NO: 464068 - protein, 401 aa, unidentified
MVSDFMKGRYNLMKIFVGIDIAKLNHFAAAISSDGEILIEPFKFTNDADGFQLLVSKLESFDKNSIIIGLESTAHYGDNLVRYLVTEFYQVCVLNPIKTCQMRKNNIRKTKTDKVDTFVIAKTLMMQDDLRFITFFDLDMMDLKALGRFRQKTIKQRTRLKIQLTTYVDQVFPEIQYFFKSGLHQNAVYALLKEAPSPKEIASMHMTHLANLLKVNSHGHFTKEQAKELRVLAQKSVGANDSAISIQITQTIQQIELLDSQLDKIEAEMTDIMKFNDSVIMTIPGIGYINGGMILGEIGDIHRFSNPNKLLAFAGLDPSVYQSGNFQAKTTRMSKRGSRVLRYALVNAAWNVVRNNATFKAYYDAKRAEGRSHYNALGHCAGKLVRVIWKMLTDEVEFNLE

SEQ ID NO: 464069 - protein, 306 aa, unidentified
MENIALIGIDLGKNSFHIHCQDRRGKAVYRKKFTRSKLIEFLATCPATTIAMEACGGSHFMARKLEELGHFPKLISPQFVRPFVKSNKNDFVDAEAICEAASRPSMRFVQPRTESQQAMRALHRVRESLLQDKVKTTNQMHAFLLEFGISVPRGSAVISRLSTILEDNNLPLYLSQLLLKLQQHYHYLVEQIKELESQLKRKLDEDEVGQRLLSIPCVGTLTASTISTEIGDGKQYASSRDFAAATGLVPRQYSTGGADNIVGHQQARQQEDTNLAGSVRQSIYTKTGTPVRQVGRLGPGVTVPEK

SEQ ID NO: 464070 - protein, 414 aa, unidentified
MRIIYQNIAGLDVHKKSVVAAIIVQRADGLWYQERRTFGTMSADLLSLSDWLMENVVTHVAMESTGEYWKPVFNILENNFEVILVNAQHLSKVPGRKTDQSDAEWIAELLQHGLLKASFIPPVGQRELRELTRFRATFVRERATLINRVQKVLESANIKLASVASDVLGVSGRAMLEAIIEGQASPEQMADLAKGRLREKRDELVKALEGRVKAHHRFLLTELLCQIDSLEETIARFDQEIAEHCRPFEDAVALLDTIPGVARATAEAIVAEIGTDMNRFPSADHLAAWAGVAPGNNESAGKRYSGKTRKGNKPLGAALNQAAHAASRTKNTYLSAQYHRLAAKRGRKKAIVAVMHSILVMSYHIIQRKEPYRELGGNYFDQRRPEITAKRLVKRLENLGYVVSLQQTSAVVVG

SEQ ID NO: 464071 - protein, 383 aa, unidentified
MMITTTRTAESTAPTSCLLLAFELGQRSWKLGFSVGMGQRPRIRQIPAGAVGTLATEIERAKKRLGLPADSPVMSCYEAGRDGFWLHRYLVALGITNYVVDSSSIEVNRRARRAKTDRLDLAGLLSLLARYVLGDRRAWRVVRVPTVAEEDARHLPRTLEALTQDHTRLMSRLKSLLVTQGVSLPINARFLNRLEAAHLWDGTPLPPGLQERLTRTWRQLQEVDGQIRDLKALRLTRRENLTPATSHALTQLLTMRAIGPIGASVLATEIFGWRRIRNRRELGALVGLVPAPYQSGETDYDQGITRAGNAHVRRVIVQLAWGWIRHQPDSALTRWYQQRFGGGGKRGRKIGIVALARKLLIALWRYLETGVVPDGAQLKPMEV

SEQ ID NO: 464072 - protein, 377 aa, unidentified
MIIAVGMDVHKDKCAACARFAGKGEPKPKHEEFLKNFNREFRRFDSDYRGMTAFADALRDHEVHVLIENSTKSHDVYWMLRNLGIDVIVAHASDLKRITESQTKNDDNDAFELAGYMRRRLWGEIEFAESHIPEPETLLRREVCRFDLNLRSELSALKRQIRSHMLIRGWKLTRDYKDVVCASALRELRHSGIDIFLYDVAKAEYLKKLIFETERNIRFRMEGDPLFDGVWSIPGFGVLSAAYFSCMIDDISRFPDGKSFSAHLGLTPKLDESADKGKNCGMSRRGDPNMRRLIAQATFVHIFHTESFISRKYQRLKSRGKKHSEALVACANSMAKLVFAILRDGSKYAADPEVLARARALADSDEVEDEMEAVGSR

SEQ ID NO: 464073 - protein, 331 aa, unidentified
MSEVMYAGIDVSAKTLVLATIDYQNNPTKAVSFANNTRGYSKLFRYLHKLGPAWHVCLEPTSKDHLAVARRLHRTAWITASVVNPKVVRDFAGSVSFRAKTDAKDAQLLAIFAQRMTPAAWEPPTVSQMELREVSRYIDNLTKRQTAIKNRIYANKKAEAPAIVGTELRADLRYVQAKIARLRKAALVLVKADQEMAWHYKQLNSITGVAMASGIRLVAELCVLPDGLAKGQWVATAGLDLVVKESGTSLKGKRRISKQGNKYLRRALNIPALVATRYCPEVKAYYEKLQARGCCKMSALCAVMRKLLQAIWGMFRSKTLWNPTLFCQVTP

SEQ ID NO: 464074 - protein, 369 aa, unidentified
MLQETYDTEELIQRVAALDIGKAELTCCVRVPSPTAPGKRSQEVTTYKTMTRSLLVLADRLRELGVTRVVMEATSDYWKSPFYLLEACGFETWLVNAKDVKHLPGRPKTDRLDAVWLCKVAERQMLRPSFVPPQEIRQLRDLTRYRVDLIGVRTAEKNRVEKLLEDAQIKLSVVASDIFGVSGRAMLAALVAGERDPKVLAQLARQRLRAKLSLLEEAFYGRFSDHHAFLLQTMLDRIDQTSAAIATLEAKIEQQIVPFQAAVDRLDEICGVGRAAAQVLIAEIGVDMGRFPTPGHLVSWARFAPGVKESAGKKKGKASTGRGNPYLARCWARRPWPPGGPTPSWASATGASRGAAAPSGLWWRSAARS

SEQ ID NO: 464075 - protein, 459 aa, unidentified
MAKPASLARMCTYCFGMDSYSHHTCKGDLSMVKPFLSVGVDVGADFSFMSVALPTQELLGKPFKIVHIETSSLSGAVSCIRKAEELNSLKARIVLESTGIYHIPLFCYFKEAGFDVIVINPLISYSSRNFSIRKVHSDKLDSKKLALLGLNPNLKTSIMPVELVLNIRGLVREYYSLVDNRVAYTLKLLGVLREAFPQYLGVFSKVTGTAALMVLEKYTLPENILAADPDALAADIAKVARRKVSTISGQRDRLIAAAKAAQSFGRALSCHATLIRLYVGIIKGFNEAVAGILRQMTTIVLDNEHEPFIQQIRLLQTIFGVGFLSAVTLMVEIGDFNAFQKPKQLPAYFGIDPEVKQSGNFKGTRVKMSKRGSSLARRILYMMALSAVSNYKNGLPKNPALQAYYLEKCRSKAKNVALGAIMHKLCNIIFAMLRDNKPFEMIWPEEHCRRRDALKNTAA

SEQ ID NO: 464076 - protein, 353 aa, unidentified
MRIIGCDLHARQQTLAMLDTMTGEVLNRTVLHEGNAVREFYSELPRPVLVGIEAIGPMQWFLDLLEELQIECQVGDATKIRAAEPRKQKHDRRDAELILKLLVEKRFPAIWMPNKALLDLRALLLHRHHWVRLRTQIQNALQAIALANGLRRGPGLWSYDGQAKIAFLPLPPHASYRRGALQTLYRKMQEEIENLTAQVAEQAEQRSGAGLLMTHPGVGPVTALATDVFLGDPQRFADGKALASYVGLIPGERSSGRRQRLGKITKQGNPLLRFLWTEAGVHVVRRDPELKRFYRRKLVQKGLGKARVAVARKLGIRLWIMLRDQIDYQEFCRRGQKQQSSAACAGMPGTRLV

SEQ ID NO: 464077 - protein, 448 aa, unidentified
MKRTQKMQENGLRLQGKTIIGIDPAKNKHQAIILRSDGSVCGRSFSFETNHTGFTETLPQRIQQRLATPDDTDVVYAIEGSCALWQNLAFHLSEQGHEVVLISPLATYHARPSITGDFSRTDSKDAELIARLAQQGSYREMPGHTDHERALHRMAICYDKLRKSRQRHYARLRSLVERLFPEFLSVLTLDTKTARYLLSEALLPDEFLTLETGRVVVGMQRASRHQHGQATLLRLQELARHSVGQTRGRAERGVEHLVAETWLSVIELIETQIKTLTEALVEAASESPCFAPIKSLRGISSLMAALFIAELRDPGLFTHWKQIEKMAGVNLYVSDSGQYRSRRRISHLGNSRLRWLLYQMVSETSKYVPEVRIKYLQRRLKHGGSRTKHLVACIPQLLQLLMALMRQGRCYEERPASLAQMQHLEARYQAVQRSKGKRRAQGTRQKAA

SEQ ID NO: 464078 - protein, 456 aa, unidentified
MAAVMIGVDPHKASHTAVVISAAEEPLGEVRVRACAVQAERLLAWAAAWPARTWAIEGADGVGHLLAQQLLAAGERVLDVQPKLSARVRLLAAGATGKNDPNDAQSVAVAALRSPSARAAAADDHAAVLRVWSKRHRDLGRLRTQVVCRLHAVLCELLPGGVAAQITAGQAEQLLRSITTSDAVAAARRGLAAQFTEDLRGIDAQMRATKKKLAVAVRAAGTSLTDLFGVGPVIAAIVIGDVRAVSRFPGPGHFAAWNGTAPVEVSSGRRKIYRLSRRGNRRVNHAIHMAAVTQIRYRHTAGRAYYDKKRAEGKTGKEALRALKRQISDAIFTCLQADARAAASANGPGGQPGNDSGSSAAGSHPAHRLFGQATPGPATQPMTPATAALPPRAVISRERAAGSRTRRSLAAQRRTQGVLDPGAREPAIPAAGKRARQQPKAIAERTPHRTKPARSS

SEQ ID NO: 464079 - protein, 352 aa, unidentified
MLIIGCDYHPSMQQIALVDTERGERGERRLMHREGEAERFYRELKQRRVEVRVGMEATGYARWFERLLAELSFELWIGDPARIRARRVRKQKTDRQDAQLLLRLLLEEDGFPRIGVPSPEHRDLRQRLWHRHRLVQMRTRIMNQLQAVAMNEGLRGKRALWSEAGRKQLESFLLAPWATRRRKDLLQLMDRLNPTIRELTGAVEKEAENKPEVQWLMSHPGVGPLTGLAFVLIIGTPQRFHGGKQLGSYLGLIPCEDSSADGQRLGHIRKQGSSLLRFLLVEAAQGAARVDAEWRRRFLHLAMRRGRKIAKVAMARRVAVGLYWMWRKEWDYQQVVKFGSHVGQLELRHGVQ

SEQ ID NO: 464080 - protein, 404 aa, unidentified
MEVIYPRCCGLDVHKKTVVACVITPEGQETRTFATMTKDLLLLADWLSHCEVSHVAMESTGVYWKPVYNLLEGTGLTLLVVNARHIKAVPGRKTDMKDAEWIAALLRHGLLRASYIPDRPQRELRELVRYRRTLIQGRAQVVNRIQKLLEGANIKLSSVASDVVGVSGRAILEAMVQGMEDPQALADLAKGKLREKRLALEEALRGLMGPHQRLLLQSHLRHLDFLDAEITALDEEVAARMAPFESALVRADSIPGIGRRTAEAILAETGVEMSRFPTATHLSSWARVCPGNNESGGKRRKTSTGRGNPWLRSALVESAWAASRTRETYLSAQYHRLAARRGAKRAIVALAHTILVILYHLLRTGKTYQDLGSNYFDERQRQYVLHRAVHRIERLGYKVSLEAA

SEQ ID NO: 464081 - protein, 354 aa, unidentified
MSQTPSTAIAVIGIDIGKNSFHVVGHDTRGTVVLRQKWSRGQVEARLANMPPCLIGMEACVGAHHLSRKLASLGHDARLMPAKYVRPYSKGPKNDFNDAEAIAEAVQRPTMKFVATKTAEQLDLQALHRVRERLVSQRTGIINQIRAFMLERGIAVRQGIGFLRTELPTILATRTDALSPRMLCVIEELAGDWRRLDQRIDSLSGEIEALARQDQACSRLMTVPGIGPIISSAMVAAIGTGDVFSKGRDFGAWLGLVPKQISTGDRTILGKISRRGNRYLRVLFVQAAWVVLVRIKNWERYGLRSWIEAAKKRLHHNVLAIALANKLARIAWAVLAKGRAFELTRTNDAGVRPA

SEQ ID NO: 464082 - protein, 410 aa, unidentified
MEVLYRRCCGLDVHKETVVACLRVVSGDEVIREVRTFETTTASLMALSEWLAKNGCTHVAMEATGVYWKPVWHILDDGDFQLILANAAHVKNVPGRKTDVNDATWLADLLAHGLIRASFVPDTQTQELRTLLRTRKQLVREKSSHILRVQKMLEDANIKLDSVITDVMGMSGRAMIEALIAGESNPAKLARLANYRLRASQEKLREALRGRVTKHHRFLLRLHLNQIDALDASIVMIDEQVEAGIAPFRAAVGQVMTIPGIRDIGAQVIVSEIGTDMSRFPSEGHLISWAGLCPRNDESAGKRRSNRLRKGAPWLKTTLVQCAWAAVRKKGSYLQAQFLRLKARRGPKKAIMAVAASILTAIYHMLKDGTLYQDLGSNHFQNRSKGQQTKRLAKRLADLGYKVALTPLAG

SEQ ID NO: 464083 - protein, 391 aa, unidentified
MIYVGIDVAKDKHDCFITKSDGEVLFKAFTITNNLDGFNELHQKITSVMDDVTKVKVGLEATGHYSYNLLGYLIDKGLPTYVINPLHTNLYRKSLSLRQTKTDKVDARTIASMLMSDVNLKSYSDISYHNEELKSLTRYRFDKVKERAKLKTSVSRLVCILFPELEKLVPTLHITSVYALLSEFPGAKHIATAHLTRLTNLLSEASKGRYGKDTAITFRDAARASIGSNMPAKSLELKHTIKLIQELDSEIDEIENEIKIIMDEINSPILSIPGINYRMGAMIIAEIGDFNRFDSPDKILAYAGFSPSTYQSGQQDGAYAHMEKRGSRYLRYALYNATKYVCHWDPTFAAYLAKKRAEGKHYNVAISHAVKKLVRVIYHLEKTKQQYIKAA

SEQ ID NO: 464084 - protein, 360 aa, unidentified
MPSMEQDRRRRRVVIGVDTHKHVHVSVALDAIGGVIGTRFFAADSGGYVQLIEWAVSLGGGTLTFAIEGTGSYGAGLTSAVRRAGIGAVEVMRTDRRDRRLRGKSDTLDAENAARAVLAGNATAIPKTNDGTVEMIRQIKVAKDLAVKGRSAAIISLKTVIVNAEPELREQLQSLPRMALIERCAGLRPGPVNTVLAATKHTLRAIARRWQQLNTEVAEHEKILTRLTKQLVPELVAAHGIGPDTAAEMLIVAGDNADRVRSEPAWARLLGVAPVPASSGMTTRHRLNRGGHRQANSALYRSVIVRMQFHEPTKAYVARRTTEGKTKREIIRCLKRLLAREIWTLMRPFREASATTGTAT

SEQ ID NO: 464085 - protein, 343 aa, unidentified
MAEVSVLGIDLGKTSCSVAGMSVSGQIVLRRRVARDGLAALLTKLPPCVVAMEACCGAHHVGRGAAALGHQVRLMPPEYVRPYVKAHKNDDRDAEAIAEAATRPTMRFVPLKAEAQLDVQALHRARERLVAERTALINQMRALLLERGIMLPQRRRAVAIWVDAPRDATAPDCLSPRIRLLVSDMRAEWAELDRRIAVFDEEFAASARQDEAARRLATVPGIGPINATALVAAVGDASAFGRARDLAAWLGLVPRQATTGGRPKLLGITKRGSRYLRKNLIHGARAVLPRLAATQTRLGCWLRGLLERAHKNTVVVALANKLARIVWAVLARGRSYEAAAAAA

SEQ ID NO: 464086 - protein, 355 aa, unidentified
MKNTIVGVDLAKDVIQVCIYTNKKVRSNIEMTPPEFIEFLANYTSLTIVFEACGTSNYWKQKAISLGHDARLISAKLVSVVRQNQKTDKNDALAIIQATLLPDVTFISGKSIEQQQQQQQQQQQQQQQLQSIMRLRELCVKQKTAAGNQLTSLLLEFNIKVSSRNSGLKGAVESTLEDAENGFSFEFRKALSEAWQLYLSVIKSIHTYDECLECAIEGHTDCKKLRQIEGVGTLNAINLYIALGCADLGVFNKGKDASACIGLTPIQYSSGGVTKLGSIGKYVKSSVLRSQLITGAMSAVNHATRRKAKTKKDQWIQEMVERRGKKCTAVALANKTVRTAFAMLTQNTEYKAELI

SEQ ID NO: 464087 - protein, 321 aa, unidentified
MQTFHLGIDVAKAKLDCALRLPTGKYRTKVVENNLKGFKALIEWLSNQGATTAHVCLEATGLYGEDVAEVLAASGMNVSMVNPAQIKAFGASRLVRTKTDKVDAQLIAAFCAERSPAPWQAPTPSEQALRAMVLRLDALQTMRTQESNRLAVAREAVKPGIVEHIEWLDKQIDALIEAIREHLDNDPGLKDKQALLDSIPGLGERTIAVLLAFYANFERFGNARQAVAFAGLDPRQYESGTSVKGKPRLSKIGHAFLRKALYMPAMVALYKTAWGKRFRARLAASGKPPKLIIGAMMRKLVHVVFGVLKSGKMFNPALHGG

SEQ ID NO: 464088 - protein, 320 aa, unidentified
MIITNVTFPQLIQRGCGIDVHLKVVVATIDGVGLQKETRSFSTFTSCLTEMKEWLLANGITHVAMESTGVYWKPVMRVLEADIPNVWIVNARHIKNVPGHKTDKMDSEWICKLLLAGLLKPSYIPPKEQRQLRDLTRYRNKLIQTIAAEKNRMMRVLEDCNIKLSSVVANTSGVTATALIDMLCDGRKLTMEDIESVYHKKLSASPQELLEACTGFVEEHHVYMLQMIRKSIAQTQGLVDELSKRIKDILVKYDNVLELLKEIPGFNTKVVEDLVSEIGLDMSAFPSEKHLASWAGICPGNNESAGKKKGSPAKVCGLTY

SEQ ID NO: 464089 - protein, 408 aa, unidentified
MGRRCIGLDVHREFAQVAIWENGQVRHAGQVTITGEALTVFADSLGPEDEVAVEATCNTHAIVRAIEPHVARVIVSNPVKTRAIAEAKVKTDKVDAAVLAELLAADYLPSVWVADEDTQALRRQVARRTQLVRQRTRLKNQVQAILHRNLVARCPFADLFGVSGRCWLADQPLPQDEHFAVQALIRQLDFHGQELRIIDAALGRVALARSEVRRLMTIPGVDATVALGLVAAVGDFRRFRTPEQLVSYLGLNPRVKQSGGKAAAHGRITKNGRSHARGMLVEAALVASKTPGPLRAFYQRVRARRGIQIAIVATARKLVCLCWTMIERDQDYAFARQSLTDKKLRALELRAGMPARRGKKGTAADYSLKEVRRRELTLAEQAENAYRQQVADWHANGPARKRTLVAMT

SEQ ID NO: 464090 - protein, 367 aa, unidentified
MSEDITYIGLDAHMETIHAAILLPGSQDSVLDSFANTPDGLRRFARRIKKRAPGPIESCYEAGPLGFGLQRSLIALGLGDVVIAPSLIPKKPGERIKTDRRDARKLADLFRAGLLTEVHPPTPEQEAVRDLCRAREAAKEDQKRARHRLSKFLLRRQIRWTEGRKAWTRAHQEWLRGRRLPHPADQAILDDHLLALEQLEGRLCAFDEQIEALAAQEPYVEAVGHLRCFRGIDTLTALSIIAELHDVQRFASPRQLMAYLGLVPSERSSGGVEKRGALTKTGNRRVRRLLIEAAWHYRHRPAVGYRLKKRREGQPALVIAIADRAQQRLHRRYRRLLERGKPHNKAVAAVGRELVGFVWAVLQPQES

SEQ ID NO: 464091 - protein, 459 aa, unidentified
MNSRRRANNKREEGVPLPVIQPKVAGIDVGSREHWVCGPARRDGEPNVRVFGTTTDQLNALTDWLVEQGVESAAMESTSVYWIPLYELLESRKIQVVLVNARQLHHVPGRKTDFSDCQWLQLLHSCGLLRGSFRPGDAIVRLRALQRQLGNLVAERTRCVQWMQKALDQMNVQLHRAVSDLTGTTGMAIVRAIVAGERNPVTLAVHRDRRCHKSVDEIARYLTGNWREEHLFNLACALKLYDAVEQMIASYDARILQEMEALQAPQRRNQPVPRHPNPAKESALKSRGEQEARAQQWRFAGVDLTRIDGISATTAQIVLTEVGVNLSAFPSENHFVSWLRLCPRTPISGGKPIKKRRNAFGASRITASLRMAAVAMQRSKTALGAAFRRIARHKGAAVAVFAIARKLAQLIYRLLRFGQDYIDIGAAAYEERFRVRRLSSMAQAAKQLGYALVLAPATA

SEQ ID NO: 464092 - protein, 337 aa, unidentified
MKRYLGVDLHRTQFVVCTRWENGEQEIRQWRIGELARFVEQLQPEDQIAVEAMGTTAHFYDAIVGRVARVVVVNPHQFKVISESVKKTDRKDAQALALYLEKDLLPEVRMKPKQNRELMHLAETRDLLVKQRSALKGKINNLLAMQGIELKREALSSKIALARVLALPVSGMVQLELRILVEQIRSLSESIVELDERLEEEGQQLPGYENLTSIKGIGSLSATVLLTVIGKISDFADENKLASYLGLVPKIANSNESERSGRITKQGNKLARTALVQCGLSAKRYSPYLQGFYERIKQRRGGGKAKIALARKLVKIVYDTLKNQWVFEDFPSFTLAA

SEQ ID NO: 464093 - protein, 421 aa, unidentified
MELEPQELVKVFRERACGLDVHFAFVAACLIVPGKGKRLKVLEATFETNVKGLKRLKAWLTENGCEVVGMEATGVYWMPVYAALEGAFDLEVANPLQIKTLRGQKTDRKDARWIAEQVRYGRIKRSFVPPPEFRDARRLARFRRQLIQARTTISNEIQRTLAESGITLAAWVSDILGVSGMAILKALVEGRSIQDELPDCLKTRLKKKMAPIAAALEAPLGEVSRSILALHLERLEALEGHIGKVENDLFKVLEPHADKLALLMTIPGLAHMSAAIILAEIGVNMAAWPTEKHFSAWAGVAPGSKETGGKAKRAPVRKGNPYLCTILMECAGPAVKKKDCHLKPKYHRLSKQLGSKMKARMAIAHKLALIIYRNLGAGSEYKELPPMPLSKKSKAKIREARIRDLQRLGYKVTLEPLEEVS

SEQ ID NO: 464094 - protein, 411 aa, unidentified
MEVIYKRCCGLDVHKEIVVACLLIWEGGRVSKEIRTFLTMTVDLVVLHDWLKAHQVTHVAMESTGIYWRPVFNLLEEDFTILLVNAAHIKNVPGRKTDVKDSEWIADLLSHGLLRGSFIPPEPIRDLRDLTRYRKSLTDERVRQVQRLQKFLEGANIKLASVASNVMGVSGKAMLEALIAGSTDPQVLSELAKGRLRKKLPELRKALEGRFRSHHRFMVAEILTHLDFLDEAIERVSQEVTNRIVPFSKQVELMDLVPGINQRVAEGVLSEMGVDMSCFPSHGHAASWTGLCPGNNESAGKRKTGRVRKGNQWLRRYLIEASWAAVQKRGTYLSALYYRLVPRRGKKKAIVAVAHAILVMIYHILKDQVPYHELGSDYFNKLNATYIQRHHVKRLESLGFKVILEPVSKAA

SEQ ID NO: 464095 - protein, 346 aa, unidentified
MLSPQAEEPPMSELATVGIDLAKSVFQIHGVDENGRVLVRRQLRRGQLLAFFEKLPRCLIGMEACGGAHDWARKLQELGHDVRLMPPSYVKPYVKRGKTDAADAAAICEAVTRPSMRFVAVKSEACSSVLVVHRTRDLLVRQRTQICNAIRAHMTEFGVIAAKGAQNVDRLRTQLHQMPEAARLPVSLLFEQLVDTDTRIERLTREIEAAHAQSETSQRLVTIPGVGKLSATIIAATTPDVGNFDCARDYAAWLGLTPKPHSTGGKQRIGRISKMGNRYIRRLLYLGAMSQIMVRHRCGPRQDWLSDMLARKKTKVAAIALAHRMARTIFAVLRDGSRYQPLATAA

SEQ ID NO: 464096 - protein, 376 aa, unidentified
MERGSLMLNTTTFVGLDVHARSIKAVALDAMTGEVRSATFGYDAAEVAGWVSSVDPSAKYVYESGVTGFDLQKRLSSMGIDCVVGAVSKMIKPSADRRRKNDRNDAEFLARMLSVGNVVEVWVPDDECEAARDLVRALDDARDDLKRCKQRLSKFLLRHGHAFSETTPSGRRKGNWTAAHWAWIKSISFAEKADDDVLAYYIDATRQAMEDKARLERLVEAEASKPRWKRRVDSVRCLKGIDVMSAADLVFEAGEFSRFKNARSFAAWIGLTPSEHSSGESVRQGGITKAGNKHLRRVLVESAWHYPGCSPHSKDLAKGQAPDPGARRHAAKGVRRLVGRRAAMLERGVHKNKANVATARELACWCWAIGCMVENG

SEQ ID NO: 464097 - protein, 320 aa, unidentified
MLSFCGIDVSKDRLDVMVLPEGHRSSVPNDVAGWAELVEQLRDCSIAAIGIEASGGYERGAMRALLAADLPVRQVNPFKLQQFARASGVLAKSDPLDARMIASFVATMPTRPAPRQARAAERLTEMLAVRRQLSAEKVAAENASRLLEDAMLQRLSRRRIARLAADIDVLDQRLVEIVATDVALAHRYRLLTSMPGVGCVLACTLIALLPELGRLSRKQVAALVGVAPYAFDSGALKGRRCIWGGRANVRQVLYMAAMSASNWNPVLKAFHDRLAAAGKLPKVVIVAVMRKMITMLNAMVRNDLVWAERRSGRHIVPTAC

SEQ ID NO: 464098 - protein, 309 aa, unidentified
MSSWVGIDVSKNTLAVWVRPSGVNFIVCNSSEGHQALLLNLADIQVERVLLEATGGYERAVMGCLAQAGHSVVRINPRRARAFAQAMGKLVKTDPVDAGVLAHLAQVIEPSACQPVSLARDELQELVRRREQVVKLRDDERRRLTLARSGVVQESLQTNISQLNEQIARLNSAIEAAAQRTDNQLVKQLGAIAGIGPVTVASLLAYLPELGQLSRRQIAALAGLAPYNNDSGQHSGKRCIKGGRASIRRVLYMATWSVIRCHSSFGTRYASLRARGKCAKVALVACMRVLLIRLNAMVRDHSSWRAEAV

SEQ ID NO: 464099 - protein, 355 aa, unidentified
MGLETIQRNLSIREFSGMNKTGWIGIDVAKHTFQAAVADQTAIPRQWASLPTAQFEHSAKGVGQFVRWLRDMGWTKRNVAGICIEATGRYTQQWVELLRRPLAPVCVVNPARPKAYGQSLGIRDKSDRVDACVIALYAKATQPDPTPADSCVQRELRELSRLHRALEKQCQANQRRLDDGPSSAFTRATLKKTIVALLRQIRRVEQAMERVIRNDENLSKDFKRAKTVKGIGAKTATLILAEFGDLRQYNRDEVVALAGLFPREYTSGTSVHKKSRLAKAGKASVRAALYMCAMSAIQANANLRQFAKRLEENRKEPMQVIAAVMRKLLLLVRAVVVSETDYDPNYANKLQSQPA

SEQ ID NO: 464100 - protein, 356 aa, unidentified
MRGEYQKEKVLARGKDVYIGIDVHKEKWHVTARVDGEEVFHGSMLSEYQSLRKFLQRFKVCKIKIAYEAGPCGFGLYDKLSADEIETIVVPPSLIPVESGNKVKTDKRDSRKLAKLLEGNMLKRVYVLTEEDRANRELVRTRRQVMEHRGDVMRQIKSKLLFHGIKSPFPSKQGWTKRYVKWLRALHLEHEVVKVSFNTLIDLYEYLGIQLMKISKKVIALSRSDKYSHKVKLLRSVPGIGILIAMELLVELANIERFKTADEIASYMGLTPSEYSTGQHVRQGRITRCGNTRARVCLVESSWHLIVKDLFWRGKYLKLKYRRGAKRAIIAIARNLIIRIRRMLLNNEPYVAAAAA

SEQ ID NO: 464101 - protein, 340 aa, unidentified
MKIYGAIDLHSTNNVTMVIDEQDRVVYQKRLPNDLPLILKELSVYQSELQGMVVESTYNWYWLVDGLMEQGYKVHLANTAAIQQYEGLKYTDDHSDARWLAHMLRLGVLPEGHIYPRAERPVRDLLRKRSQLVRQRTTNLLSIQNLLTRNTGESLSANRVKGLDVQQVDELLPDGDLALAVKANLSVMCSADEQTEVLERTVTDRVKLRPQFSFLKTVPGIGQILALTIMLETGDIGRFASVGNFASYCRCVGSQKISNGKKKGQGNTKNGNKYLAWAFVEAAHFAIQFNSKIKSYAQRKKTKTKGVVAIKAVAHKLCRACYYIMRDRVAFDVTKAFGQN

SEQ ID NO: 464102 - protein, 354 aa, unidentified
MEDTRGNIKQKKGGYHVRYFVGSDLHSRNTILGLLDEEGNRIYKVKVANFLPLILNELEPFRGGIEGVVVESTFNWYWLVDGLVEASYKVHLANPSAIKQYEGLKHRDDYHEAFHLANLLRLGILPEGHIYPKKERAIRDLLRKRLMLVRQRTSHILSFQGLYNRQTGCWLGGNDVKKLGEDDIDELFDEDYVALSAKANISTMRFLKREICEIERVVLSAMKLLPEFQKLKTVTGVGDILGLTISLETGNIRRFAKVGNYSSYCRCVSSQRLSNEKKKGEGNRKNGNKYLAWAFVEAANYAKRYCSYARRFHQRKTAQTNKIVAIKALAHKLARASYFVMRDRVDYDPMKAFG

SEQ ID NO: 464103 - protein, 373 aa, unidentified
MNTIYIGVDFHARQQTICYLTTETGELVTTALKHEPKTAVRTFYEQFRGQVIVGLEASGYSPWFERLLEELGHQVWLGDATEIRRRARWRQKNDRRDAELILDLMLHDEFPRLHRPSLQSREVMRMLRYRQKLIKMRTMSKNSLQSLALQSGIARRSRLFTREGKAELDAAVMSAAMQWQRAHWWQLLEALNQQALEAMTWLKAASQNDVSIARLRTHPGIGLLTSLCLVHTLQPVARFRNTRKVAAYAGFDPLERSSAERKHFLGISKAGSRVLRYLLVEAANTAVRKDEELKRFYQRLAHRRGRPKAKVAAARKLLIRAYIMMRDEIDYAEFRRRAVAARLARLRQGPPIPAALIGQPASTARQEPLPRGK

SEQ ID NO: 464104 - protein, 332 aa, unidentified
MIFVGVDWAQAHHDVHMQDECGKRLGGGRLPEGVDGIARFHELVGRHVEEVGEVVVGIETDRGLFVTALVATGYQVFAVNPMSTSRYRDRHSTSGAKSDPGDAKVLADMVRTDRHNHRPVAADSETVQAVRVLARAHQSMIWAKTRQTNALRSALREFHPGALVAFDDLSSADALEVLRIAPTPELARALSQSKIAAAFAPGWPPASHRRNGPPRIRVALHAEQLACPPAVSAAMGASVKAGVAVIATMVTQIAALAGELEAGFEQHPDAQVIRSLPGLGTILGARVLGEFGDEPNRYASAKSRKNYAGTSPITRGHQTGGAGSSCPQPPSR

SEQ ID NO: 464105 - protein, 356 aa, unidentified
MAVYVGIDVHKHYCQAALMSEQGEIAHELRFNNTTQGASSLVDLAKTVHPHIKAVVEPSANFWIRIYDKLEQEGVEVKLSNPMRTKAIAEARIKTDRIDAKTLAFLLRGDLVAESYVPTRKNRERRTLIRHRTSLIHMRVDIKNRIHALLDKHELTHNYTDLFGKQSLEWLHSLQLPTPDHEILQSSLQVVETLTEQIRSMDIQIAKDATSEEKAKLLMTMPGVDYYAAMVLLSEIGDVHRFSSDEKLVSWVGLAPQVHQSGESNWTGHISRKGSKRARWILGQCAQSARQHDPRMREFYERIERKHGSQKAVVAVARKMLAIMYVMLIRNEPYHGENPKLTERKHKRLDALANSA

SEQ ID NO: 464106 - protein, 354 aa, unidentified
MKRTAKYVGLDVHQATTVASVRDPGGRVIAHGILHTEECEVVGFLRGLRGSVSVALEEGTQAQWLHDVLEPVVDQVVVCDRRGKKRQGNKGDLVDADELSEQLRLGTLRPVYHGSAHQANLRELARAYRGVVGDATRVMQRLKALFRARGIKTPGARVYHPANRSEWVDKLPKGGARFRAEVLYAQLDALRMQRPKVKAAMMAEARRDPAWAALTSVPFLGPVRVAQILAIARTPWRFRSKRGIWAYSGLAVVTASSAEYTIVDGRPVRRRRAPITRGLNRNHNATLKDVFKGAATAATARRGPLQDLYLAMTEGGMRPELARLTLARKIAAVSLRLWKTGERYDPTQLTMQAR

SEQ ID NO: 464107 - protein, 349 aa, unidentified
MRFYNQQHRFYCGVDLHARTLSLCILDGAGQTVLARTIAASPDDFLQAVAPFRDGLAVACECMFAWYWLADLCHEQQIPFVLGHALYMKAIHGGKAKTDKIDAHKIAVLLRGGMLPQAYVYPKGMRETRDLLRRRTFLVRRRAEALVHLTNTNSQYNLPPFARKLAYAANRAELDVAQRFTDPSVRKNVEVDLALIGAYDRHIGALELYLVRTAKVDDPQAFHRLRSVPGIGKVLALILLYEIHDVRRFAEVGQFLSYARLVRCAHESAGKKQGTGGNKIGNAHLKWAFGEAACLFLRESEQAKKWLARREKKHGKARALATLAARLGRTVYHLLRKQEVFDARRFFAT

SEQ ID NO: 464108 - protein, 334 aa, unidentified
MENIALIGIDLGKNSFHIHCQDRRGKAVYRKKFTRPKLIEFLATCPATTIAMEACGGSHFMARKLEELGHFPKLISPQFVRPFVKSNKNDFVDAEAICEAASRPSMRFVQPRTESQQAMRALHRVRESLVQDKVKTTNQMHAFLLEFGISVPRGAAVISRLSTLLEDNSLPLYLSQLLLKLQQHYHYLFEQIKDLESQLKRKLDEDEIGQRLLSIPCVGTLTASTISTEIGDGKQYASSRDFAAATGLVPRQYSTGGRTTLLGISKRGNKKIRTLLVQCARVFIQKLEHQSGKLADWVRDLLCRKSNFVVTCALANKLARIAWALTARQQTYVA

SEQ ID NO: 464109 - protein, 407 aa, unidentified
MICVGIDVSKRKSTVCFMAPGDKIIRRPFDVKHTKEELQPLVDEIRVQAKYDEIKVVMESTGVYHLSIAYFLQQNGIFVSVVNALKVANFNKAENFRHTKTDSIDSTNIARYGIAYWAKLPQFDLNGDKYFLLKRLCDAYLNFSEERSRILLQLQSQLEQTMPGIFDLFGGFDINSGKDKLLDFLERYCHIEDIIAKSEAEFVASYCGWAKEKGYRSNESKAATIYAQAKNGIPSIPNNPIVRETIMWYVGLLRRADETLMASLTRMEDIARDLPEYELVGEMGGVGRVTRVALIAQIGDVRRFKNKHSLICFAGLTPSIHESGKFRALQNHIVKKGPARLRKVLYQVMMLLVMHKIPKDDAVYRFIKKKEAEGKYKKVAKVAGMAKFLRIYYGRVMHLYRDLGLAA

SEQ ID NO: 464110 - protein, 372 aa, unidentified
MPPCRECDRPMPLRSVKDRCRARVIALHPPSEPVQLPGLVARIIARLGQKEEAMTPAQVYVGIDVAKRRLDIALWPTGESRSLANDPTDINKLVTWLQTQQPQLIVLEATGGYERAAVASLATAALPVVVVNPRQVRDFARAIGRLAKTDTLDAAVLARFAEAVQPSPRPLPDAQMELLRALVTRRQQVVEMLTAERLRLASVQPAIQVLIQKHIAALEKELAHLEEELDRTIRQSPLWRARERLLRSVPGIGPTVTAVLLADMPELGRLDRRQVAALAGVAPLNRDSGQCRGRRCIWGGRARVRAALYMAALVATRHNPVLKNYYQRLLEAGKAKKVALVACMRKLLTILNAMLRDGTAWQETSVTHAIPA

SEQ ID NO: 464111 - protein, 468 aa, unidentified
MRKAKRNVKSAAAAAGKKRLTLLEQINFNAAGIDVGSREQWVAVPADRDPQPVRCFGTFTSDLHALAGWLLQCGVKSVAMESTGVYWIPVFQILESRGLEVLLVNARQVKNVSGRKSDVSDCQWLQQLHSYGLLAGSFRPEAQICVLRCYLRHREHLVEQASTQIQLMQKALTQMNVQLHHVLSDVTGVTGMAILDAIADGERDPLKLAQLKDPRVRSSVETIAKALTGDYRPEQLFVVKQARESYRFLQTQIADCDVAVDQVLSGWEAKVDLGQQPLPPTRKKNRSKSKHKPLPFNLREQLYRVTGVDLTEVDGLDGLSAQALISEIGLNMHRWPSEKHFASWLGLCPDHRISGGQVLHNQTRPVLNRAADVLRMAAQSLKDSQSALGAFFRRLKARLGPAKAITATAHKLARIVYLLLKYGHNYVDPGAQYYEQRYRENILKSLKKRAASLGYTLVENSALNVQVS

SEQ ID NO: 464112 - protein, 440 aa, unidentified
MKVVYQTCCGVDVHKSFLVATIIKTTSGVQPSYQKKRFSTFNNSILEFKKWLLDNSCRDICMESTGKYWVPVFNLLEDEINVTIANPKWVKAVKGNKDDTKDSKWIGDLFRLGLVPGSYIPCKPIRILREFTRYRYKLTSARSSEKNRFQNALTVCNVALDSVVSDIFGKSATSVIDYLLEQSNNSINHEEISSRLLRSLKKKSESVIESIEGYQMTDSQKYRMRLVHAHMDYITSTISDIDSMINSLVEPYDNAVKLLCTIPGVDRNSAITIISEIGTDMTQFSNSKRLCCWAGLTPGNNESAGKKKSVRITRAGVYLKPALVQVAHAAVKSDKPPYYKAKYERIMKRRGKKRAIIAISRMILTAAYQMLSTGEVWNPIDLYKIDMPAPLKEKQKEKAIKQAKKLFNRRGHCYRGATRLVKVLVKNQLCLKRLFLDSLF

SEQ ID NO: 464113 - protein, 343 aa, unidentified
MEYYVGLDVSLKQTSICVVDQSGSVVREGVVDSDPEAISVYVRSKAPGAVRIGLETGPTSTWLWIELKRLGLPVICIDARHAKAVLKMQINKSDRNDAIGIARIMQTGWFKEVHVKDIDSHTVRALLASRALLVKIKRDLENHVRGLLKNLGLVIGRAKFNVFAARVEELIEGRPELIAAIRPLLEARNAVEQQVSELDRKVMKLARHDAQVRRFMTVPGVGPITGLAFKATIDDPARFARSRSVGAYVGLTCRRHASGEVDWSGRISKCGDAMLRSYLFEAAGVLLTRVPKWSAVKAWGVKLVKRNGLRKAKVAVARKLAVILHRMWVDGTEFNWSKKEIAT

SEQ ID NO: 464114 - protein, 380 aa, unidentified
MTCKECGQVVRLTRTMNKCHSNTELSSHEGTRCQFNGGKAVIKLGIDVHQDFYVVVEQVGGSNPKPPQRFQKEAFLFWAARLKQKSGAQVYALYEACGFGFSLQRKLSALSIKCYVVCPQKLDEQNRRVKTDGLDAKALCLKLDRFVQGNRDALAIVRVPSEEEEQARAIHRQREQLVKARKQLEAQGRSLMVNHGLEPVQNWWKPRTFTALPMPQWMKELLANSQPILVALQQKIMALTVQLQSAASPEQPCGLGKMTSVVIDREIGDWNRFSNRRQIASYTGLCPGEYSSGNTRLRSCVTKHGNPRLRAALVELAWRLVRFQPKYKPIVKWRATLAKGALATGAARKKAIVAVARQLAVDLWRIKTGRLHAEELGLIN

SEQ ID NO: 464115 - protein, 433 aa, unidentified
MPTTHPYDLVIGLDRSDRKADLHLIDTRTGTVQKQTVATSPEALHDWLVQLRRDHPQARVAICLEQPAANLIVFLETYSWITLYPINPISLQKFREAFVTSRAKDDGKDAQYLAELLLSHPDKLKAWQPDDSQTRQLQQLVLHRRAVVDQRTGLTNRLKALLKQYFPQALDLCGEDLWRPLARAFLLKWPTLQSLKKARKESLKQFYYLQGSRSQTLIEQRLERIDKAVPLTDELALLQSYTLRVQLLCKELQLLLKTLQQFDQQIAKVFQQHTERPIFEAFPGAGPVLAPRLLASMGSERERFARPDNLQCLSGVAPVTKQSGGTCSIHRRYLCSKFLKQSFHEYAKESILHSRWAAAYYGQQRNKGCGHHTAVRALAYKWQRIIWKCWQTRTIYKEAIYEAALKKNKSPLIGLLDQIELGKSPVKSRAKKS

SEQ ID NO: 464116 - protein, 346 aa, unidentified
MLHVGLDLSRKRLDVCVLSEGGETLCVTTAPPDSDGLRGLSRRLAGFGQPIRAVIESMNGARFVHDELELAGWEVELADAQRVKGMAPLACKTDRIDAHVLAELSRRDLVPAIWLPPPGTRAERERSRWRQHLVRHRTSLKNRVHATLISFGHPCPTSDLFGGEGRRRLERMAIPEPWRSDITAAVHLIDELDTEISACDQALRQLGAAHPYIPLLNTIPGVSWVLAATIATEIGDISRFPSPKHLVSYTGLCPRVHQSGLHDKRGALSKSGPKYLRWALIEASFHAAKHPAYQARFEHTRRRLGKYRGHNIARVDVARHRAEAIWHMLSKHQPFCPGGSPLALVA

SEQ ID NO: 464117 - protein, 336 aa, unidentified
MIKYIGLDAHSSTCTFNVTDERGREVDNTTIESNGRLLVKYVRGIEGVKKLTFEECELSNWLYEILRPEVDELIVCNPVANKDYKKVKTDKMDARNLSKLLRGGFLMSVYHDGSKRERFRSLMSGYQDLIEEGVRLKNRYKSLFRKSGKKVKGEALYNDESFLEGLERPDFKFIGTQIYQLLEKMEGSRQEYVKEILRCSKGFKEIKYLKSIPGIGSIQAAKIVSQVIDPERFSSKYKYYSYCGLVRHKRISDGRGYGSEKIWGNRILKCVYKMAGHSVLKGKSGLRNYYDSLRLKGISHDNAYNAVCRKIAAISLSVWRKSEKYDDRLITGNLIK

SEQ ID NO: 464118 - protein, 386 aa, unidentified
MARKRTLSTLDTSIAYAVGLDLAKTDVALAAFDSDHKEPYLIDRIPYDKLYELLADMAPTLVAMEPCSGAHQIAEQIQELGHEVMMISGRHVQAWVKDHCNGQKTDLNDAFAILNLAYDRWLTPIRGKTREECRLLALQASYRQLKGQRTKTMVHVKATLHAWGFPIRAGSFNQKVLHELIDANREAFGDEVAETLHLMINRVRDLDHDIATVLKLLTEATKRDPRASLLRSIPGFGVLTTSRWCAVIGDIARFDSPKQTMAFIGLVPNNRITGHHTETSSGREARGQGRMSKRGDKMLRSLCIMGAGSLCLMVRNDRLPDCPFVASIKERLASPRPWFKVLVYVAAKLVRIATALLKYGETFSFEKAGISKAVLKQWELEQAKAA

SEQ ID NO: 464119 - protein, 378 aa, unidentified
MTNATPCMSELLAETRPARLRVEASPRPPGARKPETELGAVSTTAVPHPDSRSGPSPHLQGRVMDEQRTVFVGIDVSKDRLDVHLRPSGEAFCVPREGKGMDDLVIRLQGLSVALVVLEATGGFEATVAAALAGVGLPLCVVNPRQIRDFARAMGRLAKTDTLDAEVIALFAERVRPQARPLREPERVHLAELVGRRRQIIEMIGMETNRGRQAIDKPLARRLARHVAYLQKELDAIDHDIGDAIKHSPAWREAEALLKSVPCIGDVTARTLLAELPELGTVSRHQVAALVGVAPINRDSGLMRGRRAIAGGRTSVRAVLYMAALTAIRRRSPFRGFYDQLTAHGRPKKVALVAMMRKLLTILNAILRDHTPWRPLNA

SEQ ID NO: 464120 - protein, 348 aa, unidentified
MLADQLDYIVGVDPHRDTHALAVVDVRSGTIVVEATVAADSGGYAAALRLVDEHAPGRRAFAIEGTGSYGLGLTRFLTGRQERVLEVSRLRRERRSGGKTDALDAVRAARSVLSSDRPSTPRAGGERQALQALVAAREGAVNAKRAGLCQLRDLLVTAPEPLRSELRPLTRPRLLQRLAATRPHSRHDPELRGSLLALRSIARRLLRLTAEERELAREIETITRRLAPHLLDQPGIGPHAAAQLVLSWSHQGRITSEAAFARLAGTAPIPASSGQTVRYRLDRSGDRKLNRALHQILVTRRRTHPATIAYIERRLHEGKTRREANRCLKRYLARSLYRLLEHGPPNAT

SEQ ID NO: 464121 - protein, 403 aa, unidentified
MKHVIAFDISMGKSYMVIYNAQKQCVFESEIKHSKPEFKKLQEKIHELTDKTGELPKIVFEATGIYSRQLERFMQDNQYTYCLLNPLEAKLQCDSLRIHKTDRSDAHRLALTHFTATRRVFTGTDNLFYQLKSLSRLYSELDSELSIIRGRMHKVIQLTFPELERMFTSKSDLFLNFVQLFPHPDCILGLSKTIIKNRIRANTNKKISNITAEKKAIQILEIAKTSYPAVSQNDVLCDQLKLYARRYQELLHQKECCINKMIYIAEQRAEYDIILSLPGIGPNTAVRLMAEIGDITRFNNNKQLNAFAGIDIRRFQSGKTFFKDKINKRGNKHLRKLLFLIIQNMIKQRRYGQNHIVEYYDKLKTQPYNKCHKVASIACVNKFLKLLFHLITHDIHYDYRLTA

SEQ ID NO: 464122 - protein, 385 aa, unidentified
MGHQTFIPRDYDVFAGLDVDKRSISVTFTDHQGLLKSLRMPYNVEHLVNHVRKHFPNQKVAFAYEAGPTGYGLYDGLVAQEFRCLIASPSMIPKAPGQRVKTNRLDSVGLSENLRGGQLKGIHVPSPLYRELRHLTQLRDTFVNEMVGMKQRIKSLLLMEGVEFPPAPAGSQWSFMVKDKLRKLPCSSTVRFKLDQLLDSLEFNEKQVLKTTREIRRFCQNDPELSQCIKYMMSVSGIGWIVASQLLARIGDWRELRNIRQLGGFLGLVPTEHSTGERTDRGSITRTGDERLRSKMIQASWSAIRKDAELREFFRLICHRHPRREGPRVAIVAVARKLSVRISVVLMQQRPYVVREKVHSAPLTQEETSPQGTTRRQAEPGDKDS

SEQ ID NO: 464123 - protein, 414 aa, unidentified
MEVVYQRCAGIDVHKKSVTVCRVQPQASGGWQKEVRRFSTMTDELLLLADWLRAGGVTHVAMESTGVYWKPMFNVLEGELTVILVNAKHIKYVPGRKTDVSDAQWIAELLQHGLLKASFIPEAPQRALRELVRYRTALVQERHREVNRVQKVLEDAKLKLASVATDVLGVSGREMLAAIIAGHDDPAALAQLAKGRLRAKIEALERALTGYVQAQHRLLLRLHLEHIDELNGKIERLHEEIDRLVIPFDGHGEIERLDTIPGVGPEVAEVIVAELGTDMSRFPSANHATSWAGLAPGKHESAGKNRSAKTRPGNRHLKTMLIQAAHAAGRSKDTYLSAQYRRLAARRGKKRAAVAVARSILVIAYHLLRDGTSYEELGSDHFDKRNQEQLERRLIKRLEGLGHRVTLEPALAPI

SEQ ID NO: 464124 - protein, 361 aa, unidentified
MTKTTYVGLDVHAATIAIAMLEDGQERPEFREVTNDPAAIRKTVKQIAKGRELRCCYEAGPCGYVLHRQLATMGIDCQVVAPSLIPQKPGERIKTDRRDAAKLARLLRSGDLTPITVPTEDQEAVRDLVRAREAARRARTDARHRLTKFLLRHGHRHDASNWTLQFWKWVNKVTFTHPALTRTLQHYTDMVLHLDRQIEALDADIEDIASRAPFREMVAKLSCLRGISTLAAMVILSEVYDLRRFATASEFMAFLGIVPSEHSSGEKQRRGGITKTGNGRVRRILVEAAWAYRHYPKVTSRQRKMFAQQPPAVADVCSKANLRLTRRFRRLEARGKKSPVALTAIARELAGFVWAVARTGT

SEQ ID NO: 464125 - protein, 394 aa, unidentified
MLLFNGLGVPKFLVPMRQVCGLDVHKDSVFVCILNENGIVFQEKYGVLTTDLERMLEVLMCYGVQEVCMESTSIYWMPVWRVLEPYVSLKLVNPFFIKQLPGKKSDVKDAEWIATCLLKDLIKGSYVPDDSIQQLRQYDRRIYDLNKEISYKLTKLDMALQRCNIRISNYVSSTESKSYQDVVRLISEGVTSAEELEKVIHKRTVNRSGKDVIRGALTGVISSVDIDIIRQIREELELSQKHKYECQSKMDEFCRRCFPKELENLKSIPGVKERSATAIIAELGTDMSSFEDAAHLVSWCGLKPRNDESAGKIKSRRITHGNKYLRQTLIECAWAASKTKGCYYNRFSYHQTVVRKKNVMKVRVAVARKILCAAWHILRHNVPYRNYNSVITTC

SEQ ID NO: 464126 - protein, 338 aa, unidentified
MLGIDVSKDNLVCALVQAGTHKTVWRDSYPNTASGISQLLRRLNGTTSLVVEPTGRYSDLVVRQATAKGRTVLLAPPRRAKAFLESIQSRAKTDPLDGRGLGLFALSQQLRLFQVKSPAVEQVEQLLSARKGLSRSLATLEMQRRELPHAVSALEPVISAIKSQKAALDKQIATLTQGSRTVPALPEFAIARSLDAVPGIGPVVAAAVAARLDSKRFEHPDSFVAYIGLDITVRQSGKRSGQRGLTKQGDAELRRLLYLAAQANLRCKDTNNPFKLQYEREIAKGMKTTAALCAVARKLAKLCWSLHRHGTTYDASRVLEQPTRAKKPQAEEASTTTA

SEQ ID NO: 464127 - protein, 374 aa, unidentified
MTSSMPAPDARRKVIVGVDTHKHVHVAVTIDVWGIRLEDRSFAADSGGYRQLIAWAVGFGPIEAFGIEGTGSYGAGLTSAVRRAGHRVIEVNRGDRRARRANGKSDTLDAELAARSVLAGQSTAVPKTADGNVEMMRQLKIARDTAVKARTSAIISLKTIIVNTPAELRESLTGLGDKTLIDRCAGFRPGLLDSPTAAAKHTLRALARRWLFLNDEIHDHDRHLDQLTADTSPTLRDGFGVGADTAAEMLIIFGDDPNRIRSEAAFAKLCGACPIPASSGMTTGRHRLYRGGHRQANAALYRSTIVRMRFHQPTIDYVARRTAEGMPKREIIRCIKRFLAREIYQRVMTDHRARHVDSLETPAPSIPPALSAAV

SEQ ID NO: 464128 - protein, 354 aa, unidentified
MKRTTKYVALDVHQATTSASVREESGRVIARSVLPTDGAAITEFVRGMRGAVHVALEEGTQAQWLHDLLAPLVDRVVVCDRRGAPRQGNKADQVDADQLSEQLRRGGLRAVYHGSVDRTTLKELTRTYRNLVEDATRVMLRLKALFRARGIPASGKRVYHPRARAQWLAQLQNPGARLRAEALYAELDVLRTLRPRAKAAMVTEARRDPAWPLLRTIPFFGSVRVALLLATMQTPWRFRTKRNLWAYAGLAVVTRSSADYALIAGQAVRRRRPPLTRGLNRNHNRVLKDVFKGAATAATARPGPLQDFYHCVIARGTREELARLTLTRKLAALTLRLWKKGERYDPTKLTTPAR

SEQ ID NO: 464129 - protein, 363 aa, unidentified
MESMRWVGVDVHAKESLAAVLDPATGEIKTQRITGRPGEAVVEWLATLPQPFRAVYEAGPTGYGLVRRARDRGLDVVVCAPGHILKNATDHIKVDKRDAVRLARLLSAGELRLVRIPEPDEEQLRDLVRSREDLRVDLTRIRNRIGKFLLRREIYAPQHAETWGVLHRKWLRGLLFEDRASEFVFEDAMHAHDILVARREQLERALTETAETSAWALTIARLRCLRGIDTLSALGLVAEVGDFRRFQHPRFLASYLGLVPSEHSSGEKRRQGGITKAGSKHARRLLVEAAWQYRHVPRTSHHISQRQKGQDPRVIDIAWRAQRRLYKRWQRLLGERRKRSTVVAVAVGRELATFCWEIATLTR

SEQ ID NO: 464130 - protein, 316 aa, unidentified
MSKRKSNIGIDVSKQLLEVAVHESDFHYRCPNKPSAFGALLAELIALRPARIVLEATGGLEKPVVAALHAASLPVVVINPRQVRAFAKAIGQLAKTDRLDAAVLAHFAAAIKPPLRPLKSKEEQELEALMGRRGQLVDMLVAEKNRRHSATSEAVRETIKEHIDWLEERIAELDEQLQARLVNSTVWQDKDAILQSVPGIGPVVSFSLLADLPELGTLNRQRISKLVGVAPLNCDSGAQRGVRHIFGGRARVRCMLYMATFTATRFNPVIKEFYQRLVGKGKPHKVALTACMRKLLSIINLMVRNRTLWKTNLVSA

SEQ ID NO: 464131 - protein, 355 aa, unidentified
MNKINSNFEGQTIFVGMDVHKSSWNLGIHLNDMFVKNVHQRPNPTVMANYLKQHFPGANYKAAYEAGKFGFWIQRQLTSLGIECLVVNPADIPKSQKDSLQKTDPRDARNLGLRLQSGVLHGIHIPDEQQEADRMFFRHRKRIWKDLCRCKNRIKGLLAFTGIDIPDQYDNASWSHNFINWLKAVDCKQKSRRRALDYMISQMEYLRKELLTISNEIRKMMREQRYKTNYYLLRTIPGIGPLTAASILVEIGDVKRFETFYHLNSFVGLLPMEHSSGQSENKLSLTVRKHRQLRSDLVESAWTAKRTDPAMALYFQEQIKRKDSKIVIIKIARKLLNRIRFVLINQQPYEMGIVK

SEQ ID NO: 464132 - protein, 283 aa, unidentified
MKISAIGIDIAKNVFQLHGVDEGGAPVLRRQLRRAQLVEFFAKLAPCLVGMEACGGSHFWARKLRALGHEVRLIAPQLVKPYVRGQKNDANDARAICEALQRPDMRFVAVKSVQQQALCHLHTSRSRLMKQRIAQTNSIRAVLAEHGLVLPQGMKALRQGVPELLDDASNELLGSTRVLLQDEMALLAQLQQRIDTLDGQIKAQAQANPVCQRLQQLPGVGPQTASALVAQIDRAQQFENSRQLPAAVGVVPRQHSSGGKSVLLGITKRGNEYLRWLFIHGAR

SEQ ID NO: 464133 - protein, 387 aa, unidentified
MYFIGIDISKFKHDCSVIDDFGEIVTPSWSFTNDSEGFAQLKILLDSLDAETRIGLESTGHYGMNLKLFLESNNFSFMEFNPLLINRFVKSKSLRKTKSDSIDCMMIAHYLMTVEYKPYPPLLYHIEKLKSLTRFRDSLIRLRSRQLVELTNILDKVFPEFKPFFGGKFSVTALYILSNYSSPEKIANMNSKSYEALRKLSRGRFSTVDFAKLKQLAKNTVGNTEDYLLQEMQIVLELYSQLDSKVDETEVSIKECVFDMNPPMLSVPGIGIESAAVILAEFGDFSKFKNASQMLSFAGLEPGYFQSGTSETTGKMVKHGSSYLRYALMNCAQTVVNYEPTFAMFYSKKRAEGKPHRVALSHVVKKLLRVIYTLQTKNTAYDADFVR

SEQ ID NO: 464134 - protein, 412 aa, unidentified
MQVVYERCAGLDVHKRTVVACAITSDAQSQRCKERRTFSTMTPDLLRMRDWLKELGISHVAMESTGSFWKPIFNILEGHLEVLVVNAQHLKAVPGRKTDLKDAEWIADLLQHGLLRPSFVPPVAQLEVRELTRYRISLVEERSRTINRLQKTLEDTNIKLASVASDVMGKSARDMLTALLAGEVDPSILAELARGRMRSKRDLLSQALQGQLKPHHRFLLSEQLADIDALDEAIERMSTQIAERLRPYEQQIQRLMTIPGIKRRLAEVILAEIGPDMSRFPSARHLASWAGMCPGNHESAGKRFSGKTRKGSPWLRSALVEAAHAAIHAKDSCLSAQYQRLAVRRGGKKATIAVGHTLLVIIYHLLSQDKDYEELGGHYFDDWDRQAVQKRLVRRLEKLGYEVKLEPVSPTA

SEQ ID NO: 464135 - protein, 357 aa, unidentified
MAPRKTRKGNRVLIGIDPHKGSHTAVVVDRDEVEVARVKVRADRHQLARLLEFAAPYGPRTWAIESAGGLGYLLAQQLVAAGEPVIDVPATLASRVRLLGSGRGSKNDPNDALSTAIAALRHPDLRHVAKEDHAQVLALLARRHKNLTSLRTQAICRLHAELATLMPGGMGRSLTAAKAATALARIRPATAVETARRQLAADLLADVRRLDVTLAENTNRIRTAVKAAGTTVTDVYGVGPRVAALVLGQTGDVRRFRSPDHYAAYNGTAPLEASSGPRVRHRLNPRGNRQLNHAMHRIAVTQIRNDTAGRAYYDRKVAEGKSHKEALRALKRRVSDAVYRQLVADANTNDSNDLLTN

SEQ ID NO: 464136 - protein, 375 aa, unidentified
MKQFTQYVGVGLDVHKDTIAVAVADAGGGEVRYVGEIASTPEAITKLTRRLKKGAARLAWCYEAGPCGYHLYRQLSRAGEDCQVVAPSLIPRKSGDRVKTDRRDALSLARLHRAGELTAVWVPDQAQEALRDLTRAREDMKGLQRLQRQARQRLSAFLLRQGPRFPGKCKWTKTYFRWLDTVKFDSPVQQIVFQEYIEAVHACGRRVQAIDEQLARVARESVFWPVIEALMALRGINLLSATAIVAEIGDLHRFASARQLMAYLGLVPSEHSSGSKTVRGSITKTGNGHVRRLLIEAAWTYRHPARKTPWMRTHKGEASEAIQDIAWKAQKRLCQRYRHLMARGKQSVQASTAVARELAGFIWAVGQAVPGPAAH

SEQ ID NO: 464137 - protein, 467 aa, unidentified
MSKLRKPSLPRSSKGQPAQPKPPKLDALAQINHHAAGLDIGDAEIYAAVPESAADPAVRVFRTFTTDLEALVNWLAACHVDTVAMESTGVYWIPIYELLEERGCQVYLVNARQLKNVSGKKTDILDCQWIQQLHTYGLLQPSFRPPDEICALRALVRQRGRLIRSCSAEIQHMHASRALQQMNLKLTRVLSDVAGVTGLQIIRAIVAGERDPHKLAAYRDRRCEKSADEIAAALTGHYKAEHVFALRQALAAYDFFCEQVQACDAEIAKTYQAVTPAAQRTAPALGPRERRHIPQRHEPAFDLRTELYHLAGVDLTTVKGLDILTIQSVLTEIGVDMTRWPSVKHFTSWLGLSPANQKTGGKIIKRGTKPSANRAATALRLAARSLLRSKSALGVFSRRMRGKLGTASAITATAHKLARIIYAMLKSKTPYREPAAAEVAAQHRERKLKGLQRQAKELGYKLTPVAA

SEQ ID NO: 464138 - protein, 343 aa, unidentified
MEHSAGLDVSVKETNVCIVDEAGQIVREVKVASEPDALLAVLKSPAYRFKRIGLEAGPLSQWLFSALAEADLPVICVETRHMRSALKAQINKTDRNDARGIAQMMRAGLYRPVHVKTLRSQKLRMLLTHRKLLQSKAIAIENDLRATLRNFGLKVGTVGTVKFEARIKELVEKLPDLMTLVEPLLVVRRALREQIGILHRRLLAIVRDDEVCRRLMTVPGVGPVVALTYRATVDVPARFRKSKAVGAVFGLTPSKYQSGEIDRTGAISRCGDDMMRAMLYEAAHIMLVRSTKWSWLKAWAMQIARRRGMKKAVVALARRLAVILHRVWVDGTEFRWTRQTAAA

SEQ ID NO: 464139 - protein, 407 aa, unidentified
MRPIYERCCGLDVHKKTVVACRVTPEGSQTRSFGTMTADLIQLREWLLAGAVTHVAMESTGVYWKPVFNLLEDHGMELLVVNARHVKAVPGRKTDVKDAEWLAELLQHGLLKASFIPDRESRERRELVRYRRSLVEQRAHLVQRVQKLLEGANIKLGDVASDVMGVSGRAMLQALANGVDDPAAVAGMAKTALRNKIPELERALTGSVGHHQRFLLRSQFRLLESIEEEIATLDEEVAERMRPFQVPLERLDEIPGIGRRAAEQILVETGTDMSRFPTSAHFASWARVCPGNNESAGKRQYSSIGGGNRWLRNALLEAAWTVSHSRRQTFFTGRYRRIAARRGKKRAAIAIAHSLLIAVYHVLKDGVVFQDLGPTYFERRNQQAIVRRSLRRLEALGYKVTVDAMPA

SEQ ID NO: 464140 - protein, 300 aa, unidentified
MKDMMIGVDLAKNVFQIHGALRTGEVQFRKKLTRQQFTAFMARQAPCLIIFEACGGAHYWAREMEAPGHEVKLIAPQYVRPFVKRQKNDAADAEAIVIAARQAEMRFVGPKTVEQQSRAAVFRGRERLVHQRTADVNALRALLYEHGYVFPVGMRYLDRMTALVDDDTSDLPALIREECQDLLAQIAEKTAHITERTAKLKALASQSDRARRLQTMPGVGPLTAIAVPAFGPDMAHFKTGRNFAAWLGLVPRQHSSGGKERLGRMTKAGQADIRRLLIIGAMSRLGWLGRHTIAQGNCPA

SEQ ID NO: 464141 - protein, 386 aa, unidentified
MTLVAQTRPFIIGVDCHARTHTYAIIEANNKQQVACEQFPTTSAGISRALAWVARRTDGDMGCLWAVEGIGSYGARLARAVTDAGYDVAEAPRMNPRGRRGLGKSDPLDAAAIGIAVLGLQESHLRTPRKDEGTRAGLRILSAARDQLTRERTVNVNALIALLRAHDLGIDARKPLVPAQIAIITRWRERQEQLELSIAREEAIRLSRRVLEVTAQLTANQKRMTELIQQSPAAPLLDMVGAGAVTVSAVLTAWSHPGRVRNEAAFASLAGVSPLPASSGNIVRHRLNRGGDRRLNRALHTITMTRMIHDPGTRDYVAKRTQEGRSYREIRRSLKRYLARTLYRQLNTLYATAGPTPSHAVSEKPPKNWPTSSALRDQQSWLPVVA

SEQ ID NO: 464142 - protein, 362 aa, unidentified
MMQSTTIIAFDQHAATTMAAVLVSEHRTPALHPLTSDVPTILRFVTQLQRRGAVQCCYEAGPCGFELQRALAAKAIPCDVIAPALIPRRAGDRIKTDRRDAGQLAVLYRAGALTAIHVPTEHEEAARDLLRCREDIRAEVLRARHRLSKFLLRHGRRFTGTKKAWSKRHDAWLRTQAWAIPALDHTHHAYLRGVDEALARLRDVETDLRALLTLEPLQSRVQRLRCFRGIDDLTALTIAAEFGDPRRFATAPRTMAFVGLVPSEHSSGSKRAQGGITKTGNAHLRRVLVEAAWHYRHHPFVGKALRARQQDAPAAVIARAWSAQQRLHRRYARLAARGKPKQHIVTAVARELTGFVWAALTQ

SEQ ID NO: 464143 - protein, 407 aa, unidentified
MSVVEFPQLIDRGCGLDVHKDNVVASIRGKGLVEETRTFLTFTSDLEDLTGWLKSNHITHIAMESTGVYWRPVYYILEDFFEIILVNARHIKNVPGHKTDKKDSEWIAKLLLSGLLKHSFVADSPIRELRTLTRHRRKLINERSREKNRLQNILEDANIKLGSVISDVFSKTGMGIMELLMDGITDPVILANQAKGSLVNKKEILQRALHGRFTERHRFMLSLIKETISSLDNLIKQVENQIELYIQDMQQQINLLQTIPGVARQSAIGIIAEIGIDMAQFISDKHLASWAGVCPGNNESAGKIRSSRVTHGNTHLKTTLIEAAWASSHTINTHLSFKYSMLAQRRGKKKATMAIAHDILIASYHIIRDIVPYKEPHLTEDTLVQRRKAEMIRLEKRLLKLKILASK

SEQ ID NO: 464144 - protein, 350 aa, unidentified
MIIIGADYHPGFQQIAFVDTDSGEFQERRLQHREEAEKFYRELAAQGMKVRVGMEASGQARWFERLLSELHFELWIGDAAEIRTKRVRKQKTDRQDAQLILKLMLKEDFPQIWVPSWENRDLRQLLWHRHRMVQARTRIMNQLQAVALNEGLRCKKRLWRDAGREQLESFALAPWASRRRRDLLTLLDQLTPTIAELTQAIEQEAEKCPAAKRLQTHPGVGALTALAFVLIIGRADRFQCGKQIASYLGLVPLEDSSGNRRRLGHITKQGNSLLRFLLVEAAQVTVRSDPEWHSKYFHLAMRRGRKIAKVAMARRLAVRLYWMWRKGWNYEQLKKFGSHAGQPGHRDGVH

SEQ ID NO: 464145 - protein, 407 aa, unidentified
MISVGIDVSKNKSMVCILKPGGEVLAPPFEMLHTIEGILALVRRLNTYNEEVRVVLEATGHYHWPVVSLLVEKDVFVTCVNALRMKKYCAQSIRRAKTDQIDAIKIAAYGITYWAELTAVQSSNDTYDELRAFSRQYYHYTSLVVKAKVNLSNLLDRTMPGIKCLLEDKNENRKLIGVVQRYWHFENIRSMGETAFAADYCEWAKKQGYRMNECKAKKIFALSQNGIPVMPNTIPTKVLVLETVRVLHELERSRDTILSHMRQLASTLPEYSVVLAMGGVGPTLAPRIIGEIGDIRRFHSLSALIAYAGIDVPPYQSGSFTATKRNISKRGNKYLRKTGYEIMQSVMRQKPTDDAAVYLFIQKKVAEGKSGKAAKIAGLNKFLRIYYARVKEVYELVENILIFGSEV

SEQ ID NO: 464146 - protein, 339 aa, unidentified
MTVKTVGLDLAKDVFQVHCVSATGRRIINKKIKRAKLLAFFETLPRCLVGMEACGSAHHWGRELRKLGHDVRLLPAAYVKAYVKRGKTDAADAEAICEAVRRPTMRFVEIKSEDQQAVLAIHRARDLVVRQRTQVENKIRSILREYGHILQTGNEALSKNAREHGTEEQLEMPEIADGILGVMCHQLNGLNARVDGLTKLIEQHAWLDADARRLMRMPGVGPITASAIVATIGDARQFKTGRDLAAWLGLTPLNKSSGGKERLGRITKKGDRYIRKLLIVGMTSRALMAKNKPEKADIWTAKMLAEKPFRLATVAMANKSARIIWALLTKREEYRQPIV

SEQ ID NO: 464147 - protein, 388 aa, unidentified
MWEAFIDWADTHHDALVLDEKRQQCGSLRVDHTPEGLARLNSFLESITGSEQKEQMACIIETNHGLLIAFLLEAGWPVYPVNPRTVERRRGASGAKTDALDAYLLAKTGRADLADLRRLTPDSELVQELKALTRDQDALIQMQTRLVNQLTATRVTSYPVALQLFAGALQQHSSLIFLQSYPTPQVAMDASVEQITAVLKNAGHSRAQQVVPQIFETLHQPHLTADALTTRTKSRLMLALVAQLLPLVQQIADYGKEVQRLFLRHEAYLVFRSLPRAGKRLAPRRLAEIGDEHSRYADAKSLQALAGTSPVLFQSGNYAKAHRRLGCIKPLRNALHQFARATSQQEGWAKDDYQRKRAEGKSHSVALRALANVWVRIVRHVGAYEIPA

SEQ ID NO: 464148 - protein, 368 aa, unidentified
MNNPTANAQATTVGLDVHKASIRLAAVADGAILHEQTIPHDLAIVDTVLARFPAARCCYEAGPTGFGLYRHLTERGIDCDVVAPGLVPSKPGDRVKTDARDARKLALLHENGLLTAIEVPDPELEALRDLVRAREAARIDRMRDRHRLSKFCLRQSREMPGKSWGVTRRGWLAQQHFPFATQQCAFDLYLHALDLVDRRIAALDARIQEAADQDRFRELVGRLRCLRGIDTLTAIGLVAEVGDFSRFERAEQFMAFVGLIPAEHSSGEQRRRGSITKAGNAHVRRLLIESAWHARRRPMVSYELQRRQRDQSAATIEHAYRCQARLHKRFSRMAARGKPQQKIVVACARELAGFVWAIATEQPLVTVN

SEQ ID NO: 464149 - protein, 355 aa, unidentified
MKRISHKRKKVELSGKRCFVGVDVHKLTYYVALLSEEGLRQEFSTPAEPQRLLLQLKNMGIEILSLAHESGPTGFGLAWACQEAGVPIVVAAASKIPRPVLACGKNDRLDAMKLVDYLSRGLLQSVSIPTPQEYALREVERRRQRLCRRRAKVRQGIKSFLLRNSLSDRIRLKSWSKLETEALERLELEDEFLQMTLLSFLAEHGLILAEIQKLTKRLSEGVRREGKQEMIRNLQSIPGVGETVAHSFVAEIFRPERFERAEELSAYVGLAPIISQSGQGRGRAHLRPVGQKYLRGLLVEAAWVSIRYDKNLRDFYGRLLSRTNMPSKAITGVARKLLTVIWRVAVEKRPYKAAA

SEQ ID NO: 464150 - protein, 419 aa, unidentified
MTRRIAGIDVHKRVLMVVVLSVSEDGAAASTREKTKCGTLSTELEELRQWLREKGVTEVVMESTAQYWKPVWLALEGGFELGLAQAWSNRAPRGKKSDFRDAERLARRHVAGELTMSLVPGAEQRQMRELTRRTAQLNRELVRIQNHIESLLEPARIKLSSVLSDLFGATGRRILQALAQGESDPEKLAALADDRIRCSPARLAEALRGSMTPMQRRLLKQMLQDAELAEAHKKELEEMTGELMKQHSGAIRRLTGVPGIRLRTAEDVIAEIGPDARAFPSAARLASWVGACPGREESAEHNHSARCAKGNMSLRRALCEAAQAAVNTKNCRFQQKFRRLLPRLGYAKAIWAIVRLLCIVIWNILHQGADYIERGGQTTPGAIRRRAQRLNKELRAAGLSLIIVPLTSQTRTISAATPV

SEQ ID NO: 464151 - protein, 370 aa, unidentified
MDFSATPPELKPHDSRTRDQSHGRNHVGDLKTEILGKNTFHLVALDKPGAIVTRIKVSRNQLVRRLVNLPPCLLGLEAGSGSHHIARQVQALGHDVRLIPAQYVKPFLKGHKNDYRDAEAIAEAVQRPTMNFVAIKTPEQSDLLSLHRVRSRLVRQRTAIINQIRAFLIERGITVRQGPRPLRKVMPEVLRSPPRTLSPRILRLIAELDEDWRRLDQRIEVVSAEIETLSQNDAACQRLMTVPGIGPIISSAVVAAIGTGSGFKQGRDFAAWLGLVPKQESTGDRTKLGRISKRGNKYLRTLFVQAAHVVIERRPAAAMRALWPWIHQASKRLAHRNLLAIALANKLARIAWAVLARGRDYEPRITPDAA

SEQ ID NO: 464152 - protein, 359 aa, unidentified
MSTQSKPFSFKGQKIFVGLDVHLRSWSVTVLSEQAVLKKFKQDPSPAALNKFLTNTYPDAEYYSVYEAGFCGFWIHWELHNLGINNIVVNPADVPTMAGERLRKTDAIDSGKLARSLRSGELKGIYIPDSLATEIRSLIRLRDSLTKDQTRHKNRIKAHLRYLGFDIPEEFQRPGCTWTNKFVLWLKRLDLETDYGRKTLDLLIAQYEDLRGQQLKMMKELRLLSRTERFEEPLRYLMSVPGIGQLAGLTIISEVDDIARFKDAAHFASYVGIVPMCYSSGEHDGTGNITVRRHAKLRWLIVEAAWVASRKDPVLSSAFVEYCRKMKPSKAIIKIARRLVNRIYFVIKHQQPYVNCFVS

SEQ ID NO: 464153 - protein, 475 aa, unidentified
MNLKGKKTKNQVVTANIFEQQELLKKAEVIREKLTASTWHELETNGKFDKNAKLSFISDDMLILGCDVGSETHYLRAIDTRGRELSKSAYSFRNNCEGFQSAKEWAVELAAKNEKKQIVLGLEPTGHYWFCLATWMIANGISVVQVNPYAVKQTKEVEDNSQLKDDTKDPKLIANLVKDGNFGMPYLPEKVYAELRRLSMFREQLNEDRIRAINRMHREMKIYFPEYKEALGRVEGAFSLELLKQTPFPEEIQTLGEEGIRQIWHDAKLRGRGYSRVREIVGYAKTSVGMKDGAEASAMAVKWFVKEIRELDEKLAEIEKLMREKYQEIPYAKNILEISGIGENTLSGILAEMGDISRFDDVKEIQKLSGLGLVACSSGKHKGETKISHRGRKRLRYWLFQAAKSAVAHAEEFKELHVYYTTRADNPLKKMQSLIVIACKLLRIIYGILKNGTVYDPKKMLRDIRRPEKKEVIAA

SEQ ID NO: 464154 - protein, 343 aa, unidentified
MEAYAGKQYVGIDLHRRRSVIVRTTESGEVLEAVRIVNDVQRLASVMARAGQCPEVVLEATYGWYWAVDALQAGGANVHLAHPLGVKAFQYRRVKNDFRDAQDLADLLRMGRLPEAWISPPAVRELRELVRHRAKLVRLRSGCKAEVHAVLAKCGVHVLMSDLFGVWGTELLDGLDLPAPYAARITSLRRVMDGLDFEIDLFAGLARGRMAHEPGYTAVQKIPGIGPTLAAVFVAEIGDISRFASASQLTCWAGLTPKHHESDTHVRRGRITKQGSRLVRWAAIESVKTVPKGSVVGLLRERVADHRGRNIGSVAAARRQLELVFYALRDGHVRALEQPPEAA

SEQ ID NO: 464155 - protein, 320 aa, unidentified
MSENIFVGIDVCKAWLDTAQQPAAERAQPITLPSRVEYTEQGCGLLVEQLGQLRPTLVVVEATGGFETTLVGLLCQAQIPVAVVNPKRVRDFARAAGIAAKTDRLDAQVLAMFAQRMRPQVHPLPDEAQQEVTELVDRRAQLVGMRAQEKTRLATVKPVARKSVRDHIEWLDARIKQIERDLDGRLKESPVYQAKYELLDGVPGVGRVTVATLLGRVPELGMLARKSIAALVGVAPFADDSGKRRGQRYIRGGRVDVRCCLYMATLSAKRCNPAIKATYERLVQAGKPFKVAMTACMRKLLLILNAIIKSGEPWKNMTMA

SEQ ID NO: 464156 - protein, 386 aa, unidentified
MGGSTWSRVGSWGTKPRKEYPMNEPAHNESGVYLAIECGRKEWKLALGDGKAERQVTIRAGDVKGLGQHLGRAKERFGLPADARVYSCYEAGRDGFWIHRMLTELGVSNLVVDPASIEVQRRGKRVKTDRLDARKLLTMLRRYWVYGERKTWRVLHIPDEDQEDARRPSRERERLTKERTGHRARIRSLLALHGRHDGKLPASADEARDWKGAALPVGVAAELDRELERLRMVEAQIRLIDGERKAAVESPSMVKAKKLAKVRGVGDQTGWMLAREFFWRPFRNRREVGAASGLVGCPYDSGESRVEQGISKAGNARVRATMTELAWRWLMFQPQSELARWYERRFGAGSGRMRRIGIVALARKLLVALWKYLEFDEVPVEAIVKA

SEQ ID NO: 464157 - protein, 325 aa, unidentified
MPEDRSKASFNWVGIDVSKDRLDVYLQATQTRLSVNNDLEGIEQLKQHLNLVENLAVICEASGGYESLMALTLNEEGLRVSVVNPRQVRDFAKSLGKRAKTDALDAQVLARFGQATLPAATVFASEADRQLTAWVRRRQQLVEMLSAEKNRRAALKGHLRDDVDSHIDWLEERIKQVDQDIAELTQTRAEWRDRQAILQSPKGIGTVIAIGLLSHLPELGQINRKQIAALAGLAPFNQDSGRYRGKRRIAGGRSQVRSWLYMATLVAIRHNPPIQAYYQQLLNRGKPTKLAMVACMRKLLTCLNAMMKTLTPWDDDKVTAVFKTA

SEQ ID NO: 464158 - protein, 386 aa, unidentified
MKDETFVPREYDVFAGLDVDKKSIAATFSSPQGFIRSLHMPYSIDYLLNHVRKHFGDQKVAFVYEAGPTGYGLYDGLVAQGYRCLVAAPSMIPRAPGQRVKTNRLDSRGLSESLRGGQLKSIHVPSPIYRELRHLTQLRDTVVREAAAHKQRIKALLLLEGIGFPPATAGRQWTLRVKAQLRKLRCSRTVRFKLDQLLDSLEFCEKQVVSSTKEIRRFCKEDVELFQSIEYLMSIPGIGWIVASQLLARMGDWREIDNVRQLGSFLGLVPTENSTGDSVDRGSITRAGDGRLRSKMIQAAWSAIRQDGELREFYRSVCQRNPRGKGARIAIVAVARKLSTRIYAVLKKQRPYIVRKQVHSAPLTQEETSPQGTTRRCAEPGETDNS

SEQ ID NO: 464159 - protein, 367 aa, unidentified
MKKNSTTTQRGKRAPAGTEATVIGMDLGDKTSRYCELDRDGKEREEGSVATTKQALTERFAGKKRCRIALEVGTHSPWVSRLLKNLGHEVIVANARQVRLIAHSSRKNDRLDARTLARLARADPRLLSPIQHRGEQAQQHLAMIRVRAALVEARTKLVNAARGFSKAQGERLPACDAAAIGVKEMAELPAGLKAVLRPLLEQVESLTGQIKKADVELEQIARTQYPETALLRQVKGVGVLIALTLVLTLDDPERFQKSRDAGCYVGLRPRQRESGASQPQLRITKEGDRYLRTLLVQGAHHILGWRGPDTDLRRWGLKLASRGGKNGKKRAIVAVARKLAVLLHHLWVTGEVYEPLRNSGAATTQAA

SEQ ID NO: 464160 - protein, 334 aa, unidentified
MLYAAIDIHKHAFQAAVLDADSGEVVEERFAADRESLTRWTERWRGRVVAVAIEATTGWRWVWRELEREGFDVHLAEPVQTRALLGRRHSAKTDRLDARWLARLLAKEMLPESWIPPAQIQELRDRTRLRKALAEDRRRWGQRLHAHLLHEGWPCSRSNLLRPPGLRWAAALKLPEHARLQVDSLLAVMAALEEQLDRVDGELRRFARADQRCQALQSIYGIGPILACHLLAEIGEACRFQRAEQITRLAGLDPVVDESGDSRRRGKLAKAGSPHLRWALVEAAVHAHRTTAPDLALYRATRERRDTTVARLTVARKIGKRAFHTLRELELAAA

SEQ ID NO: 464161 - protein, 315 aa, unidentified
MSKHNIVCAGIDTGKNKLDVAIAGSDKEACFANSRHGHAGLVAWLRRHQVERVGIEASGGYERAVVAELRRHGLVVIVFQPIQVRAYAKFHLRRAKNDKIDADLIAACTAATEKIHAPPDPRLVALADHQTLIDQIIDDIAKLKNRRESCRDERFRRLWKEEIARLKKMERAELKGLVAAIRAHDDLAQRLDLIASVDGVGLPTAVAILVRLPEIGRLSREEIAALAGLAPYDDDSGERRGDRHIAGGRERLRKTLYNATLAAAFHWNAQLIAFKDRLLAAGKLHKVMRVACARKLLIFINAVVARGTPWVSTPA

SEQ ID NO: 464162 - protein, 355 aa, unidentified
MQKEIIARNRALSIGLDVDKKKSVIVVLDPSSGHVLFEGSLAHDEACWCSFLERFPGCRLRAFYEAGLTGFWQCRMLRRLGVDCQVVAPNAVPKEPERRQRKNDRLDAMTLALLAVHPPRGFVRVPTEQEEDDRELIRTREQLVKQRVRVINQVKAKFTFHGIPMTAGARSGSDAWVKEVGELLAERSSLGLAVTVLLDMVTALNRQMRRIEAAIRDLGRTDRFSARNARLQRIPGVGPMTAMAFLTEVFRPEEFTTSNRLASHLGLVPTEWSSGGTSRHGHLTRWGPPHLRRLLVEAAWIWVYRDPGAQRLYLNLCRGRLRKKAIVAMARRLVTAMWAMTVKQEEYNFHWKHAA

SEQ ID NO: 464163 - protein, 457 aa, unidentified
MTQSIRKTNAQPLRAAQAQVSTPEVTVRALYRSAIGIDVHLNVLVCCHQRQLSDKNELCESCDFLTNRDGINEFTAWCKERNPEIILMESTDVLWQSPYEALENAGFSSDRLALINARDAKAAVGRKTDRKDAARLAALSRSGHFRRSFVPPKGFRLQRVIAREIQTNRRDLARTVNRYQKLLNQCGCRASTVFSDVRGVAASVILEAKINNAENLEEIVKKNSRRLRASPQEILSALDFAIPEAIAEQIKDCRNKIKELLDYEARSFDRLCTLQQAHERDIDLLVSISGIQERVARLLYAELCENLKEHFSSCDHFTSWIGICPGENTSAGKQKSGKCPKGNKYLRRILIECTRGFVATKNQLCAREKFLALKLRRGYKRATVAMAHLLARIIYSVLTKKSFYTTYMTKALRDVIVERACRSVRQLAKREDVSVIDGQVVDNETGVILARLDFFSS

SEQ ID NO: 464164 - protein, 401 aa, unidentified
MQQQRLLVGVDVGCHKHHVAIGGPGGIVEQFEITHDSKGFQYFFTQVAAQARRQKLPIVVVGMEGTNGYARPLDQMIKDKGYHLLNVNNLKLARFKEIFASPAKTDCIDAKQIVTLMMMAPFMEQMKETLQEVPVIGEVEMQLKRISRRRRQLVKEKVILQNRMQADLQSVCPGFLDTIKQVDSLYVLRFLSFRSDLRELARLKPATVRSIPGIGKTFAAKLARWQEIAAFGSEIAWVGPMISDDAKRILELKVKIDVLEKQMEKLIVQSSLGTLLLSIPGFGPVCTAEITGEIGTMARFNSEPGFAIYLGMAPLDNSSGNYKGTKSPHQVNKRAKAAMMVAMGHHIRKVAESKAYYQKKRAEGKKHNQALRSLGRHLVRVIWSMAQNNRHYESKTEIVAA

SEQ ID NO: 464165 - protein, 346 aa, unidentified
MPVYIGVDFHARVQTISYLKTEDGAIEQVELEHLKDDVRGFYQQFVGEVIVGFETSGYAYWFEEMLEELGHQVWIGDPAEIRRLARRRQKNDRRDANLILELMLRGDFPRLQRQSRESRQVLQQLRYRQRLVKMRTMTINTLRFMAMSRGVSIRGHLSSRVSQERMKSLPLSPVLSQQRDELVSLVQELTLKIARVQQWLEAQARQDGQVRLLMTHPGLGPLTGLCLVHTLSPISRFANGRRVTGYVGLDPMEDSSADRQRFGSISKQGSRLLRFLLVEAGQVAARQDHDLKQFYRRVQLRRNRPKAKVAVARRLLVRAFILLRDQIDYAEFLRRGVAARSARNSP

SEQ ID NO: 464166 - protein, 372 aa, unidentified
MEYFAGIDVSLEQSSVCVVDGTGKIVREAKVASEPEALVGLFRGLETGVTRIGLEAGPLSQWLYAGLTTAGFEVVLLETRHVKAALSAMVIKTDRKDARGIAQLLRMGWFRPVHAKSPAAQEVRALLVARKLLQTKLLDVEFSIRGILRGFGLKIGEVSKGRFAARVRELAAGHAMLERITEPMLRAREALRTEYARLHGEMLAIVKPDPVCRRLMTVPGVGALVAITFKSAVDDPARFARSRVLGAHFGLTPRKYQSGETDVTGAISRVGDAMVRMALYEAAHIMLSRVTRFSSLKRWALDVVRRRGLKRAKSLWRASWRRSSIACGLTAPASAGASRPPPCNQRRYLSGRGRPASALPRSRYRDADPVKP

SEQ ID NO: 464167 - protein, 301 aa, unidentified
MAILYVGIDLAKNVFALHGVDEAGKPALVRPSVPRAKLLELVAALPPCVIGMEACSGAHHWARLFLQFGHTVHLMAPKFVIPYRLSGRRGKNDAADAAAICEAVQRPNMRFVPIKVLAQQAQLSVHRVRQGFIEQRTGTINRIRGLLSELHHLDERIAAYDRHIAQIAREDARARQLMRLSGIGETTATALLAMVGNGHEFKCGRQFAAWLGLVPGQYSSGGKSRLGHITKAGDPYLRSLLILGARAVLNSAKGKTDSVSLWATTLAERRGYWKAIVGIAAKNARMCWAMLSRGEQFAMPA

SEQ ID NO: 464168 - protein, 311 aa, unidentified
MDTIVVGIDVSKDRLDVHIRPGGDAFAVPRDGEGIAALAARLAPLRPGLVGLAAPAGFETVVAAGLASAGLPVVVVNPAQVRAFGRALGRRAKTDPIDAAVIAHFIEATGPVARPLPSEEAQLLADLVARRRQIVAMISAERQREKRAPARVRKSIARLLKALERELASLDGDIDTAVRGSPAWREAEDLLASVPGVGKVVARTLVAELPELGTLDRRQIAALAGLAPFTRQSGQWRGKSFIGGGRAAPRAALYIAAMVAARFNPTLKQFRDRLVQAGKPKIVAIVATARKLLTILNAILRDKTPWNPQNA

SEQ ID NO: 464169 - protein, 339 aa, unidentified
MSKLLKNFVGIDISKTYFDAAIIKADDPYQRMHNQFPQTPIGFKKMMVWLKFQDVLFNDETLFCMEYTGLYNTGLVNFLVQGKAQLWVEMPLRIKRSAGFERGSDDKTSAIKIAAYAFRYQDKMQLWQPVDNSIEKIKRLTTQRERVVKAITELSVPVKELSECGCDKEAKQLEKVQRNALKALKKTKENIEQLIIKTVGQDAVLAKKIQQVKSIKGIGQVTAVSLLGYTKGFTSFSNGKELACYCGVVPFEKKSGTSVRFKPTVSPNANKKLKRLLHLCALSAIKNNAEIRSYFARKVAEGKNKMCVINAVRNKLIHRLFAVIRDDRVYEENYVRRCA

SEQ ID NO: 464170 - protein, 456 aa, unidentified
MKRKKNDDKLANSTNSQKKNLGQGLPVYNAHAAGIDVGDTMHDVAISRENTHEVRKYSAYTEDLQNLVAWLKEEGVTTVAMESTGIYWLNLYLMLEEAGIEPYLVNAKHVKNVTGRKRDDTDAIWLQKLHSCGLLQKSFQPEAEIRVLRTYVRHRKKLIMLSSDAARRMQKALELMNIKIHTVISDLLGKTGMKMVCAILAGERNIDELIKLKDGRIKASEEDIRKSLNGIWKEEYLFMLKHAYAGYGFYQSQVKECEEKIKDCLLQQVAKILDGDITGLQIEKKRKLKKNELGFNAQSLLDIIVAVDLCQVESISEITALEFISEVGTDMTNWKNDKHFVAWLNVAPNTKITGGKIISSKMQKKKNQAGLTLRMAASNLTKSKSPLGDYARKMRSRIGKKGGVVAGAHKLGRIIYKMIKDKQPYDKTLYLKTQDKWRENRIKHLEKQIQKLKDVA

SEQ ID NO: 464171 - protein, 403 aa, unidentified
MNAVGIDVSKGKSMVTILRPFGEIVSSPFEIKHTSSDILSLIKLIHSIEGESRIVMEHTGHYYEVLAQQFSAAGLFVSAVNPKLVKNFNNDSLRKVKSDKADSIKIARYALDKWQNLKPYSIVDELRTQLKAMNRQFHFYVKQKTAMKNNLINLIDQTYPNANTYFNSPPRSDGSQKWVDFVYTYWHVDCVRKMSLNSFVKHYQNWCKQKKYIFNKSKAEEIYTKATELVPVFPKNEITKRIIRQAIAQLNSTSATVETIRILMNETASKLPEYPIVMQFKGIGPSFGPQLMAEIGDITRFTHKGALTAFAGVDPGVNESGSYAQKSVPTSKRGSSNLRKTLFQVMDVLIKTMPQDDPVYQFMDRKRAQGKPYYVYMTAGANKFLRIYYGRVKEYLCILSESS

SEQ ID NO: 464172 - protein, 338 aa, unidentified
MELYAGIDLHSNNSVVTVLDEQDRTVFAKRLANDLTAIIAALRSCAGTVRGVAVESTYNWYWLVDGLQDAGFTVHLVNTAAVKQYDGLKHGGDFSDARHLAHLLRLGILPTGYIYPREQRAVRDLLRKRSQLVRQRSTQILSIGNLVARNLGTHAGGNEIKRWQREHVDAMPLLDEQKQALMANLAVMRCLDSQIDALERSILAKAKLREDYQALKTVSGIGEVLALTIALETGEVGRFDSPGHCASYARTVDSRRESNGKKKGEGNAKCGNKHLAWAFVEAAHFAVRYDAAIKRWYQKKCANGLAVVAIKAVAHKLARACWHVMKDGKPFDVARAFG

SEQ ID NO: 464173 - protein, 402 aa, unidentified
MNCVGIDVSKGKSMIAVMRPFGEVVVSPFEVRHTANELSELAGLLKSLDGKTRVVMESTGNYHAPVAWLLHDAGLYVSVVNAMLVHDYGNNSLRRAKTDKKDAVKLANYGLDHWLTLPRYIPEEDTRLMLKICYRQYQQYSKVQTMLKNNLISLLDTTFPDANRLFTSPPRADGSEKWVDFVATFWHCECVCGRSEKAFTTQYQKWCRKHGYNFSEDKALDIYASACRHFGVIPKTDTAKLLVEQAISQLQTTSSALAALKQEMQSLAASLPEYPVVMGMFGVGPTLGPQLLAEIGDVRRFHSKKALVAFAGIDAPPYQSGQIDVRSRSISKRGSASLRRTLFLVMSVILQCAPIDEPVYQFMDKKRSEGKPYRVYMMASANKFLRIYYASVKAYLESLEHD

SEQ ID NO: 464174 - protein, 350 aa, unidentified
MSMLAELVEVVIGVDTHSQTHTAAVLDARTGAVLAQATVAADPDGYAELVALADEHSGLRAWAMEGTGGYGAGLARHLADSEELVVELDRPKRPTRRAGAKSDPIDAERAARDALARTRLAQPKTGAERAALQMRLTARRAAVEAAAAAQRQLLAMVITAPEVVRGRFRGQTTRAMIATATALRPGASRGDIEVTTALTVLRDLARRIRFLEAEALDHERAIRTIVRSWRPDLLTLSGVGPIVAATVLTAWSHPGRCRDDAAFAMLAGVAPIPASSGKTVRYRLNRSGDRQLNRALHTVVLSRLLRDERTRAYADRRRAEGKTDREIKRCLKRYIARELYRRLESPAIAA

SEQ ID NO: 464175 - protein, 570 aa, unidentified
MAKGCKLSKNIPRLPGQLGFCFSDHQIIRSPDVPILPSCLIYKKIQVIFSLKTSHLSEAEVSGSFCPCSSALASGFAFQFRRFWQFWQFWQALLMSATRDTRVAQPPRLCELPACIRLIHEESGNFNDALTLSFRAMTERMRRRERNPEDANHHQAESGNSPKTRFVSGGFSRSAASLVCDGFRWDETAGLAERAKMLSATHSRCKGDQPMKKSNRGTEWKERPSQTVGIDLGDRFSHYCVLNSDGEVVEEGRIRSNEESFRLHFEGEPRQRIVIESGTHSPWISRLLKRLGHQVIVANARKVRAIWENESKSDHQDAEMLANLGYSNPKLLAPIQHRSQERQRDLNLLRARDTLVRARTMLINSVRGLVKSDGGRLPKCAADYFATRVTAAVPAELVVAVEPLLQQITALTIQIRRLDQEIEKLADRYPEIHVLRTAPGVGPVVAAAYVLTLDGVDAVEHSRSAGAFLGLRPGRSQSGDSDPERNISKTGNIYLRRLLVQAAHYVLGRFGPDSALRRWGLKLALGGKRAKKRAVVAVARKLAVLLHHLWKTGQPYQPFPQSVTASAVSC

SEQ ID NO: 464176 - protein, 317 aa, unidentified
MKTEPFEQVILRGCGIDVHKDMVVATISGEGLKTETRSYKTFSSSLTELKEWLLSSGITHVAMESTGVYWKPVYKILECPDMKVWIVNARHIKYVPGHKTDKKDSGWICKLLLAGLLKPSYIPEREQRELRDLTRYRNKLIQHVSSEKNRIVRILEDCNIKLSSVVCSLDGVVANKLIDMLIDKGHVTMDDITCIYHKKLEASPELLYQACEGFIEPHHIYMLQTIRKDMEQTKAIIADLTCRIKEVLSPYENVMELLQKIPGLSRKTVEDLIAEIGVDMEAFPTEKHLASWAGVCPGNNESAGKKKVVEPPMATNS

SEQ ID NO: 464177 - protein, 423 aa, unidentified
MDILYERVAGLDVHKDTVVACVRIVAEGKTKRECRTFSSTTEQLIELRAWLEECRCTHVAMEATGVYWMPVFRILGEGPFELMVANAAHIKNVPGRKTDVNDATWIADLLACGLIKASFVPGEDIQELRSLTRTRKQLVREQTRHVQRIEKTLAEANIKLNSVISDIMGASGRRMIEAMIKGVRQPRQLAELAGKQIKATPKELYDALHGRLTDHHCFLLDLHLKQWDGLDGTIREIDREIDQRIGRLHTKRASGEVPFRTLIELLSTVPGISTLSASAIVSEIGCDMNRFPTAGHLVSWSGLCPGKNESAGKRKPSRLRKGAPWLKTMLVQCAWAAKRKKDSYYRAQFFRLQSKRGPQKAICAVAASILTAVYHILKNGTEHHDLGASYFDRRPLELKANRLVARLKKLGFNVQLQPAAEAA

SEQ ID NO: 464178 - protein, 376 aa, unidentified
MSMVKKYVGLDVSKEKIVVAIATENRDEPVRYWGSIPHTKEAVRKLVQRLTKEEGVTLDVCYEAGPTGFELYRWFSEFLVSCSVVAPQALDGNKRIKTDKRDAIRLAQLWRARELTEIYVPTPEDEALRDLVRAREDAVEDMNRHKQRLVKFLLRHQIQPVHKIKLWTFAYEEWLDTLRFSRECEDIVFQEYRNSIRETASRIKRYEKEIEQQATKSSQAPLIQALQGLHGIAVLTATTIAAELGNIAGRFPHPQLLMSYVGLVPRESSSGGSRWQGGITKAGNAHIRRVMIEAAWSYQTPPAVRRRLRDRLEGLGSEISGISWKAQKRLNHKYKILLGKGKHKGTIVAAVARELVGFVWAVAKEVEKQKLRSTAT

SEQ ID NO: 464179 - protein, 349 aa, unidentified
MEKITTVGLDLAKQLIAMHAVDARGQVVMRKVLRREALLRWSTTLAPCVIAMEACGGAHHWARELMRQGHSVRIIAAEFVRPFRKSGKNDANDAEAICTAVRQANMRFVTIKSVEQQAALCVHRLRQGWVEERTALINRLRGLLTEFGVVAPLSPEKLRQALRHCLDEETTNLPPTVRQLVRDELAALDTLEERIDAYAAQIAAQARENVAAQRLQGIAGVGALTAAAMVATVGQPQEFRNGRQFAAWLGLVPRQHSTGGKTRLGRITRRGDAYLRTLLILGAKSALQAALRKPAQQRHRLQRWIIEVFGRIGYHKTLVAIANKHARIIWALLVKGEDFDVQRLAATTA

SEQ ID NO: 464180 - protein, 360 aa, unidentified
MFHLLKVIKMIVKQVAGIDVAQNELVVCLGRMSDNWVPELYAGKSFPNTPSGFKAFTKWVTKTTLTEVPVRYVMEATGVYHQKLAYFLDDEQQEVSIVLPNKISNYARSLDTKTVTDKAASQAIAQFGLERHLDLWQRPKDVYTKIKYLTRERDQLVSERTVLKNQLHAELAQAFPYKKSVDRIRKRIALLDKQEKEIVAELRAMIASDPEVQKIVIILCTIPGIGLITAATVLAETNGFELIRNKRQITSYAGLDVREKQSGTSVRGKARISKKGNKYLRKALYMPALTVIRHQEIFKNIFARLVSRHGIKMKAAVAIQRKLLELMYTLFKNQTKFDKAIFNRPIEKQEPVIKWLGGEH

SEQ ID NO: 464181 - protein, 316 aa, unidentified
MQQTKFVGVDCHKNTLACYVDGKFKEFKTDFKGFKKALQWAGNDCSWALEGAYSYGLTFSTFLLKSGCKVYEFNALATAKARKALSICGQKNDWGDAKVISIFAPQSELQEVSTKTVKLKQIITKRKLLVTQRTQITNNLKSSFNQLGITTPFRNFKTIKAYKWFQNQEDVCIQQFGKMLQSLNESIKTLEEEIKKLIPEQAKKLTTITGINTLTAATIYTELKGKEMTKVQLASYCGVAPIDCSSGMSDKHRNNHRGNRILNSILFAVANIQIKYDEIGSAYYTKKLQEGKSKKVARKHLQRQLSNLLWKTLFKD

SEQ ID NO: 464182 - protein, 363 aa, unidentified
MNTTTVAPVVGVDLAKSVFELAVADGDWRITERARLSRGQFERWFVNRRVGLVVMEACGSAHHWARWLTGLGIEVKLLPARYVRAYVKRNKTDAADAAALLEAARCAEIVPVRVKSLEQQGLQALHRTRSLWMATRTSRINALRGFCREFGIGIAEGSRVGVEQIGRVLADPQTAIPGLLRGTMTLLVEEIRLLEGRVTQLERELTSAAKQSPACATLLSVPGIGLLTATAMVAATGGNVGHFKDARHFASWFGLTPKEHSSGSHRHLGRISKRGDRYLRMLLTHGARSVLRAASVATTAGKPIDALRQWAVAVQKRSNHNKATCALANKLARICYATLRDQEPYGAARLNRKLERIAFAMPA

SEQ ID NO: 464183 - protein, 338 aa, unidentified
MPLYGGIDLHANNSVVVLLNEQDQVIYQRRFANHLPEILEPFALYQADIQGIVVESTYNWYWLVDGLMEAGYRVHLANPTAIQQYSGLKYTDDHSDARWLAHLLRLGVLPEGYIYPKAERAVRDVLRKRAHLVRQQTANVLSLQNIIVRHTGVRLSAKRIHALTVEELERLLPVPEHVLAVTSSLVVVHCLAQQITTLEKTVQKHLKHTSAYAQLQTVAGIGPILAQTIVLETGDIGRFPTVGNYASYCRCVGSTKISNGKRKGQGNVKNGNPYLAWAYMEAAQFAIRFNPMVQRFYQRKQAKSHLMIARKAVAHKLARACYYIMRDLVPFDVHKAFG

SEQ ID NO: 464184 - protein, 343 aa, unidentified
MEHFAGLDVSVNETSVCIVDETGKIVREVKVASEPDALLTVLKNRAYHFKRIGLEAGPLSQWLYSALAEAELPVVCVETRHMQAVLKAQINKTDRNDARGIAQMMRVGLYRPVHVKTLRSQKLRMLLTHRKLMLSKAIAIENDLRGTLRNFGLKVGMVGTVKFEARIKELIENLPDLAVLVEPLLVVRRVLREQIGILHRRLLVIVRDDAVCRRLMTVPGVGPVVALTYRATVDVPARFRNSKAVGAVFGLTPSKYQSGEINRTGAISKCGDEMMRVMLYEAAQVMLTRTNKWSWLKAWAMKIARHRGMRKAIVALARRLAVILHRIWVDGTDFRWTREVAAA

SEQ ID NO: 464185 - protein, 347 aa, unidentified
MTIVEDTRAITGGVDTHADVHVAAALDAIGGLLGVQEFPATAAGYVRLLGWLRSFGTLAVAGVEGTGSYGAGLARYLAAAGVRVVEVDRPDRQDRARQGKSDPLDAISAARAALSGRASGAPRGRDGAVEAIRALMVAKRSARQERTQAINQARALIMTGPEELRARFSQRSPAQLIEAIAALRPRPGDVPGYATRVALHELGRRAQFLDAQLGRLDELIGPLVTARAPGLLALHGVGPDTAALLLVAAGDHPERLRSESSWAHLCGVAPVPASSGKTAGRYRLNRGGDRQANSALWRIVLVRMKSHEATRAYADRRSKEGLSKKEIIRCLKRYVAREVYRQLRAES

SEQ ID NO: 464186 - protein, 342 aa, unidentified
MDEYDGRQFVGIDLHRRRSVIVRQSESGEQLSAVRILNDPVALELQLEDAGADPEVVLEATYGWYWAVDVLQACGARVHLAHPLGVKGFRYRRVKNDVRDAADLADLLRMGRLPEAWIAPPETRELRELVRYRAKLVAIRSGLKAQIHAVLAKAGVLIAVSDLFGDTGRQRLAKVPLGPAYAQRIRSLLELIDILDGHEARFAALIADRLDTHRGYQAIQQVPGIGPTLAAVFVAEIGDVHRFTDSAHLCSWAGLTPRHRESDTVVHRGHITKQGSKAVRWAAIEAVQRHPTTAKIAADKQRIEARRGKNIAKVAAARKLLTLVYYGLRDGQIRALDRARAA

SEQ ID NO: 464187 - protein, 320 aa, unidentified
MENIALIGIDLGKNSFHIHCQDHRGKAVYRKKFTRPKLIEFLATCPATTIAMEACGGSHFMARKLAELGHFPKLISPQFVRPFVKSNKNDFVDAEAICEAASRPSMRFVQPRTESQQAMRALHRVRESLVQDKVKTTNQMHAFLLEFGISVPRGAAVISRLSTLLEDSSLPLYLSQLLLKLQQHYHYLVEQIKDLESQLKRKLDEDEVGQRLLSIPCVGTLTASTISTEIGDGKQYASSRDFAAATGLVPRQYSTGGRTTLLGISKRGNKKIRTLLVQCARVFIQNWNTSLASWPTGSGSCCVGKATLSSPVLWQTSWPE

SEQ ID NO: 464188 - protein, 350 aa, unidentified
MVYAGLDLSRRRLDVRVLDADGATLIETAAPPDRDGLAQLAERLRPLGPIRAAIESMTGARFVHDELERAGWEVELADAQKVKGLAPLACKTDRIDAWVLAELARRDFVPAIWLPDPAVREERERARFRLHLVRHRTALKNRIHQTLVAFGVPCPVSDLFGAAGRQLLERLRLPDPWRENVVLTLAFVDDLDRQIAGCERELRRLGADHRYVPLLMSIPGIAWVLGYTIAAEIGDITRFASPRKLAGYSGLCPRVYQSGDRDRRGPLAKNGPRYLRSRAHRGRPARRPLHPLPRALPAHQEAPRQEPRRQGCQDRGRPPALRGDLVDAHQRPTVCSGRRHEPSGRMTALD

SEQ ID NO: 464189 - protein, 350 aa, unidentified
MAIVGGFDIHRRQVTFDYLDTVTGQVRRGRIEPACRLVLREWLEERFAGRDDVTFAVEGCTGWQFVVEELQRAGIAALLAEPAQTADLRGSKKRAKTDKTDARHLRTLAADGRVPASWIPPAQVLELRALLQLYRDLREEHTAWTQRIHATLFHQGVPGLAGRLSDPRARARLAAAPAEMGLSAAGAQAVQVALRRMEDLEAELAPVRAQITAFARRQPGCRTLQHELFGVGPLVAAIVWAFLGDTRRFSTSAQAVRHTGLDVTVHSSDGKGPPGSLSHQGPPILRWALFEAGHQGSRASSPDHRYYADVAARIDANRAALSVARKLARRSHHILRRLGDQAYAPIPAGR

SEQ ID NO: 464190 - protein, 320 aa, unidentified
MRNAVGLDISKLTFDASAIVGNAEYSAKFDNDSKGLDQFSDRLKSLGCQNLHICMEATGSYYEEVADYFAQYYSVYVVNPLKISKYAESRFKRTKTDKQDAKLIAQYCRSAKESELVKRQKPTDEQYRLLRMTAAYAQIKSECAAMKNRHHAAKDEEAAKAYAQIIKAMNEQLEVLKEKIKEQTEKPNCKEGVKRLETIPAIGRMTAAVLFHHLTSSKFETSNKFAAFAGLSPQQKESGTSVRGKGKLTKFGNRKLRAVLFMPAMVAYRIRAFPDFIKRLEEKKKPKKVIIAALMRKLAVIAYHVHKKGGDYDPSRYKSA

SEQ ID NO: 464191 - protein, 354 aa, unidentified
MDKDRYVAMDVHKASVVVGIRDAAGKYITEAIVETKASTLVELVKGMSGPIHLTFEEGTQSAWLYDLFKPHVTELIVCDPRRNKLLEEGSKGDRIDVQKLSELFCKGMLKPVYHGDHGTRALKELGHNYESLVSDRTRVKNRLKAIYRGRGISYQGAEIYQTKQQAEWLGKLNERGVKRRAELLYQQLESLDALVKEARREMLAESRKQKVSRCLRRISTLGSISVALLIATVDTPHRFRTKRQFWTYCGLAVVTRTSADYYFDQGQLRRSRRPVVTRGLNQNYNRRLKRIFKQAALTASRRGPFKPYYERLLARGLSEELVRVTVARKIAAVTLAVWKKGAQFDPEKILKPTT

SEQ ID NO: 464192 - protein, 405 aa, unidentified
MGTPPDVDVWIGLDVGKEHHYADVLDDTGERLFGCGVDNDEPDLEELIEKASVYGTPGLVIDQPGSIAQLAIGVAGRRGVPVAYVPGLVMRRAADLYPGEAKTDRRDAFVIADTGRMRRSQVHWLDTTSDDLLGQLRVLNGFDIDLAADVTRLVNRLRDALTSVSPALERAIGSRLGHGGIRDLAVKYPTPTALKEAGRTRIGNAIKKRSPRLAGKVTDSVVAALEAQTLTLPAEATLGRVISETAAELDRLQERRDKLAAEIEEVFLAHPFGELLVTMPGIGPRTGARILAEIGDGTRFANGSKLASYAGLAPVDRQSGTSLNGASQSRRGNHRLKNAMFLAAFASLRSPDSKRFYDRKRTEGKKHNAAVICLARRRCDVILAMLRNHEPYRIPTNKADLENAA

SEQ ID NO: 464193 - protein, 359 aa, unidentified
MKYIGLDCHKQYDHATMIDADTGEVRSKRLAHTQNEFKEFIGDRASTKMVIEACWNWSKTYELAKDLVDEIILAHPFKVKAIASAKIKTDAIDSRTLALLLKADLIPQAHLRKSENRVKQKVIRHRAFLVATRTRIKNRINDMVDNQLLPVEVLRTRPKNLFSKRGKGENGVEWLKSLEWSREEARRIFESAMRLIEQFSHEISASNQMVEEIYKKDKDAKLLATIPGIGKTLAVLISTEIDGIGRFSSPSRLCSYAGLVPSTHSSGGKTYHGKITLEGNKWLRWALMEAVVPASYADAEIRTRLNALRKIKNANVAKTIMARWLLKVVYHVLKEGRPYVSADLADKTPGRLLKALASS

SEQ ID NO: 464194 - protein, 371 aa, unidentified
MEHTRFIGLDIHKERISVAVAESGRSGAVEYHGEIANDPGAIGKLCERLGRSGKALAFCYEAGPCGYGVHRQLTSLGHRCDVVAPSLIPMKSGDRVKTDRRDATMLARLHRAGELTPVWVPDADHEAMRDLIRLRSVVRQIVTRARQHLQGFLLRHGRKHGGGTAWRMAYRRWLSTLAFEHPAQQIAFQDYVDAVTDAERRLKRVEEQIVGLLPEWNLRPVVDALQAMRGIALINAVVLVTEVGDFTRFANPRQLMAYFGLAPGERSSGETVRRGGITKTGNAHARRALVEGAWAYRMKPRIGRHKVDRIEALPKIVRDIGWKAQIRLCARFRRLSARGKTANVITIAIAREMVGFIWAIACAIQSTPKAA

SEQ ID NO: 464195 - protein, 466 aa, unidentified
MGKGSNGMTRGDRRRNARRERLRELLPRDGAVIGIDLAEDKQALAVADHDGRVLARKTVRVKAFRLGEALDWAAGQARAAGFSRVTVACEPTGPRWMQVQRLCQERGLPLVCIQPLVSHIAREQQDYTAHKTDESDSVLIARLACELHCYIPEVLDEDWAHLRHLGRRREQLITAQTASVQRVRDFLSVAWPAVTEACADPFRAMTWLAALQAVVSWRGGPEGLAGPGPEELTGLARAAMPAWGGQRPCLRVLRAVHAALAAGEGVVASSRRGLFRRIAGELEDLARVRGQLRAVEAEMTAVLEDLGLSRLGGIPGLTVLGAAVILAETGDPFRYDSSSSMVKHAGMSPAQNSSGAFEGQARISRRGRPGLRLAVWRAVWPMLTHNPVLAAKYAAMTAGTAPAAGPGTVPRTAAAAAASARRGKARVACAASLLRWIWCLAVHGTAWDPAIASGATPMTTTPARAA

SEQ ID NO: 464196 - protein, 451 aa, unidentified
MDPGFLEHIRLSPRAIIGPGARFLEFLFVGPHAYDAIQEEEMELLHRRCCGLDVHKETVVACLRLVSDGKVTTEVRTFQTTTVDLLRLSEWLAANDCTHVAMEATGVYWKPVWHILDDGEFELVLANAAHVKNVPGRKTDVNDAMWLAELLAHGLIRASFVPDTQTQEMRNLLRTRKQLVREQSSHVLRVQKTLEDANIKLDSVLSDLMGKSGRAMIEALIAGETNPAKLAALADRRVKASHEEFREALRGRVTKHHRFLLRLHLNQIDALDAAMATLDTQVEANLGPFRTAVELIMSIPGIKNLGAHVIVSEIGIDMSRFPSDAHLISWAGICPRNDESAGKRRSNRLRKGAPWLKTTLVQCAWAAVKRKNSYLQAQFYRIKARRGPKKAIMAVAASILTAIYHMLKDGTMYKDLGCNHFDRRSTDKQKQRLVKRLAELGYVVEIKPIAA

SEQ ID NO: 464197 - protein, 412 aa, unidentified
MDVLHEHCAGLDVHKKTVVACVMHGNADGTTRKETRTFSTMLPDLERLRDWLTQEGCTQAAMEATGVYWKPVYNVLEESLSVLVANAEHIKAVPGRKTDVKDAEWIASLLRHGLVRGSFIPERPQRELRELTRFRTALVQDRSRAVNRLQKTLEGANIKLAAVLSDVTGVSGQRILDALLQGEDDPEALAGLAHGSLRSKQEALKQALMGRLSGRLRFVAGQELAQIRSLDDQIAACDEEVAKEMRPFDAEIERLDEIPGIARRNAENIIAEIGIDLSRWPTVAHFCSWSGACPANKASGGKRKPARVRKGNPWLKRSLTQAAWAAGRSKQSYLGERYRSLAARKGRKRAIVAVAHEILTIIYYLLTRGTHYQDLGLRYLEERNRAAIQRQALRQLARLGYDVNLTTRGQAA

SEQ ID NO: 464198 - protein, 348 aa, unidentified
MKEVLKQVLGVDVAQKELVVSLGRVFDDFSIETYAYSVFRNTPKGMNDLLKWVLKLTLDGKPLLFVMEATGVYHEKFAYFLDDKGYKLSIVLPNKISNYMRTLDIKTITDKSCSEAIVRFGLERKLTEWKRPNTIYKTLKQLTRERDQIVAARSVVKNQLHAETSEAYPVRSTIKRCNELIKFLNKQEAQIKVELEGVKDQEIKDKIKKITTIPGVGILTATIVLAETNGFELIKNKKQLTSYAGLDVKEKQSGTSVKGKPRISKKGNRSIRKAMHFPALSAIRHNEIYKGVYANLVAKNGIKMKGIVAVQRKLLELIYVIYKNNTVFDIEFEKNKREKQKQPLPLTS

SEQ ID NO: 464199 - protein, 321 aa, unidentified
MKKEIRYQQVIDVGCGLDVHKETIVATIRSGSKDYETKEFSSFTSSLTELRDWCKQRGVTHIAMESTGIYWKPVFNVLEDESFEIILVNARHVKNIPGHKTDKKDSAWLSKLLLSGLLKGSFIPPVDIRELRDLVRYKKKKTQVIAAEKNRMIKILEDCNVKLSSVVRDVQGVSATKIVNAITEGETDVAKLIGFVHGKIQADKETIKKALEGKVTEHHRFMLQIARESIDVNEALVTKLDAQIEKASIRYKVELDLLQTIDGVGKDSAIAIISEIGADMKQFPNEHHLASWSGVSPGNNESGGKKKAQEPSTETNTSKQP

SEQ ID NO: 464200 - protein, 346 aa, unidentified
MTIVEAGRTVIGGVDTHLDVHVAAALDPIGGVLGVESFVVTPRGYKAMLEWMGTFGTVSKVGVEGTGAYGAGLARFLRRAGVEVLEVDRPNRQARRTKGKSDSVDAVEAARSVLSGRATGAPKSRDGNVEAIRALLVAKRSAREGRLRAIHQMRQLSYTAPDQLRCRLKGLSTKEFVTESATMRPRVSGDPVLYATKTALASLGRRVHSLEDEAAYLDELLTELVTTTAPTMLELFGIGIDTAAVLLVAAGDNPERLRSEAAWAHLCGVAPIEASSGKVIRHRLDRGGDRNANQGLWRIVMTRISFDPRSRAYMERRTKKGRSKREVIRILKRYVAREVFKHLPRP

SEQ ID NO: 464201 - protein, 405 aa, unidentified
MNAVGIDVSKGKSTVTIRRPGDVVLMQPCDVPHTQSAISALIEQIKSLDGETKACMEHTGRYYEPVANWLSDAGIFVSAVNPILIRDFGDDSLRTPKTDKADSKKIARYALDRWAKLKQYGSMDKTRNQLKTMNRQFGFYMDQKTAMKNNLISLLDQTYPGANDFFDSPARSDGTQKWVDFVYTYWHVDCVRGKSLQAFTEHYQKWCKRNGYNFSASKAEKIYQSSSDLIAVFPKDDSTKTLIRQAVTMLNTASQTVEALRIKMDQTAATLPEYPVVMAMNGVGPSLGPQLMAEIGDVTRFTHREALTAFAGVDPGKNDSGKHSQKSVRTSKKGSPSLRKTLFQIMDGLIKRSPVDDPVYAFMDKKRSEGKPYYVYMTAGANKFLRIYYGRVREYLASLEESKES

SEQ ID NO: 464202 - protein, 401 aa, unidentified
MRFYTKQHRYYCGIDLHARRMYICILDADGQIRVHRNGPATPEHLLATIAPYREDLAVAVECIFTWYWVADLCAREGLAFVLGHALYMKAIHGGKAKNDKIDAHKIAVLLRGGMLPMAYVYPRAMRATRDLLRRRCHFMRKRAELLTHIQNTATQYLLPPFGKKIAHKSNRTDVAEQFTAPEVRKSIETNVALLDHYDRLLTDLELYLARTAKVHDVHTFARLRSVPGIGQILALVLLYEIHDIRRFPSVQDFVSYCRLVKCGKESDGKHYGYSGAKIGNAHLKWAFSEAAVLCLRQNPPAQRFVAHLTQQHGKAKALTIFAHKLARAVYYMLRREQVFDATRFFAGTAATPDPPGRATLTPGAPRGQATTTTGAPRGSRIPRSTRRRHCPGVVPMTTTAE

SEQ ID NO: 464203 - protein, 338 aa, unidentified
MVEGTKGSHHKEGTTKMAKRNTVCVGIDTGKHKLDVALDQGPEQLQVDNDPDGHKSLAAWLRQRRVRRIGIEASGGYEQAVVVALRRDGFVVILFQPAQVRAYAKFTLQLAKNDKIDAALIAACTAATKTIREPPDPRLAALAGHLTMIEQVIEDIARLKTRRESCRDERIRQCWKEEVTRLRALARNEFKHLLAAIHEHRDLTERLDLMASVEGIGLKTAVSVLIRMPEIGNLNREEAAALAGLAPYDDDSGSRTGERHIAGGRERLRTSLYAAALPAAFKWNPQLIALYRRLIAKGKSHKKALVACARKLLSSSIPLSLAVRPGLTAPLKPNGCSP

SEQ ID NO: 464204 - protein, 445 aa, unidentified
MSNGSGLSRGDRNRNARLARLRELVPLGNAIVGIDLADDKQAAVVTDHDSRVIARRRVSARAWELGGLLDWAVVAAAGAGFASVTVACEPTGHRWRVLDQLAVERGLALVCVQPLLVYRAREGEDLTWDKSDPKDAVIIARLAAGLRCYEPERADAVWARLRHLGARRSALIADATAEVNQVRDLLECAWPAVLAAAGVPFRSATWRAALAVTLDRCAGDLARVRRLGPARFESAVRRELPRWGAQRPCLRIIRAVFAALADPAGVRVHRPGALERARLVLGDWRETRARLADVEARMVAVLDDLGLTGLVTTIAGLTPAGAAAILAETGDPARFTSPRALVKHAGLCPRDNASGGYQGKTSISGRGRPALRVAAWRAVWAALPNNPVMAARFAYLTTRDHNRLARQQARTACAAALLRWIHVVITRRIAWDPAIAGRTPPCRAA

SEQ ID NO: 464205 - protein, 312 aa, unidentified
MEGLFVGVDVSKAWLDCGTEPPAGVSRFGNDVAGIQALVTWLRERSPTLVVLEASGGWETEAASALVAADVATVVVNPKQVRAFAKGMGLLAKTDRLDARVLALFGQRIRPAVRPLPSAEQRDLAELLDRRAQLVAIRAQERARLATALAIAKPSLQEHIRWLDERIRQLEVDLTAQLRTSAAWQVKANLLQGVPGIGKITIFTLLARLPELGHLNRARIAALAGLAPFADDSGNRRGARFIQGGRAEVRSVVYMSTLTATKHNPVIKAYFERLIAAGKPFKVAMTACMRKLLTILNAMLKTNQPWRAPTTA

SEQ ID NO: 464206 - protein, 350 aa, unidentified
MKHNTAKKPTKEIKVLSIDLAKQSFHIHGVDEAGETVLSKKLTRKQLIAFTVKLPPCLIGLEACGGAHDWVRKLTGYGHTVRMIAPQFVKPYVKSNKNDAVDAEAICEAVQRPNMRFVPVKSIEQQNIQSLHRIRSQLIARRTAQGNQIRGLLLEYGITIPQGITQVKKAISSILEDAENGLTPIFRELLNELKEEIEHLNDRIEGIEGKLKAISVNHEDCQRLLTIPGIGILTATALIAAIGDITVFKSGRELAAWLGLVPRQHSTGGKTNLLGISKRGDAYLRTLMIHGGRSVTRVAHRYDDKRNRWICQIKETRGQNISNVAVANKNARIAWALLTKKENYTTASAA

SEQ ID NO: 464207 - protein, 411 aa, unidentified
MALFCGIDWAEAHHDVAVVDEGGTVVVRARIGNDAAGFARLLTLLAEAGDTPENPVSVAIETDRGLLVAALRATDRPIYPINPLAASRYRSRHQVSGAKSDATDAVMLANILRTDAAAHRPLPADTELAQAIRVLARAQQDAVWARQQIGNQVRALLKDFYPAALDAFAGLPEGGLARRDARVVLTAAPNPALAAKLSRAHLAKLLAKAGRKRNIGAEVERLYAVFRADTHLRQPPVVENAMGIQLTALLGQLDAACRAADDLTEAAIAHFDRHPDAKIITSFPGLGQLSGARVLAEIGDDPTRFTDARGLKAYAGSAPITRASGKKSVVLHRHIKNKRLAAVGPIWALSSLRASPGARRHFDARRHAGDWNHQAQRHLFNKFLGQLHHCLQTHSLFDEHRAFPPPQALAA

SEQ ID NO: 464208 - protein, 443 aa, unidentified
MSEKCFAHLRGQRGQAFADLIRGISPEQILCVSLDISKYFHVAIIHNGLGEIVTPTFEVDIYQSGFDQLCRTIEQARVRTQAQVVLVGMEPTSHYFENLARHLLERSQPVKLVNSFSVKQNREQQLMRREKSDQIDVAAIGDLLRRGEGTPYKPATGIYLQLQQIDRVRMGKIKIAGILKNQIIGHLDRIFPGLVILDETAKQRYTPLFNTDFWQCQTLQDLIRVCPNPHELVALSPEQLVRVFHAQQCRLGPATAAKIIAQAKKTLLPDPELAAIRCELLQHDLTLLKTVQAHITLLEQRLIELVAHTPYQVWAKLKGLSLVQTASLAATIGDPTNYTEAAQVFRRSGLVSGRNDSGNHQRKGRGSHILKTGDVYLRRTLMNAVATLILHQPILARYSKQLQATKPAGVARVATARKTIGILWAVLRDQSSYTLINCKGAEM

SEQ ID NO: 464209 - protein, 361 aa, unidentified
MGMTKIIALDLGKFKTVACVMNVADRSHVFETIEMSPAAVHELLARHATDPAEQTLVVFETCDCCGWVYDLCVALGLSAKVVAANSEAWQWRRVKRKTDRDDALKLAKLALLDQLTVVHMPSPEQRQRRRLILHRRSVVSRRTQSRNAIRSIFSQQGLPLVRGGKQWTKAGIEQLKTHARPLAECDDALDLWRGRLHAEMQLMADADAQLKIFDRKLDGLSKEDDRVQLLQTIKGVGPRVAEAVVMHLDDVSRFASAEHVASYAGLVPKQIESGEMSRRGHITRRGPSLLRSMLVESAWVVWRHNDWAKAWVNKISRGSKARRKIGIVALARRLLTILWAMLRDNTPFRDPGVPPAPVMTT

SEQ ID NO: 464210 - protein, 491 aa, unidentified
MIQIPAVSERCAGIDVGKREIAVAVITGPADQDGEVKTRAFGTTVPELEKLRQWLMEEGCTSVAMESTGSYWIPLKNILEESVKIVLVCARKQKPARGDKTDFRDAKNLAHLHRHGLLQGSFLPPRAQVELRDLTRRRKKLLGNLSAEKNRIQKILETANVKIGNIVSDVFGVSGQAMISVLISGEPVEVGEIADLSKHRLRKRIPELTEALEGHQMNDHHRWLIRQCVEHAVLLDRQLEELESRIEAKLEPWKQQFELLQTIPGVKGTTAATILSEIGPDMSPFETAGNLSSWAGICPGNNRSAGKSKHSRIKKGSRFLLAALVQAAWAAARKQDSIFQRKFHRWMRHLGEAKANVALAHNLLEVVYAMLKTGRPFQEPDPAVIHEREKAKLIRHYTKRLTQLGADRSLVAELTERLNQPSTDSSPVEQKPPSPPDRIRRTCPAKVRRGALGFRARQTRPQEYSVEKEQSAGAPRRRRPPKTMNKDLNPE

SEQ ID NO: 464211 - protein, 440 aa, unidentified
MAVRKREDEVFPNAAGIDVGASSHWVAVPPHLAEESVRESGAMTDDLNALADWLLACGIDTVALESTGVYWIALYDVLEQRGLKVWLVDARQMKYVPGRKSDVQDCQWLQKLMSLGLLRAAWRPDGEVCVVRAVARQREVLITEQASWVQRMQKALVQMNIQLTEVPADVMGATGQAIIRAIVAGEHDPEALARHRHARVKAGAAEVIKALKGNWRDVHLFVLAQALSMYDDIGRHLLECDTKLQVLLAERSQAVVDLGKAPRQGTKSRAEFDVRKALANWAGVDLTKIDGLGVTVVMTLLTEIGPDVSRFANVKHFCSWLGLCPGNKISGGKVLSSSTKRTANRARQALKMAAMALWHSSSALGAFYRRLCGRLDKPRANTATAHKLARMVYFMLTRGEAYVDKGQQHYEEQQRQRSIAALKRRATALGFQINPVTASD

SEQ ID NO: 464212 - protein, 456 aa, unidentified
MPATVFAHVEKEGHSMAAVMIGIDPHKASHTAVAIGAAEEPLGQLQVRASASQAERLLGWAAAWPERAWAIEGAGGLGHLLAQQLLAAGERVLDVPPKLGARVRLLATGDTNKNDPNDARSVAVAALRSAGVRAARRDDHAAVLRVWSKRHRDLGRTRTQVVCRLHAVLCDLVAGGVSKHITAAHAARLVESITPSGAVEAARCELAAAFTEDLRGIDDRIRETRTKLTAAVQAAGTSLTGLFGVGPVIAAAVIGDVRAVARFPGRDHFAAYNGTAPIEVSSGDRKVYRLSRRGNRRLNHAIHMAAVTQIRHRHSDGRAYYDKKLAEGKTRKEALRALKRQISDAIFARLQADARRAAAGVKGPGRQPGNDSDSSAAGSHPAHRLFGQATPGPRHHPTTAARTRGRAGHSPAAATLLPARRRPHSAAGKVTGPSSAVKPQRPKTTSRAAKKTGQTP

SEQ ID NO: 464213 - protein, 346 aa, unidentified
MLYAGLDLSRKRLDVHVLREDGTTALVTAISPDGDAMRSLVRRVAAEGEPVRATIESMNGARFIHDRLEFLGWEVLIADAQRVRGLAPLAAKTDKIDARVLAELTRRALVPEIWLPTPEVRAERERARFRLHLVRHRSALKNRIHAILIAFGRACPMSDLFGVAGRELLDSLALPEPWQTNLVESLALVDDLTARIDALELELRRLGAEHPSMRLLMTVPGVGWVLAYTIASEIGDIDRFASPKKLAGYTGLCPLVRQSGPKDRRGPLAKNGPTYLRWALIEAATHAARDPRYRERYERTKQRLGRQRGAKVARVDLARQLAEAIWHVLTKNEPFHPAGPAMGLVA

SEQ ID NO: 464214 - protein, 412 aa, unidentified
MQDILTCAMGLDIHRDVIVACLAKGELGTDPEIEIRSFSTLIPEMRKLRDWVLEAECRYVAMESTGIYWQPIYEMLEPCFDGQISILVVNARHMKNVPGRKTDMRDAQWIATLLRAGLLKGSFIPDKTFRELRHLTRYRKSIVRDITAQKNRIDKFLQSSGFRFTAFLSDAFGASGRNIIRHLMEYGNISREALDRCLKTQTRKRIDEILIALNGSLSEHQRGFLRMIFGHLEALEQHRHTVEDAITKEITKHEEALSLLCSIPGIDVTAAAAIIAEIGTDMSAFPDSQHICSWAGLSPGNNESAGKRKSAHINKGNPYLKSMLCEVGWVISGKRSLYLSGWYWRIKQRKGAKRATIALARKLLALIYTMLKTGSPYNEDCFEIRRKQSERKRASRMVNELQKLGYFVVAPD

SEQ ID NO: 464215 - protein, 357 aa, unidentified
MQITTIGLDIAKNVFQIHGIDAAERVVVRKQLRRGQVMKFFAALPPCLVGMEACATSHYWARELTKLGHEVRLMPAKDVKAYVKRNKNDAADAEAICEAVRRPTMRFVQAKSAEQQGRLMQHRARDLLLRQRTQVINALRAHLAELGIVAAQGHEGLKQLLTIIADERDERLPIDARASLIVLAAQLQALHTMIGSIEKRLTVQHRANEASKRLQSIHGIGIIGASAIAATVTDPKAFRSDRDFAAWIGLVPREDSTGGKRKLGPISKQGDRYLRRILVVGAHSVLRRAKQNPEKYPWLTQLLARRPFKVVAVALANKMARIAWACWPAAATTGHGLGRQRRKGLGNGKMRLRPCVS

SEQ ID NO: 464216 - protein, 342 aa, unidentified
MQVTTIGLDIAKNVFQVHGIDAAEKVVVRKQLRRRQVLEFFKALPACLVGMEACATAHYWARELTKLGHRVRLMPAKDVKAYVKRNKNDAADAEAICEAARRPTVRFVQIKSTEQQGRLMLHRARDLLMRQRTQVINAMRAHLAELGIVAAQGRDGIKELLKIIASEADARLPVDAHTSLVVLAAELQAMQTLIGSIEKRIMVQHRLSEASKRLKSIPGIGLIGATAIAATVPDPKVFGSGRDFAAWIGLVPREDSTGGKQKLGPISKRGDRYLRRILVVGACAVLRYARQKPEKYPWLTQLLARKPFKVVAVALANKMARIAWALLAKGGTYRVPALATAV

SEQ ID NO: 464217 - protein, 350 aa, unidentified
MLIIGCDFHPSLQQIAGLEETGEVVERRLGHREEAEQFYRSLLGPVRVGMEACGHYPWFERLLQELGHELWLGDAAAIRAKVVRKQKTDRRDAEHLLHLLLEDRFPRIWVPSLEERDVRQLLVHRHKQVQTRTQVKNQLQAMALSQGVQKKRKLWTEVGRAELEQLPLLPYAAERRKHLLLSLDGLQAEIEALNRRVEEEVQKRPAAVRLQTHPGVGPVTALAMVLTLGPAERFPSGKEVGSYFGLIPSEYSSGGRQRLGRISKQGSSFLRFLLVEAGQSAVRYDAELGRFYRRLAARKHRALAKVAVARKLATRLYLMLREDWNYAQLCRAVVQVSLSHSVVGRQKPTA

SEQ ID NO: 464218 - protein, 344 aa, unidentified
MSQSCIAVLGIDLGKTSCSLAGLDAQGAVVLRRRISRAALVEFTAKLPSCIIGMEACCGAHFLGRMFEGQGHVVRLMSPEYVAPYVKAQKTDERDAEAIAEAATRPTMRLVAIKSEAQLDLQSLHRARQRLVAARTRLTNQLRAVLLERGVILPKRKAPLRLRLDELTTDGLAISPRMLRLLEDLRDEWRALDRRIKAYDEELAVLTRDNELARRLASIPGIGVINATALVAAVGDASAFARGRDLAAWLGLTPRQHSTGGKTRLLGISKRGSKYLRTQLIHGARAALRPLAAQPSRTGAWLRELLGRAHPNVVVVALAAKLARIAWAVLRNGRSFDRHHEAVA

SEQ ID NO: 464219 - protein, 422 aa, unidentified
MSKKRNKVCGIDVHKRFLVASILDNEGNCETKRFEQDLDELISLKNWILDSGCESVAMESTAEYWRPAYGILNPEINITIGNAYHMKGIPGKKTDVLDSQWIAELELNNLITPSRVFTGDLYELRTLTRARNKMVNNSTVFKNKILHQLDVCSIRLCTVLKDVFGKSGYALLKGIVERKTQDEIIKALPAKTRKIAPVFFEQIPEYIPDSAIFLIDSMLKIYDNLQVEIKRIEERIKFYLKDKENELRILMSVPGIGIVIGSNLLAEIGDIRDFPTADKLAKWAGLTPSVYQSANTNYTGPITKQGSKYLRWALIEAAHSAIRRPGKLNDYFNGLLPRKGYKKAIVAVARKILRIVWHLLINNEIFEDGIPRVKTVKIPKFPEKIERVGIAKIIQLLSRGAEIIVQEEGKEIMRINGSSQPT

SEQ ID NO: 464220 - protein, 409 aa, unidentified
MKTKQYTYFCGIDIAKRKHVACVINRDDEFVVRSQSFNNDAQGYQALLNRLKDTGQRRQILIGMEATGHYWYALRDFLAGKGYEVVVLNPIQTAQQAKKGIRKSKTDKIDAHHIAQLLKNGEHKAALVPGDFAMTCRQLTRLRYKLIGQGAGVKRLLWSRLHPVWPEYETLLANPFCKTGRTLLMTAPTPADVLAFGREALAELIRKTSRGKYGAMQAEKIWLAAQQTVGTRRGLDGARVSIRSLLTQIEALAAIRKQLEAEIVALAERLPGHLFTLPGIDRISAVSLFGETDPIEAFDTGAQLVAFAGLDTTVFQTGQYEAPHRRITKRGSPFLRHTLWGMAHRACYQEGDLRDYWLRRRGDGLHYLAAVTASAIKLSHVAWRILTDRRDYLPKAPTARKIRRSRPTS

SEQ ID NO: 464221 - protein, 310 aa, unidentified
MKPAYVGIDIGKERLDVFIPDHGASAYHNDRQGIRSLVKALTILEGPLHVICEPTAGYERMLTAALWEASIPLTIANSYRVRSFARSRGHLAKTDKLDARMLSEYGSVNEPKASTKPDARQQLVERLMDRLAQLDHMRTQELNRLHQIDPGDVVYRSLKAVLRTIETQIEKLRRQVKETIEDDPQLKARSDKMQTVIGVGEQTAARMLAYMPELGSLSRQQAAALAGLAPVNWDSGSMKGQRHIRAGRAKVRKALYMAAVCMSTYNPHAKTVYDRLVLKGKAKKVALVAVMRHLILHLNSLLKPPSLALI

SEQ ID NO: 464222 - protein, 371 aa, unidentified
MRQCTRFVGLDDSKDSVDVAVASEGRDGEVRPYGSIPNTPEGVKKLVRRLGRPKDLYFVYEAGPCGYGLYRELRALGANCLVAAPSKTPRRAGDRIKTDRRDAVALARLHRAGELHPVWVPDEETEAMRDLTRAREDARYVQTKARQRLQSFLLRHGRRYPGRSHWTKAHWAWLAQERFPQPAQQICLDEYVGAVEQATARVERLESEIRELTSTWSLGPVVSAMMAHRGVSLVVAATVCAELGDLTRFDRVRQLMGFVGLVPSLHATGQTRRAGAITKTGNAHVRRVLVEAAWAYRHPARRTAHLRQRLAGQPEDVQEIAWKGQVRLCGRHRRMITRGKHPNKVTTAIARELLAFLWATARMVQPMSPAA

SEQ ID NO: 464223 - protein, 337 aa, unidentified
MKYSGIDLHSNNSVVTVSDEEDRVMAEKRLPNDLHRILEFLKPWREEIVGVVVESTFNWYWLVDGLQEAGYKVHLANTMAIKKYAGLKHSGDETDARYLAHLLRLGILPTGTILPPEQRTVRDLARKRMQLVRSRTAHILAVENITARQLGARISSNQVKQLTDEGVDQMPLPDDVALAIKANVAVITALSGQIKLLEKRLQESVGARAKYEILTSAPGIGQVLATTILLETGPIERFATAGNFASYARCVDSVHTSNGKKKGEGNTKNGNKYLAWAFVEAANFALRYNPEAKRFYDRKKSRTNNVVAIKALAHKLARACFHMLKEKKPFDAERCFA

SEQ ID NO: 464224 - protein, 405 aa, unidentified
MGIYVGIDWAEAHHDICVLDERGTVLIKRRIAEGLEGVGQLHAMLADHAQEPDQVVVGIETDRGLLVGALLAAGYQVYAINPLAASRYRERHGTSGAKSDPGDAKVLADLVRTDRHNHRPVAGDSELAASLQVLARAHQNLVWSRQRLVNQLRNNLREYYPAALAAFGTELAHPVALGVLDAAPTPARGRTLSRAKLAAIVRRAGRERGVDEKAAAIQAELRTPQLAAPALIGAAYGKSVASTVRILRGMNAELASLESELAPSFEKHPDAEIYRSLPGLGIVLGARVLSEFGDDRTRFAHPKARKNYAGSSPITKTSGRSRVVLARMARNRRLADACHQWAFCALTPSAGARDYYHRLRQRGKTHHQALRALANRLVGILHGCLDHRQTYREDIAWPTSLTVAA

SEQ ID NO: 464225 - protein, 349 aa, unidentified
MSVDPVYKVARSGARVEEKRWRDRTVIDGILGIDVCKNTLDVSISSYTKVRTKSFTNSPDGWRHLLDWLIAQKIQRVHACLESTGRYSLGIACALYEADHVVSIINPAQIRDFVRTKLGRNKTDGVDASHIREYCELFKPSPWAPPSEAHRRLGELQTIRSGIIAGLTEWKNRKNSGIVDAEAQALADATISHFTSQLGAVDKAIALTIDNDCDLQSKRDLLLSISGVGETLAGVVLAELPGPDVLRSSAEVVAYAGLNPRRHQSGTCIDRATRISKIGNAVLRAALYMPALSAMRYNSAIVALVTRLKSRGRLKPKQIVVAAMRKLLVLCFGVLKTGRPFDAAIAMGG

SEQ ID NO: 464226 - protein, 384 aa, unidentified
MDQHSRAFVGIDTSKLRNAVAVAEDGRGGDVRYLGEIDTTEAATRKLVAKLAAKYRQLTFCYEAGPTGYGLYRLIRKLGHDCIVAAPSLIPKKPGDRVKTNRRDAVGLAKLSRAGELTAVWVPDERHEAMRDLSRAREAARKDLKGKRQQVSSFMLRLGRHYPGKKTWGPAHMNWLMLQKLEHREQRIALEELLGAVRQESERVERLEQAIRDAVPEWSLAELVTALQAMRGIDLVAAVTVLAEIGDLSRFQNPRELMGYLGLVPSESSTGDTVNRGGITKAGNSRARRILVEAAWSYRHPPRVSREKQIKVAAAPRAVREIAWKAQMRLCGRFRSLTRKGKRPTVVATAIARELSAFIWAINREVVESHATANRRPGHGPLEL

SEQ ID NO: 464227 - protein, 462 aa, unidentified
MTVPTTKGRRKRATPVPTSLPAIRSLVAGLDVGSSEHWVCGPARADGQPNVRCFGTTTDQLQELADWLADHRVESVAMESTSVYWIPIWELLEARGIEALLVNARQLHNVPGRKTDVSDCQWLQLLHSCGLLRGSFRPGEAITRLRALQRQLANLVAERTRCVQWMQKALDQMNVQVHRAVTDLTGTTGLAIVRAIVGGERDPARLAQHRDPRCRKSAAEVARYLTGTWRAEHLFNLASALRLFDALEAEIAAYDAHLLTAIESLQPPDRQAAPVPPHPNLAKEKAIRTHGEQPARTTLWRFAGVDLTRIDGIGAGAAQVVLPEVGPDLAAFPSEDQFVSWLRLCPRTPISGGKPLKKPRNGLGANRIAGVLRLAATSLQRSKTALGAAFRRIARHKGSAVAVFATARQLAKLIYRMLRYGHDYVDIGEQAYDRQFQTRRLAALTETARSLGYTLLPNAAAK

SEQ ID NO: 464228 - protein, 435 aa, unidentified
MRLKEYGRNPKKRKAYVQQPDLLLVGVDVSKAKHSACIGTQTAINCRKLEFTHTREGFRRLEQTLKDQLGQNQCRRLLIAMEPSGIYWHALYERLKSCGYGVCLVHCQAVRNNRKTMPEGTSKTDEKDAYSVFDLLLQGKFFLPVERDPELRAAYRLMQRHMALKKRVSQLRNQLRAAIHLAFPELNPLMKDLTQPTALRFLPANPTPESILRNGRTRFLEKWQPRRRCGQWRPETFHRIYDLAKASIGLQDAYRIDEFEIKTLAGDLVDALTKQQLWLDQAIALLAHRADYQLLLQLPRIGKPTAAAILTAIGDIHEYQNGKQLVKLAGLDIRLFESGSSVRKLPKISHAGSAYLRYWLYHYALRLIAHEPHFAAYYQRRKHQSPGKGAGQRALIAVCDKIIRMIYRILTDHAPYAPKKDQHIAAYYAARRPAA

SEQ ID NO: 464229 - protein, 391 aa, unidentified
MLNDAPRPAQAAIRTDLGAIFVSMELSRRAWLITSLSPGAGEKMSKHSVPASDVAGLLHRFAELKRKAAARTGRDFPIIVIQEAGLDGFWIHRVLQSEGIESHVVDPASILTSRRARRAKTDRIDGETLVRTLMAFKRGEPRVCSMARAPTPQQEDRRRVCRERRILVGERVRHVNRIRGLLFAQGVFGYEPLRKGRRERLEELRTGDGRPLPVHLKAQIIRELDRLELVLAQLKSVAAERDALLKPASDEVPAPPTMLTRFKGIGPETAAVLWSEGLFRRFDNRRQVAAYAGLAPTPWQSGSIDHEQGVSKAGNPRLRTAMVELAWLWLQNQPTSALSLWFRERVERLGGRMRKTIIVALARKLLVALWRYTTAGVVIEGAVMKPASATI

SEQ ID NO: 464230 - protein, 311 aa, unidentified
MGGVNAAIEVGKHQLDVALGSNGELFSEPNQARAITRLAKRLAELDCTRVLIEGGSYQNVLVAALRAAELPVVIINPRRVREFAKSIGQLAKTDHIDARVLALYGERIEPPIRELPDEQNQALRGLWVRREQLIEMLVMEENRLEHAPKTLHRSLRAHIDYLRKQIKQADNDLDRAVRNSALWDKYQLLSSVPGVGPVLSVALLSDLPELGRLNRREVAALAGVAPFNCDSGTLRGQRQIQGGRKRLRRVLYLATVASVRCNPVLRPFYLRLRATGKPAKVALVAAMHKLLLILNAMLKTKTVWRPPCPAA

SEQ ID NO: 464231 - protein, 453 aa, unidentified
MSRGRKTKVQKIQPKINPYAAGADIGAREIYVGVAVELTETPVRRFSTFTEELRQLVAWLVELKVQTVAMEATSVYWIPLAELLEEAKIAVCLVNPRHVQNVSGRKSDVMDCQWLQYLHSVGLLRAAFRPAAHVRGVRALWRHRDALVRQAGWYVQHLHKALDQMNVQVHHVLTDITGVTGTAIVEAIIKGQRDPRVLASYRDKRVKATEQTLVAALTGDYRREHLFCLQQAYAAYQFTEQQIAAVDQELATELARLAPAPAIGDAAPPPSPRRPKASIKHPPAYPAQTRLASLCGVDLTTIPGIQVLTAHTIWAELGSDLSAFPSSKHFCSWLSLCPDNRTSAGKCLSTKTRVSANRVAHALRMAAQGCHHAKHALGDYYRRMRAKLGAVEGLVATAHKIARILYAVMTTRRPYDPTLHEHALLQIERRNLTRLHSLAKKHGFQLVPNQQTV

SEQ ID NO: 464232 - protein, 476 aa, unidentified
MKPKKTASRPTRINWQQMNRKQRREMTRTLQSGDLSLEVVHPDAAGIDIGNESHYVAVPPTRESEPVRRFGCTTAELKSMADWLKQCRIRTVAMQSTGVYWIAVFDILEEAGFEVYLVNARETKNLPGRKSDVQESQWLMKLHTYGLLRNSFRPSQEIRTIRTYWRQRHDLVRSAARHIQRMQKAMTQMNIQLANVLSDVSGVTGQAIIKAILAGERDPQKLARFRDWRVKASQEEIARSLEGNWQEDLLFVLKQEQDNYDFCQKQMAECDQQLQQYLQQRQDRSVGINLREEKRKARLKKQRGNAPQFDLRAELFRMTGTDLTQIDGIDIMTAMTILSEAGSDMSKWKTEHHFVSWLRLCPDNKISADKVIGKGRLPTKNRITSALRMAASTLRLSNTYLGAQFRRLRTRLGPPIATKAMAAKLARLVYRMLRYGMQFVDKGTEFYEAQHRKQQVNYLKWKAANLGLQIIEVPAA

SEQ ID NO: 464233 - protein, 341 aa, unidentified
MQVTTVGLDLAKNIFDVHGVTEAGEVAFNRPLRRAQVLAFFERLSPCLIGIEACASSHHWGRELTKLGHTVRLMPPMYAKPYVKRGKSDTVDAEAICEAVTRPTMRFVEIKSEDQQALLSLHRARDFVVRQRTQLINMLRSLAAEFGITIARGVARAIDFAKGIIEGKQSGFPALAQDVLRVLSRQLVELHNRLRWYEITMRIQARLSRQAQLLQTIPGVGPVTASAVAATIGSGHQFKSGREFAAWPGLTPRNHSSGGKERLGKITKMGDRYLRQLIVVGMTSRVRQVTNHPERADPWLTKLLQRKPARLATVAMANNLLGTCLRHTLPGSGLCGSCGRC

SEQ ID NO: 464234 - protein, 412 aa, unidentified
MFKIVYPICCGIDVHKTFVIACIASTNEAGITKYQSKRFSTFTKGLRELREWLLSNSCINVCMESTGKYFIPVYNILEDGLKPIVAHPKYVKAIRGKKTDKRDAKWIADLFKHDLIVSSFIPDKHIRDLRDLMRYRFKLTNFGSSEKNRFQNCLTVSNIQLASVVSDTFGKSSMNIIEHILENPFDKNIDISSLIHGSLTKKIPELELAVDGVITETQAEKIKIIKQHYDSLDLCKLNLESVILNLSQPYQKEIELILSVPSINNIFTAIGILSEIGADMNVFPSAKHLCSWAGLTPTNNESAGKKKSVRISKAGCYLKPLLVQCATAVVKSEKHPEIRNRYLNLKKRRGHKKAIIAICRMLLTAIYHILKKQEVYNPDLYKKAELLPISREITPEQAIYIAQRQGYKVMAV

SEQ ID NO: 464235 - protein, 346 aa, unidentified
MLYAGLDLSRKRLDFCLLDHDGAEVEIGAAAPDGDGLNGLARRLARHGQPIHAAIESMNGARFVHDQLEQAGWQVEIADAQKVKGLAPLACKTDRIDARVLAELARRDLVPAIWLPDRSVRAERERARWRLHLVRHRSSLKQRVHSVLLAHGKPCPVSDLFGVSGRALLERLALPEPWASTVHASIRLLDELTCEIDSCERELRRLGADHRYVPLLLSVPGIGWVLAYTIAAEIGDITRFSAPAKLAGYSGLCPRVYQSGSCDRRGSLAKHGPKYLRWALVEAALHACRHPAYQERYERTKRRLGKQRGARVAQVDLARRLSEAIWHMLTRDQPFAPAGAAKPVTA

SEQ ID NO: 464236 - protein, 351 aa, unidentified
MMIIGVDYHPSFQEIAFLVEETGECDEGSLKHSNGEAEKFYRDLKARGISARVGMETTGYSRWFERLLAELGFEVWIGDAAEIKTRRAKKKKTDREDARLLLKLLLEDLFPRIWVPSPENRDLRQLLWHRHRLVQMRTRIMNQLQALAMNENRCWKGKLWSERGRAELEKLPLAFWASHRRQGLLELLDRMNPAIDELTAAAEREAKKRPEAVRLMTHPGVGPLTALAFVLIIGTPERFGCAKQICNYVGLIPSEDSSGGRQRLGHISKQGSSLLRFLLVEAAQAAVRCNADWRRRYRHLAMRRQRNIAKVAMGRRLGARLYWMWRNGCEYSPSLEFGSHAGKLGTGNGGQ

SEQ ID NO: 464237 - protein, 413 aa, unidentified
MRVVHERCAGLDVHKKTVVACVITPEGREIRTFSTMMEDLLALVDWLQERGCRVVAMESTGVYWKPVFNLLEAAELEPMVVNAQHIKAVPGRKTDVKDAEWIAELLQHGLLRPSFIPDRPQRELRELVRYRRSLVQERAREASRLQKVLEGANLKLASVASDVLGRSGRDMLQAIIQGNEDPAALAALARGRLKEKSEQLRQALCGLVGPHQRFLLQEQLSHIEELEARIRRLSAEIGARLAPFEPLLELLDTIPGVGRRVGEDALAELGTDMSRFPTDRHACSWAKICPGNHRTAGKAKREHVGGGNPWLRATLIEAARAAARSKDTFLAAQYHRLARRLGAKRAAMAVAHSILVIAYHVIRDRKPYQELGATFHDQRSHKATVRRLTRRLEGLGYCVTLQAKDELCQKEAA

SEQ ID NO: 464238 - protein, 415 aa, unidentified
MDVIVERCAGLDVHKDTVMACVRMPDGRGGRCQEVLEFRTFTSSLRALRVWLVNHGVSQVAMEATGVYWRPVWHVLEAEGSFELLLCNAQHVKNLPGRKTDVADAAWLAQLLECGLMRGSFVPTPVMGRLRDLTRYQKKLIQERARETQRVQKLLEDAGIKLDSVVSDVLGKASRAMLEALIAGQRDPEVLAEMALTRMRPKIPELRLALEGGFGAHHALMLRAHLDHIDHLGALIDRVDAQIGVEVAPFSDRIERLCTIPGIGERVARVIIAEIGVDMSRFPTAQHLASWAGLCPGNHESAGKRRSGKARKGDAALRTALVEAAWAAARTRDTYPSAQFRRFCRRFGKKGEAKAIFVVAHSLLVMVWHVLADDVPYAELGTDHFQRLQDPKAHAQRLAHQIEKLGYKVTFEPAA

SEQ ID NO: 464239 - protein, 404 aa, unidentified
MNAVGIDVSKGKSTVAILRPFGEIVASPFEVNHTNSELSELAGKLKSLNGETKVIMECTGNYHLQIACILQEAGLFVSTVHAQLIHDFGNNTIRKGKTDKADSLKIANYGLTHWLDLPEYIPEDEIRHMLKAFNRQYNKYNKIKITLKNNLISLLDQSFPGVNELFTSPPRKSDGHEKWIDFAAKFWHYKCIASLSQKAFTDQYRKWCKRSGYNFSESKAGDIYIESLGHINVLPKNDTAKLLITQAITQISAIAESLAIVSREMKLIASMLPEYPVVMEFHGVGDILCPQLMAEIGDIYRFSRKESLVCYAGLDVPPNQSGKFESHNMGISKKGSPHLRKALFQVMDCLLKHSPSDDKVYQFLDRKRAEGKHYYCYMTAGSAKFLRVYYARVKQYLDEHYPEA

SEQ ID NO: 464240 - protein, 347 aa, unidentified
MLIIGCDFHPGFQQVAIFDNRTGEIEEKRLQHRAEAEQFYGALAGQEVRVGMEACGHYPWFERLLEEMGIELWWGDAARVRAAVVRRQKTDRRDAEHLLDLLRQDRFPRIWVPSLEVRDVRQLLVHRHKQVQARTRTKNQLQAMALSCGVQKKYKLWTKVGREELEKLPLLPYAAERRKRLLEALDGLEAEIVELDRRVQEEARQRPEAVRLMTHPGVGAVTALAMVLTLGPAERFASGKQVGSYFGLIPSEDSSGGKQRLGKISKQGSSFLRFLLVEAGQTAARYDPQLQRFYRRLAVRKNRGVAKVAVARKLATRLYLMLREQWTYPQLCQAVMQVSPSHSVAGK

SEQ ID NO: 464241 - protein, 344 aa, unidentified
MDHFAGLDVSVKETSVCIVDDTGRIVKEVKAASEPQALLKVLGNPAYRFKRIGLEAGPLSQWLFSGLAEAGLPVVCVETRHMQAVLKAQINKTDRNDARGIAQMMRAGLYRPVHVKTLRSQKLRMLLTHRKLLQSKAIAIENDLRGTLRNFGLKVGMVGKVRFEARIQELVENIPDLAVLVEPLLIVRRVLREQIVILHRRLLTIVREDEVCRRLMTTPGVGPVVALTYRATVDVPARFRKSKSVGAVFGLTCSRYQSGEIDWSGKISRCGDEMMRTMLYEAAQSMMHSKKWSWLKAWAMQIARRRGMKKAIVALARRLAVILHRIWVDGTEFRWTREQAAAAA

SEQ ID NO: 464242 - protein, 430 aa, unidentified
MRFIGLDLHKRQLVLCAMNRSGKVLFRESVECRREALIAFAKAQLCDTDQLAVEATTNTWAVADILRPFVASITVANPMQVKAIAQAKVKTDKIDAGVLANLLRCDYLPTVWIPDAATQKLRHLTTLRGGLIIDRSRIKNRVQSLLAQLLVVPPVRVVFTQKGIQWLHSVELPQEARSAINLYLRLYEGVNQEIEKIDDQLMGMAYEDNRAKLLMTLPGVAHGVAITLLGALGDIHRFKDGDHAASYLGLTPRLHQSGSKSHYGRITKAGCPQTRATLVQAVQAASDHPGPIGAFFRRLRKRKKYNVAVIATARKMVTIAYLMLKNNEPYRYAKIDVVKKKLAKCRRFIQQQTAGPATAKSQDVVSSPLNELYQRHGLPLCQAPASWSDGERKALTAAEVMEFAESSHGAVSKEQKSSTLKTIKKKTIRT

SEQ ID NO: 464243 - protein, 396 aa, unidentified
MDVVYSHVCGLDVHKKTVVTCIITPDEKEIRTFSTMTDDLLQMVDWIKSKGCTHAAMESTGSYWKPVYNLLETEEIQTLVVNAQHIKHVPGRKTDVKDAEWIASLLRHGLLRGSFIPPRDQRELRELIRYRRSLIEERAREVNRIQKVLEGANIKLSSAASDIPGKSARAMIEALIAGNVDPESLSELALRRLKNKKADLQRALKGLIGPHQRLMLQTQLRHVDELDALIQQLDEEIKRRMLPFEEDLERLDTIPGVARRTAEQIVAETGTDMSRFPSAAHLCSWAGLAPGNNESAGKRKSVFQQPRGLRFVIGPLLILPAAHKAPHLNPSYLSVQFCQMVMKTPADPFCFRNNGFETFLEFVEQLGCFIFIYLINNIGIHGHHAVVEAFINIPVA

SEQ ID NO: 464244 - protein, 423 aa, unidentified
MSHDTKDVPFQQQFKLFAGFDWASDHHDVVAVDPDGQIVLELTIDDTAEGWATLRDKFAKHVGQDLSAVAVAVETNNGPAVERLLAMGCAVYPLNPKVAERYRERKSNAGCKDDRLDAFSFADALRTDGHTWRRLKPDDPVTQELRLLCRDEIQLIGQRTALVNQLRAALREYYPAALEAFEDWTSDGPWAFVQAFPTPQALVASGKRRWDKFLHANRLYRRETYERRLEIFARADQFCGTPPVTRAKSRLALALAAQLRVLEKQLVEYRQNIETLFSQHPDHDLFGSLPGAGPKIAPRLLGELGNDPSRFDTHESLQCYGGSAPVTKQSGKNRWVSFRRACNTTLRATLHHWADKSRDKCAWAQAYYQHKRDHGQSHAAALRCLANRWVKILWKMWQTHTLYDEALHTRNQVKHGSWVIQLT

SEQ ID NO: 464245 - protein, 366 aa, unidentified
MPSVSSAAGPIHLGMDTSKNTIVVGVLMPGEEVPVIDRVWNEEGSVRHLIGRFGDPAALRCCYEAGPCGFELHRLLASMGVACDVVAPSLIPRRAGERVKTDKRDASRLARLHRAGELTAIRVPSPAEEAVRDLVRARAALLADRKRAQQRITAMLLRHGRVWRSGSYWTQAHEQWIAAQRFSEPALGAALAHYRAALDTRRAELDAVEAELAAWASREPLAAAVARLGCYRGIAGLTGLVLAAEVVDWRRFGSARAFMGFTGLVPAEYSSGDKTRRGSITKAGSGPARTALIEAAWTYQHKPAIGVALRRRQRDASPDTLARSWKAQRRLHGKYKAMTARGKPAGMAVTAVARELAGFVWAEMTS

SEQ ID NO: 464246 - protein, 337 aa, unidentified
MKVTLIGIDLAKSIFQVCGVNQVGKRVFNRQLRRARLMEFLLQHPDATIAMEACSGSNYWGRTLQQHGFKVMLIPPQHVKPFVKGNKNDRNDAFAITEAARRPNLKCVEPRTLAQTDMIQVHRVLDRMVRQRTALINQIRGFLNEYGIVVAQGKEKLLSAMPDLLEDAENELTAPARLLYQQLLEQWRQANEAIKRIEKGLKGQASTSEDARRLMKLRGVAVKISTATVAHAGNGHGYKSGRHFSANLGLVPKERSSGGKQILGGITKRGNQYLRRLLIQGAWSVVRNADKNDDRLSRWARQLVERRGKHKAVVAVANKMARIMWSMLYHQTEYRAN

SEQ ID NO: 464247 - protein, 362 aa, unidentified
MQSTPLIAFDQHAATTVAAVLLPGQRTAALHSLTSETPTILRFVTRLQREVGAVRCCYEAGPCGFELQRALTAAGIPCDVIAPALIPRRAGDRIKTDRRDASQLAVLFRAGALTAIHVPTDQEEAVRDLLRCREDIRADLLRARHRLSKFLLRHGRRFTATKSTWSQRHHAWLRAQTWPLPALTRTHEAYLRAVDEAVARLHAVETQLQDLVTLEPLRTRVQRLRCFRGMDDITALTIAAELGDARRFPSARGLMAYVGLIPSEHSSGTKRARGAITKTGNAHLRRVLVEAAWHYRHHPFIGKQLRRRQEAAPEPAKLHAWRAQQRLYRRYQRLAARGKPKQHVVTAIARELTGFVWATLIH

SEQ ID NO: 464248 - protein, 341 aa, unidentified
MHRSQITYDWIDNDTGQRQRGQLAPANREHLRVWLEQFAGRPAAFALEGCSGWRYVVEELKRAGIEAHLAEPADTSAARGPKRRAKTDRADARHLRELLATGRLPESWIPPAHVLEVRSQVRCYKALADEHTAWLQRVHATLFHHGVPAERNLLAPERRGRLERGVGLSSAAKELVTVALRMLDHLDAELDRLRGELARFARRQPGCRALDELYGIGPITAVAIWAELGDVGRFTSSRHAVRHTGLDVTVYSSDGKRTPGHLARQGPPVLRWALFEAAKCAARAASPDHAYCLQVKGRLGGNRATLAVARKLTRRCYHTLGGLGEQAYAPPSDTPDLGQVA

SEQ ID NO: 464249 - protein, 320 aa, unidentified
MEAMVKRCAGLDVHQETIVVCVLKGELDKKPESEIRTFGTYTKDLEELHEWLLQEEVEQVAMESTGVYWKCVWNIIEDEKYEIKLANAREIKNMPGRKTDVKDAQWIAELLRCGLVKGSFVPDIEIRELRDLTRYKRKIVQQISSEKNRIHKILQDANIKITTDISDIFGDTGRKLIEKIIEGKKITDEDLLEITSGRGKTSLKNKIPQIKEGLKGTTREHHRKMMKLIYEHLKYLEKEKKEIEDLIDEKCKEYKKEIELLDSIPGINEDSAKAIIAEMGVNMYQFPTVKHLTSWAGMSPGNNESAGVKKKERQRMETKH

SEQ ID NO: 464250 - protein, 427 aa, unidentified
MNYTQNEKIMSITESTLVIGIDIAKQFQYARAFDYRGIELSKVRPFENTAEGFKIFEEWAKSIAKENQKDNIIVGLEPTGHYWFTLGNFLKKSGIKLVLVNPFHVKRSKELDDNSQTKNDFKDPKTIAKLVIDGRYSKPYIPEGIYSDLRIAMGMRESLSKNLNILKNKVDHWLDKYFPEFNDVFVNWEGKAALISLTEFSTPEKVLSTGVQQIVATWKKGVKSAVGINRAVRLVEAAKISIGIEEGLRMAKKELEDTLEQYELYLKQNEQLEIEIDELALQVSGVKEMLSIKGVGLITAAGFIAEVGDIKRFTHPSQIQKLAGLNLIENSSGKHKGKTSISKRGRSRLRALLFRVIMPLVSKNNEFKMLHEYYTNRKENPLKKKQSLILLCCKLIRIFFTIITKQVEYNPQKLIKDTGFTLLSKVA

SEQ ID NO: 464251 - protein, 456 aa, unidentified
MAPQFKGNPPKRKSTPQLPVLHPHAAGIDLGAREIYVAVPPGSDPRPVRAFPTFTEDLHALRDWLQACGVTSVAMESTGVYWIPLFQILAAAGIEVCLVNARHCKNLPGRKTDVQDCQWLQYLHSVGLLRGSFRPADQVCAVRTILRHRDALVRGAGRCVSHLHKALTQMNVQLHHVISDLTGVTGQAILNALLAGERDPQKLAALKDHRIKASREVIAKSLRGDWRAEHLFTLKQTHALWQQHQQLIAECDTQIEGMLQAFDAKVDVASAPLALAKSSHKQAQRNEPQFDARTECYRVLGVDLTCVPGFASPTVLVLLCELGPEFAAKFPTAKHFGSWLGLCPDNRITGGKIYSVKTRAVKSRVAEALRLAAQSLWQAKNYFGELYRRWKARLGSPKAITAMAHKLARILWHLLKFKAPFNPEVFAKEEAKMKRKKLQRLVAMATTLNYRLVPNQ

SEQ ID NO: 464252 - protein, 349 aa, unidentified
MVIVGIDAHKRTHTAVAIDEAGRKLGERRTTSTTTQANLELLRWADGFGAERRFAVEDCRHLSRRLEADLLAAGEELVRVPPKLMAHARDAARTYGKSDPIDALAVARAAHREPSLPVARLDGPSRDLRLLVDHREDLVRDRVAQINRLRWHLHELDPAWDPAPRSLVRFKHLDGIAARLEIMDGTVAWIARDLVARIRELTVAANVLERRIVQLVARLAPALLELAGVGALTAAKIVGEVADVRRFRSKDAFARHNGTAPLPVWSGNRIRHRLSRTGNRQLNAAIHRIAITQMRTHDDARAYLERRIGLGNTKTEALRALKRKLSDVVFRALLADADTIGSVALEQAA

SEQ ID NO: 464253 - protein, 343 aa, unidentified
MEYYVGLDVSLKHTSICVVNPTGSIVQEGVVDSDPEAIALFVRSRAPGTVRIGIETGPTTTWLWTELKRLGLPVICIDARHAKAVLKMQINKSDRNDAAGIARIMQTGWFKEVRVKDLDSHAVKALLASRALLVKIKRDLENQIRGLLKNFGLVIGRGKFNVFAVRAAELIENRPELIAAVRPLLEARKAIEQQVDDLDRKVHKLARHDVQVRRFMTVPGVGPITALCFKATIDDPTRFKRSRSVGAYIGLTTRRHASGEIDWSGRISKCGDAMLRMYLFEAAGVLLTRVPKWSGLKAWGAKLTKRNGLRKARVAVARKLAVILHRMWIDGTEFNWSTKKAAA

SEQ ID NO: 464254 - protein, 325 aa, unidentified
MRQPQSQVKPQTQVGLDVSSQTLDAHIRVDGKAFSVPNTDAGFDQLCEILSTYSVSMILMEATGGYEDNVACYLQLQGFDVVVINPRFARRFAQSMGRLAKTDRIDAAILSQMAFMIDSGPDRDRYIKPVTDEQRKQLSRLSSRRRQVVDLITIEKQRLTHADDYARESINGIISLLNVELKRIESDILRYVKKNFSELANRLLSIPGVGEQAMIVLIADLAELGHVNRRRISALLGVAPFNHDSGKFKGQRRIRDGRQTVRNVLYMGVISATRFNPVIKAFYDSLLLRGKPRKVAIIACMHKLIRIINAMMRTGKPFDMSLHGV

SEQ ID NO: 464255 - protein, 355 aa, unidentified
MNAVGIDVSKGKSMIAVMRPFGEVVVSPFEVQHTDIELTKLAKLLKGLAGETRVVMEATGNYHAPVARMLHEAGFYVTVVNAMLVHDYGNNSLRRTKTDKKDAIKLANYAIDHWLTLPQYFPEEDTRLLLKDCNRQYQQCTKLRTMLKNNLISLLDQCFPEANRLFTSPPRADGSEKWVDFIAVFWHCECVCELSEKSFILRYQKWCGRNNYYFSAEKAAEIYVAACGHISVMPKTDTAKLLVEQAVSQFRATSAAIAALQKEMQSLASTLPEYPVVMRMYGVGPSLGPQLMAEIGDVRRFYSKKALVSFAGVDAPPYQSGTVDVRSRSISKRASSSLRRTLFILMCVILKKCSA

SEQ ID NO: 464256 - protein, 368 aa, unidentified
MIVPIMTYERSTLVNSEKYIGVDVHQATISVAVMDSKGKVVMESILETKAATILEFFAGLRGTLLVTFEEGTWAAWLYDLLKPHVAKLVVCNPRKNALLKHGNKSDRIDARKLADLLRLNDLEPVYHGETGVRMLRELARSYLTIVKDLSRVMNRLKALYRSWAIPCAGRDVYYTRHRSEWLGKIPEAGTRRRAEQLYLQLDMLQHLRQQARRELLAESRKHAITAKLRKIPSLGPIRSALAVALIQTPHRFRTKRQLWAYSGLALETRTSGEHRYVRGQLQRSKKQISIRGLNKDHNHDLKGLFKAAATRASVQPGPFQDFYQRSLAKGIKPTMVRLTLARKIAAITLTLWKKGENFDVEKLKSQAA

SEQ ID NO: 464257 - protein, 326 aa, unidentified
MQGKVSPERSALKRVYVGIDVCKAWLDVYLHPIGQSLRVQNTAKGFKVLLRTLAKHQVALVVIEATGKYHRSVHRALHEAGIAVAVVNPLRSRLFAEAVGALAKTDRIDAKVLAMMADSLQPKAVAPLPSELENLQELRRARQAAVDDRTALSNQLGETKGMFLQRGLKRRLEQVSEFISRLEAEIKRLIDSDPQLARRYAIVKSIRGIGPVAAVALIVGLAELGTCSAKQAAMLAGLAPVASDSGESKGARHIRGGREDVRRGIFMAAISAARCNPTLKPFYDRLIASGKLHKVAITAVMRKLVVLANTLLTENRHWQPEAPKTA

SEQ ID NO: 464258 - protein, 444 aa, unidentified
MAFSGMILIREVADAPVIMGISKPADLKSPCGEVKIVNPLFVGIDVSSKNNVAYLMNPDGSKHSSFSVQNNLGGAKLLSERIVSALSSMQLSNVVIGLEATSIYGDSLVYALREDGSLGRFQRKIHVLNPKQVRKFKDAYPDLPKNDFVDAFVIADHLRFGRIAKEVYMDDYRYQALRTLTRARFDVIQNLTREKQRFANYLFLKCSGMAQDKDIQNTSATTIALMEYFETVDDLANADLEELTAFITEVGRGRFADPTATAKAVQAAARGSYRLPKTVNDTVNQAMSVSIASMRALKEQVKVLDKAIEQQFEIIPNTLISIPGIGKVYSAGIIAEIGDIHRFNSQSSIAKFAGLVWTQHQSGDFEAEHSRMIKSGNRYLRYYLLEAANSVRRCDSEFRRYYDLKFREVNKFQHKRALALTARKLVRLVFRLLKDNRLYILPEG

SEQ ID NO: 464259 - protein, 339 aa, unidentified
MELYAGLDLHSRNTYIGIMDNAFNRVFKKRVPNHLEQILQTLDPFRDQIKGFVVESTFNWYWLVDGLMDAGYSSAHLANPSAIKQYEGLKHSDDQHDAFFLAQLLILGILPQGYIYPKKDRPVRDLARKRMFLVQHKTAHILSLQSLIQRCCARKVRANDMRHLTVEELELWLEEEHLVLSAQANLDSVNFLKQKIKQLEKAIIQKVKLNKAFKYLLTVPGIGNILAMTIMLEVGNIKRFPKVGNFTSYCRCVPSRRLSDGKSKGQGNRKNGNRYLSWAFTEAAQLGRRHNERFRRYYNRKVAQANTSLATKALGNKLARICYYIMRDQVPFREELFCR

SEQ ID NO: 464260 - protein, 344 aa, unidentified
MIVLGADTHKRSHTIAGVGATTGELLGERTVQVGRAGFGALLAWARALGGERVWALEDCRHVSGSLERFLIERGERVLRIPTNLMAETRKSARQRGKSDAIDAVNVARAALREGLATFPAAHLDGPELDLRLLVDHRERLVIHRVELNNTLQWHLHDLWPELELPGGALFSKKWSTRIARRLSRAEQTMRVRIARDDLRRLRELTETVKALAREITQLIEQIAPRLLAEPGFGPLIAAKLVGEIAGAQRFATDAKLARAAGAAPIPASSGNTRRQRLDRGGNRQINAALHRVIVTRARCHQPTRDYIERRRGEGKTTRDAIRCLKRYLARQVWNLLRASPRTRP

SEQ ID NO: 464261 - protein, 312 aa, unidentified
MPQLQPRIEAVVGADVAADTLTLHDLPTGRTRTIANTPAALAEALAPLAGRALLVCEATGGHEANLLAAALALGLPVHRADGAKASAFARSLRLAKTDRLDAQTLALYGRERGAALARYVPQAALTALVRRRADLVALRQAERARAKGPGAGAIQASLARSLAFLDGEIAGLEEAIAGLIAATPDLARRRGVLQSLPGVGPTVAATLLALLPELGHLPRRAAASLAGVAPHPDQTGTSRNVRRTRGGRRELRPVLFVAALTAVRGDNVLATFYRRLVAGGKSKRLALVAVMRKIVTIANARLAELTTPQPAN

SEQ ID NO: 464262 - protein, 412 aa, unidentified
MDVVVERCAGLDVHRDTVVATTRVPGQRRGSRRGETRTFATTIAGLERLADWLGEQAVTLVGMEATGVYWKPVFAVLETRVECWLLNAQHLHNVPGRKTDVADSAWIAQLVEHGLVRPSFVPPPLVRDLRDLTRLRTAITQERTRAIQRLEKVMQDAGIKLTSVASQAYSKTARAILSALLAGVCDPVELAGLAKGRLRSKNARLVEALANRFRVTHHGVLVARLLAHIDVLDEQLVALDHKITALVAPVGDLVELICTIPGVSANTAHVLLAECGWDMSVFPTAAHLASWAGICPGNNASGGKRFSGATRPGSRWLRKALTQAAQAAARSKGTYLAAHHAQIRGRRGHAKAIGATRHDILVAFWHIVRDGVPFQELGPDWAARRFSVEHRANRLVRQLQALGMTVTIEPAP

SEQ ID NO: 464263 - protein, 341 aa, unidentified
MKLYCGIDLHSDNSFVVVIDETEKILYKKRLVNNLELILQVLLPHKESIQGIVVESTYNWYWLVDGLQLAGYSVHLANTAAIQPYSGLKHTDDKDDALWLAKLLKLGLLQEGYIYPKETRGLRELLRKRMMLVRQQTMNILSIQSLITRYENIRLTGTKLKSLVNDEEKISLYLKDEHVKLAVKSQLAILRCTMEQVDGLEKAILIKVKDDPLFVLVKSLPGVGSILGMTILLETGDIKRFADVGNYGSYCRCVESKRISNAKKKGENNRKNGNVYLGWAFIEATAAAIHHYPEIKKYYQRKLGKTLRVVALKTIANKLARACYFVLRDGVPFDMRKSFIP

SEQ ID NO: 464264 - protein, 310 aa, unidentified
MNNLTKKTAAVYIGLDIAKATLQLHLQSQQHAFPNTPAGHRQLLKRLSAVSGAQVVCEATGGYERAVVAALHAAQVPVSVVNPAQVRYFALAQGQRAKNDPLDAAVLTAYGVALQPAATPLPDACLEELRALVQWRLHLLEQLQAARNHAEHAAQPFVRKQLTKLIRQLTTQIEAAETELAAALARSPRWQAQINKLIELDGVRQLTAVSVLCQMPELGRLNRGQAAALAGLAPWTRQSGPWEGQRHIGGGRATVRRALYMAALSLARLTHTTLGRFYRHLRDAGKPAKVALAAVMRKLLIQMNHALKPA

SEQ ID NO: 464265 - protein, 370 aa, unidentified
MGKSVLYVGLDIHKMSVDVAIAETGPAGEVRFYGRIGGDLEALDKVTRKLQAKGAELRFAYEAGPCGYQVYRHLTAQGHSCLVAAPALIPRRPGDRLKNDRRDALALARLLRAGELTPVKVPDADDEAMRDLTRAREDAICVERRARQRTVAFLLRHGRVYPGKTTWGRGHWAWLLQQVMDHPAQQIVLQEYLDAVREASARVLRLTGQIRDLVPQWHQAPFVAAYQALRGVSFIVAATVVAEVGDLDRFNNPKELMAYLGLVPSEHSSGASVRRGRITKTGNSHARRVLVEAAWAYRLQARVTRHLLKRQEGLPECVRQLAWKAQLRLCARYRRLLARGKARQTIVIALARELAAFLWAIGRAVAPATA

SEQ ID NO: 464266 - protein, 423 aa, unidentified
MDKYDDSRLEEFRQLKREIRGSSEHLVVGIDVAKERHYAFFGTPSGKTLLHRLVFDNTKEGFEKLCFQADILKTQHCLTEVVFGMEPTGDYHKPLGEYLNHQGHLVVLVAGNAVKNNRELLDGRWDRNDTKDAANVADLITQGKCLFYEFASPPLQELRSLLSLQRRLKKQEQGYRVRTRNHLIARYFPELDPYFGYCEGPAIVKWCLDPKEITGLLFDEFVRMVSSRNGGEKQLRRLEEIRNKAASSIGCEAHPSVAFEGRVLVEEVRHLQDLLRETQASIRAVCHHFPEYFFLLTIPGFGPDISAKVLEAIGNPHRFENHRQVLKLAGLDLSADRTGKKQDVTPVLSKRGKADLRYGLYQAALIASTRNKQFMTYFTAKLKGREREKGIATKMRIKLAAKMLVIAWTLMKKKEKFDPGCIA

SEQ ID NO: 464267 - protein, 354 aa, unidentified
MKISRIGMDIAKNVFQLHGVDSFEQTVLKKKLKRADVLAYFRTLAACKIGMEACGGAHHWARTLIAMGHSVLLIAPQFVKPYVKTNKNDAADAEAICEAMSRPGMRFVPVKTVEQQDIQALHRVRSELVKQRTAKGNQIRGLLAEYGLVVQKRIECLRVALPELLEDADNGLTGEFRALLDGLRLDLVGLDERVGQLDRQIVQMCRASVSAKRLQEIPGIGPVTASALIAAVGDGSGFKRGRDMAAFLGLVPRQHSSGGKEKLLGISKRGDSYLRTLLIHGARSVQRVSVNKTDPSSRWLNALSHRRHKNVAAVALANKTARIAWAVLSKGQAYRVPAQHDECIGPVLPVAANG

SEQ ID NO: 464268 - protein, 373 aa, unidentified
MRADGRRGKAKVGRMNSIVTGIDLGDRESLATVLSPIGDVADRFTFPMNEEGYAFFASRVPKNARVAFESTIMTYPISRALRMHGYNDITVAHPKTLAWIVKSKRKNDRVDSLKIAKLHMAGMLPESHLLDKDEQVVRDLLVQRVKLGVEIGRLKNSVIGYLKREGVYDSLPRTGDNFSARRRQAIHSLRFNDNRDLVLGTMMDRLRFLEKQCTPLEDSVRENAKLSDDVKILMTITGVDYYLASLISSFIGDVERFPSDDHLASFFGIVPTSRDSADVKRRGKMTKDGSSIARWTLSIMVDTVMHHNEPIREYYTSVKKRTGSGKLAHVSTMRKLTRMLYHMLKTREHWKWENPRLTERKMARLELGGGDVS

SEQ ID NO: 464269 - protein, 389 aa, unidentified
MKIFVGIDIAKLNHFAAAISSDGEIIIEPFKFTNDADGFQLLVSKLESFDKNSIIIGLESTAHYGDNLVRYLVTELYQVCVLNPIKTCQMRKNNVRKTKTDKVDTYVIAKTLMMQDNLRFVSFFDLDMMDLKALGRFRQKTIKQRTRLKIQLTTYVDQVFPEIQYFFKSGLHQNAVYALLKEAPSPKEIASMHMTHLANLLKVNSHGHFTKEQAKELRVLAQKSVGANDSAISIQITQTIQQIELLDSQLEKIEAEMTDIMKFNDSVIMTIPGIGYINGGMILGEIGDIHRFSNPNKLLAFAGLDPSVYQSGNFQAKTTRMSKRGSRVLRYALVNAAWNVVRNNATFKAYYDAKRAEGRSHYNALGHCAGKLVRVIWKMLTDNVEFNLK

SEQ ID NO: 464270 - protein, 312 aa, unidentified
MVDHCYGGIDVSKDRLDVQVLPQGRCFSVDNTAAGWKQLVDRLRGLSIAALGIEPSGGYERGVIRALLDAGLSVRRINPNKLRQFARARGVLAKNDRLDARLIAEYVAIMPTRVVHRDPAAEQLAAVVTMRRQLSDEHVTVENQTAHIEDAMLRRLNKRRLARLKADILLLDKRMAEIVASNANLARRYDLLTSMRGVGPTLAFTLLALLPELGQMSRKQIAALVGLAPYDFDSGRLKGHRCIYGGRMPVRNVLYMAALSAARYNPVLKTLHNRLAATNKKPKVVIVAVMRKMITTLNAMLRDNVDWQPKSA

SEQ ID NO: 464271 - protein, 312 aa, unidentified
MYYIGIDVSKKDLSVFDGKKDLKFTNKEGLKSFKKYLKKKYNLSEIAIIFEPTGVYSLYLKEFCAENSIKAYIINPKKSHNFTRALGKRSKTDKIDARILYQFHKNIDLKDIKVPKIDQQAKTLASYLVSYEFVLKQRISLSNHLESLRNKSLISLMKKDLKRAKMLEDKLFHDIKEYVSKNQNLREDYQRLLTISGVGEKTAIALLTLFKTYQGTNRAQITALAGLDPVKRESGTSVKDKAKISKNGKGIYRKIFYLPTICATVHNQKIRVFYQRLLTHHKTKKLAVIASMRKILLIAHAMYRDKTEYIAI

SEQ ID NO: 464272 - protein, 387 aa, unidentified
MPQPNDLSRSLVALDQNSTIIAVLEMSQSSWLVAGMLPGIERQPRKKLEPSPERLVAVLHGWRDEAVRAGRTITRIALAFEAGRDGFWLARWLEARGVEAHVIHASSVAVSREHRRAKTDRLDTELLKRGFLGWLRGERGHCTMARVPTIAEEDAKRPNRERECLVGERTRIVNRIKSTLARLGIRDFKPTLRNAAERLVTVHTPEGMRLPPNTLAELQRDMARLGFVVSQIREIEDARQKRLDQQPETGPHAMVRLLARIVGVGVETADLLVHEVLSRPMRDRRAVARYAGLTGSPNESGAQRREQGLARAGNARVRRGMIQLAWRFLMFQKDSALALWYRARTADSRSGTRKTMIVALARKLVIALWRFVTTGETLEGVVLRPAS

SEQ ID NO: 464273 - protein, 276 aa, unidentified
MAKAIPVFVGIDVSKAQFDIALCPSGTMESFPNDEVAIGNLVKNLRTIKPVLIVLEASGGIERSLVRALVAAGLPVTVANPRQVRDFAKATGKLAKTDVLDAQILARFAEAVRPTLRPLPDETTLELRALVSRRRQITAMLTAEKNRLSRAPRRVQTHIEAHIHWLQSELERYDEELDQAIRQSPIWREQQDLLKSVPGIGSVISRTLLAELPELGCLNRKQIAALVGVAPLNWDSGLMRGRRIIWGGRADVRTALYMAAVTASRCNSVIRDFYKR

SEQ ID NO: 464274 - protein, 438 aa, unidentified
MQEKKSVKQILNSLKEETKSSSNMLLVGIDVGKKRHCACFMASSGKVLRRKLFFTNTIDGFNKLLRQVKFYQKKENLPKVLLGMEPSGFYWLQLYEFLGLQGEKAVAVSPLAVRRNRETIDVSRDKTDPKDAYNITDLIYQGKFYLPIYRDREIRQLKRLMMMYHKLMQQKASLRCRLRGVVGYIFPELEYYFCDITAKSMILLLENFPFPQKIRKMEKGKFTSFLMKRNPRLSWKRAEEIHNLAGSTVGIRGEEEAVSLEIKLLLDELKRINENVALITTKVNSIVGEREDYNLLLTIPGVGPVTAASVIAEIGDITNFSSGRQLVKLAGLDLCGMQSGTSINTLRHISKRGRKTLRTVLYQVVVNCIRCNSHLRVCYLRILANQPNKKKIRPKAMVAIACKLLRIMYRMLTEKKAFDPNYDKILRERFSLQAVKVA

SEQ ID NO: 464275 - protein, 412 aa, unidentified
MEVVYGRCAGLDVHKQSVVACVLTGASSGEVKQEVQTFGTMTRELEALSRWLVAARVEQVSLESTGVYWIPVFNILEEAGLPVTLVNAQQVKQVPGRKTDVGDACWLATLLRHGLVRASFIPPAEIRALRELARYRANLVRARAKEANHVLKTLEMANLKLDSVASDALGVSGWDMLTAVAAGEADPTVLAQMARGKLRQKLDELEQAFIGRVKPHQRLLIRVSLDHVRFLEDTIEQLDGELALAMAPFAAQQAALDAIPGIGAVAATAIVAEIGVEMERFPTAAHLASWAGVCPGNKQSGGKRLSGQTTKGNSWLRRILGEVAWAAIHDRHSVFRARYYRLKPRLGTQQALVAIMHQLLKLIYRILQTGEHYRELGTDADQPADSHRTVRRLRKRLERLGYTVTPTSPPAA

SEQ ID NO: 464276 - protein, 341 aa, unidentified
MATATPPNNYHQFLGIDVSKDTIDCLLRPSRSYSQWTNRPEGFRRLHRWLNRRHCDPAHTIICIEDTGIYSDRLLAALTEYGWKCAVVKTTATKKVAPEHHRKDDRFDAGLLAEYAQRYCDRITLRQPPKQVIRQLQQLYAERQRLIKARGATQNRSQQASHAVIASELLAQQWRQQLQLYNNQIASLESRMGRLVSNHPGLNRYYQLLRTIPGVGQVTAWLWLILFYGEHHLNHKQIASRFGFAPHRFCYGSSVRGKTRSAGHGNSQMRSCMTMVARSVSHHYERFARYKQRKLDEGKPWPIVRNNLINKLIKIICAIWNSGQPYRQDYESRFDQQKNAA

SEQ ID NO: 464277 - protein, 377 aa, unidentified
MSKVRFVGLDVHAETIAVAVAEADGEVHGLGVIPNKLESIRKLVHKLGPVQHLRVCYEAGPTGYVVYWQLAQMGVACQVIAPGLVPTKPGDRVKTDRRDAEKLARCYRAGELTAVWVPDAAHEALRDLVRAREAAKKDQLKARHRLGKFLLRRGRRPEGMKSWTKKYLEWIGSHVHFDEPALEATLLDYLDEVQHVAQRIQKLEKAMDEAVRQAPPEIRAVIEALQALRGVAQTTAATIVSELGSLSRFESPRQLMGYSGLVASEHSSGNRIQRGSITKTGNAHLRRVVVEAAWSYQHRPNVAGFLLRRQKSLALSEEVKQIAWKAQHRLNKRYKAMSARGKNKNQVMTAVGRELLGFIWAIGKHVEGQQHTAAATA

SEQ ID NO: 464278 - protein, 338 aa, unidentified
MEAYAGIDLHSSNSYIGVIDEQDERLYAKRLPNSMNQILVALEPFKEDLKGVVVESTYNWYWLVDGLQEEGYKVHLANPSAIKQYDGLKHTDDKTDSFWLANMKRLNILPEGYIYPKEERPVRDALRRRLLYVSHRTSHILSLQSAITRNLGYKMSGRDIKKLNESDADKLFDEPFLILSVTNSISTVHFLGKKIKEIEKAVKSQVHLKPEFKCLLTMPGIGDILGLTIMLEAGDLSRFPTVGKYSSYCRCVKSERFSNKKKKGEGNRKNGNKYLSWAYVEAANFAIRFYPEFESFYKRKKAKTNGIVAIKALSNKLARASYYVMRDQVPYDASKLFR

SEQ ID NO: 464279 - protein, 337 aa, unidentified
MKIANSKDGFQRLMEVVQRYGDPVHVAFEPTADYHRNLAYWLQNAGATCFLVSSLMSARARELLFKTWDKNDRKDAQVILYLMRQNMMKPFYDPLVEGTMDIQELSNTYHQISLARTRCQHSLINHYLTLYFPEMERFYHASRSEWFCRFLCKFPTPQSITRYKIATFVKRAWVIVGRKVAKQRFLEEVHETACRSIGLPVELQGQAVKTFRIQLQRIIDLNQLRHQLEKTSENIFNAREDYQQLRSVPGVGPICAMMIIAESGDLNRFGHYRQYLNFCGFNLCSSQSGQRQSKHKVSKRGNSRLRYAYWLAATIAIRQRENSFREKYERHMKVVTK

SEQ ID NO: 464280 - protein, 340 aa, unidentified
MKQPRYYIGLDVHKERTTCVVRDRIGNILIECETATLYQEIFPKLQPYLTQGIIGLEASTSYYTLYQQFLHHGYTIKVANTIQLRQLIAKNDKLDARRLAEMLRLGTFPSSYIPDEKIQRMRSLIQTRHSLMEEKVRCNNRIQAFLDRNEVPMPSHRAFSKKWRHILMQYMGSRRISIELRYAYDHFVFLEKKMEQLDQEIQGYARTHWTKEYELLQSITGIGPVIACYAIAHILPIERFDSAKKLRRYAGVVPTCKESGNKRSPGHIPKTSSRRLLRWALIQAANTAGKTNTPLGRYYRKKKKQKKNNGIAKVAVASSLIDIMYKVLTTKQPYTPKTMC

SEQ ID NO: 464281 - protein, 344 aa, unidentified
MNHVAVDLGSRQSQLCVRSAEGQIQQEAKLANADLRAALAALPKSRVVLETSSEAFAVADLALAARHEVNIVPSGLARNLGVGQRGIKTDKKDARNLSMASCRMETLPQVHLPSMQARELRRLLTSRAQLVAARTSMVNSVRGWLRSQLLRTSRGTRPDNFPERIRELALERPEGLPVHIDRLLKVVETLNAQLKDADKELEELAKGNLTCQRLMTVPGVGPVTSATFWATVDDAKRFKTAHAVESYLGLTPGESSSGQTVQKLGITRAGATRARATLIQAAWAAWRTRPSDPMVRWARGIAERRPIQVAVVALARKMAGILFALWRDEERYDPAHGLKRDQHS

SEQ ID NO: 464282 - protein, 357 aa, unidentified
MKVTTIGIDLAKDVFGRHGVDCEGRVAFNKSLFRSRLLEYMSQLPPCLVGLEACSSAHYWARKIERLGHRVRLMSPRFVKPYRKSDKNDANDAEAICEAVTRASMRFVPIKSEAQHEVQALHRVREQLLKSRTALVNQVRGLLAEHGIVAPQGIARARRLLLELLADPERHGLSGLFRETLQEMAERLRFFDERVAAYDDRIERVFKEDERCRRLAKIEGVGPLVATAVVAAVGNASEFKSGRELSAWLGLVPRQHSSGNRSQLLGISKRGDRYLRTILIHGARAALRRADHKRDQRSRWAMRIKLARGYNKAAVALANKNARIIWALLTRGENYRPPAISVASPTAGRISLIRVQA

SEQ ID NO: 464283 - protein, 325 aa, unidentified
MARMQGKTTSDIHQLFAGIDVSKAHLDLQLSCERRSRRFPNSPAGWAAIDAHLRARADTPCLIALEPTGRHHFPVWRALHAAGHGVAPLNPLHVRRFAESGGELTKTDALDAAVLARMAAERCPAAKAPPSEEQLRLKALTTSIADRTDRRATLKGQRAETRDPLIARFDEAEIARLSDAIDALKAERARLINANPQTARVAGILCSIPGLGEASAHRITTDMPEIGTLDEKQAAALLGAAPRANQSGKRDKRRHIKGGRRRLRAALHMPAIVASNANPDLKEFKQRLKSKGKNNAVILTAILRKLIILANALVAQNRMWTPKCP

SEQ ID NO: 464284 - protein, 338 aa, unidentified
MNIVFLGIDLAKNVFQLCGLNQAGKPVYTKRTGRKELLQTLANIPACLIGIEASTGAFYWQREFEKLGHKVKVISPQYVKPFVRGQKNDGNDAQAIAVALMQPTMQFVPPKSPEQQDIQALHRARQRIVNHRTATVCQIRGLLLDRGIPIGSAVSRARRAIPLTLEDAENGLSSRMRRTIAEIYDLFNDLGRRIHFFDKEIETVFRQSEACPRIAKVKGIGPKTATAVVAAIGKGTEFKNGRHFAAWLGLVPRQHSSGDRQVLMNMTKKGDKHLRTLFIHGARAVVRVATNNNDGHMNQWVNQLKERRGFNKTTVAVANKNARIIWSMLRNETGYQVV

SEQ ID NO: 464285 - protein, 327 aa, unidentified
MLFLTLGIDIAKDKLDVALYQEERYREASFSNDKDGYRRLRKWLKKHKAQETAVCIEATGRYGDGVAYYLHEQGHQVSIVNPARIKAYGASQLKRNKTDGEDAKTIAHFCVTQKPAQWTPPSAATQELQAISRRLESLKADRTRELNRQQSGLTSTIVLEAIAAHITFINEQIADLEQHMADLIDQEPNLRQQRDLLTSIPGIGQTTAANFMAEVPDIARFESAAQLAAYAGLTPRQYSSGSSIHRPARLVKTGNSRFRTAFYMPALSAMQHNPIARALVARLTAKGKNRMTIVGAVMRKLVHLAFGVLKHKQPFDPNYLVNVQVTA

SEQ ID NO: 464286 - protein, 414 aa, unidentified
MELLHERCAALDIGKKDLKACVRAPSPKGKRSRRQEIRTYATTTNALLELRDWLVAERVTLVVLEATGDYWRGAFYLLEDDLNVILVNAAHAKGLPGRKTDVCDASWLCQLGECGLLRASFVPPEPIRQLRDLTRYRTTLTAERTREAQRLEKELEDAGIKLSSVATDILGVSGRAMLAALIAGEDDAVALAELAKGRMRPKIPQLVQALTGNFGAHHAFLCRLHLERIDQLSATIGELSARIEEQMRPFSHKLDQLQTIPGVARAVAEVIVAETGADMSRFPSPGHLASWAGVCPGHHESAGKRKSGKTRHGDRWLCGALGTAAMAAARTRDTTYLGARYRRLAPRLGKKKAIVAVEHSILTAAWHMLTDDVDYHDLGGDYFARLDPERAMRRIVRQANALGYTVRFDPIHAA

SEQ ID NO: 464287 - protein, 351 aa, unidentified
MVTVGLDLHKRYITACALDDAGTVLAEHRRLEPSLDALGRWLGALPQPLTVALEATLYWHWLERHLTALGIHVVVAHPYQVKLIWQARTKTDPIDARKLAELARVHLLPAIWIPDPATRALRQLLRGRVFLVRQRTVMRNRIHANLTAENLRCPALDLYTKAGQAWLAAVELPAVVRGQVGLVLANHALLTTQIQALDRYIKATVRRDATARRLQTIPGIGPFGALLLQAEIGPIARFGSAQELAAYAGLVPSTRSSGDKTRHGRVGRGNPWLKWLLVEALQTLKLAPGPVGLHYQKLLRAKGKPKATVAAARKFCTYLYWMLKEEWSYTEWLRQHDRSEVRPMQPLGSAA

SEQ ID NO: 464288 - protein, 351 aa, unidentified
MSEYIAFDSHKRYTWVDRQDHSTGKSNGHRLEHAPGAVRKYLSGSEPGTAVAVEATGNWYWIIDEIEQAGLQPRLVHPRKAKLMMGQTNKTDKLDAQGLNHLQRNGTLPTVWIPPGPLRDLRELTRTRLVLVAQRTRLKNRLSATLAKWGTPASEYSDPYGKRGRAELEKHLQRLPEQTRWVSGQLLAQLDFVTGQVRQLEERLEQLVEVSEPMQWLLSMPGVGVILAATIALEIGEVERFPSAMHLASYAGTTPRVHASGGKVRYGPLRADVNRYLKWALAEAANSVAVNHLRCPDRHVSQLYRRLRLHKGHPKAIGAVARHLAEAAFHVLRGKQMYQDPGLGRGRTSQG

SEQ ID NO: 464289 - protein, 341 aa, unidentified
MEEVSTIGLDLAKHVFQAHGASASGAVLFRKRLRREQVLSFFASQPCCRVAMEACASGHYWARAISDLGHEVRLIPPAYVKPFVKRQKNDMADAEAICEAAQRPTMRFVAVKSEAKQAAAVIFRARDLLVGQRTQIINALRGHLAEYGLIAPQGPSYIERVIAQIEDPVSDVPELARSCLERLVGMFRHLQDEIAALDREIAARAKSDDVARRLMTIPGIGPLCATAIEALAPPFETFRSGRDFAAWIGLTPVQRSTGGKERLGRTSRKGERALRRLLIFAASAVVRWAKRKGVPPGSWLARMLARKPPMLVIVALANKNARVAWALMTKGGIYRAPAVAA

SEQ ID NO: 464290 - protein, 342 aa, unidentified
MNQYVGLDVSLEETKIHVLDEAGGRVWRGKCASHPDELETTICKHAPGAVRIGLETGPLTTWLWTELSKRRLPMVCLDARQAQRALDMRANKTDANDADGLAHLVRAGWYKEVRVKSRDAMLSKAVSAARRQLLDISTNLSNQVRGLMKTFGLVVPKGKGRIFEANVRRLLDEEHALAAVVLPLLEAWCAIRNRAAELDRLLLRKVRDDANCRRLMTAPGIGAVVAASYVAAIESPANFKHARDVGAWVGLTPRRFQSGEMDYDGHISRRGDERLRALLYEAATVILTRVRSASALRSWALALKKRLGFKRAAVALARKLAVVLHVMWKTRKNFDPNHRLVA

SEQ ID NO: 464291 - protein, 339 aa, unidentified
MELYAGLDLHSRNTYIGIMDKSFNRVFKKRVPNHLEQILQTLAPFRDQIKGFVVESTYNWYWLVDGLMDAGYSSAHLANPSAIKQYEGLKHSDDQHDSFFLAQLLILGILPQGYIYPKKDRPVRDLARKRLFLVRHKTAHILSLQSLIQRCCAMKIRANDMRHLTVKELEIWLEEEYLVLSAQANLDSINFLKQKIQELEKAIRKIVKLKKAFHHLKTVPGIGDILALTMMLEVGNINRFHKVGNFTSYCRCVPSQRLSDGKSKGHGNRKNGNRYLSWAFTEAAQLGRRHNERFRRYYNRKVAQENTSLATKALGNKLARICYYIMRDQVPFREELFCQ

SEQ ID NO: 464292 - protein, 391 aa, unidentified
MVCVGIDVAKDKHDCCILDSEGTTLVDCFTIPNNMDGFKSLLQTIQDCSQKSDKIKVGLEATGHYSYNILGFLLDNDLLVYVMNPLHTNLYRKSLSLRKTKTDRVDAKTIATMLLSDVDLKSYTDTAYHNEELKSLTRYRFDKVQERAKLKQSVSRLVTILFPELEQLVSSIHGTSIYALLREYPGAKQISEAHLTRLANILVKTSRGHYRKDKATHIRDAARTSIGSVMPAKSLELKHTIKLIQELTSEINEIEDAIRKIMDELKPPILSIPGMGFHSAAMILAEVGDFSNFNSPDKVLAYAGCSPSTYQSGKLTNCYAHMEKRGSRYLRYALYTATKYVCYWNPVFTEYLTKKQAEGKHYNVALSHATKKLVRLIYALQKSGKAYLAVT

SEQ ID NO: 464293 - protein, 458 aa, unidentified
MTVRRKKSAASLRPSLPVVRPNVAGVDVGSSEHWVCGPVRPDGSSNVKVFGTTTSQLDDLADWLIEEGVVSVAMESTYVYWIPLYELLESRGLEVLLVNARDLHNVPGRKTDLHDCQWLQLLHSCGLLRGSFRPRESIARMRALQRQLANLIAERTRCVQWMQKALDQMNVQVHRAVTDVTGLTGMAIIRGIVAGERDPVELARLRHGRCRKSVQQIADHLAGNWREEHLFNLASALRLFDALQSEIASYEAWLLKQIQALQPPERRHKPVPSHPNPLKERAIRSRGDQDSRTALWRLAGVDLTRIDGISAGAARVVLTEIGPNLGAFPTENHFVSWLRLCPRTPISGGKPIKKRRNSLGANRIAGVLRMAATSLQRSKSALGAAFRRIARHKGGAVAVFATARQLARLIYRMLRYGHDYVDIGEQAYEQQFQARRLATLTETAKSLGYTLVSQPGTV

SEQ ID NO: 464294 - protein, 411 aa, unidentified
MEALIERVAGLDVHQGSVVACIIIGAAGRRPAKEVRSFGAMRQDLAAMRAWLLERGVTHVGMEATGVYWRPVHAALEGAFTLIVGNASHMRNVPGRKTDVKDAEWIADLIRHGLVRASFVPPPEVRVLRDLVRHRKALVGTLAAERNRTIKLLESAGIKLAGVMSSVFGVSGMLMLRALAAGTAAPAAMADLAKRRLRSKLGQLTLALDGSLALHQRLLLGMHIRRLEEIGRDVTEVEAAIVAAMRPFAAQQALLVTIPGVDALTAAAIVAEIGTDMAAFGTAQRLAAWAGLCPANHESAGKQKRRGTRKGDPYLKATLVTAAVCAARTNGTYLRDKFHRLRARMGAKKAAVAVAHKILLAVFHMLQRAVAFADLGGDYLDRVDKHRTAKRLIRRLDALGYDVMLRPKAAG

SEQ ID NO: 464295 - protein, 376 aa, unidentified
MKNLIFVGLDVHAETIAVAVAEADGSVRSLGVIPNRAESVGRMIRKVGKPEQLRVCYEAGPTGYVLYWQLSELGVKCEVLAPTLIPVKAGDRIKTDRRDAEKLARCYRAGDLTAVWVPDAAHEALRDLVRARLAAKRDQLRARHRLGKFLLRHGRRTPEAMSAWTDKHLAWIKTVHFEHSAQETTLLDYLHEVEHVAERLVRLERSIDTTIETLPVKLRAVIEALQSLRGIAQISAVTIMAEVGELSRFEHPRQLMGYSGALSREHSSGPRVCRGAISKAGNAHLRRIVIEAAWAYRHRPAVGTTLAARQRRSDPAVIATAWKAQHRLHQRYLRLIGRGKSKQQTVTAVGRELLGFIWDIGVQVERQTQLPLKQVV

SEQ ID NO: 464296 - protein, 384 aa, unidentified
MTEQSAAATAFDHNSTLVLALELSGKGWQVGAVLPGVARRPHRSMAPRDVAGLLAQIERWKAEAQRAGRTVLRTVLAYEAGRDGFWIARCLLAHGIEVQIMHPASIPVERRGRRAKTDRIDLDMLLRTLLAWLRGEPRVCSMVRIPSETEEDMRRPERERERLVSERIALENRIENLLCLHGIAGFKPRLKKAAERLDGLRSFAGAPLPPMLLEELKRLMTRHRMLSEQLREIETAREQAAMAAEPDLAVQQIQMLARLVGLGLATATGLTREVFCRSFADRRAIAGFVGLTGTPFNSGGSEREQGISKAGNPRVRRILLQLAWRWLRFQPDSALSCWFVERTGSAKGRIRKIMVVALARKLLVALWHYVETGEVPAGARLAAA

SEQ ID NO: 464297 - protein, 342 aa, unidentified
MGEVVTIGLDIAKSVFQVHGVGADGEVLIRCRLTRARMLPFFAKLPRCLVGIEACNNSHYWARELSALGHDVKLMPAQYVKPYVKRGKNDAADAEAICEAVTRPTMRFVAVKSPEQQSLMMLHRVRLMLNRQRTQISNAIRAHISEFGVVAPVGRLGVERLLEVVADTGDDRVPEDARLCLQMLAAQLDGVKQQILENDRRVLASARRTELGRRLMDIPGIGPLLASAFVASVADPSVFKTGRDLAAWIGLVPKQNSSGGKDKLGSITRAGNRYLRQMLVVGAMAVIRYAERHGTKRPWLIQLLARRPAKVAAVALANKNARMVWALMTSGERYREPMPMAV

SEQ ID NO: 464298 - protein, 320 aa, unidentified
MSATSVVVGIDVAKAYVDVAVLGGDFAAQRFENEAEGHSALAAALQPLGVALVVMEATGGYEAALACALQATGLPVAVVNPKQARDFAKAMGRLAKTDRIDAGTLAELAAVLVRRDDLARYLRPLPDAQQQTLAAVVTRRRQLLTMLGAERQRLQLAIPMVRPSIEAMIHAIRAQLDDVEAQMVGHVREHFAELDRLLRSASGIGPIASATLLATLPELGRLTRREIAALVGVAPIANDSGTTRGRRRVQGGRFETRRVLYMATLTATKHNPAIRAFYQRLVAAGKLPKVALVACMRKLLTTLNAMVRTNKPWDRSFHHA

SEQ ID NO: 464299 - protein, 347 aa, unidentified
MKIIGCDFHPSFQQIAMVDTETGEHTERKLTREQAAEFYRGLPGKVIVGVEACGNTLWLERLLAELGHELRMGDAAKIRAMEVRKQKTDRRDAELLLTLLVQGRFPQVWVPSLEQRDTRQLLLHRHKLVNVRRQIKNQLQHLALNQGVQQKWKLWTQKGRELLEQLPLTGWTAKRRADDLQLLDELNRSIAELDTAVQQAAAQNRIALLLQTHPGVGPITALAFVLTLGQIDRFAHSKKVVSYLGLNPAEHSSGGRQRLGSISKQGNPMLRSLLVEAGQSSARLVPELKRAYQRLKHRKHSGVAKVMVARKLAVRLYWMWRTQQPYSATRMQGSPSHLVGGTLTPAA

SEQ ID NO: 464300 - protein, 413 aa, unidentified
MYYVGIDIAKRTHVAVIMNEDNTLRVKPFSFNNDKSGFKKLLIHLQTLCCDLSDIVIGMEATGLLFENLYRHLQSLEYNVVLLNPYQTAKFREMDTMKRVKNDNIDSVMIAALLKSGRFSEGYVSQEQLQSLRELYRHRASIENQLKALKRQTYTILTVVFPELETVIRDPFNITGLALLDKYPTAKHFHHASVERILKTFRGIKGNNFNRMKAQALLDASRRSIYSGIASEARALSIRMNIAQIRLLQEQLDETLTVMQSLFTNHSEVKEEDREVMESLIDNLRTIPGVADKTILALLAECGNLDRFYAPKALIGFLGLYPTLSQSGDSTRHGRLAKRGASLAKKAIYLASISAIRHNDEMRTIYMNYRSKGRAKKEAIIIVARKLLTIIYIIYIRNIPYDPQRVFVAKPNQ

SEQ ID NO: 464301 - protein, 418 aa, unidentified
MSRTLTKKLAMIKPGMLLVGIDLGKRTNVAVVINQQARQLGRFSFGHDQGGYAYFARQMQQICKQVGAEEMLVGMEPTGYFWKLVAAALDSQGIKYRLVNAYTVKKHREGDQLDRAKDDNRDAFAIADLLRTGKFTETQRLRGVYAELREYHVTYYRLIQEIGRLKGLLDTAVGQCFPELRQLFKSLTGKTARALLRQHAAAQAISRLSATEFLARVEADFAGKRLQRKKLRQAYQLAQVSVGLADTVAHQLTIRCLLDELALKEAQLADVKEGLMACFLSCPEAEYMLSLPLGAITTARILAEIGDPKRYSNAKQLVKLAGIQPSPNHSGQKTRSPTPMSGKGRAALRTMLFFGCLHLIRTDATFTAYYQHLKTRSKNPLTGLQAIGVLMGKVLHILWALIRQQTYYDPAGWQLNYQ

SEQ ID NO: 464302 - protein, 341 aa, unidentified
MSDYSYFCGIDLAKNHFSLHAVDQNGKVLLHKSVTRSKLLTTIANMPLMRIGVEACGGAHYWARTLNKLGHDARIMAVKYVIPYRTKGKNDLNDAVAICEAVQRPSTRFVPVKSPEQQAILSVHRMREHWVRERTALMNRMRALLSEFGLIIPVGRSSLMKQIPLMLEDAENELPHLARTVIADAYHHLGELNQRIADTEQVFDSFAKVSANVQRVMKVRGIGPQTATAILASIGNGSQFDKSRDFSAWLGLVPKQYSTGGKPRLGRITKHGDKYLRTLLVHGARTVIANLGDKQDKLSQWCRGVLERRGMNRAIVALAAKNARIIWSLLHNQTEYENYAA

SEQ ID NO: 464303 - protein, 421 aa, unidentified
MTSMTSLTPAAKPERLPGSLFGGIDTHKNTHHVAVVDGVGRPVADREFATTPTGYTEIVAFFHSHGAVEQVGVEGTGSYGAGISRVLSAAGFTVMEIARPNRRHRRLKGKSDPIDAHQAALAAIAGTEAAIPKRGDGVVESLRILMTERHSAVKARSQAMNQIHGLLITSPDQVRQDYRALGGEKLVSVLSRSRPAPGADPTMVARHTLKRLAIRHTLLRDEITVINNQLDTLIRILNPGLLALSGVGVVTAATFLTAAGDNPERLASAAAFAALCGAAPIPASSGQRVRHRLSRGGNRKANSALHRIVLLRMRHQEPRTAAYFERRRAEGLSDRDIIRCLKRHIANEVFRALTSPIPTTPAGALLRQRRQALGIPITTLAATLEIPYQRLRRLEIGTRGDTKLEHQAHHALDQLSSRKTA

SEQ ID NO: 464304 - protein, 343 aa, unidentified
MQAVTTIGLDIAKSIFQIHGVDAAGNVIVRRKLKRRYVLPFFQRLSPCLIGIEACASSHHWSRELQALGHTVRLMPPAYVKPYVKRQKNDAADAEAICEAVTRANMRFVGTKTPEQQSCLMLHRTRHLFIRQQTAVINAIRAHLAEYGIVAAVGRNGVEELLGVVADPSDKRVPEIARACLAALGAQLRMLKAQILEFDRMITTWHRSNETSKRLDAIPGVGPALATALVASVPDPKAFRSGRNFSAWIGLVPKQHSSGGKDKLGSISKQGDRYLRSLFTAGALAVIRYAKIHGTKHRPWLTALLARRPAKVAAIALANKIARMAWAMMAKGERYKEPVALAV

SEQ ID NO: 464305 - protein, 346 aa, unidentified
MEHYVGLDVSLKLTAICIVDRTGKIEREGVVASNPEAIAAFIKSHAPHVARIGLETGATSTWLWTELNKMGLPVICIDARHAKAALKMQINKSDRNDAVGIARIMQCGWYKEVRVKDVESHAIKALLVSRALLVKIKRDLENQIRGLLKNLGLVIGRAKRNVFAVRAAELTEDRPELAGAIEPLLKAREAIERQIADLDRKVLRLARNDAQVRRFMTAPGVGAITALCFLATIDDPTRFKRSRSVGAYVGLTTRRYASGEVDWTGRISKCGDKLLRSYLYEAANVLLTRVAKWSALKAWGIRLAKRSGLRKAKVAVARKLAVILHRMWIEGAEFNWSSKKTANQPA

SEQ ID NO: 464306 - protein, 326 aa, unidentified
MQYILGIDVSKDKLDLVLITELGKFHKVISNNSEGYKALDKWLVSRQVEQVHACLGATGQYGEEVAEHLYKQGHAVSVVNPARIKHYGESKLHRNKTDKADADLIAEFCLKENPTLWQPLSPEIKHLRALVRRLEDLKTICQQEKNRLSSGEKDEWVVKDLSTHVAYLETCIAATEKEIQNFIKQTPNLKKQQELLNSIPGIADKTSARLLAEIGDISTFESASQLAAYAGLNPKGFSSGSSVHKKTRISKQGRRELRSCLYMPGIVASNHNPVVRSLKVRLHDRRLANKAIIVAAMRKLLHIVYGVLKTQMPFDAEYHKQFNFSA

SEQ ID NO: 464307 - protein, 340 aa, unidentified
MPNPAVIGLDIAKNVFQVHGADAEGRCVLRRRLRRTEVVTFFARLPKALIGIEACPSGHHWARELRSLGHDVRLIPPQYVRPFVKTNKNDAADAEGICEAVVRPNMRFVPIKSVAQQAAMMLHRTRALLLRQRTQLINAVRGHLAEFGLVARRGARNIRELAELVRDTGSDKLPDAAGAMLVLLLEQIREAQLRVQKTEHALEAWAKQSDACRRLMTIPGVGIMSATAIVLAMDDPKRFRSGRHFAAWLGLVPRQSSSGERQVLGGISKRGDGYVRTLLIHGARSLTRWRRESWKWLAGLLMRRPTNIAAVAIANKTARTAWAILAYGRQFQPTRRAEAA

SEQ ID NO: 464308 - protein, 368 aa, unidentified
MNTIYIGVDFHARQQTVCYLKIETGELVVSELKHQNKDEVRAFYGQFEGQVIVGLEASGYSPWFEQMLTVLGHEVWLGDATEIRRRARWRQKNDRRDAELILDLMLHEEFPRLHRPAPESSEILRMLRYRHKLVKMRTIGKNSLQALALQSGLSLRTKLFTKAGKQELCKATMSPVMAQQREQWLTLLETLDQRILETMLWLKQQSQGDERISRLRTHPGFGLLTALGLVHTLWPVSRFRNQRKVTAYAGLEPMERSSAERKHFLGISKAGSRLLRFLIVEAAHTAVKKDEELKRFYRRLEARRGRPKAKVAAARKLLVRSYIMLRDEIDYAEFQRRAVAARLARQSSRLTMPDSLIGQPASPASEER

SEQ ID NO: 464309 - protein, 321 aa, unidentified
MHKFHLGIDVATAKLDCTLRLPNGKYRSKVVENNPKGFEALIDWLTKHEATIAHVCMEATGVYWEAVAEYLATQGMTISVVNPVQIKAFGASHLVRTKTDRVDAQLIANFCFERRPAPWQAPSPSEQALRAMVLRLDALQTMRTQESNRLEVARDAVREGIVNHVAWLDTEIEALAKLIRNHINDDPTLRDKHALLDSIPGLGERTIATLLAYYADLDRFANARQAAAFAGLDTRYHESGSSVKGKPCLSKIGHSFLRKALYMPAMVALYKTGWGKRFRERLAAAGKPPKLIIGAMMRKLVHVAFGVLKSGKNFDPSLHGC

SEQ ID NO: 464310 - protein, 355 aa, unidentified
MTSTKYIGMDVHKESISIAVRNSAGKVVMECVIETKASMILQFIDGLRGDLQVTFEEGTSAAWLYDLLKPHVTKLVVCDPRKNKSMREGNQNDKIDARRLAELLRLDHLTPVYHGEHGLRTLKELVRSYLTITKDLARVMSRVKAIYRSWAIPCSGKQVYAARHRAEWLGKINEPGVRRRAECYYQQLDALRVLRQGVRRDLLAESKKQKAWKRLCEIPSIGPIRAAVLLGILQTPHRFRTKRPLWNYGGLAIEMHSSADHRRVHGQLERSTKNVLVRGLNRNCNHDLKNLFKGAAAVASSKPGPFQEFYTALVAKGMRPEMARLTLARKIATIVLMVWKRGVNFDAQHLKPQTA

SEQ ID NO: 464311 - protein, 412 aa, unidentified
MQVLYARCGGLDVHQKTVVACVMITQPNGKVDKSTRTFATTTAALLTLADWLASLQVSHVAMESTGVFWRPIYTVLEDQFELILANAHEVKALPGRKTDVRDCEWIADLLRHGLIRPSFIPAKPIRVLRDLMRYRKSLVYQHTQEINRLHKVLETANIKLTSVVSDVWGKSGQSMINAIIQGESDALTLSELARGTLRGKLPQLQAALEGRIQPHHQMLLQRIFAHLRFLESSMQQVLTEIEAQMEPYQEAVELLMTHPGVQAVAAMGFVSEVGIDLSRFPSAKHFASWVGVCPGNHTSAGKRKHGKTTKGNSYLRALLAEIVWGISHTKNNYLSAQYHRLARRIGKTKAIVAVSHTVAVNFYHMITKRIPYRELGANYFDTLDRERLTKHTVKRLEALGYEVTLTQREVDV

SEQ ID NO: 464312 - protein, 407 aa, unidentified
MEVLHPVCCGVDVHKDLVVACLRVQQARGRAKVEVRKFGTTTGELLRLQAWLSEAGATHVAMESTSVYWKPVFNMLEGSVEVVLANAHHVKAVPGRKTDVKDCEWLADLLAHGLIRGSFIPPAPIRELRELTRHRKNLVRNRVDEVNRIQKLLETANIKLGSVVSDVLGVSGRTMLRALVAGERDPMVLAKLAKGSLIPKVTKLAEALRGRFTDHHAFLLGQLLRHVEHLDEFISVCDERISRLAMPYAAELTRLQTIPGIKARASQALISEIGVDMSRFPTAGHLASWARICPGNHESAGKRRTGSTGTGNNWLRSTLLECAWAASRSRKTYFGAQYRRIVRRRGPKRAVTAVAHSILVAAYHVLRSGVAHRELGPDYFDRIQTAKLTRYHLRRLAELGYPVAPAA

SEQ ID NO: 464313 - protein, 362 aa, unidentified
MEFFTGLDVGLDETAICVVDDKGNVALQVTVLTDPDAIKAALKPYLGRLRRVGHEAGTLSPWLHGELLRLGLPAICLETQHVRAAMSAQRNKTDKADALGLAHLMRTGWFKRAHIKSESCYRLRLLLTHRRNLKRKFLDLENAIRHSLKTFGIRIKGTGRGGFAQAVRDAAAGDALVAELIDAMLSARAALWKEYCRLHDLVIKFVAGHELCRRFMQIPGVGPVAALSFVTAIDDPSRFKRSRDVAAYFGLTSRRWQSGSSIDVQGRISKAGDGDVRRALYEAASALLTRFKRKDKVKTWGLAIAKRSSHRKATVAVARKLAVIMHAMWVDGTFYCGDPTAAPADVRAHAAVKEGKLLRRYA

SEQ ID NO: 464314 - protein, 412 aa, unidentified
MEIIHQRCAGLDISKKDTKVCVRVAGAGRRKTTETVTTWGSMTNQILALREQLIDQQVTCVVMEATGSYWKPFYYLLEDLPGVEVMLVNAHDAKNLPGRKTDVSDATWLAQLAAHGLLRASFVPPEPVRHLRDLTRTRTAITRERSREVQRLEKLLEDAGIKLSSVATDIMGVSGRAMLQELIEGQRDPIMLADLAKRRLRNKTPELVEALTGRFVEHHAFLARMHLNLIDQHSAAIAELTERIEVMIEPFRGFHQLICSIPGISTLVADVITAETGADMSRFPTAGHLASWAGTCPGHHESAGRVKSTKTRPGNRYLKGALGTAAMAAARSKNTYLGARYRRLSTRTGKAKAIVAIEHTMLIVIWNMAQTGALYDDLGADYYTRLRPDRTKKRAIGQLEAMGYTVTLDRAG

SEQ ID NO: 464315 - protein, 437 aa, unidentified
MEKIRENAAGIDIGAKKVFVSVECQEVKNFFTFTEDFELCRDYLLELKIATVAMEATGVYWNILYEILEEAGIDVWLVDGRQTKQVPGRKTDVKDCQWIQQLHSYGLLNRCFVAESDIKELRSYQRLREDHLRSASMHINHMQKALTEMNIRLKEVLSQIHGASGLAIIEAILKGERNKETLLSMCHISIIKNKKEEVLKSLNGKYTKTGLFALQQAFDAYNFYQRQIQQCDQMLDEVIKKMELKIGDGNNIEQKAQNKRKPIRHNKPDIKNLGTSLMKIFEGKDATVLSGITDYSWMQLLSETGTDLFKWPSEKHFTSWLGLSPGQHSSGKTQRNKRKAGRPKAGQIFRQIAQSILTSKHIALGAFGRKLRARKGPSIAIKAMARKLAVLYWRVMVKGLTYVENGINKYEEQLLAQRHKTLLRLANELNIQVSYNV

SEQ ID NO: 464316 - protein, 409 aa, unidentified
MEALYPHCAGLDVHKETVVACVRHMEGQVRTAVKTFSSTTRGLMDLSAWLSEEAVTDVAMEATGVYWKPVWHILSDGEFHLVLANAAHVKNVPGRKTDVTDATWLADLMAHGLIRASFVPDEPTEQMRNLLRTRKQFVRERASQVQRIQKTLEDANIKLESVISDVVGVSGRRMIEALIRGQSEPQELAALADGRIRATGAQLEAALRGRVKAHHRFLLRLHLDHLDAVDAAIARIDKEVDGQIEPFRTAVERLSSIPGVSSLSAEVIVSEVGLDMSRFPTVGHFISWAGLCPKNDQSAGKRRSTRMRKGAPWLKTILIQCAWAATRVKGCYLQAQYLRLRSRRGAKKAAGAVAASILTAAYHMLRDGTSYQELGGSHFDRRSTTQQVDRLLKRLHHLGYDVQIAPVAA

SEQ ID NO: 464317 - protein, 423 aa, unidentified
MFKIFRKNCCGLDVHKTWIYACIGITDEDGRTAYHQSRFSSFSRGLRELAEWLSKHNCVEVCMESASKYWIPVFNILEKTCHVTLSHPKYTKPQKGNKTDRKDAKWICDLFMCDMVKPSFIPPPDIRHLRDLMRYRFKLTNMLTGEKNRAQNCLTVSNLKLDDVFSDVFGKSSMSITKHILDHPGEQFNVAPFIDRRCKKPIEEIQAAVDGSISLEQAAKLREILRHIEEIEIHKLNIESEILRLAEPYLHQLDLIHSVPGFFANPMTAIALISEIGVDMSVFPTAKNLSSWAGCCPRNDQSGGKRKSTRISRAGAYLKPLLVQVANAIVKSDKYPEFRDRYRRIKSRRGHKKAIIAICRMLLTAIWNILSKSEPYSPEGYLVNRFIPKGDTFITRAQAINYMRARGFVIYDYSDESAAEAPA

SEQ ID NO: 464318 - protein, 284 aa, unidentified
MLTERSPAPATRFVALDVHRQYLMVGAVDSQQHVVLFPRRFGFAAFAEWAHVHLTHADAVVLEATSNAWLLYDQLQPLVSEVVVAHPQAVKLIAAARVKTDSRDTIKLASLLAANLIPAVWVPPQEVRELRALVTHRNRLVQQRTQAKNRLHSVLQRHNFDPPPGTPFAVHQREWWLTLDLSLAEKLRVQQDLSLYQTLETLIQEIEAELGRLSTCDPWVKQVPFLVQLPGLGVLSALRILAAIGEITRFPSAKHLVGYAGEGGQRSPVGGDQSRGAHHQGGAQ

SEQ ID NO: 464319 - protein, 426 aa, unidentified
MKPNNPPEFTALIGLDWGDKSHAIALEPADGSTETSTLEHSAESLHQWLDQLEQRFGARPVAIAIETDQGAVVYALLERPWITIYPIHPATSTRHPTMFRPSGAADDLPDALVLLSLLQHHRQRLRPLQLDDETTRTLARLVEARRKAVDRRTLLLNQLVSTLKNYFPQALELVGEDLCTDMALDFLAKWPRLIDVQAAKPATLKSFYHRHNVRRPQLIQKRLDRVRSARLLTRDPAVIEVSVRVVQLLVAELRVLVEHITAFESAIAQDFARHPEKAFFSELPGAGPTLAPRLLAAFGTIRELYPEVACMQRYFGVAPVTEKSGFRAWIHWRWNAPTFTRQTLVEWAGQTIVFCPWAKAFYERQRARGSAHHAIMRALAFKWLRVLWRCWQKRQPYNQEQFLRQLEKRRSPIAARARQLALEMAA

SEQ ID NO: 464320 - protein, 343 aa, unidentified
MDYYAGIDVSLKESSVCVVDAKGKVVREAKVASEPECLIGYFDELDLTVVRIGLEAGPLSQWLHAALVESGREVVLLETRHVKAALSAMTVKTDRKDARGIAQLLRMGWYRPVHAKSPPAQDVRALLVGRKLLQGKLLDVELSIRGILRGYGLKVGEVSRGRFEARIHELISGHATLSMVIGGMLAARAALWSEFTRLHREMLKIARADKICQRLMTTPGVGALVALTYRSAVDDPNRFGRSSTVGAYFGLTPKKYQSGETDRDGGVSKVGDAMVRTALFEAAHIMLTRATRFSSLKRWALDVAQRRGMKRAKVALARKLGVVLHRMRMDTTDFRSGAASMAM

SEQ ID NO: 464321 - protein, 447 aa, unidentified
MVDIVARRCAGLDVHKDSVVACLLVIEETGEFRKEVRTFETNTRALEALRKWVQSERLTHVAMESTGVYWKPIFNILESHVPNLLVVNAHHIKQVPGRKTDVKDCEWIAELLQHGLLRGSFVPPENVRHWRDITRTRVRLVEERTRCANRLQKILEDANIKLGSIVSDVLGASGREMIRALVAGESDSEALADLAKKRLRQRIPELRSALRGRVNEHHRFMLGFELDRVEQIERDVVKLDERLGSLMVPFEETLRRLQTIPGVGRRTAENRLAEIGPDMSRFPTPGHLASWAGICPGNNLSAGKRRRMKTTKGSPWLRRTLNEAAWGATRSKRTYLRALYHRIKARRGPKRAVMAVAHSMLVAAHRMLSKNVDYAELGDDYFDRMNRVRLVKHHLRRLRDLGVNLDELGGVLVPRDPVEDEPAPTPAPAPRTPRAPTQGTLFRDRPR

SEQ ID NO: 464322 - protein, 415 aa, unidentified
MDTLIERVAALDVHKDSVAACVRLPGKGRRRHQEKRTFRTTTEGLLVLRDWLRSYGVTVVGMESTGCYWKPVYYLLEDDFDCRLLNAQHLRNVPGRKTDMADAEWICQLVEHGLVRASFVPPRPIRELRDLTRYRKAQIEERTREIQRLDKVLQDAGIKLSSVASDVLGVSGRAMLEALVRGTHDPELLAELARGRLRQKLPALREALTGRFRTHHAVIVSQILAHVDFLDETIAVLSAEIDQVIAPFADKLALLDTIPGVDKRTAEALLAEIGPDMSVFPTHRHLASWAGVCPGNNESAGKRKSGKTRKGSKWLHATLIQSAKAATRTKGTYLSAHYARIKGRRGHAKATVAVAHSILVSAYYILQRGVPYDELGELYFQRRDKKNAERYRRRLVRQLERLGHTVILKPLPEVA

SEQ ID NO: 464323 - protein, 323 aa, unidentified
MTSLPSPTRDARITVGVDVSKATLEVAISEGARSLVLPNDEAGCAALLSELRELDVALVLFEATGGFELACATALQLAGLAVAVINPRQARDFARAMGYLAKTDRIDAAVLAEFAAVLHARGHQPRPLPSMEQRELAALVARRRQLVVMLVAERQRLGVAHSRAKPSIQAVIELLLKQLADIDDDLQRTLRERHADLSDLLQSVKGVGPTTASTLIAELPELGLLTRKQITSLVGLAPLNRDSGTFRGQRHIFGGRASVRRVLYVAALVATRFNPAIKDCYTRLVAAGKPKKVALVACMRKLLITLNAIARTKTPWRNDFALA

SEQ ID NO: 464324 - protein, 331 aa, unidentified
MEQRKTIIGIDVSKKTLDVFIKTIEVHIQISNDSEGFKKLLALLKVNKLKPEDCLFVLEFTGGYEYRLVQFCQAKMFSYVRISGLALKRSMGMVRGKSDKIDAKRIAEYGDEKQSKLEAETGSLANIVRLKRLLSQREDFVADRKAYDHRYKELQYMMDLPDSDSILKRFKKTVADFQKLIEKTEDEIVKLIKANDAFQLNFELLTSIKGIGQINAWTMIAYTENFTSFQNGRQFGAYIGVVPYDFTSGTSIKAKSRTSKMANQQIKALLQMAARAAVLHNKELNLYYERRIALGKHHMAVMNEIKFKLVNIMFAVVKKQKPYVDKYKIAA

SEQ ID NO: 464325 - protein, 343 aa, unidentified
MQTIMTIGLDIAKSVFQVHGVGAGGQVVIRRQLKRRYVLTFFQKLSPCLVGIEACGSAHHWSRELQALGHTVRLMPPAYVKPYVKRQKNDAADAEAICEAVTRANMRFVPTKTPEQQSGLVLHRTRHLFIRQQTSVINAIRAHLAEFGIVAPVGRHGVEELLTVVADPNNRRVPEMARACLSALGAQLRRMKEQILEFDRLIRAWHRSNEMSMRLEEAPGVGPVLATALVAAVADPKSFRSGRNFSAWIGMVPKQHSSGGKNRLGNISKQGDRYLRSLFVAGALSVIRYAKIHGTKHRPWLTALLARRPTKVAAIALANKIARMVWAMMARGERYKEPVALAR

SEQ ID NO: 464326 - protein, 377 aa, unidentified
MSKLRFVGLDVHAETIVVAVAETAGEVRSLGGIPNRLESIRKLVHKLGPVQHLRACYEAGPTGYVLYWQLTQLGVECAVIAPSLVPTKASDRVKTDRRDAEKLARCHRAGELTAVWVPDAAHEALRDLVRAREAAKKDQLRARHRLGKFLLRHGQQRPEGVKVWTKKHREWIKSHVRFEQAALEATLADYLEEVDHVGNRITKLETAIDEAIQQAPPAIKAVVEALQALRGVAQTVAVSIVAEVGSLSRFPNPRALMGYSGLVPSEHSSGNRVQRGGVTKTGNGHLRRVIGEAAWAYQHRPNVIGFLAQRQKRLAIGEESKKIAWKAQQRLHKRYQALSARGKNKNQIITAVGRELLGFIWAIGVSVEKQHPVTTAA

SEQ ID NO: 464327 - protein, 472 aa, unidentified
MFSWLGHHSVLPVSNARLFGVLHIVDALIHTEMKGCVSLSKFIHDFVVGIDVSSEFSVVAMLEPNGSLIRKPFRIDHNPKGFNALLEILKKEEERLKQKPIYFVESTGIFHLPLFFFLRSNDLKGFVLNPLCVHSTKNFDLRKVKNDAKDAESIARLAKFQEVKYSLVPEPQILALRMMAREYYALSDMLTEMKNRLCTDLYLLFPGYINVFGNPFGKASLEILRRYPSPRDVLAADTNELTSLVSKISRKTIPWAQIKVNTLLEISKLTESMPMNFGVLSLKIKYHLDGIESLQNSLDGLLKQLHLMIDSPEFPVKVRRYIELLKAMPGIGFLTAVTLIAEIGDFSKFNSPKAFVAFFGIDPSVNQSGKFNGDRNKISKRGTRFGRRVLFTAALASIRTTRSGDAINPILRDYYHQKCENKKKKVALVAVMHKLLNYIFAVLRDEKPFALRSPKDHQTWRHSKETVLKLVA

SEQ ID NO: 464328 - protein, 342 aa, unidentified
MTTIKYSVGVDIASSTFTVSVGEIPWKVVLKPQTFENVEDGYQTLLEWLAEHHLSASETVVCMEATGVYSEGLAYFLYAKGYRVAVQSPLEVKRTFKPYGPKSDAVDSLQIAEYACRHTDKLSFWRPRNEILEQVKALLAVREQFVSQSIAHKNALKAIQRKVVRTPFAEQAYLQLIEQVKKQIKAIDLEIRRLIESDPTFKEMLLLLLSVPGVGLLLAAHFILLAQFSLEYKVLASFLGICPNEHSSGTSVFKHATSRHFGPPAIRKLLYLAACSVCTHRPQFGSYLARKAKEGKPARLVLNNVENKLVRIMCAVLQSKTAFIENYHSVQPLVFQNTLTVS

SEQ ID NO: 464329 - protein, 343 aa, unidentified
MTIVEATRPVTGGVDTHLHVHVAAALDNVGGLLGVESFPATPSGYRKLLGWMSSFTRIGVEGTGAYGAGLARYLHRHGVQIIEVDRANRQARRQVGKSDPADAVEAARAAQSGRARGLAKTRDGNVEAIRALLVTRRSAAQMRVKTLCQIRHLCFTGPDELRRRLQPLSAIMLPREAAALRPRAGGDVVAYATKVSVQTLARRVLAFEDEVARLDDLLAGLVAATAPSLLALHGVGVEGAATLLVSAGDNPERLRSEATWAHLCGVSPIEASSGKITRHRLNRGGDRQANAALWRIVMVRMVSHPATRAYVERRTKEGRTKLEIIRVLKRYVAREVYRHLPRA

SEQ ID NO: 464330 - protein, 339 aa, unidentified
MSLYCGIDLHSNNNYISIIDSNDKIIFERKLTNNIGAVTDALARMREPITGIAIESTYNWYWLVDGLQELSYKIHLVNTSKVKQYEGLKYTDDKYDAYWLAHLMKLGILPTGYIFPKEMRAVRDLLRRRMQLVQQRTANILSIGNQLTRNTGKQFSSNKIKSLKLVDMKSMIKDPNIQLSIKSNINIMQSLSVQIKLIEKAVLKQVELKEEYIKLTEIDGIGVILALTIMLETGDIARFKAVGNYASYCRCVNSKRTSNDKKKGEGNKKNGNKYLAWAFVEVANHSMRFNEKAKRYYQKKAAKTKRVVALKALAHKYARACYYVIKNKESFDENRLFGC

SEQ ID NO: 464331 - protein, 311 aa, unidentified
MKSSIFVGIDIAKASLQVACQELTLEPAIAYEAQALAALVKQLKKRRSKVQIICEATGGLEALLVHSLSAAQIKFSVLNPRQVRDFARAQNLLAKTDKIDAALLADFGRRMQPAPTAAPHRLIQQLAALSARRQDLLDFCVAEQNRLAQATQRWVRHQHLALLSQLRAHLCQLDQRIQTLIDSTPWLKARFQRLIQTKGIGPVSALTLLATMPELGSLSPAKAAYLLGVAPLNCDSGRYRGRRKIYGGRRLARSVLYMAALSASRCNHILRPFYNRLRANGKPPKLALVAVMRKLIIYLNSCLASLPTPTE

SEQ ID NO: 464332 - protein, 370 aa, unidentified
MNTLCERRNTLFVGIDVHKNSHTAVGISPFGEKLFELTVGNYEKDFQLLSEKVQSAATASHLSPHLGLEDCQGYGERLALFLTREGYPVVHVPAVFVDHARKRNTHPEKNDSLDARGVAEVMIQRIDTLPTYTLTEEAKISKDIKDISLDREYLVKERTRTKNQLHTLLYRIFNTGYQEKFKDPFSVKALRYWMKTNPKDASPFLLRSMKRKVKRLQQIREETNELEAELETLIKESGHTIQTASGCGAVIASEIIGEVGDINKFHSPASLAKYAGCAPREYSSGKTIRWRKTKSGNRRLNRAFHRMALSQISRMGNAAAQTYFKRKVSEGKSKSQALVCLRRQMVNIIWMMMKHKTDYRIHGYPQGNLT

SEQ ID NO: 464333 - protein, 359 aa, unidentified
MQAKVKTISFHGQNIYIGIDVHLKSWTVTVMTENSLQKTFSQDPSADILQGYLHRTFPDGSYYSAYEAGFCGYSVHRELEKCGINNIIANPADIPITDKEKKQKEDKRDSRKIAKALKYGQLQGIHIPSKPTEELRTLVRYRKTLVKEISRHKNRIKSFLYLYGITIPPVLLQPSRYWSGRFTQWLSTVETSTPWGTSVLQGTLETVGQLRSELLKVNRLLRTINKESQYSGILSLLQSVTGVGPIVSITLLSELEEVNRFNNLDKLSSYIGLVPRTNSSGENERAGRITPRSNKPLRSCLIEAAWIASRNDPALAQCYVRLCKRMTPNSAIVKIAKKLLNRIRYVMKNQKEYVHSVVQ

SEQ ID NO: 464334 - protein, 408 aa, unidentified
MIEAAIETPTFDLTVFKLHFGRLTGKAYTKDEMCWGTPSVQTLVAMASVMFQELEEVPMTMVGGLDVHRQQITFDYVDDDGLVHWGQIRPATRKTLRGWLAEHFRDGDADFALEGCTGWRYVSEELAAAGLGVHLGDPAETAALRGRKKRAKTDRADARLLRTLLVEGRFPESWIPPAHVVEVRTLGRLYGTLMDERRAWQQRIHAQVFHQGCPPIRALLTRAGREALAGAELSAAGRQYVDTALRRIDELSAEIDPLRTQLISFARRQPGCRALQRHYGVGWLCAVIIWAEIGDARRFSSSDQLVRFAGLDVTVYSSDAKRAPGHLSRQGSPELRWAAFEAAKSAARRGSPDHGYYHKLAAKHDGHNGKNPTLAVERKILRRCYHTLRELGDAALALPDIRPQEVAA

SEQ ID NO: 464335 - protein, 327 aa, unidentified
MRQQTSATSETPVKDRMIIDFTGKTIYVGIDIHQKDYQVAKVIDGVCLGNHRMAANGDLLIKHLRSCYRGAEFKCVYESCAWGFNLQRKLTAARMQCIVVHAADVSTSDKERKRKTDKVDALKLARNLAAGELKGIHVPDETIQKERNLIRYRTRLMRDINRSKNRIKSLLKYQGIEVPAQYAKNNWSRNFLTSIEEQAAKDELLADTLLLMLDQMKLLRQLLLKTEKKLRELRKGKYASKVKLATSVPGIGPTTAMLFLLEAGDINRFKGFDALNDFIGFCPDTDSSGETDRDRGITTRRHKQLRSALIAGDKNRPCPDEQLSDAH

SEQ ID NO: 464336 - protein, 386 aa, unidentified
MQKLNDFSRSLIALEPDGTLIAVIEMSLSSWLVAGIVPGVERQPLKKLTVDESALLKLLHRWREEAEKAGCRIERIVVAFEAGRDGFWLARWLKARSIEAHVIHAASVAVSREHRRAKTDRLDTELLKRAFLGWLRGERDHCKMVDIPTIKDEDAKRPNRERENLVSEQSRIINRMKAALIRLGIRGFNPKLKRAAGRLEDLRTPEDEAIPPNTLAELRRDMERRRLVRDQIRQIEEARLERLDHAPGDGPHAMVRLLARVIGVGIETADMLVHEVLSRNMRDRRAVARYAGLTGSPDESGRKRREKGLARSGNARVRRGMIQLAWRFLLHQKDSALTRWFRARTENARGTRKPMIVAMARKLLIALWRLVREGIVPDGVVLRPAQ

SEQ ID NO: 464337 - protein, 412 aa, unidentified
MDRLVERCAGLDVHKDSVAATVRVPGKDGQRLQETRTFATTTRGLLTLADWLASYGVTLVGMESTGCYWKPVYYLLEERFECWLLNAQHLRNVPGRKTDVADSAWICQLLEHGLVRPSFVPPKPIRELRDLTRYRKAQIEERVREVQRLDKVLQDAGIKVSSVASETLGVSVRRMLDALVAGTHDPEVLAELARGRLRQKLPALQEALTGRFRSEHHGLLVSQILAHIDYLDETIATLSARIEQVIAPFSRERELLQTIPGVARLGAEVLIAEIGVDMSVFPSDAHLASWAGQCPGNHESAGKRRSGKPRNGSKWLHKTLTESAKAAARSKGTYLSAQYGRLRGRRGPGKATGALRHSILIAAYHILEQKVPYQELGADYFDRRRSTEQRTRRLVRQLEQLGHTVTLQPLAA

SEQ ID NO: 464338 - protein, 407 aa, unidentified
MIFAGVDWAEAHHDVCFQDEQGRRLAGGRLPEGVEGIARFHELAAAHAAEPGEVVIGIETDRGLFVSALVAAGYRVVAVNPMSASRYRDRHRSSGAKSDPGDAKVLADLVRTDRHNHRLVAGDSDLAQGIRALARAHQSMIWARRRQANQLRSALREFYPAALAAFDDLTGGDAVAVLKAAPQPSLGAALSRAQIAAALRRGGRTRRLAERTAAIQAALRSPQLQPAPALAAAMGAAVAATAAVIAEMNAQIAALEQQLAADFELHPDAQVVRSLPGLGTILGARVLGEFGDAQGRYATAKSRKNYASTSPITRASGTRRAVLARYARNKRLADAIYLWAFAALTASPGARAFYDHRRAAGDTHHQALRTLGNRLVGILHRCLASHTPYSEHTAWAHRANQEIGHAA

SEQ ID NO: 464339 - protein, 424 aa, unidentified
MVQVVDDVEIIERVAALDIGKAEVVCCVRVPDESRSGRGSGRAQQVRTFATMTRSLTELSDWLAGLRVTRVVMEATSDYWKPPFYLLEAAGFDVWLVNAHEVKHLPGRPKTDALDAVWLCKIAERQMIRASFVPPSPIRQLRDLTRYRVDLIGDRGREKNRVEKLLEDAGIKLSVIASDLFGVSGRAMMDALIAGERDPDILADLARTRLRARIPELREALTGHFSDHHGFLLTQMLRHLDHLDARITAVESQIDELIRPYADTVARLDQIPGVGAAAAGMIIAEIGTDMTRFPTAAHLASWAKFSPSVKESAGKTKGNAATGRGNRYLARALGEAAVGASRTNSFLGERYRRIARRRGKMRALVAVGRSILTAIWHLLSDPNATFNDLGPDHYDNRGSTQRALRRHVNALHALGFTVTITPTG

SEQ ID NO: 464340 - protein, 369 aa, unidentified
MTQCIKTRFVGLDVHKDTIVVAVAELGREAARVVATVPHEWKALRKVLDKLGPRSEVACCYEAGPTGYGLARTLIAADWACDVIAPSLIPKKHGERIKTDQRDAVKLAQNHRSGELVAVFIPDEQTEAIRDLERAREDAKKAERVVRHQLSKFLLRNGRRYPGKTTWNDAHHAWIAQQTFAEPAQQYVLSDGLAAVEGATLRASQLTARLREVTVGWSQEPLVKALQAMRGVEFVTAVTLVAEVGDFRRFAKAQDFMGYVGLIPSEQTSGNHRRQGPITKTGNAHVRHVLVESAWHYRRQPRMSKALRERSAGISPQVCAIAWKAQKRLHGRLNRLIGRGKNKAEAVTAVARELAGFVWAISRECPCSA

SEQ ID NO: 464341 - protein, 343 aa, unidentified
MKQQATVLGIDLAKRVFHLVGMDDVGHVVLKKRLTREALLPFIAQLSPVIIGMEACGGAHYWARRFRGYGHTVKLIAPQFVKPYVKSNKNDPADAEAICEAVMRPTMRFVPIKEVEQQDLQSLHRARERVVKARTALVNEIRGLAMEYGFVFPHSVTKFRHTFAATLEAEQDKLTPLSAELFRQLYDEFGTLEKRLAYYNEKIAAICAAHPVCQRLATIPGIGPLTATALVAAVSDASHFKNGRQFAAWIGLVPRQHSTGGKARLLGISKRGDVYLRTLLVHGARATLRWVGLKTDRRSQWVRGLVERRGKNKAAVAVANKNARIVWALLMTEQEYTAEHAAA

SEQ ID NO: 464342 - protein, 349 aa, unidentified
MGLVIGLDAHAKTCVYVVKDDGANVVDRGILPATPADLAVLAERYPGATVVVESSSVTEWIYDRLTALGMNVFPAHPVNIRRVLGRKSDAIDAGFLVDAYRLGALRPSYVPPKEIRHLRQLARRCAFLTKERTRFKNRVHAILKRRGIRFLDAETEDDVSNVFARRHRDRLLAVGDPEIPVLLDLIDAVDEKRDALDAELLAVAESNEDVRNLMTIPGFGPLTAVCVYAEVGDVSRFPTAGSLCAYFGLVPVESQSGETLVRGHITRRGPAHVRWVLNQAAWQHVRHCPRGSIARAHKRIARRAGKKRAVTGTSRRLTKVCHCLLRERRPFHAERPRGSLGSVLRDGTA

SEQ ID NO: 464343 - protein, 435 aa, unidentified
MEEVTDEPLYRDRVCGIDIGKAQMVATIRVPSDRDPARRAAETRTFGTTKREVLALVDWLRCWQVPAVVMEATSDYWKGPFYRLEAEGLECVLADAKQVKNLPGRPKRDPADSRWLAACFERGAVTACFVATPEFRIIRLHTRYRRDLTEERTREKQRAEKLLESAAIKISSVLTDLHGVTGRDIMDHLIAGQRDPKVLAQLARAAARRKISQLEEALEGAEFFTGEHAALLAKVLARIDRLSADIEDLTVVIERLLAPYEEQLQQAESMPGWARRAAQDAVAETGVDMTRFRTGPHLSSWGGRAPQDHQSGKRAGRSKAKKGNKYLGAILGETAVAAGRTQTREGVRHRRLARRRGTAKACVATGNTQLKVYHKLLSNPGMRYQDLGPDYYDRQRDTRRQIAHHVGKLGSLGFEVTLCRIPEPGPDGTAPTQAA

SEQ ID NO: 464344 - protein, 343 aa, unidentified
MDHFAGLDVSVKETSVCIVDDTGRIVREAKVASEPEALLAVLKNPAYPIKRIGLEAGPLSQWLYSALAEAGLPVICVETRHMRAVLKAQINKTDRNDARGIAQMMRVGLYRPVHVKTLRSQKLRMLLTHRKLLQAKAIAIENDLRSTLRNFGLKVGMVGNVKFEGRIKELVENLPDLATLAEPLLIVRRVLHEQLGILHRRLLDIVRNDDVCRRLMTVPGVGPVVALTYRATVDVPARFKNSKAVGASFGLTPSRHQSGESDRPGAISRCGDEMMRVMLYEAAQVMLTRTNKWSWLKAWAMKIARHRGMKKAIVALARRLAVIMHRLWVDGTEFRWTHDVVAA

SEQ ID NO: 464345 - protein, 417 aa, unidentified
MKVVYSTCCGVDVHKTFLVATIIKTTKGVQPSYQKKRFSTFNSDIRRFKQWLLDNSCFDVCMESTGKYWIPVFNVLEKNNIWVTLSHPKYTKPQKGNKTDRKDAKWICDLYMCGMVKTSFIPPADIRQLRDLVRYRFKLTCMITSEKNRAHNCLTISNFKLDEVFSDIFGKSSRSITEQILQHPGETFDVAQFVDGRCKTPIEEIQAAVDGAISTEQAVKLRQCLNHIDELEKHQAEIEREIFRLSDKYEEVLNLIRTVPGFDKNPMTAIQVLSEIGGDMSVFPTAKNLVSWAGCCPRNDQSNQKIKSTRISRAGSYFKPVLVQVANALIKSKKHPEFTTRYRRIKARRGHKKAIIAICRMILTAIWHILTDLKPYTTEGFLESRPVNDSKILTTSQALNLLKQRGYVIKDDIVSVP

SEQ ID NO: 464346 - protein, 345 aa, unidentified
MVVIGVDPHKSSHTAVAVDEAGQVLAERRVPADKATLRRLRQWAEPWPERTWAIEGANGLGHLLAQQLVTAGEVVVDVPATLAARARHLDRGHGRKTDGIDAKTVAAVAQRRPDLRRVVPEDHAGVLRLLSDRRDQLTAERRRVVNRLHRLLRDLRPGGAPIELSAAMAAKLLGMIHPQGAADVERKSMGRQLVADLRRLDRALADNRRRCATAVAASGTSLTTVFGISEVLAAKILGHTGDIARFGTADRFASYTGTAPVAVSSGELTRHRLARSGNRSLNNALHLAARVQIMHAGPGRDHYARKLAEHKSSTEALRSLKRQLAKVVYRHIVADCARRLESSLT

SEQ ID NO: 464347 - protein, 339 aa, unidentified
MQISTIGVDLAKNVFHVHGVDKDGKVVISRQLRRKQVVEFFSKIPPCLVGMEACGTAHYWARELTRLGHTVRMMPPSYVKGSKSDAADAAAICEAVTRPSMRFVPIKTAEQQAALMLHRTRDLLIRQRTQLINALRAHLAELGLVAEKGREGVVELAAIISDERNSHALPPAMKQALQAILDQLTALQQQVGQLDRCIHAQHRASDVSRRVETVPGIGVIGATAITSTVTDPSVFKTGRDFAAWIGLVPRQYSTGGKEKLGGISKQGDRYLRRLLVIGATAVIQHARRHPEKHPWIMRLLAKKPAKLVAVAVANKMARIAWAIMAKGGTYRAPALAAAA

SEQ ID NO: 464348 - protein, 368 aa, unidentified
MRRMERDRSICLRSEETVPEPGRHVPHHPSPNSCQGHQARMFTRSGYTQEAARQTPLVVVGIDVSKARLDVGVRPSDERTSVPYDAHGITTLIAQLTPVQPTRIVLEATGGLERPLVRALVDAALPVIVVNPRQVRDCAKATGPWAKTDVLDAQVLARFGEVIRPPLRVIPDAQTQELAALLARRRQVLAMQGAEQNRRDRAPARVRKRIEVPLRWLRAELARLDADLDEMIQQSPLWREREDLLQSVPGIGPVMSRTVLAELPELGLLNRKQIAALVGVAPFNRDSGRLRGHRAIWGGRAPVRRALYMAALVATRWNPVIRVFYQRVRTAGKAPKVALVAAMRKLLTMLNAMVHAGTPWQPVVAQDT

SEQ ID NO: 464349 - protein, 438 aa, unidentified
MRKPQVIEDQQHERVFERVAAVDVAKASGMVCTRMPNPSRPGTRHSTVWQVPAAMNAVLALADRLVADGIEMVTLESTADYWRIWYYVLESAGLAVQLVTASQARNLPGRPKTDRLDAMWLARLTEMGMLRPSFVPPAPVRVLRDYARARTHLVQDRTRCWQRLEKLLEGALIKVSAVASKLTTVSAQDMIKAMIGGQRDPHILAGLARGRMKAKHDALVEALTGMFDDHHGELAQMLLDQIAFCDTRIATLATRIEQHLAQIRAAWGVDADGSTGPSAGTGTDAAVPPAADRLAEIPGVSAELARSIIAETGLDMSRFPTAAHLVSWAGLCPSAHQSGPRTRNGKKGQGDSYLRGYLGQAATGAAGTATFLGERHQRIARRRGRAKAQVAIARSILVVIWHLLNDPQARYADLGPDYHASRTDKDKKIRNHIRPPPA

SEQ ID NO: 464350 - protein, 338 aa, unidentified
MFFSGIDQHKVSSVITTLSATGERVAQVTLPNHRAALLAHFAQFPGPHRAVVESTGRWYWMRDLLAPAGIELELAHAKLLKAIAYAKVKTDAVDADTLAQLLRVGLIPRAHMIADPLRGPRDVLRARLQLVERRLRCEHTLTSLLEKFNVPDVAQLPPLYQLQARLHTAQAQLLAAQVKELEQAVQGDLLADAAVQRLLWIPGIGRLLAFTIYLEVDDIHRFPTVKHFWSYCRLVPGAADSAGRQRHKASRDGNRYLKLAFSHAAIRAVQYFPEVRQWFQRWKRKKPVRVARTLVAKELAQAVYVVLREGVDFNQQFKGTPLTRRKLASWPRRASPSV

SEQ ID NO: 464351 - protein, 351 aa, unidentified
MKGMAVAIVESRVTGGVDTHLDVHVAAALDGIGGLLGVESFPTTAAGCEDLLEWVAGFGPIAVIGVEGTGSYGAGLGRYLQAAGVAVVEVDRSDRQDRRRQGKSDPLDAISAARAAQSGRARGEPKGRDGRVEAIRTLMVAKRSARGDRTATLNQMRALISTAPDDVRARFAHHSVARLVAVTAAMRPRPGDVVGYATRVTLRELGQRAAYLGDQIDRLNELIAPLVTARAPGLVALYGVGPDTAAILLIAAGDHPERLRNEAAWAHMCATAPIPASSGKVVRHRLNPAGDRQANHALWRIVITRMSSEPRTRAYVQRRTAEGLSKMEIIRCLKRYVARETYRHLRPPVAD

SEQ ID NO: 464352 - protein, 450 aa, unidentified
MGSNYAGVDWASEKHDVLVSDEAGEELLSTTFAHDEAGLRSLCRTLVRLKVKLVAIERPDGVLVERLLDAGLRVIALHPNQVAATRARFRVSGGKSDRFDAFVLCELARTDHHRFRVLEPDSDQTKALRALTRGREDLVQTRVALTNQLRAELERFWPGATKIFARLDSPIALAFLQKYPSPIDARSLGVGRLEAFLRRQRYSGRKSAGELLTKLRAAPEGRTGEQEIAMRRQLVLALLAALGPLVAQIKTLDGQIAQAVREHPDGEIFLSLFRDPKSVVTAATLLAEIGDCRARYPTRDTLAGDAGQAPVAVESGKRKVACFRWACNKRLRDAFCTLADSTRHHNPWAAAHYARAIADGHDHPRATRTLGRAWCRIVWRCWQDHTPYDPARHRSLQQHALVTIPESSGPRPDTAATQRMLGATVTDRRPEGPSAQALDRKPTSANTLGG

SEQ ID NO: 464353 - protein, 463 aa, unidentified
MMKKRKLASKAEKPRREKVDWKTLEIVHPDAAGIDIGGREHWVAISPDRDEDPVRRFDCFTADLEQMAKWLVEKGVCSVAMQSTGVYWMPVYEVLEQSGLEVYLVNARHTKNLPGRKSDVQECQWLLKLHTFGLLNNSFQPTDEIRVARTMWRHRSSLVAQAGGAIQRMQKTLTEMNVQIHNVLSDLSGVSGMAILKAILKGERDPWQLAAFANPAVKASPADIAKSLHGNWREELLLVLRHEMELYQTYQDKIAECDHQLRKHLQSLASRVDLQAQPLGARPKGKKAPRGNTPKFDLRSELYRITGIDWSQVNGIDVQIAQTVITEVGVDLSSFPSERHFASWLGLCPMNEQSGGKILNRRTPKVVNRATVAFRLAAQGLLRSQSYLGAQYRRLRTRLGAPKAITAMARKLACLFYRLLRHGQPYVDKGAQYYESRYREQQIRSLTKRAHKLGLQLVEPKPA

SEQ ID NO: 464354 - protein, 387 aa, unidentified
MSQLNDLSKSLVALEQDATLIAVIEMSQSSWLVAGIVPGVERQPLKKLTTDQDALLQLLHRWRKEANEAGHVIKRITVAYEAGRDGFWLARWLRAHEIEAYVIHPSSVPVSREHRRAKTDRLDTELLKRAFLGWLRGEPKHCSMAAVPTIADEDARRPSRERENLVREVTRLVNRMKANLARLGIRGFRPHLAQAAGQLQTLQTPEGTAVPANTLAEMRRDMDRLRFVKQQIKQIEAARVQRLESEPGERRHAMVYLLARVVGIGVESADMLVQEVFSRKLRDRRAVARYAGLTGAPDESGNKRRERGLAKAGNARVRRGMIQLAWTHLLHQKDSALAQWYRARTADARGRTRKIMIIALARKLLIALWRLVTTGEAPAGLLIRPAA

SEQ ID NO: 464355 - protein, 350 aa, unidentified
MKYVGIDWAYRTAQWCALSPGGEVCGEGRIAADRDGLARLVFELGDEVKACLEMMSGALWVRDQLVACGWQVEVADARRVKTVAPLAAKTDKVDARLLAELSRRELVPALWLPSLDERALRERLRRRMHLVRLRTSAKGRIFGLQTQWGVRVSLARLRRADGLTVLERAGVPAVWRRSVSESLALIDFLDARLEPLDAELRPFAQADPRAVLLDTIPGVAELLALTIAVEVGEISRFAGPQKLVSYGRLAPRVHQSGESRPRSGPLSKSGSRLLGWAAVEAAQQAWRESNPWHELYLDVSRRSRNHNSAKAAVARKILIAAWHMLSRNEPFNPTPRTTSVPASSRLALAA

SEQ ID NO: 464356 - protein, 366 aa, unidentified
MKKNSTMATSRKQIFKGQKLTIGMDLGDRFTYYCILDEAGEVMVEQKLPTTKPAIQQVFGRMPRSRVAMETGAHSPWVSRQLTQLGHEVIVAHARNVRLIGESSRKDDRLDARMLARLARLDPRLLSPVQHRSAEAQAHLTVIRARAALVGARTMLVNAARGLAKSYGERLRKCGTQQVSKDLAAGFSVELRAALQPLLMEVASLNERIAEYDRRIEQIATQVHPEVALLKQVKGVGTLIALTYVLTVADPRRFRRSRDGGCYLGLRPGRRNSGSSQPQMHISKEGDRYLRTLMVQGAHYILGPFGQDSDLRRWGLKLSERGGSNAKKRAVVAVARKLSVLLHKLWVSGEVYEPLRNSSAAVGAVA

SEQ ID NO: 464357 - protein, 322 aa, unidentified
MKCIGIDVSKLNFTVAYPTENAYRLATFTNDSKGIKKFINSIDDCDYHCVMEATGTYSSLLVYLIQEAQVPVSVVNPKQINHFAKMMLCVTKTDNLDAKLIAMYGEKMKPAIYKMSSSTIQFLRQKRTLLRQFKKQLRMLLNVQESFQALPKIDTKADKALKKSITFLEKQIHELHLDMVAVTRAEFSTQLDHLTSIKGIGNGVATALIMATGGFTYFDSAKKFAKYIGVCPSYQQSGTSIKTKGIITRHGDPELRSLLYISSWSAIRFNSSCKELYERLKAKGKPGKVALMAVINKLLRQAFAVIISKSNYVDNYVIGEIK

SEQ ID NO: 464358 - protein, 347 aa, unidentified
MNGDYAGRQVVGMDLHRRRSVLVRMTEDGKKLGTARITNSPAALRAELARAGENPRVVLEATYGWYWAADTLAAAGAEVHLAHPLGVKAYGYQRVKTDARDAANLADLLRMGRLPEAWITPREVRDLRELTRYRQKLVGLRTSCKDQVHAVLAKLGIAVTCSDLFGAWGTAWLDGLRLPQPYAGKVTSLRQLIGELTTEITMLAEVIADLLAGHPGYAVIQRLPGIGPVLAAVIIAEIGDVTRFATPGQLASWAGLTPKHRESDVKVTRGHATKQGSRQLRWALIEAIQHAPAGYKVRETKDAIIARRGRQARNIAKVAAARRLLTLVYYGLRDGQIRCLPEPARAA

SEQ ID NO: 464359 - protein, 335 aa, unidentified
MQIKHFIGIDVSKDTLDLSVVVDGKNLQYFCIKNRTVEIKSTINKIMKSLGATVDDTIFCMEHTGMYNLPLVKWLQSHQGKMWLESGVHIRKTLGVVRGKNDKVDSSRIAMYAYTNRHQIKFWNPPRKLIERIAALLSQRARMNKAKKQLNTANKEQKRFLDKDIMRTLNKYTQKTILVINKQIEALEKEILGLINDDEKLSRIYKIITSVHGIGFVTASYILVTTNEFININNPKKYACYSGVVPFEYSSGSSVRGKNRVSHMANKNMKSLLHLSALSAIQMQGDLQEYYKRKVSEGKNKMSVLNAIRNKLVLRVFACVNQNREYEKKYEYILV

SEQ ID NO: 464360 - protein, 418 aa, unidentified
MDVVYPRCCGLDVHKATVTACLLTPGQQGGPAKELRTFRTMTGDLLALSDWLLAAGCTHVALESTGVYWKPIWNLLEGAFQLLLVNAQHIKAVPGRKTDVRDSEWLAELLRHGLVRGSFVPEREQREVRELVRYRTSVVRERASEVNRVHKALEGGNIKLASVASDVMGTSGRRMLAELIGGATEAPALADLALGKLRAKLPELEQALTGRVGGHQRFLLARQLAHIDFLDELIAEVSTEVARRMRPFEQALADLDSIPGVGRQTAEVLVAEIGLDMARFPSPGHLASWAGMCPGQHESAGKRRSGRTRKGSPWLRATLVEAAHAAARKKQCYLAAQYRRFAARRGKKTAAVAVGHTILVIAYHVLKRHQPYQDLGPDYFDQRDRQAIQRRLTHRLESLGFEVRLTQRPPADQEQAAV

SEQ ID NO: 464361 - protein, 419 aa, unidentified
MLARKTVRVKAFRLGEVLDWAVGQARAKGFANVTVACEPTGPRWMQVQRLCAERGLPLVCIQPLVSHIAREQQDYTTHKTDESDCVMIGRLAVELHCYLPEELDETWAHLRHLGRRRAQLITASTASMQRIQDFLSVAWPVVTETCVQPLLSKTWLAALQVVTSRCGADPGNLAALGCEAFTALIRSAVAGWGGKKAWGTICGRIFAALTDTEGVVVSSRRGLLRRVADELADLQRTRAQLRRVEEDMVAVLDELGLSRLAGIPALSAVGAAAILAETGDPRRYDSSSSLVKHAGMSPSDNASGAFSGDARISRRGRPGLRLTVWRAVWPMLQFNPVMAARYQAMTQAAGDTAAGTSSRQAGAAAAAARTRRAKARVACAASLLRWIYSMVVHGTSWDAAVAAGDAACQHAPRRPAEAA

SEQ ID NO: 464362 - protein, 400 aa, unidentified
MAGNVIVGIDPGRYGHGVVVLGSGGEELLRERAANDAAAIETLVGRVAGFAGGGGQALWVIEADGGDGAVLIGELLARDEVVATLTPTEVASRRKGRRQVHKSDLIDAEIVAQIGREQQATLRRLVAMPEAVAAMRVLARYQDGLIRDRTRLINRLRFLLSQYWPEFLAARAFAALDGDAVTALLTELPTPTAVRSKSAFELAGFLAAQRYRRRPLERAQQLLAAAQVGSRPQEAVYGRLVAEVAGELRALKGRIEALDGEIRDRFLPQPEAPIILSLPGMSHRTGPRFLAEVGALARFSSPDALAAFAGLTPTLWQSGRSSGTNFLSRRCNLHLRQACWSAALGSLKTPASHRFYARKRAEGKSHHQAIIALARTQLRVLWTMLRAGSLFSPERALEAA

SEQ ID NO: 464363 - protein, 359 aa, unidentified
MRYLGMDVHMGSSVWCLLNDRGEETGRGKVATTADSIRGLVESLSGEDELLVGQEVGTMSHYVHDAVNAAGVRILSFNAQHLRMISSSRKKTDRRDAYWIAKTLQTGMMPHPVYIPREKERQLRRLLSTRDGVMRERQRWMVRAGSYLKGAGLHGGPGARVGKALVQEVIEDLEDREPDLVAALQLCQRQESLLSQELAVIDAKLRQETRGIDDIRRLMTIPGVGLLVGTAIYAWVGDVTRFRNAKTLAAYAGLVTSVWQTGETLKSGHITKQGSPALRRMLVQAAQVLISRCRTPEAWPLQAIAMRVQDSRHRRKIAVVALARHILRVSYYVLRDGTVYDPALLHSVQQEDNTGETAA

SEQ ID NO: 464364 - protein, 352 aa, unidentified
MRTSQKAAGIIATIGIDIGKNTFHLVGLDKRGAIVLQQKVSRGQLERRLANIPRCLIGMEACSGAHHIGRQLAAVGHDVRLIPAQYVKPFLKGHKNDYRDAEAIAEAVQRPTMHFVAIKTPEQLDLLALHRVRSRLVGQRTGVINQIRGFLIERGITVRQGPMPLRKALAEILSSDTGVLSPRMVGLVTDLVQDWRRLDERIAAVSAEVEALAEQDDGCQRLMTVPGVGPIISSAVVAAIGNGAGFKQGRDFGAWLGLVPKQESTGDRTIMGKISKRGNKYLRTLFVQAAHVVLARRPSAAMRGLWPWIEQASKRLHRNMLAIALANKLARIAWAVLARGRAYQPRITADAA

SEQ ID NO: 464365 - protein, 353 aa, unidentified
MNNSRNKAEVILGVDTHLDTHVGVLLNAQGHQLGCLMVTTNISGYERLVTWANSFGCLKRAGVEGTGTYGAGLASVLRKHGIEVFDVNRPDRTKRRLQGKSDPTDAESAARAVLSGSATAIAKTQSGAAEMMRVASVARRSAVKAKTQAMNQLRALLVSAPQDVRERLWKSKPADCARGCARVRSLGSTELLHTLTTTLCLLAKRWLLLANEVEKLDAMLDALTRQHAGRLREQFGIGPQTTAVLLSTAGDNPERLRNEASLAALCGVNPLPASSGKTVRHRLNRGGNRAANNALWTIAMVRMRGDPQTQSYVARRSAQGLSSKEIQRCLKRYIVRELYPLILADLADSARVC

SEQ ID NO: 464366 - protein, 443 aa, unidentified
MSRKQRKHIRGKRGERFLQIVRGMDRARILCVSLDISKYFHLVMMHNAYGEIVTPSFEIDIFRSGFEHLCQVIDETAARIGAEVVLIGLEPTGHYFENIARHLRARYEHVYLINSLAVKENRAQKMMHYQKTDEEDAATIGDLLCRGEGTPYQPNKGVYLEMQHIDRVRVAKLKMRSALKNQIIGHLDRIFPGMIITNKEAQKRRRPLFTTNLWSCQMAQDLVRVCPDPRQLSQMSPQELIDAFHAQGYRMGPQWATRITAFARQTLHPDPEIIAVRSQLLQRDLALLEQVEGCIAQLEDRLIALLAQTPGYIWIRLKGISSIQAASLMAAMGDSSYYDYAAQVFRRSGLVSGRNDSGTRQKKGKGKHVTKVGDVYLRRALNNLVETFSLHQPTLSDYRGRLKSVKPHPGVARVATIRKAVGILFAIQRDQRIDGLLVKPQEG

SEQ ID NO: 464367 - protein, 351 aa, unidentified
MTFVGCDLHTRQQHVAVLDTETGEVQARRLAHDDQTVEHFYASLPRPVTVGVESTGYAQWFHALIQRQGHTLLVGDAARIRAMVIRKTKTDRRDASHLLQLLSQDRFPVIWVPDPCVRDLRALVSHRMRLVRIRTMVKNGLHTIALNQRLAASSALFTRRGRAQLQALALPPHTTQRRDESLALLTWLDAHIDPLNAQIAEAANADDQARRLMTHPGVGPLTALATVLILGPVTRFPTSKHVVSYIGLAPTVDASADKCRLGHVSKQGNTLLRYVLGQAGQVAVRSEPDLRRVYTAVMRRHGRAKAKVAVARKLLVRLYILLRDQIDYIEFRDRGRSRHRAHPRAEVPERA

SEQ ID NO: 464368 - protein, 346 aa, unidentified
MLYVGLDLSRKRLDWQALDREGAVAGVGAVPPDRDGVAGLAKRLGDATPVLAVIESMTGARFVHDQLELAGWEVRIADAVKARGIAPLACKTDRIDCWVLAELARLELVPEIWLPDPRVRAERERARFRLHLVKHRSSLKNRIHAILFQHGIANASSDLFGAGGRRMLERLALPEPWASTVRASLALIDSLDEQIDACALELRELGADHRYIPLLMTCPGIGWALAFTIASEIGDISRFASPRKLVGYTGLCPRVDQSGERDRRGPLRKNGPNYLRWALVEAAHTAARHHPPYATIRERMQARHGKKRGTKIAAIEIARRLAEANWHMLTTNTPFTPAGAPASLAA

SEQ ID NO: 464369 - protein, 324 aa, unidentified
MSDSILGIDVSKETLDAYCARGQRKQGRTFANSPDGWKLVRAWLKAVGSKQAHVCMEATGRHSLGVALALHEAGHVVSVVNPAQIRDFARTKLGRNKTDKVDAALICEYAELFKPEPWTPPSPAMRRLCELQTMRAGIIRSRAEWKNRIGSGLGDSTATKLAAATIDHFTSQLEAIDRAIGETIKQDAELRGRCDLLLSVIGVGETLAASLMAEMPEPGVLRRSGEMVAYAGLNPSHHRSGTSIDRPTRISKIGNATLRSSLYMPALSAMRFNPAVAILVARLKSAGRLKPKQIVVAAMRKLLVLCFGVLKTGKRFDLAIAMPA

SEQ ID NO: 464370 - protein, 402 aa, unidentified
MNCVGIDVSKGKSMIAVMRPFGEVVISPFEVLHTDSELSKLAGLLKSLDGETRVVMESTGNYHAPVAWLLHDAGLYVSVVNAMLVHDYGNNSLRRVKTDKKDAVKLANYGLDHWLTLPRYVPEEDTRLMLKTCYRQYQQYSKVQTMLKNNLISLLDTAFPDANRLFTSPPRADGSEKWVDFVAAFWHCECVCGLSEKAFTAKYQKWCKKHGYNFSKDKALDIYASSCGHFGVMPKTDTAKLLVEQAVSQLRATSAALAALKQEMQSLAASLPEYPVVMEMFGVGPTLGPQLMAEIGDVRRFHSKKALVAFAGIDAPPYQSGQIDVRSRSISKRGSASLRRTLFLVMSVILQHAPMNEPVYQFMNKKRSEGKPYRVYMIASANKFLRIYYASVKAYLDSLEHD

SEQ ID NO: 464371 - protein, 343 aa, unidentified
MNYYVGLDVSLEQTAMCVLGEDGGVVLERSVASHPDDIGACLADLDGTIMRVGFEAGPLAPWLYSGLAERGLPVFCIEVRQMKAFAKASPVKTDRRDARPIAQAIRTGLFKATHVKTDYSQRIRLLLRHRQSMVRRNKDLINTVRGTLKAFGIRTGGGKNTLYARRVREAIDDPVLLAMTEPLLAAYEDGLRTLAAIDKMVLDIVKKDAICLLLMTMPGVGPVTALTFRTGVDVPWRFDSSRLVAAVFGLTPRVHASGEMEQVGRISKCGDAMVRAMLYEAANVMMTRCKADNWLKSWALGIARRRGARKAKVALARRLAVVLHRMWSNETEFSIERPAAMNS

SEQ ID NO: 464372 - protein, 388 aa, unidentified
MHVYVGVDIAKELHYAAIMDSDGVVSKPFSFENNDKGFNLLLSHLAPYNKESILIGFESTAHYQENLAYFLKSLGYRTAEINLLQTAALRKANIRNTKTDSVDARLICLALMNHHIQGDQRDSARLDDLYQLCKMRMDTMKKRTTCKIQFVAIMDRIFPELASFFDNNLHTNTIYRLIDSFPLPSQIKKTRIDILTKLLHKASKGHFKKEKAQKLKNLADISVGIPSDIFAFQAQQLVHQIEFYTDQIQTIEERINTNPDVMSSPLMTIPGIGTFCVACILSAIKNINDFDAPCKILAYAGLDPVIRQSGKFTASHTRMSKRGNSLLRYALVWSAGNVVKNNHTFAEYYRHKTEDQGKSHYQALGHCAKKLVKSIYHMLKYNESFNLD

SEQ ID NO: 464373 - protein, 349 aa, unidentified
MFYVGVDYHKRYSVATVLDSGGVMLARQRLDNRLDDFRDFLAPYDKAEVEAVVEATRSWGIPVDILEQLADRVVLANPGEVKLIAKARISTDKVDSLSLARLLRMDWVPEAYLRPKANREQQLILRLRCFLVQLRTRVKNRIHDLIDRQDESVREMTTGFSDLFGKKGMTWLRGLELGHPSGKLLGQLLAVYDALDKEVRQSDRLVAELFAVDDDCKLLVKTPGIGVFFAVLIKTEVGSIERFTNSSRFNSYAGVVPSTESSGGKVWHGRIIKQSNCWLRWALVEAVIPATVADAGLRAHYEYYRRTKGSKVAKVITARRLGCIVYRVLKERKPYFEQPVPRRGYRQTG

SEQ ID NO: 464374 - protein, 391 aa, unidentified
MVCVGIDVAKDKHDCCILDSDGTIRADCITIPNNMDGFKQLLQTIRDCTKKSDKIKVGLEATGHYSYNILGFLLDNDLAVYVMNPLHTNLYRKSLSLRKTKTDRVDARTIATMLLSDVDLKSYTDTAYHNEELKSLTRYRFDKVRERAKLKQSVSRLVTILFPELEKLVPSLHIASVYALLSEYPGAKQISEIHLTKLTNLLATASKGRYGKDKAIQIRDAARTSIGSVMPAKFLELKHTIKLIRELTSEIDEIEVSIQKIMDELNPPILSIPGVGIQSAAMILAEIGDFSNFESPDKILAYAGCSPSTYQSGKLTNCYAHMEKRGSRYLRYALYNATKYVCHWNPVFSEYLAKKRAEGKHYNVALSHAAKKLVRLIYALQKSGKAYLVAA

SEQ ID NO: 464375 - protein, 336 aa, unidentified
MNGSIERWVGIDVAKSKLDVAMLDEHGKLKSHVFVNDAKGHAALMAWLRQRGSSQQQIRVCMEATGCYGEALAISLVDAGWCVSVVNPARIKGFAQSELVRNKTDRADAALLARFGQALRPAPWVAPSLEVRQLRALVDRLHSLKEMHQQEANRLEAAMNQTGMRESIESHMQWMQASISQLERQIDDHIDGHPQLREDAKLITSIPGVGNTTAAKVMAYLGDVRRFKNAKALAAFIGVTPRLKLSGSSIRGRSMISRSGHAAIRHALYMPALVALKHNPIVKIFGERLKNGGMAPKAVVAACMHKLVHLIYGILKSRTAFNANFVVVQLDSKDGI

SEQ ID NO: 464376 - protein, 374 aa, unidentified
MEHFAGLDVGTHLTSLCVVDAKGDIVFEAEIATDPDLLAKALKKWRTSLRRVGHEAGSMAPWLHGALEARGLKVVCLEAFHARQAMKAQRNKTDRNDARGIAHLVRAGWYRSVHIKSDESYRLRFLLGQRSLMVRKRVDVENSIRQSLKTFGLRMGVCNKHGFEDRVRDLVGDDPLLSGLVEAMLRVRTVLLAEIARLHKLVLAVVLKDELCRRYMEIPGVGPITALIFKATIDDPARFKNAKLVGAYFGLTPKRWQSGETIDRQGRISKMGDKDVRRCLFEAAHIMLTKYRGKTAIKTWGLKLAKAKGHHKATIAVARRLAMAMWAMWRDGTHFDLGAEPHAAKPAPNEKGKAWPRTTPPALPAPKARKLLPA

SEQ ID NO: 464377 - protein, 331 aa, unidentified
MFPVGIDVSKNTLDLCMLYDGIKGRIKTRNIQNNRHSVENILRWLRLQHCGPEDVHVVMEATGVYHERLATELHDAGFQVSLANPHRSREFARGMGIMTKTDKVDAYMLACYAFLKKPHCWEPPAPEIRYLGALLRRRDVLLGDALREENRLEKYLSTDTPADIISSCRRMAQLLREEVSNIERQIKAHIKASPALRRDYTLLTSIKSVGPQLGMHMLVVLRSHNFVSAEQAAAFLGVVPIEKRSGTSVRSRPRMSKIGPPQLRAKLYMSALCGKIYNKRMRNIYDEMCLRGKPKMVAIGALMRKLVHWCYGVLKTGTVFNDEGLKPVLST

SEQ ID NO: 464378 - protein, 395 aa, unidentified
MYSLWVGIDVSKDFFATAGINSEGKESFSRSYSMDSNGFDDFLKTITSHCEDLSKVIVAMESTGCYHINLFSFLTSEGIRTMVVNPLLIANFAKLSLRKTKTDKKDAMTIARFLMDHHEEVSHLSLSQDHQDLRDLSRERESLCHLMAATKVEIKRLLRTVFPELGSIGDLYTRVMLRFIQEFPSARLVRAAKPKAITKALKQPYVGNKLMYSAEDILRAANTSIGTVSPAKEIILQGKIATLLHLQERLDEMTKLLTDLCKATRIDDLKILRSIKGVGPKTAAPFLAEMGEVQKYTFHKKLIAFTGIDPSLHQSGQYIGMSKLSKRGNRHFRRAVYLMTAAVVSKNPFFKAYFLRRKREGLPPQKALFATAHKLLRVIFAMLSNRTYFKAKEAI

SEQ ID NO: 464379 - protein, 365 aa, unidentified
MQTTQGEYPVKYVGIDVHKKYCQAAVLGEDGELLDQIRFLNKKEEIKDFALKLLTFRDDVKAVVESTGNLWIQIYDILEKFGIEVSLSNPGKTRLIAEAKNKTDKIDAKILAQLLRADMLFTCYVPGPDIRNRREFLRARMDFVKNKTQIKNRIHGILDKHGLRFPGTPFTKKSIVWLREQDLGFMDNAVIKGQIVILETLDEQIRILEDKIAAKGMEDPQVRLLMTMPGIGFFTASMLVAEIGDINRFSNDKKISSWAGLAPRISQSGQKIHIGRVGRGNKRVAGLLVQCAHNARRFDPRFKRFYDRYSKRRGHGKALVAVAHEMIRIIYFMLRDNEPYRGQNVELTTRKLKRMESRAKIGLQI

SEQ ID NO: 464380 - protein, 348 aa, unidentified
MEHYAGIDVSLEQSSVCVVDASGKIVREDKVASDPQALMAWFGLLGFDLTRIGLEAGPLSQWLYAAMREAGLAVELLETRHVRDAFKAMPVKSDRNDARGIAQLMRLGWFRPVHCKSMAAQEVRAVLTARKLIQAKLHDIENGLRGILRGFGLKVGKTTARSFAGRIRELVAGQANLELVARGLLAARAVLLREFNGFDKRVRMMAREHVQARLLMTTPAVGPIVALTYACAIDDPARFKSSKQTGAHFGLTPKKYQSGQTDYSGRISKIGDAAVREALYQAAHIMLTMPVKGCSQLKGWAMRIARRAGLRKAKVALARKLAVIMHRMLADAKAFNPAATTKLVAAAA

SEQ ID NO: 464381 - protein, 461 aa, unidentified
MRKARRWRRKPGKKIVDVTAGLEVLRPHAAGIDVGNAEHYVAVPPGRSDPSVQTFGSFTADLHRLAHWLQACHIESVVMQATGVYWMALYQVLESYGFQVYVVNAKYTKTLPGRKTDVLECQWLQKLHTFGLLNNSFLPPEEIRVLRTYLRQRENLVAAAGTCIQQMQKVLTEMNVQLANVLSDLSGTTGMAIVQAILEGQRDPQRLAALADPRVQASRKEIAQSLEGHWREDLLFVLQQVHDLYFTYLESITACDRRIEAHLKTLEAKADVAAQPLPPMPRLPRRKHIPQTNLREELYRVTGVDLTRIDGIQVQTAQVVISEVGVDMTRWPDEHHFASWLGLCPNNRITGGKVIGRGTKKVLNRAATALRLAAQSLHRSKSYLGAKYRRLRARLDGPVAITAMAHLLARLIYRLLRYGTQYHDKGVEHYERKYRETQMKWLKKQAAQLNMQLIPAPGVAK

SEQ ID NO: 464382 - protein, 436 aa, unidentified
MGRKRDRYLQVVHPHCAGIDIGAKEHFVAVDPQACETPVRHFGCFTDELEAMGRWLLECGVTTVAMESTGVYWIPVYELLERMGLEVHLVDSRASRRISGRKSDVLDCQWLWQLMSYGLLRSAFRPADAVCELRAYVRQHGRIVAERARTVQHMHKALTQMNIQVHTVLSDMTGKTGMRILRAIDAGERDGATLARFRDPRVKASTETLARSLQGNWRDEHLFSLHQALQSYDLHCQQLTECERAIARTTAKLATGEVLDDLDEGSCAKHIGDAVQQLLGVDLTAIPTIGPDTALLIASELGPDLSRFESMAHFCSWLNVAPPTNISGGKKLPGRSKQRSANRVGQALLRCAVNARNSKTFIGAGHRARLRRLDKPRAVKATAHHLARLIYAMHTKGEEYVERGMQAHDEVRKQRELKALTSRAEKHGYTLVAKAC

SEQ ID NO: 464383 - protein, 389 aa, unidentified
MRAVFGIDVSKASSEVAILVNGEKVHGYTMSNDALGFARLLGDLRTVHKPEIIFEATGVYSRPYTRLNPLEAKKQLDSLRVRKTDQIDAEKLAQSQFVLSRKPTYVQEEVYQNLRALSRFYQNLTEDIVRAKNRLHKVLQVTFPELETILSTPSGEQYWNLVIAFPCKDFVLELSKDKLSESIRQSTSKRISDKRVAYLAEKLIGLANQSYCAVKKNSPMLEEVRYYTKELLRLSEQRQTVLDQMVELAQPLPEYDILLSIPGIAETTATSIIGELGDIRRFQSANQINAFIGIDLRHYESGNFLAKEHITKRGNPYARKILFKCIHNIASASHTNPCHIADFYEKRKRQSQTTSTKPHTIASIHRLIRTMYYLITHNKLYDYRSTRNQ

SEQ ID NO: 464384 - protein, 338 aa, unidentified
MLSIGLDAHERTSSLCILDISGRTVKELTLKGHPRRVLQWLQELDEPFKICFEASTNYGWLYDELKTTAAEVLVAHPGRLRLIFRSRRKNDRIDAARLAKLLYLGELPLVYVPGVDVRAWRGLIEHRQRCVRERTRVKNGIRALLRTHGIQMPSRLQLWTRKGRTWLAELDMPTTVAVLRRDQFLDDLAHHDRKTHRLETMLEMIGNRHSGIALLRTIPGVGMRTAEAFLAYVDDPQRFRGRSIGAYLGIVPRQDASGGVNRLGRITREGPATVRQMLAEATWQAVRRSRTVRLRFERICQGRPDRRKTALIATAHYLARVMIAMLNTGEAWREEVTA

SEQ ID NO: 464385 - protein, 344 aa, unidentified
MEITTIGLDLAKSVFQVHGVDATGQVVVRKSLRRAQMLPFFARLRPCLVGMEACGTSHYWARELIKFGHEVRLMPPAYVKPYVKRGKTDAADAEAVCEAVIRPTMRFVPVKSPEQQAALSMHRTRDLLVKQRTQLVNMIRGLLAEFGVDIPKGLERALLVARRIVDGEAPDVPMEAAKIVGTLSQQALDIHVRLREIDRDLLVWQRSNDVARRLMTIPGIGPVGATALAASVTDPHQFRSGRQFAAWLGLTPLQKSSGGKERLGRITKMGDKYLRKLLIVGMTSLVRRARYNPKTVDPRLADLLARKPVRVATVAMANKTARTVWAIMARGEAYRAGHRPALTA

SEQ ID NO: 464386 - protein, 404 aa, unidentified
MKKNIKVEPKPAKAMKESKEPREATITESRKKVGVEIKPESETFWIGLDLGDVESTYCVLNQAAEIVSRGKVKTREADLKRVLGGYEGSQLAMEVGTHSGWVSRSLEGEGIEVVVANARKVRLITASQHKSDEKDAEDLARLLKADPKLLSPIVHRSEAAQKDLLRIRGRAGIVEARTKLINMARGLAKTMGKRLGACDADQMGTKQVEGWEAELAEILGPVLALIECCTLTMQTYDEKIKENSEEKYPETKRLTQVPGVGTLTATTFVLTLGDKNRIKQSRQVGPLLGMTPARRQSSESDPELRISKEGDRYLRTLLVQGAQWIMSGRGPDCELKRFGQKIAGIDPAQPGMKKDKQSRKRKKIAVVAVARKLGVLLHRLWVSGEKYDPFYATKRKGKTKTEAA

SEQ ID NO: 464387 - protein, 402 aa, unidentified
MNAVGIDVSKGKSMVAIMRPFGEIVSAPFEIKHTASDINSLVELINSVEGESRIVMEHTGRYYEVLAHQLSEANLFVSAINPKLIKDFDNDSLRKVKSDKADSVKIARYALDKWQNLKQYNVMDELRNQLKTMNRQFGFYMKHKTAMKNNLIGILDQTYPGVNTYFDSPARSDGSQKWVDFASTYWHVDCVRKMSLNAFIDHYQNWCKRKKYNFSQSKAEEIYGKAKELVPVLPKDAITKLIIKQAVDQLNSASTTVESLRTLMNETASKLPEYPVVMAMKGVGTSLGPQLMAEIGDVSRFTHKSAITAFAGVDPGVNESGTYEQKSVPTSKRGSADLRKTLFQVMDVLIKTHPQDDPVYQFLDKKRAQGKPYYVYMTAGANKFLRIYYGRVKEYLSSLPES

SEQ ID NO: 464388 - protein, 360 aa, unidentified
MAKIKSVLTPSVVGGVDTHKDLHVAAVVDENNRVLGSKFFATTRQGYRQMLTWMTSFGTVARIGVECTGSYGAGLLRYLQNAGITVLEVTAPDKMERRRRGKSDTIDAESAAHAAFSFIRTVTPKTRSGMIEALRVLKVCRKTAVAARRIALQMIQMNIVSAPDELRDQIRSLTRMQLIRTLVAWRPDVTAYRNVQDAYRIALKSLARRYLELHDEIADLDIMIASIVDELAPDLIKRNAIGYESASQLLITAGDNPQRLQSESGFAALCGVSPVPVSSGKTNRHRLNRGGDRAANSALHIIAIGRLRTDTKTQEYVAKRVSEGHSKMEALRCLKRYIAREVFTLLRNQNRQINSTQITT

SEQ ID NO: 464389 - protein, 310 aa, unidentified
MIIASGFVGIDVSKHHLDIFDAAVGVAARVANTAAAVAELAHDWARRDAFVLFEATGRYDLDLRHALTAAGVRFARVNPARARDFARAAGFLAKTDAVDAEMLAAMAQCLQLPAEKAGLAARERLAALNRRRDQLVANRQQERTRQRECSDPFSRQSIAAHLAWLDAAIEAIQAQIAAAIAAEPELEHDRRLLSSAPGVGPVTAATLLALMPELGRRSPKQLAALAGLAPFNNDSGTRRGQRSIRGGRKRVRDALYVAAFVAARHAPRFKAFFKTLFEAGKPRKLALIAVARKLLIVLNAILRDRQPFHA

SEQ ID NO: 464390 - protein, 322 aa, unidentified
MIFVGIDISKLTFDVAVLIDGKYMSRQFENKQSGFLKLSQWIKSFKKPAYFCLEATGIYGLALAKHLYQNNQKVIVANPLQTHAFTKMEMARNKTDKADAMSIARYCQYLFNRGEIDKGLFIPRSPAFERVQFLVTRLDQLSKMKSQENNRSGVSLDKAAASSIESMLTFIDKQIVVIKKEITMIIKQDEQLTAQLKLLVSINGIGDKTAWALLAYIGDISLFENSKQISSYAGLNPSIDQSGTSLNRSSLSKTGSTRLRKSLYMPAMVAVRYNPLMLAFYNKLLTKGKPKKVALIAVMRKLLVLAFGVLKSGKPFDINYQH

SEQ ID NO: 464391 - protein, 488 aa, unidentified
MKSQPSKRARKDKKQGKEASNNPTLVKWNEMNRKQRREMMRKVQSEDLSLQVVHPHAAGIDIGNESHYVAVPPSRDPQPVRCFGCTTAELKTMAQWLTQCGIRTVAMQSTGVYWIAVYDILEEAGMEVYLVNARETKNLPGRKTDVQESQWLMKLHTYGLLRNSFRPSREIRTLRTYWRQRHDLVRSTGRHIQRMQKALTRMNIQLANVISDISGVTGQTILKAILDGQRDPRELAAYRDCRVEASEEEIVQALEGNWQEDQLFVLRQEQAGYEFCQKQITECDQQLAQYLARLEDRTQGATLPEETRKGRRKKKKGNPQFNLRQELFRMTGTDLTQIDGIDVMTAMTMVSEVGWDMSKWKTENHFVSWLKLSPDNKISGGKIIGKARMPTNNRATTVLRMAATTLRESDSYLGAQFRRFRTRLGPPVATKAMAAKLARLIYRMLRYGMKYVNQGAEFYEAQHRKQQVIHLKRKAAQLGLQVIEVAAA

SEQ ID NO: 464392 - protein, 317 aa, unidentified
MEQRQSSTKVAGIDVGKRWLDIAVHGLEDELRVENDAAGISALVAWLKAREVGRVGLEATGGYERGVRAALDGAGFEVVVHQPLEVRRFAQLKRWRAKNDRLDARLIAAATAQVEAVKAAQDPRLVELAERLTAYEQITDQIVELKTFLESITLKDLAALLRTQIRSLERAKAKLSLDILRRIKAEADLLARFRLLTSLPGIGAIVAASLVIRMPELGQMNRGQAASLIGVAPFDRDSGQWKGLRFIAGGRARPRRMLYLAAVTAKRFDPSLKAFAERLLARGKPKKLVTVAVMRKLIEAANLVLGRGQPWLQQPAT

SEQ ID NO: 464393 - protein, 464 aa, unidentified
MSKTLGVDVACRAAHQGSLAVDGRLIWTGRRFFTRPADLERLWADLDLEDPAELTVVVEPTRNAWIVVAAWFRRRGAKVVMVPTTQSADLRAYYSKHAKNDRLDSALLARLPLLHPEGLREFTGDGPADPLRRLTKQRSSIVKRRTAVLQRLDALLELLGPAWYEVLGSNYGKAALMLLARYGDPHALIRLGQARLARFLARHSRGWWKDDHATRLIAAARESLELWGSGGIDFAELAADIAIEAEQAQMLTEQIEDLDERIANLYQDADPDGFVASAPGVGPVTSAIIAGRIGDPHRFKSLAAIRAYSGLVPKVSQSGVVETRGGITKAGDPLLREALFAAADAARKTDPQLAAKYARLMATDRHHESAICHIATTLLTRIAASWRAGEHYALRNTDGRIITPEQGRQIVRDNHKVDPKIRDTAAHRRMAQRQKNRTSREQKKSQSAPASRPVPTRIEPADVA

SEQ ID NO: 464394 - protein, 415 aa, unidentified
MVQMELLHSRCCGLDVHKDSIVACVRIVRDAQHVEDHMGTFPTTTAGILKLGDWLAEQEVPIAAMEATGVYWKPVWNLLEDQLQLMLVNPRHIKQVPGRKTDVKDAQWIAQLLSCGLLKASFVAERPLRELRDLTRTRTSLQADKSRVANRLQKQLEDANIKLGSVATDVLGASGRDMIRALIAGRMSPPEMADLARYRLRAKIPQLTEALRGGVNAHHRFMLQMLLEEVEHLEGQVEKLDRRIEEVMSPLQRKAVKVLDEIPGLDRRAAENVTAEIGTDMSRFPTAGHLAKWAGLCPGNYESAGKRRTGRMSQGNRWLKAALNQCAWAASRKKDSYFFAQHRRIASRRGVKRATMAVAHTQLCLCWELLKYGKSYQDLGSDYFDKLNVDRVKRKLVQRLESLGYAVTIQKIVAA

SEQ ID NO: 464395 - protein, 452 aa, unidentified
MSKRKRSKAVSLPIVEANAAGIDIGATQIFVAVPADRDVESIRCFDTFTADLERLADWLEQCQIRTVAMESTGVYWIPLFQILEERKIEACLVNAQHLKNVPGRKKTDVEDCQWIQHLHSVGLLHGSFRPDQEICAIRSLWRHRDNLIQLATIHLQHMQKALDQMNLQIHHVISDLAGTTGLAIVDAILAGERDLAKLAQLRDWRIRASEETIMKSLVGDYREEHLFTLRQSLQSYRHYQHLIQEVDGQVKQMMRRLPGRVDIGEKQLPKEKNPRKTPWRNEPPQLREDLYRTFGVDLTQIPGINTLTAQMLLTEIGPDLSCFPTAPAFCSWLRLCPEPKISGGKVLSSKTRPTKNRAALALRMAAQGLHRSQTFLGDYFRRMKARLGTPKAITAAAHKLARIVYHMITTHQEYDTTVFQELERRVQDRKRMKLRAQARALGFELVPREAVP

SEQ ID NO: 464396 - protein, 329 aa, unidentified
MIVIGLDVSKNRLDAAVKRPGTHKWYDRKVAHSKAGVHELVERLCDKLDATPDQLRVVMEATGPYHEKAAHWLYDLGCTPCIANPKRVRDFAKAMGLFNKTDRADARALCLFGAQTRLPAWTPPPPEVATLRALINRLSVLENELGRETNRREKAQAGRMAAPVLESIDRCIASLNEEIRRIKDQIDDHFDQHPDLKRDKALLASIPGIGQTSARHLLCLLADRDFTSARQAAAFAGLAVVHFESGSSVRGKPHLSKQGSSKLRAALYMAAVASLRHNRALKMFYERLRQRGKPALSALGAVMRKLVHIAFGVFKHKTPYDPAIASQIA

SEQ ID NO: 464397 - protein, 407 aa, unidentified
MIFVGDDWSEDHHDICVLDEQGHRLARRQLPEGVAGVSALHELLAGLAESPAEVAVAIETDRGLWVAALVAAGYTVYAPNPKAVARYRERYGGGSGAKSDAADAKVLAELARTDRHNHRPVAGDSPGAQGVKVIARAHQRLVWARRRQVNALRATLREFYPAALVAFGEDLAHPDALAVLAKAPAPELGRRLSAAQAAAALRRAGRQRGVEARAKEIAQALRTEQLNPPEELSGAYGVVVSSTAMVLAEMNRQLERLEGELASHLAAHPDAEIVRSQPGLGTILGARVLGEFGDDPDRYADARARKNYAGTSPITVASGKRKVVKARYVGNDHRKDACYLWAFAALSASPGARRYYDTLRGDRHFAHDAALRALGNRLVGILDGCLRHRALYDEQIAWGHRQAEKAA

SEQ ID NO: 464398 - protein, 316 aa, unidentified
MPQSECLIGIDVSKAQLDLAVRPSGTRWSSPNDESGIRATVARVAELRPTLVVLEATGGLELPVVGALAAEGLPVVVVNPRQVRDFAKATGQLAKTDALDAAILARFGEAVRPTPRPLPDAATQALAALLARRRQLLEMLVAEQNRLGTAPRPIRTEIQTHIRWLERRVAQVDTDLTHTIRTSPVWREKDRLLQSVPGVGPVLSTTLLAALPELGTLTQRQLAALVGVAPLNRDSGTLRGKRTIWGGRAVVRQALYMGALVAARYNPVIRAFYQRLCATGKPKKVALVACMHKLLTILNAMLKHHTPWSIHHVQPS

SEQ ID NO: 464399 - protein, 343 aa, unidentified
MNIVRIGLDLAKYVFHLYGVDERGKVVLRKTLRRPGVAPFFANLPRCVVGMEASNGAHYWAKTLSEFGHDVRLISPQFVTPYVKSSKNDRNDAEAICEAVGRPNMRFVSVKSAEQLAIQAVHRIRIRLVASRVRLVNQIRGLLGEHGVVVAQTIGNLRRALPRIIDDEANGLNSIVRALIGELREELSNLDGRITIYDRKIINLYRMSEACQRLGEVEGIGPITATALVAAAGDGKCFKNGRQFAAWIGLVPKQRSSGGRSRLLGISKRGDRYLRTLLIHGARAALGRTRGKQDPRSLWLLKMRERRHANVVAVALANKNARIAWGLLASGMNYDQHLTVSSA

SEQ ID NO: 464400 - protein, 343 aa, unidentified
MKRYYYIGLDIHKKIIAYCVKAIDGSLIDQGKIGADRQSLEAWVKDLPGPWIGAMEATIFTGWVYDFLKPHAVALKVAHPAMLKAITVAKKKNDKADAETIADLLRVNLLPECHMLSEDIRELRRILRYRNHIVRTAVKMQNKMSGLLMEVGASYSKKRLHGKKYFCELLERADEIPSSVKELLKLSRSSYEMFRSFQKRLVAGLHTNELIRDRVQHLMTIPGVGEITALTWVLEIGEPERLSSIRKAISYCGLCSAQKESAGKEQRGPISKKRNKHLQTMLIEAAKLAPYWNEQLAIVHERESKKGNKNRATLAVARRLVAYMLAVDKKGADFTHPVATHAA

SEQ ID NO: 464401 - protein, 407 aa, unidentified
MELVALYKRVIGLDIHQAQITACALIEEPDGSARIEQRQFGAFKRDRRELADWVSSLRPDEVVMESTGIYWKSPYAALEAIGIRAKVVNARHVKNVPGRKTDVGDAHWLATLARAGLLRGSFVPSAKLRELRLIARQRQKLVGQLASEKNRLHKVLTDSGVRLGVVVSDLHGQSARAMVKAIIAGQSPQEVLKLASRRLKASREEIFDALQGDLTASHRFVLDELMRHIEEIEARIARFDTRLLAELESERDALALLQTIPGVDLIGAAMLLVEIGTDMESFGSADRLASWVGICPGNNESAGKRKSGHLRKGNLYVRRLLCEFAHAASRTTSVFKSKFQSLVVRRGHKRAIIAIGHKILRTIFFMLKRREHYRDSATDYEALSVQRNAPRWIKSLTKFGFINPANA

SEQ ID NO: 464402 - protein, 396 aa, unidentified
MWTLGIDVAKRRHNATLLDEEGNAVFRNVSFAHSREGLDAFLDRLAGTGQAPPGVLVGMEATGHYWMVLFQGLSQAGYPVRVINPIVTAARRNVTIRGTKTDAVDSFLIARVLREENPKVSAIPDQDVQRLRDLTRLRFECAQAALAEKQRLVALLDLVFPEYAEHFSDLFGAASREVLAEFPRAEDLAKVDIRRLTRLLRQASRGRLGRPKAEQLKKAARASFALTGNTDGLALEVRFVVERLNLLLEQIAQLDRRFAPLLPADQQLVQSVPGFGPVWAPTVLAEVLPVFHPELQHGAKKFVAAAGLDVRLHDSGESRGKGKMSKRGSQDLRTAVMQAADVAVFLAKDPLFKGIYDRQKARGKHHTVALSHVAHKMLHVIFSVLKNQRPYTPMLN

SEQ ID NO: 464403 - protein, 386 aa, unidentified
MHQATTFPAPERTCSRGDRAILFVSLELSRSTWVATALAPGSTKMSKYTLVGGDGHKLLELLARLKTRAEQRIAAPVKVVTIHEVELDGFWIHRLLEANGVESHVVDPASIAVPRRHRRAKTDAIDGETLLRTLMAWQRGEPRVCAMTVPPNPSEEDRRRISRERAKLLQERVRHTNRIRGLLFGQGITNYNPLHKNRRKNLEQLRTGDGRSVPAHLKSAILREIDRLELVLRQIGEVETERDEMLQLTQPSSPAALLMRLKGIGAEFASVLYLEGLFRRFENRRQLAAYAGLTPSPWKSGSIDQEQGISKTGNPRLRTTMVELAWMWVRYQPASALSCWFRQRVGSKRGRIRRISIVALARKLLIALARYLSHGEIPAGAVMTAG

SEQ ID NO: 464404 - protein, 315 aa, unidentified
MAMPVSAIKPIVGVDVAKSELVIYQAELDLLETLPNNKPAIKKWLKALPAPVDVAIESTNIYHLEFADLAHEAGCTIYMVGGYELSHYRKGVKVRAKTDALDAKLLARYLKNEYEELHPWIPPSPLYRCLLSLFRRRAALVQARVGLVQSWTNEPLLKAAFAEQVASMQRLEGLVEKMINDRLKEAGLLAQLKRCMKVEGIGFLTGARLIAAFQRGDFRNADAFIAFLGMDLRVSQSGQKDGRRSLTKRGDPEARRLLHNAAMSASRTAAWKGFYQEQRAKGFSTTQALVILARKLARIVFALLKGQGEYQPKAG

SEQ ID NO: 464405 - protein, 368 aa, unidentified
MGEITRVMAARVGADLAKSVIQVDGVDAAGRRVVAKALRREQFLPWCAQLPPGCIVAMEACSSAHHWARKLRALGLDARLIAPNFVSPYRMEGKSGKNDATDAAAICEAASRPNMRFVPIKSGEQQGLMSLHRVREGFKEERTACINRIRGVLAEFGLVFGKSPKALRSVLADVLEDASNELSTQARWVLQRAFEHWRELDEHLRWCDRQVGAHVRSDPAAKRAVRITGIGELGASALVAGVGEFKQFRSADQFGAWVGLVPRQNSSGGKTSLGRITKRGDDYLRTLLIQGAKSAVMSAHKRDDPTSRWLVQLRERVGWQKACVAMANKNARIVWAVMTREHGFDPQHVSVKPPAKQPSAQSLSCGAA

SEQ ID NO: 464406 - protein, 326 aa, unidentified
MEAHPVGIDVSAKELVVTSDRSRDARFDNDAAGHKKLIRFLTKGRRAARVVLEATGVYSLDLALALHRAPRIEVMVANPRAVANFAKAYLQRSKTDPLDAEVLLEFARRMPFTPWVPPAPEHLDLRALSRRIAALTKTAQQEKNRLHAVSQCSEVTPLVRRDIEVNIRHLERRIERLRHQALALIEEHAPLQGAFEHLVSIKGIADASAISILGEIATLPADMTVRQWVAHAGLDPRHVQSGSSIHKPARISKAGNKYLRAALYMPALVAIQHEPNVAAFYDKLVARGKTKMQANIAVMRKLLHAIFGMLKNGANFDGEKFYAINT

SEQ ID NO: 464407 - protein, 470 aa, unidentified
MNDRRLVGIDLGIATAHTVRVLDGEGSIVAKRKAWPTAESLAAVETAALAGCPEGTRLEVVIEPTGPAWLPIAVFFTRRGHQVFRVSSQKAADLRRFLSRHAKSNGIDADTLARLLLFDPAGLRPLALPGAALAALDRRVRATDRLTRAGAEHKRRIKDLARQLLPMTPLTGELGAADLAVLERYADPRAPATAGQARLTTLITKASHGHQGAGRARQWLDAARASLELYASHPAVDFTGLAAEVATEVRLLRAISAELAAHAAERETRYHAVDPAALARSLPGLADIGGPALAACMGDPARFRGGKQFRSFTGLAPKASETGETDRKGQPMSKAGSALLRTTMVRAADNARKQDPQLARIYCLQMTERGKDHIGALCVTAAHLAERAWTTMRRGTPYVICDTDGQPVTPAQAKKIITERWTVPPEVRARRRSKKTGKAPQKVLAGQYARGDLPRGTTPPHSQQPVKPST

SEQ ID NO: 464408 - protein, 423 aa, unidentified
MMKLKYSICCGLDVHKNVIVATIVTTNKDGISEYLQKSFSTINSDIQRFHNWLIENNCYHVCMESTGKYWIPIFNYLENDIDVCLTHPKYVKAIKGKKTDKKDSKWIADLYKFDLVRCSFIPPKDFRQLRELSRYRFKLVCMKSSEKNRIQNCMTISNVGIASVLSDPFGKTATEIMSYLLEHTADSMDEKAVRKLIKKGAKAKSDEIIEAIKGYNIETDQAKKLELAQGHLEYLDDMITQTEVELYVRIKPYYEFVEFVSTMPGMTELSSAIVLAETGVDMDIFDDAKHLCSWCGLSPANNESAGKKKSVRIAKAGDYLKPMMVQCALAAIKSKKQPYFAIKYGRIKKRRGHKKAIIAIARMMMVCIYHMVSEKKPFTPTDYEELMDPQNHVESVVLNENNVFAYLESLGYDSSKLVKRNDN

SEQ ID NO: 464409 - protein, 415 aa, unidentified
MRVHRNCCGLDVHKKIIAACLIKEGADGNSVYEKRLFGSMTGDLHELAQWLCAAQVTAVAMEATGVYWMPVWNVLEPYGLQLLLINPEHYKAVRGKKTDLKDGKRIAELLQDGRLEGSYVPAVAIRVLRDLTRYRTKLVQYQSAIANRIPRLLEQCNIKLASVASDVLGVSAIAMLGALAEGETDAVRMAEMAKKQLRKKIPQLQLALEGYVLPHHRWLLREMIEHLDHVGDKITRIQETIEQQMRPFQSAVDRWVTVPGIKHRLAWTLVAEVGPSVEAFSSAADIVSWAGVCPGNNQTGGKRKSGTTRAGNPWLRRALCEAAWAASKTKGTYLQAQFRRLAALRGPKRALIAVANSILTAGYYMLQRATTYQDLGPDYFDKRNTIRATRRLVKRLEALGHRVILPPSFNSDPSS

SEQ ID NO: 464410 - protein, 318 aa, unidentified
MTPTPARFVGIDVSKSTLDVHVRPDATAHQFANTDAGCRALIEWLTPLAPSLVVLEATGGYEGTVVAHLSLAGLLLSVVNPKRVRDFAKALGRLAKTDAIDAAVLAEFAEVVRPPVRPLPDANAKRLQAILARRGQLIGMRTAETNRLGGETDAFTRASIAAVLRTVGRLIGRVDRELDTAIRSCPAWAAKDDLLQSIPGIGPVVSRTLLAEMPELGTLTRGEVAALAGVAPMNRDSGQQRGKRRIAGGRAAVRSVLYLASQAARQGNKQWRAFSDRLKAAGKAPKVIRIALARKLLIVANAVLRSGQAFREIEPKIA

SEQ ID NO: 464411 - protein, 388 aa, unidentified
MQTVADRPEAPTAIRTDLGAIFVSLELSRSTWLITSLSPGGGEKMSKQVVRGGDVAGLLERFARLREKARARTGKVFPFVVIQEAGLDGFWIDRALQNEGIESHVVDPASIATSRRRRRAKTDGIDGEVLVRALLAYKRGEPRVCAMIKAPTPGEEDRRRLCRERKVLIVERVRHVNRVKGLLFSQGISGYEPLRRDRRRRLDTLQTGDGRLLPVHLKAQVCRELDRLELLLEQIKAVEAERDVLLAAQQVAAPAPAAMLLDIKGIGPEFAAILWSEGLFRHFDNRRQVASYAGLAPTPWQSGSVDREQGVSKAGNPRLRTTLIQLAWLWLRHQPHSALALWFEERVRRNGGRLKKTTIVALARKLLVALWKYATAGVVIEGAVMKRT

SEQ ID NO: 464412 - protein, 451 aa, unidentified
MTKSKRRNPERDFTPTHPHAAAIDIGSRMHVAAVPPDRDPEPVRAFGTCTGDLQQLADWFERCGVRTVAMESTGVYWIPAYELLEQRGFEVVLVNARDAKHVPGRKTDVSDAQWLRRLHEYGLLRASFRPKGELAALRAYLRQRERLLDYAASHIQHMQKALMQMNVQLHHVVTDIMGETGMRIIRAVVAGERDPAVLAAHRDRRCHASKAEIAAALAGNWREEHVFALGQALELYDAYHAKVVECDLQVEAVLQRLRDAAAKPVDRLPPARHRDKTANAPAFDARAALHAVLGVDLTQIHGLGPSLALKLIGECGTDLSAWPNAKHFTSWLCLAPANKISGGKVLSTRTRRSGSRAAALLRLAAVTVGRTQTALGAFYRRLSARVGKAKAVTATARKIAALFYNTLRHGINYADPGASYYEDRYRARVLANLRRRAKSLGYMLNEAPAPV

SEQ ID NO: 464413 - protein, 352 aa, unidentified
MIVLGADTHKRSHSIAAVAATTGELLDELTVQVGQRGFDALLRWARALDGERVWALEDCRHVSGSFERFLIGRGERVLRIPTHLSAGARKSARQRGKSDPIDAIGVARVALQEGLESFPVAHLDGPELDLRLLVDHRERLVRQRVALNSTLQWHLHDLWPELELPGSSLFYDRWAPRVARRLARAEQTMRVRIARDELRRIRELSQAIKALEREIASLVAAIAPQLLSEPGFGPLTAAKLVGEIAGAQRFATPAKLARAAGVAPIPASSGNTQRQRLDQGGNRQINAALHRVIVTRARCHPATRDYIARRQAEGKSTREAIRCLKRYLARTVWRLLQPSHPVQGTPPSPSTS

SEQ ID NO: 464414 - protein, 415 aa, unidentified
MRTGEKARKIERYIALDIHKEYVLAGGMNAAQEWTLPPRRIAMGKFREWSTANLREGDAVVLETTTNVWDIYDIVAPLASRTVVAHAGAVRQIAEARVKTDKEDVKRLIRLLIADIVPEVWVPPTHVRELRGMISYRNRLVKTGTMVRNRLHSLLHRHNLSLPEEGLANQEWWDRQALSALEKIQIHQEIALLEQINQHKAEVDAELGRQCLGEVWGKSAMRLLQLSGFGVIITMTILSAIGDIFRFESSNKLVGYSGLGAGVHDSGKEHIEKRITKSGRKELRWAMVEAAWCAIRISPYWKEQYEKYLRRMRKPNQAIVVIARKLLVAVWHVLTKEETDAHASEEDLAYKMLVLAWDLDEDVRMGLTYKQFAKYALLKLGVENDITRFVRKDVPRRLAPREEVLARMAELGIPA

SEQ ID NO: 464415 - protein, 331 aa, unidentified
MVIVGIDVSKDSLDVAMEGANAKRCYERRLNNDVGGFKRLLSWVEERTGTPAHEFTVMMEATGVYHEAAALALHEAGCRVFVANPKRVRDYASGLGLLNKTDRVDARALVRYGREKVSELAAWEPPAPEIRALRALYARLSAVMTDLRRELNRQEQAQLSGQPEAVLESMRQSVEHLREDCERLKQAIEDHFDQHPNLKNQRDLLQSIPGVGPVSADRMLCLLLRHSFASARQAAAFAGLVPRMHESGSSVRKRARLTKQGDASLKATLYMAAVVGARHNPQLCHVYQSLLKAGKSKMSALSALMRRMIHIAYGMLKHNTTYNPNLFTAMT

SEQ ID NO: 464416 - protein, 344 aa, unidentified
MYKADRTRRRVVVHGVFISMSTMAYLGIDVAKRKVDVALLRPDGKVRSKAVLNTTAGAAELLAWVARYHEGPVHACLEATGTYGLALAEALADAGYVVSLVNPARIAAYARSRLTRSKTDAVDARLIAGFCAKETPPRWVPPSPEIRALQAWVRRLDALDQMRTQELNRLAAEPADAAVRASIQHVVDLLEDEMQTLRARIHDHFDAHPGLRAQRDLLTSIPGIGQATAAVLLAEFGGLTQFRQAAACAAYAGLVPQHRESGTSVRHKPVLSKLGVPLLRKALFYPAMVALRFNPIIVAFGERLRQKGKHKMVVIGAAMHKLVHLAYGVLKTGKAFDPKYRLVP

SEQ ID NO: 464417 - protein, 349 aa, unidentified
MLADELDYIVGVDTHLNEHVLAVLAAPAGAVLAKQAVPANARGYREALRFVEEHADGQRAWAVEGAGHYGAGLARFLAGRGEPVLEVSRSPRAERRLRGKDDSLDAIRAARALLSSETLALPRAGQRREALRLLLLARRSAVDVRREALVQLRSVIVTAPDRLRDDLRGLPVGRLLERCRRLRRSRCASADELATRLVLRSLARRIEAATAEAGELEAEILGHVRALAPTLLDEPGVGSIVAAQVIIAWSHPGRIRSEAAFARLAGVAPIPASSGQTTRHRLSRGGDRQLNRALHTVILHRRLHDPATKTYIERRVAEGKSRREATRLLKRYLARHLYRVLDNQASLMT

SEQ ID NO: 464418 - protein, 346 aa, unidentified
MSNSVVAFAPCGIEVSHLTLPVAWRGHDHDEPLREFPNTREGHQALLRLLKRGARPVCVALELTGLYGLDLALALHQAGVAVMVANPRAVRHFAQALLQRSKNDQLDAAVLCEFAARMPLQAWRPPSAAALKRVAVTRRLEALTDMMAAEKNRAHAASLSEALPALIRRDIQRSIQTQQRAIDRLTRTAQEFLLAHPKLARRYELLLFIPGFGATSAVHILAELTLLPADMDVRQWVAYAGLDPREYTSGTSVHKKVRISKAGNKHLRRALYMPALVAVQHQPQVRAFYEHLLARGKTKMQALVATMRKLLHAIFGMFKHDQLFDGQKVYAALDVSVPTPQEVLCP

SEQ ID NO: 464419 - protein, 408 aa, unidentified
MNPLYVGIDVSSKNNVIYLMLPNGDKHSSFSLANSHDGSTQLVKRIFTAMTSNNIDSVLIGLEATSVYGDNLVYFLKEDTTLASFDRKIHVLNPKQVNKFKESYNDLPKNDYVDAFVIADCLRFGRINKEVYMDDYRYKALQNLTRARYFAVTNLTKEKQRFINVLFKKYSTMTQEKVFSDTFSTTALAVYEKFESAETLAKMDLQELTAFIMEKGKNRFPDPDAVAKALQKAARSSYRLPKTVNDSVNQVLAISITSIRALESQIKAFDKAITKQMELLPNVLISIPGIGPVLSAGIMAEIGDINRFQNQAALAKYAGLAWQQHQSGNFESQTTRMIHSGNRFLKYYLCEAAFSLVRCDKEYSRFYHLKYKEVNRFQHKRALALTARKFVRLVFALLKDNRLYRPAE

SEQ ID NO: 464420 - protein, 410 aa, unidentified
MKMAGIDVHKKVLMVVVVETSALQEKPARRRFVTLPSELQRFRIWLQEQGVEEAVMESTAQYWRSVWLELEPHMSLHLAQAFSNRAPRGRKHDFKDAERLVRRLMADELILSFVPKGEQRIWRSLTRMKLQLTRDRVRLQNQMECLLEEMRIKLSIVVSNLLGASGLRILHALAQGETDPKRLAELGDERLHCTEEQLVDALTGRVQPMHRGMLALQLQRLQLIDQQMAQLNSMIAQAMKSHQDAVIRLAEVPGLGVDSAQQIIAEVGAQASTFSSAAELTAWVGTCPGKEESAEQNHSSRSAKGNKYLRRVLNQAAHAAVAKKGSYFQVVFRRLMPRLGYKSAIWAIAHRLCRVVWKILHEGVRYIEQGRDVGPREKKQRAQMLARALRKLGYEVTITPINELAPKPAI

SEQ ID NO: 464421 - protein, 370 aa, unidentified
MLDTTTFIGLDVHARSIKAVSLDVMTGEVRAATFGYDAGAVAEWVRSVDPRARCVYESGVTGFDLQKRLSGLGVDCVVGAVSKMIKPSADRRRKNDRNDAEFLARMLSVGNVVEVWVPDDECEAARDLTRALEDARDDLSRAKQRLSKFLLRHGLAFDERTPTGRRKGNWTRAHWSWIESIRFAEGADNDVLAYYVDAVRRAAEEKARLEGLVEAEARKPRWRRRVDSLRCLKGVDTATAADLVFEAGEFSRFGNARSFAAWVGLTPSEHSSGESDRRGAITKAGNKHLRKALVEAAWHYLTCSGRPKDLAKGQAPDRGARRHAAKGVRRLVERREALLARGVHGNKANVATARELACWVWAVGLMAEEA

SEQ ID NO: 464422 - protein, 337 aa, unidentified
MKIFIGVDLHKKTQTWAGIGLSGPEKLFIREFQVTPEGVSSAVEFVKGKYGDDVDISLSIEPCCGWMWVVKQLKENKIDVHITNPRKVRAIADSLQKTDENDAHTLALLLRTGMLHESRIIDPETQKLRSLVRERSFCVRLRASVKCRLEGIVTREGRHLITGSLSSKKGKDQITKSNHPEWLTHIGIIQDLDKHIDVLEKELIKKSKELPVSKLLQTIPGVGHITALTIISEVGDFKQFSKPEKLCAFSGLVPTERSSGGVQRLGHITHAGSKHLRYILVEAAMHIREDNSKTLYNFYKKIKEKSGAMRARVALARKILTISWYMVTRNESYKIII

SEQ ID NO: 464423 - protein, 338 aa, unidentified
MVFKRIAIDTSKHVFTIHGVDEQEQPILRRELKRGQVESFFSKLARTEVVLEACGGSHHWGRLFQKMGHDVRLIPPQYVKPFVKRSKNDRNDAEAISEAASRPGMRSVMVKTVDQQAQGIILKHRAMLVSQRTQAINALRGHAMEFGVVVAKGSAKVAPLLAVLAADTAIPVVAREMFEQMGAHIEVLESRIAVLDAELMALHKANPVSRALAEIPGIGTMIAATMALTVEPENFVSGRHFAAWLGLTPREKSTGGKQRLGKISKAGNERLRTLLVVGATSVIRFAKPGSKSASAWLLQLLERKPRKLAAVALANKMARIIWAMMARGEAYRRQPIAA

SEQ ID NO: 464424 - protein, 416 aa, unidentified
MKKHINSRKNSELTSKRAKSRGSVERDTKEVLAELVGKLKEKLDRKKVAARSAGEEHPGGELRPNLDRLTVGVDLGDQGSHYCILGLEGETLAEGQLRTTQEDLATFFQGLNAARVVVEVGTHSAWVQEVISGCGHEVLVANPRLMDGSKRRKRKNDRIDANKLARLGRVDPESLHPIQPRSREVRQDLVMLRARDALVAARTELINTTRGLVKSMGTRLPKCSSRSFAQKGEETVPVEIREALLPLVRLAAALSADIKEYDKKIETLGREKYGHTALLRQVKGVGPITALAYVLTLENPQRFVKSRDVGPYLGLVPKQEDSGESQPQLGISKAGDTMVRKLLVGSAQYILGPFGPDTDLRRYGLRLCERGGKNAKKRAAIAVARKLAVLLHRLWVSGEVYEPLHNAMSAPIAAAA

SEQ ID NO: 464425 - protein, 311 aa, unidentified
MTKHTIGVDVSKDTLDAHRHPDGDVHRFANDRAGHKALIAWIGGNVGRVVFEPTGPYHGALERALADAGLPIVKVNPRQARRFAEATGKLAKTDRLDAAMLARMGAVLELEVRPVQGAALAELKELHIAREALVKDRTAAKNRSKHLGLRLLKRQNADRLKHIERQIVAIEAEIEQRIKADTEMSKRFDILTSIPGIARLTAFVLLIEMPELGNLEPGQAASLSGLAPIARQSGRWTGKAFIKGGRANVRQALYMPALVACRFNPDFKAKYKQLTEAGKPAKVAITAIMRKIVVLANALLKAGRSWMPKEA

SEQ ID NO: 464426 - protein, 340 aa, unidentified
MHATTYGLDVAKRVFQMYWVDGDTGEIVNRRFGRNDLIQYLSRRPPGRVALEACGSAHWWAREIKALGHEVVLLHAKFIRPFVQTNKTDAADARAIWTAVQQPGMRTVAAKTEEQQAMLSLHRIRSLLVKFRTMQVNQLRGLMYEFGVSFRAGRVAGLAEVRARMADLDEVLPGMMMCCLQDQLARIDGLQTEIDQIEHRIAAWQKQDAACSAIAAVPGIGKLTATALVATMGDAATFKSGREFAAFLGLIPRQSGTGGKVRLGSISKRGDPYLRTLLIHGARSVLYHTKVPTTWASAIKERRPANVAAVAIASKMARTAWAILARGQAYQRDHISVRPA

SEQ ID NO: 464427 - protein, 364 aa, unidentified
MHRVAHSVDAVVGGDTHVDTTSLCVVSPVGAMLAEITIDNDEDGYAQAVTWVLQSVPSERFLVGLEGTRSYGAGLCRALQAVGIRVVEVERPSRGERGRRGKSDTGDAVLAANKVLAMPPDRVPAPRAGDGVREALRLLTVDREQMTTQRTRLVNQLYADLLTGNAEQHALRKKDLTSGTLRKLAGARGRSGRPIDEQARLVVLRRKAQDIVRLDQQIRENERQLNTILDEVAPQLLEQVGVGPVVAAQLIVSYSHHGRCRSEAAFAALAGVSPIEASSGRITRHRLNRGGDRRLNRALHVVAVTRVKHDPRTRAYIQRRSKDLTDREIRRMLKRYITRDLYGVLRTIDALHPKRTTSTVTPAA

SEQ ID NO: 464428 - protein, 339 aa, unidentified
MQQDITTVGLDLAKSVFQVHAINADGEVLVRRQLRRAEVLRFFSSLPPCLVGMEACASAHHWGRELLALGHDVRLMPPAYVKPYVKRGKTDAADAEAICEAVTRPTMRFVAVKSVEQQAVLMLHKTRDLLVRQRTALINALRAHLSEYGIVTGKGPGGVTALMKHLHEGQEKLPAHARSALHTIGAQLRSLACEISRLEAQILAWHRADDTSRRLATIPGIGPITASAIAAAVPDASLFRSGRQFAAWLGLTPRPHSSGGKERLAGISKQGDGYLRKLLVVGATAVMRMARKDPSRQPWLAQLLGRKPVKIATVGLANKTARIAWAVMSRKEVYAASAA

SEQ ID NO: 464429 - protein, 447 aa, unidentified
MMSTKQKQKLDVVNPHSCGIDIGSRSHYVAIGQGKDDVQEFGVYTEDHRKLIEFLKTHHIKTIAMESTGTYWQTLFTSLQVAGFDVILVCGNQTKNVKGRKTDVQDCQWIQKLHSLGLLSNSFLPSEFVAQLRIYSRQRQKYIKIQTRIINQMQRDLRQMNIRLEIALRDITGKSGMAIIEAILNGERDANNLASLVDYRVKKSKEEIAKSLEGNWSEGYLFVLRQHYQEYKSNLILVQECEMAIEQILKERMIDNEIDITEFKGQLKAKKKNKNTPSIDLQQYSYQYFGGVDLFAIEGVNQNTVLTLISEVGSDIDKFPTAKAFASWLHLSPNQKVSGGRVLSNGTKRGANPLSQALKSSANVIGNMKIGFLNTFFKRISYKNGRKEAIAATARKLAVIIWNMLKYYQPYKPQNTEIVEGKIRMRKIKEIKKLFNKYQIQVNDIAI

SEQ ID NO: 464430 - protein, 372 aa, unidentified
MGHDSEAFIGIDTSKSGNAVAIAEGGRGGEVRYLGEFPATEAGTHKLVAKFAAKYNKLTFCYEAGPTGYGLYRRIKSLDHECVVVAPSLTPKKPGERVKTNRRDAVSLARLLRAGELTAVWVPDERHEAMRDLSRARQAAKKDLQGKRQQVSSLMLRLGRCYPGKKTWGPAHMTWLRSQKLQQREQRTVLEELLEGVRQEGERMERLEQAIREAVPEWLLAELVTAVQAMRGFDLIAAVGVVAETGDLSRFQKPREFMGYLGLVPSESSTGDRVNRGGITKAGNGRARRLLVEAAWAYRHPARVGRVKQAKVAAAPRRVREIAWKAQTRLCRRFRLLERKGKRRPVVATAIARELAAFIWAINREVMQGRQA

SEQ ID NO: 464431 - protein, 340 aa, unidentified
MNSTQVAVDLAKSVFQVAVSSTPGRIDEQHRLSRARFGRFFAAHEPVEVLMEACGSAHHWGRELTALGHTVLLLPPSDVRRYRDGDKTDRADTKAILEAARNEAIDAVPVKTLDQQAITALHRLRSGYLATRTARINWVRGLLREFGVAIPVGARHLAPRARAAIDDGAVPAYLEPVLLDAITEVDELRRKAKDIERHLKHLAKHMPEATLLMSVPGIGVLTATALVAYVGDVGRFRSARHFAAYLGLTPREHSSGLSRRLGRISKRGNSYLRMLLIHGARSVLRAAKLTEQPDALRAWALGIEHRNGHNVAAVALANKLARITWRVWRDHRPFEQRLAV

SEQ ID NO: 464432 - protein, 390 aa, unidentified
MVQVNDLSRSLAEFDPISTLVVVVEMSKASWLVAGTVPGVERQPLKKLEPDATALLRLIERWRNEAVRAGRPIRRIALAYEAGRDGFWLARWLVSRGIEVHVIHSASVAVSRERKRAKTDRLDAAMLMRVFLGWLRGERGHCGMVAIPTIEEEDARRPSRERESLVNERSRIINRMKSALARLGIRGFKAHLRKAPERLAALRTPEGRGLPTNTIEEFRRDMARLALVREQITSIEKTRAERLERAPDTGAHAMVRLLARVIGIGIETADMLVQEILSRTLRDRRALARYAGLTGSPDESGMRSREKGLAKTGNARVRRGLIQLAWRFLIFQKDSALARWYRTRTEGPNGARKTTMIVALARKLLIALWRLVTTGEIPDGVELRPAAAMV

SEQ ID NO: 464433 - protein, 346 aa, unidentified
MEHYVGLDVSLKLTAICIVDRTGKIEREGVVASEPEIIAAFIKSYAPNVVRIGLETGPTSTWLWTELNKMGLPVICIDARHAKAALKLQINKSDRNDAAGIARIMQCGWYKEVRVKDLDSHAIKALLVSRALLVKIKRDIENQIRGLLKNLGLVIGQAKMNVFSVRAAELAQARPELAAAVEPLLKAREAIGQQIADLDRKVMRLARNDAQVRRFMTTPGVGPVTALCFLATIDDPTRFKRSRSVGAYAGLTTRRYACGETDWTGRISKCGDKMLRSYLYEAANVLLTRVAKWSALKAWGVRLAKRSGLRKAKVAVARKLAVILHRMWIEGSEFNWSSKQAANQAA

SEQ ID NO: 464434 - protein, 321 aa, unidentified
MEAVWIGIDVSQEWLDVAIWPGAARCRVANEAEAVVAVAARLQTLNPRAVVLEATGGAEVLAASELHAAGLPVAVVNPRQVREFARSLGALGKTDRKDALVLAQFAQAAESNGRLTLLRLVDEAELELQALVGRRRQLMGMLVAETNRRLRAPKRVRKSIVQHIKALKRAVAEVEQELKQTLANAPAQQAKATLLSAVPGVGPHLSFTLLAELPELGQLGRRQIASLVGVAPHPWDSGKFKGRRTIWGGRAHVRTMLYMAALSAVRHNPPLRSHYQALLARGKAKKLALVACMRKLLITLNAILRDAAPWNPNHLAFQHSR

SEQ ID NO: 464435 - protein, 377 aa, unidentified
MSKVRFVGLDVHAATIAVAVAEPGGEVRSLGIIPNRLESIRKLIGKLGSVKDLKVCYEAGPTGYVLYWQLTQLGVACEVIAPTLVPTKAGDRIKTDRRDAEKLARCYRAGDLTPVWVPDAAHEALRDVVRAREAAKKDQLRARHRLSKFLLRHGRRAPEGTKAWTKKHLEWIKTYVHFDQPALEAAFADYIQEVDHCADRILRLEKAIAEAVEQAPPSMRAVIEALQALRGVAQTTAATIVSELGALSRFESPRQLMGYSGLVSREHSSGTHIQRGSITKTGNAHLRRVVVEASWAYQHRPNVTGFLLRRQKNLALDEGTKQIAWKAQYRLHNRYKKLAGRGKNKNQIITALGRELLGFVWAIAVKIEQQQQFAQAA

SEQ ID NO: 464436 - protein, 358 aa, unidentified
MKILAIDLGKSKSVACVYSVETAESRFHKVGTIPGQLHELILKVRPDRIVIEVCSAAGWVADLVGTIGIELQVANTAAPAWRWSNTKRKTDRDDALRLAQLSALEQLPRVTIPKRDVRQWRALIRYRHHLVRRRTQLRNRIRALFDREGLTLPTGKQCWTNAGIAMLREWARSLDEAPDQELWRGELACELEILQMAELLIARVETKLDRLAEANTACQLLQSIPGVGPRLAEIVVAVLDDASRFQKGKQVGSYAGLTPRQYQSGDCDRQGRISHQGNPLLRSLLVEVSWVGLQHNPWMRAVYEQVRRGSPSRKKIAIVAVARRLLIRCWAMLRDGVPWRPPNTEPIPSRTCGVVGAH

SEQ ID NO: 464437 - protein, 341 aa, unidentified
MDKVSTIGLDIAKHVFQVHGVNAVGAVVVRRKLRRDDIAGFFRALPPCLIGIEACATGHHWARVLMALGHEVRLMPASYVKPYVKRQKNDATDAEAICEAVARPTMRFVSVKSEEQQSVLMLHRVRELLIRQRTMLVNALRGHLAEFGIVTRQGIVGVGMLITLIEDEGHNLIPPLARSALLSLTGQLREVHEKVGEMDRQIHAWHRSNELSRRLETIPGIGPITASAIAATVTDASLFKSGRQLAAWIGLVPRQNSSGGKDRLGRISKQGDPYLRRLLVVGAHAVLRFSRKAKVAPTRWAAELLAKKPYNVVAVALANKMARIVWALMTTGKRFEAAAVL

SEQ ID NO: 464438 - protein, 349 aa, unidentified
MNNTITIGMDLGDKSHIAVVFDEEGNELNISKVINNKKALTKFFEPYRNANVAIEAGTHSPWISRLLGEMGITVYVGNPRKLRCIWDSTDKSDERDARMLGMVCRLDPRLLHPLRHRGSQAQADLAMIKSRDILVKNRNQLINHARGLVKANGDRLPKCSSESFVKRCEAHMPPELRPALAPVFDSISNLTQQIKDLDQKIDQLSKERYPETQYLRQVPGVGPVTALTFVLTIEDPARFSKSRQIGPFLGLTPRRDQSGETDKQLPITKAGDEYLRQLLVGCAHYIMGPFGPDSHLRRHGLKVASRGGKNAKKRAVVAVARKLSVLLYKLWITEQAYDPFYDMNKKQAA

SEQ ID NO: 464439 - protein, 408 aa, unidentified
MELLHPRCAGIDVHKAQLLVCVRVVEGRTARKDVREFGTTTGELLRLSEWLVREGVTHVAMEATGSYWKPVWHVLEGTVELLLANPRDVKAVPGRKSDVLDCQWLADLHAHGLIRSSLVPPAPIQDLRDLTRTRKQLVRERGRHVQRIHKTLEDANLKLASVITDIMGTSGRSILEAIAAGESDPASLARLGSSRLHASEAELRDALQGRVQAHHRFMLRLHLTQIAGLDAAIHSLEARVEECLTPFRAVSERLATIPGVSATTAAVLVAETGADMSRFPSAGHLVSWAGLCSRLDESAGKPRSRRTRPGQWLKTTLVQAAWAAVKRKDSYFYAKFLRLRRRRGDKKAIVAVAAAMLTAAYHIMRDETEYQDLGADYFHRFDRAKLATHLIRRLQQLGFDVEAHPTAA

SEQ ID NO: 464440 - protein, 346 aa, unidentified
MEHFAGLDVSVKETSVCIVDETGKIVREVRVASEPDALLEVLKSHAYRFNRIGLEAGPLSQWLFSALAEVGVPVVCVETRHMRAVLKAQINKTDRNDARGIAQMMRVGLYRPVHVKTLRSQKLRMLLTHRKLLQSKAIAIENDLRGTLRNFGLKVGMVGTVKFEARIGELVENVPDLAALVEPLLVVRRAIREQIAILHRRLLAIVRDDEVCRRLMTIPGVGPVVALTYRSTVDVPARFRNSKAVGAVFGLTPAQYQSGEIDRTGAISRCGDEMMRVMLYEAAHIMLVRSTKWSWLKAWAMQIARRRGMKKAIVALARRLAVIMHRIWVDGTEFRWTREQPAAAGA

SEQ ID NO: 464441 - protein, 336 aa, unidentified
MEKTSFKETVGIDVSKDVLDVTLHLAKLHHQFSNNLKGFRELLKWIKAHSGYPLEQVLICFEHTGIYSLPLATFLSENKISYVMESSLQIKRSLGIARGKNDKIDSRRIAQYAYMRRDSLKIYQLPSASLQKLQQLLSLRERLVKQRSGFKSALKSQKQMLTRKNNPLIFSVQEKMIEQLSIQIKAIEKEMKSIIEADPELKSIYKLVISVKGIGFIIGTHLLVNTQCFTKFENARQYACYCGVAPFEHSSGKSIRGKTRVSHFANKKMKYLFDLAAQTAIQNDPELKYYYESRVEKGKSKRSVLNAVRNKLIHRVFAVVKRGTPFVPLFRPNVAA

SEQ ID NO: 464442 - protein, 443 aa, unidentified
MSRKKHTHLRGERGQAFADKIRGIPLEQILCVSLDIHKYFHVVMLHNALGEIVTTTFEIDIFQAGFDQLCRAIDEAVARTNAQVVLVGMEPTGHYFENLARHLHQRPQPVTLINSFAVSRNREQQMMRREKDDEIDVAAVGDLLRRGEGTPFQPVSGIYLEMQHLSRVRLSRVKIQTALKNQIIGHLDRLFPGLVIQGQVARERYEPLFVADFWSCQTLQHLIRVCPDPRQLATMAPEDLRAAFHAHSFALGVKTAARIITYSQKVLLSDPEVIAIRRELLAHDLALLAEVERLIAELEDRLHALLQQTPYWVWTKVRGLSLTQVASLAAAIGDPSHYTYAAQVFRRSGLVSGRNDSGTRRHKGKGKRVVKTGDVYLRRALMTAIMSLIRHQPVLQDYFNELHRTKHAGVARVATARRAIGILWAMQRDQHSRTLVLKRGAKM

SEQ ID NO: 464443 - protein, 320 aa, unidentified
MEAVLGIDIAKAKFDVALQFSDGRVRRKSVPNTPAGFTALGAWLTQQLVTRVHACLEATGSYGEALATWLHDAGHRVSVVNPMTIHAFAASRLSRTKTDRTDAALIAQFCATQHPAAWQPAPREIRELQALIRRLEALQDMRIQETNRLSSGAVTPAVVRSLETVIATLSDEITAVQQQIRDHFTQHPGLRAQRDLLTSIPGIGDSTAAVLLAELFDKQYRSARQAAAFAGVVPRIAESGTLKRRGRLSKIGPSRLRKALYFPALAGLRFNPSLQALRTRLRAKGKVPMVIVGAAMRKLIHLAYGVLKSQRPYDLTIVRA

SEQ ID NO: 464444 - protein, 358 aa, unidentified
MEIQVLRPIIRGSMVIWILGLILKLNIMNRQNFCYFIGIDISKKVFDVAIIIDERTTSYVFENSKKGTNAFIRLLKNQKILLDNTLICMEHTGVYGKLIITKLVEKQANFCVEMPIQITKSIGLLRGKNDKVDAQRIAQYASKNFRKLELYKPIPEILEKVRILLKIRKQLVNARADFNKYPNELELFSPEMGKLAKKNLKKINKTLCDEIKRVEAEIKKLILSDDKLNKTVGLVTSVTGIGQITALHFTVFTSFFTRYDNPKQLACYCGVVPFEYTSGSSINRKSRIHPMANRTLKKHLHMSALAAINHDPDIREYYLRKVEEGKTKMLIVNNVRNKLVHRICAVIKRQQPYVKNVA

SEQ ID NO: 464445 - protein, 333 aa, unidentified
MENIALIGIDLGKNSFHIHCQDHRGKAVYRKKFTRPKLIEFLATCPATTIAMEACGGSHFMARKLEELGHFPKLISPQFVRPFVKSNKNDFVDAEAICEAASRPSMRFVQPRTESQQAMRALHRVRESTVQDKVKTTNQMHAFLLEFGISVPRGAAVISRLSTLLEDSSLPLYLSQLLLKLQQHYHYLVEQIKDLESQLKRKLDEDEVGQRLLSIPCVGTLTASTISTEIGDGKQYASSRDFAAATGLVPRQYSTGGRTTLLEISKRGNKRSELCWFSVRGIHTKLEHQSGKLADWVRELLCRKSNFVVTCALANKLARIARALTARQQTYEA

SEQ ID NO: 464446 - protein, 393 aa, unidentified
MLAITQSPHPAANSEPIRVYVSLELSKSLWLVTSMSPGNGRKTSTYRLPARNIGKLLRLFAKLQMKARRRTGAEDDYEIVVIHEAGMDGFWISRSLEEAGIKCHVVDPASIPVPRRYRKVKTDRVDGEVLLRTLITHELEWPRVCSMVRVPTVEQEDEREISRHHEELVEKRSACVTRIKSMLMRHGIADYEPSRKDRWEEFKKLRTSKGHELPKETKFRITQALKELEFHIEQLRETDDERDAIIAAKIAAAAAAGRPSPIEMLSKIHGIGRRSAFLLWTEGLFRHFDNRRQLASYAGLTPTPWKSGSINHVQGVSKSGNPRMRKTLIQLAWLWLRNQPHSPMTRWFHDRVAANKGRGKRTLIVAVARKLIVALWRYVNFGEVIEGAIMRHA

SEQ ID NO: 464447 - protein, 385 aa, unidentified
MQKRHDDSKACLTAFLQDNTVIAVIEMGLASWLVAGLLPGVNREPLKKIAPDPEVLLRLLYRWRDEAIKAGKEITRIAVAYETGRDGFWLARWLRDRGIDAYVIHATSVAISREHRRAKTDRIDTAMLKRGFLGWLRGERGHCSMALIPTIAEEDAKRPHRERESLVKERTRTINRMKAILAQFGVRNFKPALRKAAEKIAEVRTPEKVPLPPNAAAALRRHIEHFRLTNEQIKAIEKIRLQRLRQNPTDKFNAMVFLLVRIIGLGVETAEQLVHEILFRNLRDRKAVARYSGLTGSPDESGARHREKGLSRSGNERVRKILIQLSWRMLRFQPNSGLVRWFKARTASSRRSRKPMIVAFARKLIIALWRYANTGLVPEGFQLAK

SEQ ID NO: 464448 - protein, 370 aa, unidentified
MNEIIRIGMDTSKSVFQLHGVNGAEQPMLCKKLRRRAVLGFFAKLAPTTVGLEACGGAHYWARELKALGHEAVLLPPQYVKPYVQRGKNDAADAEAICEAMSRPRMRFVPVKTAEQTAAQMLIGMRDQLIRRRTQLTNAIRGYAAEFGLTAAKGLSHIEPLLLRIENNDGLPALAKELFATLGQEYARLKVQIREIEAKLSAWHRENELSRRLAEVPTIGPIGACLLAIKVTDPHAFRSGRDFAAWVGLTPKDHSTAGKQRLGAITRAGDEALRQVLVVGATAVVQQVRRGRGHPSPWLVEIVKRKPPKLAAVALANKNARIVWKLMVSGERYNPHLTAKHFAPPTGRVAPCSHRQGRFAPPSAVALGQP

SEQ ID NO: 464449 - protein, 419 aa, unidentified
MQSIKQVPEGYLVVGIDPHKKKHAAVAITQDFTTQAKYKFDNTKEGLETMLGWAKAEMVKSGCRGVIFAIETGGHYWRNIAYFLDKRGIPSRFINAFTLKRRREGKDLNRRKNDYRDSEVAAQLLCTGEFTESKLLQGAYAELRAGHNAYRRLVKERTRITNLLKGLLDGLFPEFTQVFKDPCALTAMSVLSTRPIPSVIAGMTEDEFVATIEAKHQGRRLMRRKLRALHYSARTSIGIVAGARSVASEISFLAEKLEVIRRHIAIIEMTLVELVDETEEGKYLLSIRGLNYIAVAGLLAELGPFKSYRNAKQMIKMAGSNPTESESAGKKGTHTPMSRKGRPGLRYCAWTSVIPMLRLNSDFRAWAKQMRERPVHANPLGGREVVGAALNKLLRLAFALVKNQTYYLIPKPELSLVAV

SEQ ID NO: 464450 - protein, 416 aa, unidentified
MDVIVARCAGLDVHKNTVMACVRAPGPDGGRISTVRRFGTFTDALRQLRAWLVAEGVTQVAMEATGVYWKPVWHVLEAVPEFELLLANAHAVKNMPGRKTDVADAEWLALLCECGLLRPSFVPPPVIAELRDLTRYRKKLIEERSRETQRIQKLLEDAGIKLDSVVSDILGVSARQMLEALIAGVRDVEALAELAQTRMRPKIPQLRRALEGRFGAHHALMLQMHLDHVDQLSAAITRLDVEVDRVIRPFSAQLQRLITIPGVGRRTAEVIIAEVGVDMRRFATAGHLASWAGMCPGNHESGGKRRSGRARKGNQALRAALCEAAWAAAHGKTGYLPAQYRHLMRTFGKKGQTRAVFAVGHSILVIAWHLLANDCDYTDLGAEHFTRNADPEARKHYLIRQLEALGHKVTVEPAAA

SEQ ID NO: 464451 - protein, 337 aa, unidentified
MEQYVGLDVSQETTSISVRQDGRRVWRGKCPTDPKALSEVIRKHAPHAVRVVFETGALATWLYHVLQAENLPVVCIDARHAKAALDMAPNKTDANDADGLAQIAEIGFYREVRVKGYGPMLTRTLVGARSQLLRISVQLSNQIRGIMKTFGLIVPKGAGRIFERNARALLETNEAVARVVLPLLETWRVVRARAAELDRQLIAAARTGPSYRLLMTIPGVGATTAVSFVAAIGVPENFKRSRAVGAWLGLTTRRYQSGETDYDGHISRRGDRYLRALVYEAAVAVLTRTRTDCALRSWGLKLKAKVGFKRAAIAVARKLSVIMHTMLKTGAAFAAAA

SEQ ID NO: 464452 - protein, 369 aa, unidentified
MPHVTSIGLDVHARSVAAAAFNPFTGEVVHRDFGTDAAEIAEWALGFEEPRACYESGPTGFHMARELRALGLDCAVAAVSKMQRPAADARRKNDRRDAEFIARMLATHNIVEVPLPDAAVEAARDLDRALDDATVEYRRARQRLNMFLIRLGHVWDERNADGTRKKAWTRAHWRWISEIRLEGPQRDALEYYVTAARCAESDRRQLERRVVALAGADRWRPAVEALSCIKGIDTLTAFRLAAEAGSFSRFRSAPAFASWCGLTPSEHSSGESERRGGITKAGNALARTALIESAWHYSMCSPRPKAPAPGTDVPTAVRSRADDCTARLHRRREALARAGKPACKANAAVARELACWVWEIGCRSEGTIL

SEQ ID NO: 464453 - protein, 389 aa, unidentified
MNRIIKIGMDVHSKNYTLCAMEPTIGAEDRIFGEVQVAPDYKEVICFIESLKMKLGFYDEYSIECGYEAGCLGYTLYHQLTGAGVKCVILAPTTMLTQQGKRIKTDKRDARLIAQCLSYGGYHPVYIPTGEDDAVKEYLRMRDDHKLALKKLKQQIHAFVLRHGYQYSGTKWTIKHVTWLKKLELDPMYRETLNEYLASYEEQEAKIERYDKRIEEIASERRYQENVKKLGCFLGIRTHTALSLIVETGDFKRFAKGNTYAAFLGLAPGERSSSDNVNRLGISKAGNTHLRCLLIEAAKGICKGAIGHKSKELRARQSGQPAEIIAYADKANTRLRSKYYKMIRHGKKTNVAVAAVARELACFVWGMMTGNISIRPTTAGTSMPAVRQE

SEQ ID NO: 464454 - protein, 374 aa, unidentified
MARNQSRQRFELVHPHCAGIDIGSREHWVAVDRDHEQPVRSFSTFTDDLIKLADWLETLKIEVVAMEATGVYWIPLFELLDARGFKVYLVNSRATRQISGRKSDVLDCQWIWQLMSHGLLRGAFRPDDAICSMRALIRQRASKVRNQAQTLNRMQKALSQMNIQLANVISDISGVTGMKILRAIIAGERDPAVLAELTDRRIKASKETIARSLHGNWRLEHLHALGQEVECYDFFEQQIGACDKAITDALSQLPEREEAPQPSRKILRSPHRCAADQAALHQSLWRVMGVDLTAIPTIGVDTALIIAGEIGPDLSRFPTMEHFCSWLGVAPPTRISGGRQLSGKSQKTLNNAAQALKQAASNARNDKSFIGCQP

SEQ ID NO: 464455 - protein, 412 aa, unidentified
MQVVYERCCGVDVHKKTVVACVLLTHPDGTVQRQVRTFATMTADLCALADWLTGWGVTHVAMESTGVYWQPVFNVLEDEARTILLVNAQRIKTVPGRKTDVRDAEWLADLLRHGLLSPSFIPPAPIRALRELTRYRKTLVGERTAEINRLHKVLEAANLKLASVASDVLGVSGRDMLAALLDGQQDPAALAELARGKLREKLPELRRALVGRVKPHHLVLISRILAHVDFLEQSIAEVQEEIARSLTPFEEAVTLLDTIPGVGAVTAATIVAEIGVDMSRFPSARHLASWAGLCPGNKQSGGKRLSGKIPKGNRWLRAVLGEVAWSIARAPGTYLHAQYHRIARRRGKNRAIVAVAHSVLVIAYHILKDQRPYSDLGADYFDTLDTARIQRHHVQRLEQLGFTVSLTPKEAA

SEQ ID NO: 464456 - protein, 356 aa, unidentified
MSEKLNSKMAVIGIDIGKNSFHIVGQDRRGALVLRQKWSRGQVEARLANLPPCLIGMEACTGAHHLSRKLQALGHDARLMPAKYVRPYCKGDKNDYRDAEAIAEAVQRPTMKFVATKTADQLDLQALHRVRERLVSQRTGIINQIRAFLLERGIAVRQGLRLLRAELPDILAKRTDVLSPRILRIIEDLSGDWRRLDERIEGLSSEIEALARQDQGCARLMSVPGIGPIISSAMVAAIGTGDPFSKGRDFGAWLGLVPKQMSTGDRTILGNISRRGNRYLRTLFVQAAWVVLVKVGPKQWERYGLKSWIEAAKKRLHHNVLAIALANKLARIAWAVLHNGRAFEYVKTNATVSRSA

SEQ ID NO: 464457 - protein, 347 aa, unidentified
MEKASQAEVQVFVGIDVSARELSVAVQCGIKEGIAITTFRNQAAGHKALLAYLLRAKGRARVCLEASGNYSLDLAFTLQAHPQVEISVVNPRRARRFAESLGERSKTDPVDARVLCEYALRMPWVPWVPPSLAALRLRSITRAIEDLVAMQAQEKNRQHALLASDALPALLIRELEQHLRYLKLRITRLRREALRLIARNPELNRRFHLMLTTPGLGETSSLQILGELAVLPETLDARQWVAFSGLDPKQFSSGTSVEKKPRISRGGNRHLRRALYMPALVATRHEPFMRDFYQRLLRRGKAPLQGVVAVMRKLLHALFAMFRRDEAYDGSKLCPVEFARHTAVVCV

SEQ ID NO: 464458 - protein, 375 aa, unidentified
MIKHSEVFVAFDTSKLRNAVAIAEAGRAGEVRFLGEIENTAGATTKLVRKLGAKYERITFCYEAGPTGYELQRHIHGLGHECIVAAPSLIPKKPGDRVKTNRRDAVSLVKLLRAGELTAVWVPDPRHEAMRDLTRAREAAVIDLRAKRQRVSALLLRQGRSYPADKKTWTKVHMNWLASQRFEQPERGIVFAEMMFATRQAQERVERLEQAIRTAVPDWSLAEMVTAFMAFRGIDLVSATCLLAELGDLTRFPTAPEVMGYLGLGCSEGSTGDRIKRGGITKSGNRRARRTLVECAWSYQHPPRVGIAKQAKVAAAPAKVREIAWKAQCRLNRRYRVLLRRGKLKTVAITAVARELAGFLWAAARELSSPERVAK

SEQ ID NO: 464459 - protein, 348 aa, unidentified
MQVTTVGIDLAKNVFCVHGCDVNGKPVLRKQLARRQLLSFVANLPRCLVAMEACASSHYWAREIEKLGHQVRLIAPSFVRPFVKANKNDASDAEAICEAASRPSMRFVAVKSTAQQDVQAVHRVRQQLVKTRTGLVNQARGLLAEYGIVIARGLAPLRRAIPLILEDRDNRLSGVMRELVGEIGERLRFIDDRLRKYDLTIQRLFRDDERCQRVAAVEGVGPLTATALVAAVGNATDFKSGRELAAYLGLVPRHRASGGRTVLLGISKRGNRYLRTLLIHGARSALYRIERHHGARASWAARLKLRRGANVAAVALANKNARVLWALLSRGQSYRPAPFSARVPQAGG

SEQ ID NO: 464460 - protein, 299 aa, unidentified
MRFYTGQHQHYCGVDLHARTMYLCVLNHAGEVFLERNVRSNPEIFLRTLEPYRDDLVVAAECMFTWYWLADLCARENIPFVLGHALYMKAIHGGKAKNDRIDAHKIAALLRGGMIPQAYVYPPEMRSTRDLLRRRLYLVRKRGQLLAHIQNTHHQCNLPEPTRKIIYKANREGIAEKFIDPSVRKSVEVDFELVAHHDRLIRDLELFLVRSAKQHDPQSFHRLRSVPGLGKILSPTLVYEIHDIHRFPRVQDFASYARLVKCSRQPAGKNLGTGGRKIGNVHLKWAFSEAAVLLAGDGA

SEQ ID NO: 464461 - protein, 312 aa, unidentified
METKFVGIDVSKLTLDFDCLPVSAAQQFANDAAGVAALVVLLQGSGVERVVIEATGGYETAVVSALAAAGLPVVVVNPKQVRDFAKAMGHFAKTDRLDAKVLALFGERIKPALRTIPDETQRALADLLGRRTQLVVMRAQEKARLATVAAVARKNVEQHIAWLDKCIGKLDTDLGDRLRNSPVWCHKATLLDSVPGVGTVTTFSLLAKLPELGTLNRQKISALVGLAPFPDDSGKRQGTRYIRGGRAEVRCVLYMATLSAIKHNPPIKAMYERLTKAGKPFKLAMTACMRKLLTILNAMLKTNQTWKIQTSS

SEQ ID NO: 464462 - protein, 359 aa, unidentified
MSELTFIGLDVHARSVWAGVLDGSTGEVRSCAAPAPTGELVEWLRAQGEALSVAYEAGPTGFGLARACEAAGIPCLVAAPSKIAKAPGERVKTDRRDALRLAKLLRLGELTAVRVPSPAEEGARDLVRAREDARGDLMRARHRLSKLLLRQGLVWEGSAWTQAHERWLFAQHFEARGLQVAYEEGLATLASVRARREALDAAICAEAATEPWAPVVGRLSCLRGVSTLTAFGLATEIGDWERFDGRSIGAYLGLTPSESSSGERRRQGAITKTGNAHARRLLVEAAWHQRRPSSHPSRELARRREGQPALVRERAMAAERRLHRRWRSFDARGKRSTVAAVAVARELAGWCWSLAVMDA

SEQ ID NO: 464463 - protein, 380 aa, unidentified
MPDVSSAAPADVSQWIVFDVHKNSLVAGVLPASGGTPEVSRLENTERAIRRFIEKAGDPGTLAVAYEAGPCGYEIYRLLSGMGVACDVIAPSLTPIRAGDRVKTDRRDAKKLVRLYRAGELGFVAPPSPQQEGLRDLIRCRDDLRCARTAARHRVAKALLRHGHVYREGKKAWTRRHREWLDRQRLGDPLAQLALEQMRAHLDGLDAQIAAIDHELAQIAEREPWSDPVAWLCSFRGIATHTALGLLAEIGDFRRFAHPRELMSYLGLVPSEYSSGDQQHRGHITKTGNRHARRLLVEAAWHYQHPARLSKRLAASQEHVPPQVFARAWQAQVRLHHRHRTLVSHGKRPTVATVAVARELCGFLWAAMTKQPLREEVAAA

SEQ ID NO: 464464 - protein, 317 aa, unidentified
MKDKNVIGIDVAKAKLDVFDSKTGRHTVVANTPEGVDALVRGVAPAKTLVVLEATGGYEGLLVEALERRGVDCAVVNPLHVRHFARGCGMVEKNDKLDARIIARFGEVVRPEPREAPSASEAKLKALVHRRDQALAHLGAERNRLQQTRDPETAEMIRQGVAFYRAQIREVDKRIARVLEQCPQLAAKSRVLQSCPGVGVATTATLLAELPELGRLNRGQVAKLVGVAPIAKDSGQKQGQRKTYAGRSMVRKVLYMAALVATRYNARMQAFYQRLLAKGKAKKSALVAVMRKLVVTLNLMVRNNETWSEPSLAIDKN

SEQ ID NO: 464465 - protein, 366 aa, unidentified
MKKTSTVRVNKNTIFKGHKLTIGLDLGDRWSCYCVLDEAGEIILEQKLPTTPEAMKQTFERIPRSLIALETGTHSPWVSRLLRELGHEALVAHAQKVQLISKSKRKDDRHDARTLARLARIDPELLGPVRHRSAKAQIHLTVIRARAELVSARTALVNAARGLAKSYGQRLPKCGTAQVSRELAAELSVELREALEPLLAEVESLNERIKEYEVRMEKIARESYPQVELLKQVKGVGTQIALTYVLTLEDPYRFPKSREVGCFLGLRPGRRDSGESQPQMHISKEGDPYLRTMLVQGAHYILGPFGEDSDLRRWGLKLAARGGKNAKKRAVVAVARKLAVLLHRLWVSGEVYEPLRNSDKALRAVA

SEQ ID NO: 464466 - protein, 415 aa, unidentified
MKNVDSPKITNGTVIAAMDISKDSFTGYLRCIHNGAERAVRRYAMTNIDLQRFYTEAHEFMQTHECSQIILGFESTGVYHMPAVHYFSQKPIEILQVNTLHVKRMKDITDNSPAKTDEKDPRVIADLIELRRGMQVVIPTGVFLAMRATIHARERVIEHHSAITNQVCDLVHILFPEFHRFFKDIHGKTARMLLRKCALPQQVVALGVEKLASMMFTASRGRYTHEHARKFFAAALSSLGVTDGVEPYVDEIHTQLSFCEALEKAIENYEEKLAVLVQQTPTGRILLSVKGLGSITVAAVLGEYNGFEKFLTIADVLKYAGMDLTECSSGKKKGQRHLSKRGRPLLRKILYLAALNLVREGCAFRARYQAYLNKGKPKMVALIAIARKLLRTIFGMSKTMTEFRTSPVQRYLQAA

SEQ ID NO: 464467 - protein, 338 aa, unidentified
MVYGAIDLHMRHSQVRIVAEDGTVLREARIVTARERFVKEFADFGTMRILLETGTEREWVAQALEAAGHDVIVADPNYAPMYGETKRRIKTDRRDVAALAEANRRGWYRVAHRTSAAQRETKQILRARRWLVQQRSGVVSLVRSLLRQSVYRLGPGICATVPTRVRRLGVTGELAATLQPLCDQVLTLTTAIDALDERLQQRTAPDAIVTRLRSVPGIGSIVATTFRAFVDRHERFTHAGQVSAAIGLVPREDRSAERRHRGHITKAGPRELRSLLIQAAWVCWRHPGSATLRAWVDRLAARRGRRVAVVALARRLSRILFALWRDEAVFDAQKLATA

SEQ ID NO: 464468 - protein, 439 aa, unidentified
MHPKMQYTYVGIDSHRQTHTAVFLNCFYEKLGELVVSSTPSDFEPFFKKAEKFLLPYTTFCFAFEDISLYGRSLVKFLISKEQLIKHTNANLVASERKSRNDLQKTDSVDAECCARVVLSQFEKCPTITKVDDKHWILKTLVAHRQSLSKTGTKLKNQLHQLVFDNYPTYHTFFGHIDTKTALAFFETYPSPAHLKSATLEELTIFILDVSKGSIKADKANHIWESVQNDGVEASEYQNIHDFTIQSAVRQLRSNIQEMADIEEKLENILAYFDYPLTTMKGVDTLTACRLVAEIGDIERFQSPASLARYAGIAPATYSSGETSIQYANKRGNRQLNTIFHQLAIVMISTRGKNKAVINPYFYDYYMKKIGEGKTKKQALKSLQRRLVNIIWGMMKHKEDYINPPIAFVVDDETGEIIEDETINDNQKAHLMKLQSTFK

SEQ ID NO: 464469 - protein, 431 aa, unidentified
MTTSSVPMETEILAYVGLDWADQQHVICCQAAGSTSVETAVVRQRPEELQAWVAQLQQRFPQGLVAIALEQSRGAVIAALMHYDFLRLYPINPKSLARYREAFFSSGAKDDPNDAALLLDLLVKHRDRFSPWVPDDPLSRQLALRVEHRRQLVNLQTELTHKLSSHLKLYFPQALDWVGELDSLQACDFLQRWPTLEAVQKARPAQLKKFYNQHHCRRPQLIEQRIEQIGQAQALTQDTALVEASYRMVLALVAQLRPLISTLVQWQQEISQLFAQHPDATLFASFPGAGPVLAPRLEAAFGSRRDRFSSAQEILQFSGVAPVTQKSGKSHQVHRRWARPKFLHQSFVEFAAFSIPHCDWARALYQQLRARGQRHWAAIRVIAYKWIRILFRCWKDRVPYDEPKYLKSLERRNPRLWTAIQQLALEKPEVA

SEQ ID NO: 464470 - protein, 407 aa, unidentified
MICVGIDVSKRKSTVCFMAPGDKIIRRPFDVKHTKEELQPLVDEIRVQAKYDEIKVVMESTGVYHLSIAYFLQQNGIFVSVVNALKVANFNKAENFRHTKTDSIDSTNIARYGIAYWAKLPQFDLNGDKYFLLKRLCDAYLNFSEERSRILLQLQSQLEQTMPGIFDLFGGFDINSGKDKLLDFLERYCHIEDIIAKSEAEFVASYREWAKEKGYHSNESKAATIYAQAKNGIPSIPNNPIVRETIMWYVGLLRRADETLMASLTRMEDIAKDLPEYELVGEMGGVGRVTRVALIAQIGDVRRFKNKHSLICFAGLTPSIHESGKFRASQNHIVKKGPARLRKVLYQVMMSLVMHKIPKDDAVYRFIKKKEAEGKYKKVAKVAGMAKFLRIYYGRVMHLYRDLGLAA

SEQ ID NO: 464471 - protein, 405 aa, unidentified
MLVEADRSNASSAVRTELTAIFISLELSQSKWLITSLAPGTGEKMSKFTVAARDVAGLLERFVEVQRKAEARTGTRYGFVVIQEAGLDGFWLHRKLEAEGIESYVVDPASIAVPRRARRVKTDRLDGEMLLRTLLAYMRGDPRVCAMVRAPTPEDEDRRRVSRERKALTNERIRHVNRIKGLLFSQGITGYEPLRRDRRKQLEDLVTGDGRPLPFYLNAQIGRELDRIELLLEQIKAVEDLRDALLTTAPPEKASATSGTERTEKPVALRPSIPAMLIELKGIGPEIASVLWLEGLSRTFDNRRQLAAYAGLAASHWQSGNINNDQGVSKAGNPRLRTTLVQLAWLWVRHQPDSALSRWFITRVTERGPRSRKPAIIALARKLLVALWKYVSSGVVIEGAIVHAA

SEQ ID NO: 464472 - protein, 347 aa, unidentified
MNEVITIGLDLAKSVFQVHGVDASGKPIICRQLRRRQVLTFFKKLPPCLVGMEACATSHYWAREISQLGHEVRMMPARYVKPYVKRNKSDAADAEAICEAVTRPTMRFVPIKTPEQQAVLMLHRTRALFVRQRTALINALRAHLAEFGIVAGVGRNGLEKLLEVIADKQDERVLPAARDSLLALRDQLVMVRQQIQEADRRILAWHRTSEVSRRLAEIPGVGPLIATALVAAVPDPYAFRSGRDFSAWIGLVPREDSTGGKHRPGHISKAGDRYLRRLLVIGALSVIKRAKQTGSTRRAWLVALMGRRPTKIAAIALANKIARIAWAIMVRGTRYQEPQCEPMPQAA

SEQ ID NO: 464473 - protein, 440 aa, unidentified
MSMSKTYRSVPVKRVEVEKVLAAHAGEFVEAGFDIGKRWVWTTIRFRDGTCLRPWRAGNPLEIGSLVDLLKQAGERVKLRVAMESSGTYGDPLRQALSDAGLDVHRVSSKASHDWAEAFDGVPSQHDGKDAGVVAELCAMGKSVAWPLQKPTELEQELGYWVDQLDAAHRVQQVWIGRLESRLARHWPELGQERKLSAPTILKALRHWGSPAALGADPQAAATLSRFSHRLLDQAGIDRLVQEAKQSVGVRMNAWDQRRVREDAEGALLAHHQKRAARRRLHELARRHELIPALGEVVGIPTACVLWVCVGDPRHYGSGGAYRKAMGLNLAERSSGMYQGQLRISKRGKSLPRRFLYFAALRYVSKQPVKQWYLEKKRRDGDGGMRGVVAVMRKLPLALHAAARGEAFDAARLFKSIVNEVNNSNMRRQVQGGDARPKRQ

SEQ ID NO: 464474 - protein, 339 aa, unidentified
MDQVSTIGFDIAKHVFQVHGTDAQGRVFRRKLRRKEVIAYFASLPPSLIGMEACGSAHYWARQLQALGHEVRLMPPAYVKPYVKRGKNDAIDAEACWEAVGRPTMRFVAIKSEEQQSVLMLHRARDLLIGQRTQTSNALRGHLAELGIIAKQGRGGTDELLALVEGNEEGQMPELARTALLVLAGQLRELRLQISKIEREIHAWHRSNAVSRRLETAPGIGPITASAIVATVPDPSRFKSGRQFSAWIGLTPNEDSTGGKQRLGRITRAGDPYLRRLLVVGAHAVLRYSGNAKSAPTKWAAGLLGKKPYTVAAVALANKMARVIWAMMMKGEAFRAVSA

SEQ ID NO: 464475 - protein, 371 aa, unidentified
MADYREAFVGIDVAKLKNAIAVADAGREGEVRFFGEVDASDMSMRRVVQRIAAKFDRVYFCYEAGPTGYGLYRLIRSLGHECMVVAPSLIPTKPGDRVKTNRRDALSLARLLRAGELTAVWVPDGSHEAMRDLVRARTAAVETLRVHRQHVSAFMLKHGRIYPRKKGWTMRYLRWLQEQPFDHPAHQIALQEMVEAVRVSKERVERLERVIKEFVPAWSLAPIVRALQTLRGVDLIVAVTFATEVGDVQRFESPRQLMGYLGLVPGERSTGETVRRGGITKAGNGRVRHMLVESAWTYRHPPKVGKAKLYRLEQASPKVREIAWKAQTRLTARYRMLSGRGKRTTVVCTAIARELAGFMWAVAREAQATKS

SEQ ID NO: 464476 - protein, 420 aa, unidentified
MKAFAVEDFATLIGIDWADKKHDVCELITLSNEPLYSVISSKPEAIHQWANDLAVRYPNQQVAVACELQKGPLIYALSKYKHIVIFPLNPSSVAKYRKVFSPSGAKNDPKDAFIQMEMLRLFMDKLRALEPESCSVRALAQTVENRRNLVQDRVDITNKITSSLKNYFPQVIDWFTEKDTAIFCDFLTRWPSLKEAKKARKQTLITFFNQHNARNTKLNKTRINAIKDAALLTEDEGVVAPNKLYVEALVPQLKALNESIATFDKAIKQYYKPQSDKAIFDSFPGAGPQLSPRLFVAFGTNRERYNEASELQKYGGIAPVTEQSGKKQWVHWRYSCPTFLRQTFVEWAGQTVRYSFWARAYYEQQQAKGKPRNTIIRALAFKWIRIAFRCWQTHTPYSETKYLEALKRRDSPLLKFAVQK

SEQ ID NO: 464477 - protein, 355 aa, unidentified
MGVDTHLDFHVAVVLDRLGRPLGEVKVPTTGKGYAELLRWAAGFGLVRCAGVEGTGSYGAGLARHLKAAGIAVMEVERPMRRHLRRRGKSDPIDAEKAARAALAGEAAGVPKSGDGEVEMIRTLRSARRSAVKARVQAANLLQAMIVTAPEELRRRLHALPTKELVAVAARFRPGGEPEDVEAATRFALRSVARRHEALSEEIAGLDAQLERLVAQAAPEVLALPGVGTNHAATLLVLAGDNPERLKSEASFASLCGVSPIEASSGKVVRHRLNRGGNRDANRALHMICVVRMGSDQRTRSYVARRTAEGKSKREIMRCLKRYIAREVYRVLLSSTTVEPSPIRSQRGFVGADVA

SEQ ID NO: 464478 - protein, 388 aa, unidentified
MIYIGIDIAKFNHFAAAISSDGEILIEPFKFTNDYDGFYLLLSNLAPLDQNSIIIGLESTAHYGDNLVRFLISKGFKVCVLNPIQTSAMRKNNVRKTKTDKVDTFVIAKTLLMQDSLRFMTLENLDYIELKELGRFRQKLVKQRTRLKIQLTSYLDQVFPELQYFFKSGLHQNSVYALLKEAPTPNAIASMHMTHLAHILEVASHGHFGKEKARELRVLAQKSVGVNDSSLSIQITHTIEQIELLDSQLFHTELEMANLVTCLHSVIMTIPGIGVVNGGIILGEIGDIYRFSEPKKLLAFAGLDPSVHQSGNFQAQRTRMSKRGSSVLRYALMNAAHNVVKNNATFKAYYDTKRAEGRTHYSALGHCAGKLVRVIWKMLTDEVEFNLE

SEQ ID NO: 464479 - protein, 371 aa, unidentified
MKGFCISLDVSKGSSFYQWFKGFDEPITKSKKIEHNLEGFKELLKLKETIRKEYNEDYVVVFESTGIYHRSLQTYLDEHNFKYTIINQLLSAKVSKSDIRGTKTDAKDCASIAKVFFLKELRIYSKIDEIYDDLKEKSRYYDFLMDEMKRWKIEFRRLFDIIYPGFDRVYDDLYGDFIQTFLLEYSHPEIIRKRRLDTIAKFLEKHTCHKEAYCIRQAQTLKEYVENCASGCSSKSYLVRQFDTVIHNLNAQIKHLEIVLEEIVELAKTLPNYDSIRSIPGIGNNLAGRILAEIGDVNRFNNASQLVAYAGIDPQIYQSGQISGLHLKISKKGNKKLRCLLYLVVTCMIKTSRNTVIVDFYKKEKGRWISV

SEQ ID NO: 464480 - protein, 425 aa, unidentified
MNDLPACYAAYVGIDWADRAHSLCVWPAGASQPELSELPHVPEAIHTWARQLHQRFPAGKIAVALEQTRGPLLYALLQHPYLELFPINPARLAKYREAVTAASGRKSDPLDAALACEVLRMHRDWLRPLRPMPAKVRELQLLVEARRHFVDQRTALIEQLTDALKAYYPQALQLVGNLNSPLGWAWLRRWPTLTALQAARPSTIERFYRRHGLHAAELITARLQLIRQAVSLTDDPAVLAAMPVQVAVLVAQLAGIAPALADYDRRIAALFAAEPEAQVFASLPGAGAQLAPRLYVAFGPDHDRYQGADQIQCFSGIAPITKRSGQMWVTRWRWHCPTFLRQTFQEFAGCSIPHSRWAHAFYTQQLERGQSPNQAKRALAYKWQRILFRCWQTRTPYDEARYLASLREHHSPLIARIDALQTCAA

SEQ ID NO: 464481 - protein, 325 aa, unidentified
MSVIVGIDIAKDKFDVCLLNEAGKAQEATFANSKQGINQLHHWLKKQGAKHAQVCLEATGIYGDLVAETLHSRKYQVSVVNPARIKAYADSQMRRNKTDALDAALIADFCRTQQPDLWSPPPPELKELRALIRHLDDLKQEKQRASNRLDVQNGSQAVTQHLQAQTSLLEEQIQHTLHLIHDHIDRYPDLKRQRDLLDSIPGIGDLTASYLMAELGDISRFQDVGEVVAFVGLNPCQHQSGKRKATHGISRMGRAALRAALYMPAIVAKRCNPRLAAWANQLAQRGLTGKQVIVALMRKLIHLAYGILKSGRAFDPHFADLRLTP

SEQ ID NO: 464482 - protein, 355 aa, unidentified
MTDAKYIGLDVHQATISVAVLDSTGKLMMESILETKAATILQFFQGLRGSVYVALEEGTCAAWLHDLLQPHVTKVLVCDPRKNSLLKAGNKSDRIDARKLADLLRTGLLSAVYHGDNGLRTLRELARSYLAVTQDLTRVMNRLKALYRSWAIPCAGQQVYAPRYRSEWLGKITAVGVRRRAELYYQQLDALALLHQQVRRDLLAESRKHSAVKLLRQIPLIGPIRAALLIALIQTPHRFRTKRQLWAYSGLALKTYSSGEYRFVEGQLKRSKRLLAIRGLNTNHNHDLKNIFKGAASRAAMAPGPFQEFYAALVARGMKPSMARLTLARKIAAITLLVWKKGASFDAEHLKQQAA

SEQ ID NO: 464483 - protein, 428 aa, unidentified
MSNQEIIRRKQFCQIVKEVRSSKEYLVVGIDVAKDKHHAFMGTATGKSLFRKLIFENNIEGFSRLLRTADEIKSQNDLSKIVYGLEPTGNYHKPLARYLIRCDCNVVLVTGQAVKNNRNLLDGRWNKNDTKDAANIADLVSRGRCLYYDCPLPGIIEIRSLLSLRRRLKREEHSLRMRIRNNLLAQYFPELDRFYNACENETLSIVRYFLYPDTITAMEFGEFFHMVTRTRRGIAQTLRLRKIHGLAVESVGCPLGPAGEYESNLLVEKLNQVREQVKKTADLIKDFCLEFDEYIYLLTIPGFGPYISARVLASIGDPFRFENRKQLIKMSGYDLCANRSGKTSNKAIPVISKKGNGELRYALYQAAMVASARVDLFRTYFTKLLRGRERERGIKTKMCVKLAAKMLVIAWTLMKKREPFDPAYLNIE

SEQ ID NO: 464484 - protein, 346 aa, unidentified
MEKIGIDVHKVATQVCILTEDGEFVEFRIRTERDALTKAFASRARARILLEAATESEWVARHLEALGHEVIVADPNFAPMYSSRSRKVKTDKRDARALCEACHLGAYRAVHRVSDASRMQRKQLAGREALVRTRSRMISLCRALLRQEGIRVPSGGAVSFAKRVRMLELGTELARTVEPLLQTHAHVCEQIKHLDAMIAEAVEHDERAKRLTTVPSIGPVTALSFVALVDNIDRFSSSAKLCSYLGLVPREYSSGEKQQRGHITKMGNSRMRYLLVECAWGVLRRQDPSTRALREWALSIAARRGKRIAAVALARRLAAILFAMTQQGRNFEPERLERSSTIASAA

SEQ ID NO: 464485 - protein, 418 aa, unidentified
MKQIDEERIAVWVGLDWADEEHVYALRMAGSERIETGSVKQKPEDLREWINSLRDRSGDGWVAVAVEQSRGALLYALMDYEFLFIYPVNPKSLAKYRQAFYPGGGKDDPRDADLILDYLLKHRDRMRLWQPESPEVRCLRMLSEERRKLVDLRTELTNQLTANLKNYFPQALQWVSPLKETTACEFLERWPSLQELQKPKPSVIRRFFRSHGARGLERLEARILEMRQAQALTRDWAILTAGGMLTQSLARQIGQLNESVALFDRKIEELFKNHGDHVIFSSLPGSGPALGPRLLALFGDDRERFDSSEQVQAMSGVAPLMSQSGKTRIVHYRHACPKFMRQSIHEFAAHSRKWCPWAEAFYQTQVSKGKKHNMAVRSLAFKWLRIIFRCWKDGTPYDDALYMASLKANNAPLLAYLR

SEQ ID NO: 464486 - protein, 356 aa, unidentified
MARTNVSSVQQFVKGFEAHPFFIGLDVHKRSYHVALRRLDGKTVTLVCPADPSGLLGVIQRLCIQVGSVVYEAGPTGFSLARTLRAAGIQTLMAAPSRIPRAVTAGAKTDRLDCIRLADYAAKGLVRAIAVPTPEQEAKRGLQRRRHDIVDSRRRCKQRIKSFLLFLGLPEPKPSIRWRRGTAEALRALSMDPHARLTLESLLRELAFYDEELREVDEQLRQMGRQQERLMDCLQSVPGVGDVVATTFMVELFDPERFQSAEEVASYLGLAPMVRHSGEKTPSGRLRPAGQTRLRSLLIEAAWIWRQYDPYARTLYSRFFGRMGIAQKAIAAVARKLAIILWRLYVEGRPYRPAII

SEQ ID NO: 464487 - protein, 347 aa, unidentified
MLADELDYVVGVDPHRDAHALAVVHARTGGALFEAQVGASERGYARALRLAEREAPGRRAWAVEGTGSYGAGLARFLAARGERVLEVGRTRRERRSHAKTDALDALRAARGVLGEAKHAAPRAAGERGALRALMVARAGALAAKKAGLCQLRALLVTCPEPLRSELRSLTQARLLRRLAAVRPDRHGDAELRGTLIALRALARRVQALTAEEWELKREIQALVARLAPALLDEPGVGPVAAAQVLLSWSHRGRFRSEAAFARLAGAAPIPASSGLVLRHRLDPGGDRQLNRALHTIVVSRRKHDPATIAYVERRRAEGKSVREAIRCLKRYLARHLFRLLEAAPMAA

SEQ ID NO: 464488 - protein, 323 aa, unidentified
MYNETIDFEQVVAKGCGLDVHKETVVATISGTGIKRETRTFSTFTRSLKELKEWILSLGVTHVAMESTGIYWKPVFNILEGSGLTILIVNARHIKYVPGHKTDKKDSAWIAKLLLAGLLKGSFVPPVEIRQLRDMTRYRRKLEGAITAEKNRMIKMLEDSNMKLSSVLSKVHGVSGTRIVDALLEGQTDPVYLASLCHGKVKAEQKDIILALEGNLTEHHKFMIRIIRQDIRQTESLIKELDAEIEKQLLPYAQELALLSQIPGVGDQTAGELISEIGADMEVFATDKHISSWAGVSPGNNESAGKKKVEKRLTATNKLRQSL

SEQ ID NO: 464489 - protein, 406 aa, unidentified
MLETMVRCCAGLDVHRRQVVSTVIREGSKEAREYSTFHRELQELAHWLQREQVELAVMESTGIYWKAIYAALEEAGIETRVVNARHVKQVPGRKTDVQDSEWLAELARCGLLRSSFIPPRDLRELRLLTRYRRKLTGMLSAEKNRLHKVLDDAGIRLGCVVSDIDGISARAMVEALIRGGSTPEQMAEKALGRLQKKRDALQLALEGEISDRHRLVLKKILLHVKWLQRQIVTIDGQIVAAMKPYQEEWKLLQTIPGFDILSAAMLLAEIGVDMGRFAGRDRLCSWAGMCPGNQESAGKKKSGRTRKGNAYVRSLLCEAANSAKKTQSQFQGLYKGLVIRRGHKRAIVAVGHKILQVVYVLLSRKEPYRDPEIDYEALVVHRNAPRWLDALHKYGYLESIKGSVER

SEQ ID NO: 464490 - protein, 347 aa, unidentified
MVIIGCDFHVGFQQVALLDSESGEVGELQLGHREQARQFYAGLRGAVRVGMEACGYSRWFERMLAEMGHELWVGDASQIRASARRKQKTDRRDAQHLLGLLTEGRFPRIWVPSPEERDVRQLLLHRHSQVRERTRVKNQLQAMALNEGLRLKRKLWSQEGQRQLALLPLPPFQARWREELLARLEELDGQVKASDKLVEREAAQRPAVQLLRTHPGVGPVLGLAFVVTVGPVERFGRARQLASYFGLIPSEHSSGERRRLGRISKQGNPLLRFLLVEAGQSAVRKDPQLRQAYGRIARKRHRAVAKVAVARKLALRMYWMLRRQVGYPAVLEPGPVQASPSHSVVER

SEQ ID NO: 464491 - protein, 414 aa, unidentified
MDVLHPRCAGVDISKRDAKVCVRIADPGRAKAKSTVTTWGAVTNQIMALRDHLIGEQVTLVVMEATSDYWKPFYYLLEDGPFEVMLVNARHVKNLPGRKTDVSDAAWLAQLGAHGLVRGSFVPPEPIRQLRDLTRTRTTITRQRAREIQRLEKLLEDAGIKLSSVASDISGVSGRLMLDAMIAGQRDPAELAELAKRRMRSKIPELTEALTGRFGEHHAFLARVHLDLIDQHTHAIDDLTARIEVMIEPFRGARDLIITIPGISTLVADVIIAETGADMTQFPTAAHLASWAGTCPGSNESAGRIKSTKTRPGNPYLKGALGIAAMSAARSRGTYLAAKYRRIAARRGPVKAIVAVEHAMLIAIWNMLTNGENYTDPGADFYTRLNPDKAKNRALDQLRQMGYDVTLNPLAHAG

SEQ ID NO: 464492 - protein, 289 aa, unidentified
MLFLGIDWGEHHHPDLCLLDQDGMMLAARRITDGLAGVGELHALVAAHAQGPAEVVVGIETDRGLLVGALLAAGYQMYAVNPHTVSRYRGRHGSSRAKSDRGDAKVLADLVGTDRHNHRQVAGDSPLAEPEALAVLELAPTPEQGRRLTRAAVQRALVGAGRRRNLRTRGVAVHDALAAPQLAAPAPIEAAYREVVGAPGGRAVLPQPAGRRVGAAARRRFATSPDAAILRSQPGLGVVLGARVLAEFGDDPHRYATAKGRKAFAGTAPVTQSSGCAQWWWPGRRATSG

SEQ ID NO: 464493 - protein, 340 aa, unidentified
MSKAAFCSQAFCGIDVSAATLAAAVEQEDRPGSFERREFANSTAGRRQLVAWLRRSCVPVRVSLEATGIYSLDVALALEAAEGIAVAVLNPRRFHQFAETLRRSKTDAADAVALAEYSRRMPFVAWVRPSEACLELRAISRHIATLTEDHARLKNRLHAAEGSAATPRCVLQDLRRSLTGLGKRLLRLRREALAAIGKDAGLERKFHQLTGITGIGELSAVHLLGELAGLDQEMTVRQWVAHSGLDPAHRVSGTSVHKPARISRQGNRHLRRALYMPALSAARFDPHMKAFYTLLQARHKTKLQALIAVARKLLHAIFGIFKSGTTWDGAKLFPRLIPTS

SEQ ID NO: 464494 - protein, 350 aa, unidentified
MLYTGVDYHRSFSYLTTMNEKGEIVSQKKLPSNGEIVDFLKSFGESMEIAIEATPSWYWLYDHLEDEGFEVKLSHPLKTKAIAYAKVKTDKVDSATLAHLLRSNLLPLSYVPEKPVRLNRELLRYRASLVKIQTGVKNKIHTILAKNNVSHDYSDLFGKEGMTFLHSLSLPENYKIALEGYLDVLDVVRREIRAVSKKVQQLAEEDRDALLLMSIPGMGYYSALLTTSEIGDVKRFLSAKQLCAYAGLVPSTHASGNTCFHGHITKQGSRWLRWILIEAAIHAVKRPGVLRRFYFKIERKKGGQIAKVATARKLLEWIYHILKDGRTYQEMEKIADLLGRGEPGNSSGSA

SEQ ID NO: 464495 - protein, 342 aa, unidentified
MNHYAGIDVSLECSSVCVVDASGKILREVRVASEPEALIAWFRSSGFEFERIGLEAGPLSQWLFAGMKAAGLAVELLETRHVRKAFEAMPVKSDRNDARGIAQLMRLGWFRPVHCKSISAQETRSLLTARKLVQSKLHDVENSLRGILRGFGLKVGKTTGQKFAGRIEELVAGHPYLQMIAKALLAVRAVLRTEFAAFEKQTRRMARSDMQARLLTSVPAVGPIVALTYASAIDDPVRFKSSKQAGAHFGLTPKKHQSGETNYTGRISKIGDASVRTALYEAANVMLTKPVKGCSQLKSWAMRIAKRAGMSKAKVALARRLAVIMHRMLDDGTPFNAAAAAA

SEQ ID NO: 464496 - protein, 311 aa, unidentified
MQEQCVGVDVSKQHLDWVLGGEGSVSRVNNTPAGVRSLTAKLRRRDMGLIVVESTGGYERALVEALAKASLPVVLVNPWRVRRFSEGMGVLAKTDPVDARILALFGERARPPRRPLPGPTQRQLADLIRRRRQLIAMVTAEKNRLGTATAVIKRDIHALVKILERRVVKMDERIDTAIASDPEKAENWERLQTTPSVGPGVARALIIDLPELGSLGRKQIASLVGLAPFAKDSGRKTGQRRIRAGRSAPRTALYLAAMNAARFNSTLKPVYDRMIAAGKPPKVAFIALARKLLTILNAMIRDGTTWQQATR

SEQ ID NO: 464497 - protein, 437 aa, unidentified
MIGSLQRGEDTLDSVVIGADPHKHSVTIEIVDDRERILDKGRYGTDTDGYRQLLAAAKRYPQRRWAVEGCNGIGRHVAQRLVADGETVVDVPAKLAARARVFDTGNGRKTDPADAHSVAVVALRTRNLTEVRIDDELVALRVLVDRRDELGRTRTQTINRLHRLLLELLPGGAKRFLSAAQAQALLDSVAPTDVAGRVRHQLATELLAEIVVLDAKMKASDKTLRKAVAATGTGLLDLYGIGPASAARILGDVADVARFATRDRFASWNGTAPLDASSGEQQRHRLSRAGNRRINRALHIMAIVQIRHDTEGRAYFRRRVAAGKTKMEALRALKRRLSDVVYRQLVADMKKASPGGHTEATVVSSAVDPTPTVDSSDQSQPGPDHEPTHPDTDAVDSTPRPVAPAQSLRTRDQRPPAQPDKLDDLAPLFGASKRDLT

SEQ ID NO: 464498 - protein, 429 aa, unidentified
MQESSSSAPAEGVAAYVGMDWADQNHDVILRAASEPAKVEYRRIAHEPEALMEWVGELQQRFAGKGKILIALEQSRGALIYHLMGYEFLELYPINPSQVASFRETFSPGGAKDDRPDAELICELLYCHRDRLKAWKPDDELTRKLAFLNEGRRKAVDQRTQLANEIKSQLKVYFPLALQVLDHDCSTALAADLLLQWPTLDSLQKQRAHKLRKFFYAHNCRQEQKLLERLELVQAAKPLTRDLAVIEPAALRIQLLAQQLKSLLPYIARYEKQIAELFDAHPDSFLFRDLPGAGSAMGPRLLTAFGTDRGRFEHSMEVSSLSGVGPVRRASGKKSGKHASVHFRSACPKFLRQSFHEFAACSIRYCPWAQACYDTQRARGKGHHTAVRAVAFKWIRILFACWKQRVPYDPQRYQQTLQTRGSQYAKTAA

SEQ ID NO: 464499 - protein, 390 aa, unidentified
MYLIGIDISKYKHDCFIATETSEVVHNSFSFDNNSDGFAYFLSILTSLDPDQEKRIGMESTGHYGNNLMRFLDEHNFSFMVFNPYLTEKFRQASSLRKTKTDKIDARIISQMLVSRDYTTYSSKSYHISSLKSLTRFRLRLIEARTKLKVRVQNILDLTFPEFTKFFSTIFGVLPLKILSNYPSAEKLSKVNPDETFNFLKEDIRGSYSYQKFINLVNAAKSTIGKSNENYELELSSSIRLINYYNEEIKKIETQIESIMNQYSFKILSIPGIGIQSAAVIISEYGDIKSFGNANKLLSFAGLEPSISQSGTQSFNGHMVKRGSPHLRYALMNVAQTVVKNNLCFSKHYWKKRNEGKYHRVALSHVVKKLLRVIYFLETNNIDFNSNLLK

SEQ ID NO: 464500 - protein, 467 aa, unidentified
MRKAKRNVKSAAAVGKKRLTLLEQINFNAAGIDVGSREHWVAVPADRDPQPVRCFGTFTSDLHALADWLLQCEVKSVAMESTGVYWIPVFQILESRGLEVLLVNARQVKNVSGRKSDVSDCQWLQQLHSYGLLAGSFRPEAQICVLRCYLRHREHLVEQASTQIQLMQKALTQMNVQLHHVLSDMTGVTGMAILDAIADGERDPLKLAQLKDPRVRNSVETIAKALTGDYRPEQLFVLQQARESYRFLQTQIADCDVEVDQVLSGWEAKVDLQQQSLPPTHKNNRSKSKHKPLPFNLRQQLYRVTGVDLTEVDGLDVLSAQALISEIGLNMHRWPSEKHFASWLGLCPDHRISGGQVLHNRTRPVLNRAADVLRMAAQSLKDSQSALGAFFRRLKARLGPAKAITATAHKLARIVYLLLRYGHNYLDPGAQYYEQRYRENILRSLKKRAASLGYTLVENAALNLQVS

SEQ ID NO: 464501 - protein, 387 aa, unidentified
MSNVIMIGCDLHDETMLLKIANGLLAPETLSVKNTARGREGMIANLKRRAQAVGGARLVFAYEASGLGFGLYDQLTAAGIECYVLAPTRIAHSQRQRSQKTDEKDALELLELLRAHILAGNSLPKVWIPKAELRDDRELVRMRLDVGDKVTSLKTQIKSLLKRYHLYRPPALGKGWTKSFRVWLSRDLATPADPQKIPLGAGGRAALASLLRQLIFLEQECECLDQEIITLAWSPRYEKAMLEVTKLCGVGVLTGMVFLTELGDLSRFANRRQLAAYLGLVPSSYETGKSNDRKGHITHQGSSRVRKALCQATWSRVRYDPDEKAAYDRIKAKNPKHKKIAVVASMRRLSVRMWHCGQTATAAPEETRQDQAKPHTECGCAAGFSEV

SEQ ID NO: 464502 - protein, 370 aa, unidentified
MRNDTTVFVGLDVHKDFISVAYVPAERQAEVTFVGPIGTREGDIDKLIRRLRTKASRLVFAYEAGPSGYGLYRYLRKKGYPCLVVAPSLIPKKAGDRVKTDRRDAVQLARLMRAGDLDSVYVPKVEDEAIRDLSRAREDVLRDLKASKLRLKAFLLRQGIYYTGRATWTPAHLRWLAEVVCPTAAQQIVFQEYVRTVTERRELLQRLETELHEQVGTWKLQPVVQALQALRGVQFTVAVTTVAEVGDLTRFDNPRQLTAYLGLAPSEYSSGEKRRMGGITKTGNGHARRALVEGAWSYRYPAKVSRQIQERQESLPRSIQDMAWKAQVRLCKRYRRLTSRGKNVNVAVTAIARELAAFMWAIAREVKLPA

SEQ ID NO: 464503 - protein, 352 aa, unidentified
MNKPPVVSEARVFCGIDVSAETLAAAIIEHDQPDLDRRIEQREFPNRPSGHKALIGWLGKRKSVARVSMEATGIYSLDVALALDAAAGIEVAVLNPKMVNRFAQTLRRSKTDAADAAVLAEYSRRMPFQPWRPPSMKALQLRAITRQIESLTVQHTREQNRLHASAGSMATPQCVVQDLKRSLVSLDRRIGKLRRAADALIRTDAAMGLRFQLLTGLPGVGQISALQLLGELMTLAPEMNARQWVAHSGLDPVHELSGASVHRPSHISRHGNRHLRRALYMPALAAVRWDPHLKAFYEALIQRRKAKMQALMAIARKLLHAIYGIFKTGSSYDGQKLFPKLTIARALQSPSR

SEQ ID NO: 464504 - protein, 385 aa, unidentified
MTNEMLQTNDTNTSATLTPRLLVAIEMSLKNWRLVMSPEGGTRNRVKTVEAGNYLELERAVADARERFKLPPQTLVVFCYEAGRDGFYPYRRLTEVGHEVWVIDSASIEVSRRQKQAKSDGIDGDKLADLMQRKARGEKKALRVVRVPSLEVEDERLLPREREIILHDIGRLRNQIESILFTQGYRGVPKNAAALKSWAAERGELTPQLRERLGREVERLALLEAQLQKVERAMAVKVKQENSTGIAAVAGALMQLCGIGLIGAWVLSSEIFGWRQFRNRREVGAALGLTPTPYSSGQDVREQGISKAGNRRARSMLVELAWLWLRYQPGSALSQWFKSRFGGGGKRMRRIGIVALARRLAVALWRYADQGVLPDGAKLKNGAAA

SEQ ID NO: 464505 - protein, 353 aa, unidentified
MKPKTDFSTASLAIIGVDIGKEVFHIVGLAVDGKIAFRKKVRRLGFEDAFEKLPPSIVGMEACLSAHFVSRVLRRLGHEPRIIPAIYVRPFVKGQKNDYNDAEAIAEAALRPNLRAVQEKSQDQLDLQACHRVRSRLVSRRTATINQIRAFLIEQGITVRSGARALRNSLFAILENRRDEISPRMASLILGLYEDWCQLDKRIETITSAIEELSQVEPKCQRLMSVPGIGPIIATGIVAAVSMGEAFERGRDFAAWLGLVPRQHSTGGRSVLGRISKRGSKYLRTLFIQAAKVLLMRPHNWPRYSFGAWLTAAASRLHKNKLAVALANKLARIAWSVLRNEKAFDTHLEVTAI

SEQ ID NO: 464506 - protein, 408 aa, unidentified
MTVFVGDDWAEAHHDIHLMDDDGNKLAARRLPEGLEGIAALHAMIAGYVDDPSEVIVGIETERGMWVQALIAAGYTVYAINPLSVSRYRDRHNVAGAKSDPGDAKVLADLVRTDRHNHRPVAGDSDTADGVKVLARAHQNLIWDRTRHTNRLRNDLREFFPAALVAFDDLAHPDAVAVLTKASSPDAAARLTIGQIRGALRRGGRQRNLDVRAAEIQQGLRSPQLSAPPAITAAFAATTNALVAVIAGLNQQIARLEAELANHFEQHPDAGIYRSLPGLGVILGARVLAEFGDDPERYNSAKSRRNYAGTSPLTVASGKKRAVLARHIRNRRLYDAIDQWAFCSLQASPGCRDFYDQRRAAGDLHHQALRALGNRLVGYLHGCLQTRTTYNEHTAWAHRQTQQINNAA

SEQ ID NO: 464507 - protein, 354 aa, unidentified
MHYANRVDFSGQTIYIGMDVHKKSWTVSLFMEHLEHKTFTQVPDVAVLAAYLQRHFPGARYSAVYEAGYSGFWIHDKLLESGIACMVTNPADVPTRDKERRRKGDRSDSRKLARCLRSGQLEGIHVPPRATVEDRGLIRTRQAMVRKQTRCKNQIKSLLLFYGLPVPDAASGWSRNFIRFLEETRLERESGDLALKAHLTELIHLRQIIAQLNRDILALSRTDEYRERVQLLKSVPGISTLSAMIFLTELGELSRFPSLDKLCGYVGLTPDTHGSGEKQGIGDITRRGNQMLRSLLIECSWVAVRKDPALALAYHSFCKRTLKTKAIVKIARKLLNRIRFVLNNRCRYVSSVAA

SEQ ID NO: 464508 - protein, 364 aa, unidentified
MSRKSGRIGRFAASVGEEPVFVGVDVHKRTYSVALFCATDGQVETWNCPADVDGLVEQLRGVGCHIEHVVYETGPTGFSLCRALREAGFKASVVAASRIPRGAAAAAKSDRIDATKLATYLARGLLRSVAVPTIEEEGYRALVRRRKRVSEARAKVKQKIKGLLLATGIAEPSSLKKWVKTAAADLAALDLDPGHDGALASLIREYRFLQEEHRRLSREVGRATKRLHRERYVRLTQVGGIGEVVATTFLAEIFAPERFNRAEELTSYVGLAPVVRRSGDGPARARLRPVGQKRLRAILVEGAWQWTWRDREAKELYNRHLARSGVPQKAICVVARKLAIKLWRLSVETPRASMEGAAVGLLSG

SEQ ID NO: 464509 - protein, 354 aa, unidentified
MNKIKQLNFEGKVIYCGLDVHKTNWKINARMEGIEMAAFSQNPDPLLLKNYVHKNYPGAELKVVYEAGFCGFEIQRSLKSLGIECIVVNPADVPSSDKDRKRKDDKRDARKLSIELAKGNLKGIYIPDKQMQDARSLVRQRHRLVQDQTRCANRIKHLLLNNGITAGEKSERWSLRFIKKLQQLDCGSISLKSSLRFTIEQYVQTRRILKEITLAIRGLSKEEPFKKVQAVLQSIDGIGLINGMVIQTEIGEIHRFKRLDSLCDYGGFVPDIYSTNDKMVVRGISKRGNEFLRETIIESSWVLIRKDPAMLMKYNEYRNRMSANKAIVRIAKHLLSRIRFLWKNEQAYVRGIIG

SEQ ID NO: 464510 - protein, 419 aa, unidentified
MSFKILKNNCCGLDVHKTWIYACIGITDSFKRTEYKQARFSSFTKGLQELCLWLAKYNCIDVCMESTGKYWIPVFNVLEKNNIFVTLSHPKYTKPQKGNKTDRKDAKWICDLYMCGMVKPSFIPPADIRQLRDLVRYRFKLTCMITGEKNRAHNCLTVSNLKLDDVFSDIFGKSSRSITEQILQHPGEVFDVAPFVDSRCKTPIEEIQAAVDGAISHEQAVKLRQCLKHIDELEMHKAEIEREIFRLSQKYESVLDLIRTIPGFDKNPLTAIQVLSEIGADMSVFPTAKNLVSWAGCCPRNDQSSRKIKSTRISRAGSYFKPVLVQIANALIKSKKHPEFTTRYRRIKARRGHKKAIIAICRMILTAIWHILTELKPYTPEGFLESRPVNKEKVLTISQALNLIKQRGYIIKDDVGPVT

SEQ ID NO: 464511 - protein, 312 aa, unidentified
MAAMVRLAGIDVSKQTLDVHVLPSGERRTVTYDRHGLGELRRWLLDLGVAVAAVEASGGYEREVSEVLEEAGLVIHRLNPLRVHRFAELRGRLAKTDRLDARTIAEFTRAYPQDRQLARDPRRERLAEHLLVRRHTQDGITDCINQLEHLRDSRLRRLVTTRKASLERSLAALDKRLAALLAEHDDLVALGDQLRSVPGVGPVLATTLIALLPELGLLTRRQIAALVGVAPFDRSSGRSSASKSIHAGRVLVRNALYMAAMVAARHNPALKTFAERLEAKPGKVRLVACMRKLLVTLNAMVRDGAQWQSRTA

SEQ ID NO: 464512 - protein, 400 aa, unidentified
MKGFLHMKLIGIDIGKNKHFFCIMDQQTGEIISQPVSFSNDKEGFDFLVQKIKSYPKDSILIGMEDTGHYHFALLKYLLDLQYTVALINPKTTDFNRKMQGGITKNDKLDTINICDVLDTPERKKQYRITKVNSFDLYEQKQLTRHHHNLKEEENVYKNRLQKCIDIVFPEFNKLFNSKYGIVYMNILKMFGSAENIANTDIRTIRKCFEIEGRGNRISLTPERLKECAGSSIGISSSAEVIQIKHLTAQIELIEEQLTEIDKKIEEFSIQNNSPILSIPGISHFSGTSILAELGDISNYSKPSQIIKFAGVAPLHYESSQFNAQHTAITKKGSKYLRKTLYQIILPVIRHNPVFTKYYQLKISQGKGHRCAQGHCVRKLIRIIYHLLKTNQQFDPQLLR

SEQ ID NO: 464513 - protein, 417 aa, unidentified
MEVVYPICCGVDVHKTFLVATIITSEGITPHYQKKRFSTFNNSILAFKQWLIDNKCFNVCMESTGKYWIPVYNLLEDRISVTIANPKWVRAIQGNKDDNKDSKWIGDLFRLGLVPGSFVPDKPFRVLREYTRYRSRLVSSRSSEKNRFQNVFTVCNVALDAVVSDMFGVSASSITDYILTSDAFDPSVCASLLKRSLKNKADEVIESIEGFMMEPAQKARALIVRDHLEYLNQRIAELDRMVDVLVAPYEGFIRLLCTVPGIDRLSAIIIISEIGTDMSQFASSKRICSWAGLTPGNNESAGKKKSVRISRAGVYLKPALVQVAFAAVKSNEFPYYRFKYEQISKRRGKKRAIIAIARMILTAVYSMISAGEEWNPCDLYKIDMPQNLKDSHKEKAIRQAKQLLLSEGITDLLQMPA

SEQ ID NO: 464514 - protein, 313 aa, unidentified
MKKTICGVDVSKAKLDVCIEPGHRLASFNNDTAGIAELAAFCREHAVELVVMEASGGYERRAFVELWEQGISCALTNPRNVRRYAEAMGILEKTDRIDSSVIARFADTKKLAPTPLPSQAQQRLKALVTRLRQVTDDLTVQKQRRASMFDSPEMRSSVDEVIALLKRQSRSLEGEIASMIDDDPLWAKLAETWREVKGVAGRTVARLHAELPEIGLLSNRAIAKLAGLAPIANDSGKRKGRRSTRGGRAGVRSILFLVAATAARYDRSLAEFRDRLLMAGKEKMVIRIALARKLLVILNAKARDARAEYANAT

SEQ ID NO: 464515 - protein, 345 aa, unidentified
MELHTIGIDLGKTVFHLVGLNLRGEVVVRKKFSRKQLLHFTANLQVELIGMEACGGAHFLGRALREQGHEVRLMPAQYVKPYVKTNKSDYIDAEAIAEAVGRPKMRFVPIKSDDQLDLQSLHRVRERWVMRRTAVINQIRGLLLERGITLRKGRCHVDEALPGILEDASAKLSGALRVLLAQLKLELDHLQMRIDEADAVIKKTAGENEACRRLVAIPGIGPITATAIIAAIGNGAAFKKGREFSAWLGIVPGEYTTGGKQKLLGISKRGNSYLRRLFVHGARAVLQQSAKQSSGLSSWLAQLTTRTHRNVAAVALANKLARMAWAVLAKNEPYRPPMLADAATA

SEQ ID NO: 464516 - protein, 344 aa, unidentified
MAQVTTAQVTTVGIDIAKNVVCIHGVDAHGHVVVKKRLARQKVLPFMAQLPPCLLGMEASGGAHYWAREFTQLGHTVKLMSPQFVKPYVQSQKNDPNDAAGICEAVERPRMRGVPVKSITQQDVQALHRIRERQITARTAFINQIRGLLTEYGIVIPQRASQVRHKLPLVLEDAENGLTATAREWLHALAEELQALDQRIAATDQQIERVFEADEACQRLAQLPGIGPLTATALVAAVGDATAFKNGRQFAAWLGLVPRKHSTGGKTTLLGMTKRGNCYLRTLLIHGARAVLRVVDRKTDARSRWLQGVKARRGMNCASVAQANKTARVAWALLAKGDRYRHAA

SEQ ID NO: 464517 - protein, 325 aa, unidentified
MNVPGKTVLKPLTFSNNKAGFELLDLSFRQLNQDCLIALEDTGHYAFNLLNFLHEQGYKVYTYTPLLIKEFAKSLSLRKTKTDKKDAHGIALKLLSDPNREQFQHDNRQVELKILARHIHRLKKKQSDWKVQYTRCLDIIFPELDKIVGKHSEYTYQLLTCYPNPQKRLEAGFDKLIEIKRLTASKIQDILSVAPRSIGTTSPAREFEIIEIIKHYKRLIDKAETCVNDLMAEFNSVITTVTGIGGRLGAVILAEIRNIHAFDNPAQLQAFAGLDSSIYQSGQIDLAGRMIKRGSPHLRWALIQAAKACARFSPAFKAYLKTKLE

SEQ ID NO: 464518 - protein, 322 aa, unidentified
MASFLGIDVSSLSLDGWVRPQAVRIAVSNNPAGFEELERTLRKFSIKRILLEATGGYERDVLRFLQDAGYKVIRVNPARARKFADSMGVKAKTDAIDAEVLAHYAEVIPDQPTLQISPDRALLRELLMQRDRLVQQRDDDRRRLKQAQSLVVANFLKANLQHFRSQIRLVEQEINQQAAKLNDERIARLTQVKGIGMVTAGKLVTLLPEIGRVESREIASLVGVAPFNHDSGKSLGKRSITGGRFEVRRTLYMALLVAVKYNPALKARYEALRGRGKLAKVALVACMRTFIVRLNAMIKTGTPWRDLILPQPAGTTQIEKAA

SEQ ID NO: 464519 - protein, 349 aa, unidentified
MFAGIDSHKDTLAVAVIDTAGRVVTVRQVANEPVGFSVLAALVAEHAVVRVGIEGSTNFGWAAAMHLVAAGAAVVEVPPLMTSRERQSRPGQGKTDPVDAVAVARITARETSLPPVRPMDGLPAELRVLMDYREQLIDERTALANRIHADLGWLRPGYQRKLPRLTQPAHLQAGLALLQNDQSIRASVTRRRLQRMVEINAELAGLRTQITELVQQSGTTLTGIYGIGVFVAARILAEVVDVRRYPTRHTFAAANGSAPIPASSGRTVRHRLNRGGNRQLNRALYTIAITEIRADTEGRAYYERKRAEGKTTREALRCLKRRLSDVVYRTLRADQAAAQPQPALLVSAA

SEQ ID NO: 464520 - protein, 372 aa, unidentified
MKEDSVIFIGLDTSKLKISVAIADGERNGEVRFFGDISSEPASVASMVNKLSKRGAKLHFCYEAGPTGYGLYRQIIDLGHDCVVVAPSLVPRRAGDRVKTNRRDAVSLARLHRAGELTAVWVPDEGHEAIRDLVRAREAASDALKQARQQLQSFLLRHGRIYTGRKPWTRAHTRWLACQAFDHSAHHILLAEYCQAIEDAGVRLDRLTQLVVETAASWSMAPVVAAYQAMRGVAFMTAVTFVVEIGDVRRFDNPRQLMAYLGLVPSESSTGERVKRGGITKAGNARARRVLIEGAWTYRFPARVSPTIQARLESLPRAVREIAWKGQVRLCARYRKLMAAGKQKVVAVTAIAREMAAFLWAIGQEVAPTAKP

SEQ ID NO: 464521 - protein, 421 aa, unidentified
MSNSTLSKKLASVKPGTLFVGVDLALDRNVAVVLTERAEQLGRFGFPNERDGYDYFYRRLEAIQEHQQAPALLVGMEPTNYFWKLLAADIEQQRPEYGYRLVNPYTVKKNREGDQLDRSKDDNRDAFTIGNLMRIGKHTETRLLHGAYAELRQYVTLYTRLQRDVRRQKSLIHNIAGQLFPELPRVFKNLTSLTALAMLRNHAAAAAVREITQEAFIASVRADFRGRRMQVAKLRRVHILAKRSVGLIDSVEALQLALRLHIEALEALRQQLETVCQALTDTFLALPESKYLLSIHGLGVITAATILSEIGDPSHYTKASQLVKLAGTQPVSNTSGRKSRSQTPMSHKGRPRLRTALFFAVMRLVRMDEAFRQEYQRLQGREKNPLTKMQALGVLMNKLLRILWALMQNRTLYRSGFQSTS

SEQ ID NO: 464522 - protein, 382 aa, unidentified
MKNQTEQLTPTSPKQTEAKVEVIKLGMDIHKRQYVVVQQVEGEGPKAPQRFTPESFLSYLAKLRKRAKRVITCYEAGCFGYVLHRQLEGMGIENLVVRPRNWDEYGSKVKTDGRDARELCSCLDRWLAGNKNALSVVRVPTEEQERSRSLSRQRETLAKELKRLQNIGQSNGRYYGIELKMSWWKPCRWRVLEKELPDWFVAIIAPIQVVLTTINAQLKEATGREERQANRKLPVGLGALTASVLDQEFRDYSRFSNRRQVASFTGLCPSEQSSGATHHRGSINKHGNPRIRSKLIEACWRLLQFQHDYEPIKQWRLRFAEQPPGKAPKKKMIVAIARRFAVDWWRINTGQIQPEDVGLRVDYPASYAAKALREGRIVKHYA

SEQ ID NO: 464523 - protein, 343 aa, unidentified
MQITTIGLDLAKSVFQVHGVDAAGQVVVRKSLRRSQMLPFFAKLPSCLVGMEACGTSHHWARELIKLGHEVRLMPPAYVKPYVKRGKTDAADAEAICEAVTRPTMRFVPVKSLEQQAALSMHRARDLLVKQRTQLINMIRGLLAEFGVDIPKGLERALLMARQIVDGKAPEVPIEAAKIVATLSRQALDTHVRLREIDRDLLVSLRGNDVARRLMTIPGIGPVGATALAASVTDPHQFRSGRQFAAWLGLTPLQKSSGGKERLGRITKMGDKYLRKLLVVGMTALVRRARQNPESDPRLADLLARKPTRVATVAMANKTARVIWAIMTRGEEYHAGHRPALAA

SEQ ID NO: 464524 - protein, 349 aa, unidentified
MKIIGCDFHPSYQQIAMLDSVSGEIVEKALSHERKEEVRTFYAGLEGSVRVGIEASGQSQWFERMLAELGHEVWIGDAAKIRASCERKQKTDRRDAELLLRLLAEDRFPRIWVPTAVERDARQLLLHRHKLVRMRTQVKNELQAQALNQGVQRKRKLWSEAGRKQLESLPLLPWASRRRAELLQLLDQLEASISELDRAVAEQASARPAARRLMTHPGMGPVTALAFALTMGPTERFQRGKQVASYLGLIPSEHSSGGHQQRLGHISKQGNPFLRGLLVEAAQSAVRYEPEMRRAYQRLAQRKCRALAKVAMARKLAVRLYWMLRLQVNYAQLIQGSHAGQSGTFCGRS

SEQ ID NO: 464525 - protein, 341 aa, unidentified
MALYYIGLDLHKKTIVYCIKSTDGTIIGRGTVAATRPALLAWVGSLPQPWVAAMEATMFTGWVYDFLKPYAQEIKVAHPEMLKAITAAKKKNDRADAEKICDLLRVDLLPTCYMASEQIRELRRVLRYRNHVVQMATATKNKISGLLMEVGAQYSKKQLHGRRYFNDLLESVEDVPPSVKELLKFSRSGLDLFAEVQKKLLTALKDKDLIRDRVERLMTIPGVGEVTALTWVLEIGDPHRFSISQVISYCGLCSAQKESAGKETRGPISKKRNKHLQSVLIEAAKLAPMWNSQLAEVHERELGRGHKNRATLAVARKLVTYLLTIDKTEKNFVVHTKAEAA

SEQ ID NO: 464526 - protein, 411 aa, unidentified
MGRVVIGMDPHKRSATIEIINDREKILDTGRYGTDTAGYRAMLAAGRKHRDRVWAVEGCNGIGRHLAQRLVADGEPVVDVPAKLSARARVFSTGQGRKTDPVDAHSVALVGLRSRGLRTIQADDATVALRLLIDRREQLGVTRVQVINRIHRLLLELLPGGAKKHLSAAQAKALLTKVRPRDIAAKTRRRLAAELIVDLVLLDAKIKAADKELHQLITTTGSTLRELHGIGPANAARLLGDVGDISRFADKGRFASWNGTAPLDASSGDQHRHRLSRAGNRRINRVLHIMAVVQLRTDTKGRRYYDRKVAAGKTNMEAMRCLKRRLSDIVYKQMRDDAQPVATGPGGHVGAATGSSAVNSNPDVDASEKSCPGPVNTNATRVKSSRPDRSPARSRHPKTAPARSRRQAQSA

SEQ ID NO: 464527 - protein, 454 aa, unidentified
MSRRKKKAKNFQVTNLPAQLRHVNLDAAGIDIGSDRHLVAVPEGRDQVSVREFGTFTADLEALADWLAQCHIRTVALESTGVYWIPIFEVLEHRGFEVKLVDARRVKNVPGRKSDVLDCQWLQQLHTYGLLAGAFRPPDQICVLRGYMRQREMLVQASSMHIQHMQKALQQMNLLLHNVVSDITGTTGMKILKAIIAGERNPEVLANHRDPHCRNSAQTIAKSLVGNYREEHLFALTQAVELYETYQSKISDCEAAIARHLAAQPNSTDELPPPSGKRLQAKNIMRGGVDVRTQLFKLTGVDLFSISGMGADTLLTLVGEVGIDMRPWKTEKHFTSWLALCPGTRTSNRKILSTKTRRSSNRAAAAFRMAATSLGRSKTALGAFYRRISARVGAPQAVTATARKIAVIYYSMLKYGTQFVEIGQLAYEQKYQRRRLKGIKQQALALGYQLVPIS

SEQ ID NO: 464528 - protein, 370 aa, unidentified
MNRLSVGMDVHKEKVVMLGLAERGDTPVMRETFRGDNISGIVKRLRTLSRAWAVESCYEAGPSGYGLARVLTEAGISCRVVAPSLMPRRPGNMVKTDIRDAKELAAALRAQTLEFVRIPSCEEEEVRGLVRCREDIARQLRSFKQIVSHWLLSHGYRPPAKVNRWSPVFWTWVRSLPLPPLERMVLDHYLDVLLMLEDRRKQVESQICELADRVEYRERVCRLGSLQGFSKLAAMRLIAEVMDFNRFPKASAFMKFTGLVPSEHSSSDRIRRGRITKGGNSHIRHVLVEAVQRAHVSARPGRSLLKRQEGAAGEFRQIALKCLLRLYRKFWAYTKRGVPVGKVRVAMARELAGFVWALMVHPAPVLTAAA

SEQ ID NO: 464529 - protein, 334 aa, unidentified
MKEITTVGLDLAKNVFQVHAVDAAGAVVIRRQVRRAQMLLFFSRLAPCLIGMEACAGAHYWARELTKLGHEVRLIPPSYVKPFVKRGKTDAADAEAICTAVTQPTMRFVPVKTEVQQAVLMSHRTRDFLVRQLTQLANAIGAHLGEFGLVVPKGVHNMNRLVAEAEAADLPPEARMPLDLLVGQFTDTKVRIDTITADLRRAAEEDETARRLQTMPGIGPITASVLVATLPDVSVFRSARDLSAWLGLTPKPHSSGGKERLGAISKMGNRYIRRRLYLGAMGVIYTRKRADPGEDWLGRMLGKKPLKVVAIALANRMARRIWAMLRTGEVWRAA

SEQ ID NO: 464530 - protein, 360 aa, unidentified
MVMLAEQYEYVIGGDPDRDTIDLAVVDAATGVVQCHRSDRADGPGYRQLLSWAIEQAPGRRVWALEGTGSFAAGLATALAEAGEDVVEITGGKRTRGAKNDRLDAVRAARTAMAREHQSQPRTRGLREALRQILVTRQAVLVSRTKAINELKSLIVVAPEHLRVGLRGLSLAKQLQRIAALSSPAGATVEHRVTVLTLRSIAARVEFLLAQTAELDPELLALVKAHPAGPALLAEPGVGPVVAAQLLVSWSHRGRVRSEAAFASLAGAAPLEASSGQRCRHRLNRGGDRDLNRALHTIAITRLRCHPESRAYETKRTAHGKTHRDVRRSLKRALARRLYRRIQAATRPEAVPLKQAPTST

SEQ ID NO: 464531 - protein, 371 aa, unidentified
MEHTRFVGLDIHKERISIAVAESGRSGAVEYIGEVANDPGAISKLCDRLGRPGRPLAFCYEAGPCGYGVHRQLKSLGHRCDVVAPSLIPMKPGDRVKTDRRDATMLARLHRAGELTPVWVPDADHEAMRDLIRLRSVVRQIVTRTRQHLQGFLLRHGRKHGQGTAWRMAYRRWLSTLAFQHTAQQIAFQDYVDAVMDAERRLQRVEEQISCLLPEWNLRPVVDALQAMRGIALINAVVLVAEVGDFTRFSSPRQLMAYFGLVPGEQSSGETIRHTGITKTGNSHARRALVEGAWAYRMKPRIGRHKVDRIEALPKIVRDIGWKAQVRLCARYRRLSARGKNANVVNIAIAREMVGFIWSISCTIQSAPRTA

SEQ ID NO: 464532 - protein, 296 aa, unidentified
MEYFTGLDVSVDETAICVVGDDGKVAFETAVETDPAAIAEALRPYADRMRRVGHEAGSLSPWLHTELLAEGVPAVCLETRHVRAALSAQRNKTDANDALGIAHIMRTGWFRQAHIKTDGCYRIRLLLVQRRNLKRKFLDLENAIRHSLKVFGIRLGKVGRGAMEKSVREAVAGAGLMDCMLRARAALWAEYLTLHKLVVQLAMRDELCRRFMAIPGVGPVTALSFSSAIDDPQRFRRSRNVAAYFGLTAKRWQSGTSIDVQGRISKAGDPDVRRALYEAASAMLKSPRRIVPDYLL

SEQ ID NO: 464533 - protein, 425 aa, unidentified
MHTKQYNRQQEKRNRIGNQTLVVGMDIGSEFNAACFMDKEGNVLGRYPTIYNSRKGFDYFQTMLMKTKRKHKLTDVLIGMEPTGHYWRKIAFFAKEKGYEVRFVRTTAVKHQRELDESSSGKSDSKDAYTIGNIVREGKYIDTVIEDSVFRQLRTLAHARERILRYIVGSTHGLQAVLNDYFPELRHLFWSMKAKGLWTLLETYPFPEDVRNAGLAAVVTLLAKGTGKKRHIREQAEQVYQAAAESVGLTAIGKADRARLTMYLEEIKRSDARRKLLEHEMEELLKEIPCAQYVLSLPGMGKVGCAVFLGELGNPDYFKNPRQIIKFAGYDPKENNSGLRVGRKIISKKGRWLLRKCLFFMVLRLVHMSSFFKAYYEHKKKGFDRPLEKTEALCAVILKLIRVLFALMRDRRMFTEELPRCEKAA

SEQ ID NO: 464534 - protein, 308 aa, unidentified
MPRTPQELVQLRGPRARIRKAEPRRPSLAQELPALVERLQAQAPALIVLEATGGLEGPVATALALAGLPVVIVNPRQVRDFARAVGQLAKTDRIDADVLALFGERLRPMPRPLRDADTRRLEALVVRRRQVVDMLTAEHNRLAGAPTPAVRQRIAAHVHWLQGELRSVDQDLDGAIRQSPLWRAKESLLRSVPGVGRVLTLSVLTQLPELGTLNRKQIAALAGVAPLNRDSGRFRGRRTIWGGRAPLRAVLYMAALVATRRNPVLAAFYRRLLAAGKPKKLALVACMRKLLTILNAMLATNTAWQAAH

SEQ ID NO: 464535 - protein, 520 aa, unidentified
MVRSRTRARSSRRRVATSVSKPRGVLHPRVQQVGPEHFGIVCFDCAKVRSKFLLADFYGRLLIAPTPVAHTRPALEAAVAQVRAAFAEHQLRDGLVAIERTGRYHRVVQRTFAAAGWETRILHPFVTKQYRQPVDPGNKTDDADLAAIHRATVTGCALLEATRDEAWTTLQLLVRHRRDLVRKGAALNCQIRDHLEAAVPGYAACFDELWESAIPWHLLRHYPGARPLYGAGVASLCQSLRQAGIRHQQRTVQRVVDWAAQAAPGDIAAGQHLRIALALYDDRLRKNQGIQAAERELAGRLAPTPYVLLLSFPGVNVVSAADFGGEAGPIEHYTNAKSITGRAGLRPCRYQSDAVDRADGPLVRNGNRALRAAILGIADNLIACNHHFQALATRWAAQGKDPRHSRVKVGLRFCRIAFQMVAGRQVFRHPCIQGRHSILDKLTAFHRDHGTAMPDVLRDLQAAVGQLPRPAYAAEAKPLAEELARIQQGRRRGPQLLGDLLPTVLARLGVGVVQSSESGE

SEQ ID NO: 464536 - protein, 452 aa, unidentified
MAKRSKKRCEELPILHPDAAGIDVGASELFVAVSADRDPQPIRSFPTFTRDLNALADWLQQCGVCSVAMESTSVYWIPVYQILESRGLEVCLVNAQHVKNVPGRKTDVSDCQWLQYLHSVGLLRASFRPPGFICAIRSLWRHRSSLIQMAAEHVLHMQKALDQMNLQIHRVLNDITGLSGLRILDAILSGERDPVNLARLCHSGVKSSQDTIAKSLEGDYRPEHLFALRQSLAAFHYYQQLVVEVDQEIQRQLGSLETATTAEPTLPKRTKASAYQRRRYEPKTFDLRSELYRIFGVDLTNVPGISAITAQTILCEIGTDVSRFRNASAFASWLGLCPENKISGGKVLYTKSRRVRSRVATALRMAANSLHHAKDYLGEFFRRITRKLGKPQAITATAHKLARIVYHLLSTKEAYNETVFHHCDEEALRRAQFRLRRQAAQLGFQLIPVQNG

SEQ ID NO: 464537 - protein, 350 aa, unidentified
MTMVGGFDVHRKQITFDYVDDDGLVRVGEIRPATRATLRAWLGERCLAGDAEFALEGCTGWRYVVDELAAAGVVAHLGDPAEIAAARGPKKRAKTDRADARLLRTLLVQGRFPESWISPVHVLEIRTLGRLYCTLMDERRAWQQRIHAQLFHQGCPPIRALLSAAGRAALVSAELSPAGRQYVDTALRRIDELSTEIEPLRTQLVNFARRQAGCRALQTHYGIGWLCAAIMWAEIGDARRFASPDQLVRYAGMDVSVYSSDATRAPGHLSRQGSPELRWAAFEAAKCAARRSSPDYAYYLRVAAKRDGHNGKNPTLAVERKILRRCYHTLRELGDAALAMPMPERQEVAA

SEQ ID NO: 464538 - protein, 348 aa, unidentified
MVHFAGLDVSVKTTSVCVIDDAGKVILEQKVPTEPAEIIAVLTSLGVPFGRIGIEAGSLSQWLVNALTAADLPVICVETRHMKALLTAQQISKTDRNDARGIAQMMRVGLFKPVHVKTLVAQEQRMLLTSRKLLQRKLLDVESDLRGTLRNFGLKVGVVSSFRYEVRVRELVAGFPRLAAIVEPLLSVRRVMRQQLAVLHKMLLDMVRGDPVCRRLMTAPGVGAVVALTYRATVDQPQRFVRSRAVGAHVGLTPKRYQSGETDYEGGVSKCGDALLRTMLYESAHALITRGAKWSWLKAWGVRVAQRRGMRRAIVAVARRLAVVLHRMWVDGREFRWSKDSTAVPAVA

SEQ ID NO: 464539 - protein, 477 aa, unidentified
MPRWIGLDLHKRVLEVCVLDEAGHIQSRTRLPVERAELRKFAERELRTDDQLAVEATTNTWPVVALLRPYVGKIVVSNPLQTKAIATAKVKTDKVDAETLARLLRADYLPTVWQPDAATAHLRHLCSQRSSLVADRTAVKNRIHALLHQRLIPVPNESLFSQRRRRWLTDLELEPEDRATLARDLHLLEEFDRAIADLDHTLYRVGGNDPRLKLLVTLPCVDVVCAQTLLAALGDVRRFHDGAHAASYLGLVPSTKQSADRCYHGPITKAGNGHARWMMVQAAQHLDRHPGPLGAFFRRLARKKNRNVAVVACARKLVVIAYELLLHTQPYRYAQPGPTAEKLRRLRLRTGGTRRKTGSPKGIWSVAKLPGGSRTFKALPTLYAEEDVPQLVPPAPGELRVQRQPDVAHFVASLSQSQVRRRRRPTTDDLTSEACTHTRAVSEDLALRPSAPVKAAARPAPLRSAPAGDGRSPDKRR

SEQ ID NO: 464540 - protein, 342 aa, unidentified
MKQYVGLDVSQKETSVCVVNEVGQVLFEGKAKSDPGALAALLRKRAPRADRIGFETGAMASWLWHELRRVDLPVVCIDARHAHAALSVRMNKSDQNDARGLAELVRVGWYREVKVKSEESQKIRAILVARSRLVAIRRDIENQVRSLIKEYGLLFPRAIGKQFRNQVSELLGEDHQLLGVIAPLLSIHEHICEQQSKFDDEVRRLAKLDETTRRLMTVPGVGVVTALTFRHTIDDPSRFRSASTVGAYLGLTPRRNQSGETDTSGKISRWGDRLLRSYLFEAATVLLYRTKKWSSLKAWGMKLAKRIGVKKAKVAIARKIAVILHCIWVDGTSFDWGQAKPA

SEQ ID NO: 464541 - protein, 469 aa, unidentified
MKKKKHKNKGLRFKNLDQLEQINLNAAGIDIGAEEHYVAVPKGRDPEGEDVRHFHTFTADLLNIAEWLKSCAIDTVAMESTGVYWIPLFEILDSQDFDVKLVNPRFIKNVPGRKTDVVDCQWIQQLHTYGLLQGAFRPDDKICELRSYLRQRSMLTSYASQHIQHMQKALEQMNIKLSHVITDITGATGMRIIRSILVGERDPEALARMRNPLCKSSESEIAKSLQGNWRSEHLFALQQAVDLYDFYKSKIIACESRIHACLETFEDRSDGTSLPKSSNRSSGSRHKFHFDARTSLYRMTGVDLTKIDGIDTPTALTIIGEIGIDMSKWPTDKHFSSWLALCPGSKVSGGKVLSSKSKPSANRAAHAFRLAAYSLHNSKSALGAFLRRKKSHLGSPKAITATAHKIARIFYNMLKYGSKYVDLGQDYYERCYRERVIANLKRKAKQLGYDIVNVKELENFTTSYKVAVT

SEQ ID NO: 464542 - protein, 384 aa, unidentified
MKDLLEISCGLDVHKEKIVACILTGPLGKPTRSEIREFSTLIPDMIALRNWIVSKNCHHVAMESTGIYWMPIYEILEDAFSGDITLLVVNARHMKNVPGKKTDMRDSEWISTLLRAGLLNGSFIPEKRIREFRDLNRYRKSVIRDITSQKNRIEKFLQSSGFRLSSFISDIFGASGRNIILHLIEHGQIDKTALDSCLKTKTRNRIDEILMSVNGTLSEHQKAFLRILMTHYDSLKKHLAEIETSLEEDMAPFALQVEQLNSIYGISTTASCAIIAEIGIDMKPFKTAEHICSWAGLCPGNNESAGKRKSTSVTKGNPYIKSMLCEIAWVIAGKRNTYLSAWYWRIKQKKGAKKAIVALARKLLVIIYTMLKPVSYTHLTLPTT

SEQ ID NO: 464543 - protein, 419 aa, unidentified
MRFIALDVHRDFSEVAIAEGGQVRLAGRVETTPAGLELFAQSLGADDQVVLEATGNALAIARVIEPHVARVVLANPKAVKGATQTAKTDKLDARTLAQLLAAGFLPEVWTPDERTRALRRRISRRAQLVRQRTREKNQIHAILIRNLKARPPVTDLFGVQGRKWLSGQGLPDDEREMVEACLRGIDFLDREVAAIDRALAELVLASPEMRRLMTLPGVNFVTAAGLLAAIGDAKRFPTARHLVSYLGLDPRVRQSGSEPARHGRISKQGPGEARHVLVEAAWHAARTTGPLRAFAERVAARRGANVATVAVARKLAVIAWHMLTRGEDYAFVRPSLVREKIRRLELMVGAERRQGRRNPVRVFATSEQHRLEKELAAQAELAYRRLMVDWKAQRRKGTGAAPGRASSAARQGTAPRPAL

SEQ ID NO: 464544 - protein, 345 aa, unidentified
MEIRTIGIDLGKTVFHFVAVNARGQVVVRKKGSRTQLLRFTANLPQCLIGMEACGGAHFLGRALREQGHDVRLMPAQYVKPYVKTNKNDYIDAEACSEAVTRPTMRFVPIKTDDQLDLQSLHRVRERWVVRRTAVINQMRGMLLERGITIRKGRHYIEESLPGILEDADNKLSGALRVLLTQLRLEMQYLHGQIEETDKLIARICGELEQCKRLVAIPGIGPITATATVAAIGNGAAFKKGRGFSAWLGVVPGEHSTGGKQKLTGTSRRGNKYLRKLFVQGAHTVLLQKTKQSSGLSTWLVNLTSRKRKQVATVALANKMARMVWAVLFKGEAYRPPTAPQVIAA

SEQ ID NO: 464545 - protein, 342 aa, unidentified
MSKHVVRGGDVAALLERFAQLRKKTRARTGKVFPFVVIQEAGLEGFWIDRVLRNEGIESHVVDPASIATSRRRRRAKTDRIDGEALVRALLAYKRGEPRVCAMVKAPTPEEEDRRRLCRERKVLIAERVRHVNRVKGLLFSQGISGYEPQRRDRRERLDMLQTGDGHLLPDHLKAQVCRELDRLELLLEQIKAVEAERDVLLAAQQVTAPATMLLDIKGIGPEFAAILWSEGLFRHFDNRRQVASYAGLAPTPWQSGSVDREQGVSKAGNPRLRTTLIQLAWLRLRHQPQSALALWFEERVRRNGGRHKKTTIVALARKLLVALWKYVTAGVVIEGAVMKAA

SEQ ID NO: 464546 - protein, 392 aa, unidentified
MALYVGIDVSKDKFDACGIGDGGKKVFSCTSTMDRNGFEKLVLHLKGKNHALLLGLESTACYHIALFSYLTAKGYRVVIINPLLISNFVKLQLRKTKTDKKDALTIAQFLMLKREALEEHPSCSADMMELRDLARRRERLTDQVTKLKGNMKRILSVTFPELEHLTGVFAKSILQLLIRFPSAEALRNANVDEVASIVVPRSWGRKSRAWVETLMATASSSIGVSGPAKELVLKQDAAQLLYIEEQIKEVTKLLMSLCTERMNKDIEILTSLQGIGASTALQFLIEMGGDIRLYKNDKKLIAAAGLDPSTYQSGTYEGKSRISKRGNRHLRRVIWLMAKNTIFSNDLFRSYFYKRRREGLPYKMAVLATAHKLIRVIFSMLVHQTYFKEGGK

SEQ ID NO: 464547 - protein, 326 aa, unidentified
MEHELHYIGIDTAKEKLDVDVLRPDGRHRTKKFANTTKGHDELVSWLKGHKIDHAHICIEATGTYMEPVAECLYDAGYIVSVINPALGKAFAQSEGLRNKTDTVDARMLAEFCRQKRPAAREAPHPLERALRALVVRHQALTDMHTQELNRTETAREVQRPSIDAHLLWLEAELKRLEKQIKDLTDDDPDMKHRRKLLESIPGIGEKTSAVLLAYIGLKDRFAHARQFAAFAGLTPRRYESGSSVRGASRMSKAGHVSLRRALYMPAMVATSKTEWGRAFRDRLAANGKKGKVILGAMMRKLAQVAYGVLKSGVPFDASRHNPVAA

SEQ ID NO: 464548 - protein, 443 aa, unidentified
MSELAVLDPRAAFVDVGSEKMHVSIAGGPPALFGTVTSQLHGLRDYLAEHQVRSVAMEATGVYWLPLYGVLEAAGMEVVMVDGRQTRNLPGRKTDMKDCQWGATLHAHGLLRAGFVPPANIRRLQDYLRLRGDHIAAAAGHVQHMQKALERMNIKLHEVISSLTGASGLAVIRAILAGERDPQVLLGLCDIRIRNVKAERVVESLRGDWAEEHLFALAQAVQSWDHYQGLIAACDRQIAVVLGQMPDAKVPPSAASTKTGKPRTRPGVNAPDIADLREILAQICGAKDLTTLPAHSEYSVLQLIGEVGTDLTKWRTEKHFTSWLGLAPGSAQSGKRKASVKRRRNRAGQIFCVMARALARSKYVALGGFYRRMAARRGGLVANKALARKLATLFWRVMVKGLDFVETGVAQYEAKVLETKHRILHRLARQLGQKIVPNPAAVV

SEQ ID NO: 464549 - protein, 343 aa, unidentified
MQTVTTIGFDIAKSVFQVHGVDAAGQVVVRRQLKRRQVMAFFEKLPPCLVGIEACASSHYWSRQLQALGHGVRLMPPAYVRPYVKRQKNDRADAEAICEAVTRANMRFVPTKTPEQQSGLMLHRARHLFIRQQTSVINAIRAHLAEFGITAPVGRRGVEDLLRVVADPSDKRVPEVVRACLGALGNQLLNLKKQILNFDRMIMAWHRSNQTSKRLNCIPGVGPLLATALVASVADPKTFRSGRNFSAWIGLVPKQHSSGGREKLSSISKQGDRYLRSLFVAGAFAVIRYAKIHGTKHRPWLTALLTRRSTKVAAIALANKLARMAWAMMATGERYNYPASLKV

SEQ ID NO: 464550 - protein, 338 aa, unidentified
MKTKYFIGLDVHKEKTTYVVRDRLGNILLEGEAATLYNELQDRLKPYLKSSVIGVEACTSYYTLYQSFLKNNYDIRVANTMQLRQLITKNDSLDSKRLSEMLRLGTFPCSYIPDEDIQRLRSLVQIRHSLMEEKTRCNIRIQAFLDRNGIVMPSYKAFTKKWRHALMQYMGSGEVSLELRYEYDHFVYLEKKIEQLDQEMTGYTKKHWKVEYLFIQSITGFGPLLTCYIIAYILPIERFSSNRKLRRYAGVIPTFHESGGKSSKGHIPKSSSRKLLRWALVQAANTAGKTDTKLGRYYRMKKKQKKNAGIAKIAVASSMIDIIYEVLTTKQLYNPTVY

SEQ ID NO: 464551 - protein, 337 aa, unidentified
MIVIGVDVHKQSLTAVAVDEAGRALAEVTVAAAPELLGWSASLARERLWALEDCRQLTRALERTLVAAGEGLVRVPPKLMAPQRRAGRTRGTSDPIDALAVARAALREPRLDHPRPGEQRLRELKLLVDHRDDLIDERRRAQQRLRWHLHELDPEWAVPLGALDRGVWLDRLGRRLARLEQTAQVRIARELVGRCRSLTRMILDLDRELQTAAAQTAPALLALPGCGAISASKLLGEIGPIERFESDAQLARHAGVAPLEASSGKHRRHRLDRGGNRQLNCALHRIAVTQARVHPPARAYLERKQAEGKSRREAIRCLKRQLARTVYTTLKNAPLLT

SEQ ID NO: 464552 - protein, 388 aa, unidentified
MIYVGIDIAKTNHYASIVNYSTGEVLESPFLVTNNKQGFDLLYSKIKDFNKEKVLIGLESTAHYGNNLIFYFHEKQFKLGIINPIQTATLRKTKIRKVKNDKVDSTLICEALSLGYYNLLSDYDIKLLEIKSLCRFHKDLKDKASEAKIQLKTYVDQLFPELNSFFKDNLDIKTAHELLKLYQSPEDISKVNLTKLSNLLIKSSRGKYDKSRAIELKTLASNSVGINNYALSIQIKMTIELIELLESQIKDIEKQVSNFIKKSDNVITSIPGIGDMTAAIIISEIGDINRFNNPSQVLAFAGLDPSVKQSGNFNASSTRMSKRGSSILRYALILAANNVQLNTKTFNDYYNSKRLQGKLHYNALGHCAGKLVRNIFYMLKHNVKFNLD

SEQ ID NO: 464553 - protein, 327 aa, unidentified
MVYLGIDVSKAKLDCALLAPATGKRKNKVVSNDKAGFETLLAWLAKQDISVGEVHGVMEATGVYHEQAALWLTDAGMRVSVVNPTQVRDFARGLAVRTKTDGMDSVVLARYGTLIQPEAWEAPPLEIRELKALIARLEALETDARRELNRREKALVAKAPALVRESLDNHIASLSKEIARLQQAIDDHIDRHPRLKADRDRLLSIPAVGDKTANRMLTVLRSRKFTRAEQVAAFLGLVPVECRSGSSINKRPRLARNGDAKTRAVLYMAAIVATKYNPHVKALYARLCAKGKAKMAALGAAMRKLVHLCFGVIKHQTSYQPDWAGSC

SEQ ID NO: 464554 - protein, 412 aa, unidentified
MFKIFRNNCCGLDVHKTWIYACIGITDANGRTEYKQARFSSFSKGLRDLAAWLANYSCFEVCLESSGKYWIPVFNILEKTCLVTLAHPKYTKPQKGNKTDVKDAKWICDLFMCDMIKPSFIPSPEIRQLRDLIRYRIKLTNMLTGEKNRAQNCLTVSNLKLDDVFSDVFGKSSRSITNHMLDHPGETFDVAPFVDARCQTPLDEIQAAVDGAISSEQAVKLRQCLAHIDELEAHRKEIEREILTIAEPFSAVLELLYTLPGLDKNPMTAIAILSEIGPDMSVFPSSKHLVSWAGCCPRNDQSNQKVKSRRISRAGCYLKPLLVQVANSLIKSKKHPEFKERYRRIKSHRGHKRAIIAVCKMLLSAIWNMLSKLEPYNPDGFLEHRPVNEKRVLTKSQALELLRLRGYTITND

SEQ ID NO: 464555 - protein, 348 aa, unidentified
MARKTTTQMTTIGIDIGKNTFHVIGLDGDGHIVLRRKLSRSQVVARFANLPPCLVGMEACVGAHHLSRQLHALGHDARLMPAQYVKPFLKGQKNDFRDAEAIAEAVQRPRMPFVPTKSVEQLDLQALHRVRARLVRHRTAIINQIRALLLERGIAVRQGARFLQAALPEILGQNSELLSPRMLGVITDLSGDLRHLNNRLEEVTSEIEGLAKSDDGCQRMMTVPGIGPVISRATVSAVGNGAAFRKGRDFAAWIGLVPRQLSTGGETILGRISKRGNTYLRTLFIRAARVILLRPENWSKHSFGPWLHAASRRMHRNVLAVALANKLARIAWSVLAGERHYEARRVAA

SEQ ID NO: 464556 - protein, 457 aa, unidentified
MNANNARLQSAAKIGISPLIIVQPYLLMKGGDLVKNFMSTLFVGIDVSSKTNVLCALDFQGNKLLNLKALNNQPGAEAILASIIDCLNSNSLKYVVIALESTSFYSTHIANFLSSNEELLFFKPLVYCLNPKSVANYRKSFVDMDKTDPLDAFVIADFARCGRITSAPWRGAQFLALQRLSRHRLHLVECITREKAYMVSNIYLKFSELAVLDKDEQPFSNTYGATSAAVLTEFLSLDDITYSSIEDLVAFVSAKGKNRFSDPYETAKLLQKAARDSYRLDKVLYEPLNTSIASSFNVIKTLDDEIKIIDKAIIKAIKGISTTEYQSLTSIPGIGPVLASGILAEIGTITSFGSHDALAKYAGLTWRVNQSGNYSADDTRMTKTGNKYLRYYLIEAANSVKKHIPEYRDFYKKKFGEVTTHQHKRALALTSRKLVRLIFGLLTKNQIYSSDKVGEIQ

SEQ ID NO: 464557 - protein, 386 aa, unidentified
MLIIGVDYHPSDQYIAFVDPETGECGEQRLNHQNGEAEQFYRDLKQRGVSVRVGMEATGYSRWFERLLADLGIEVWIGDAAKIKTKRVRKQKTDRQDAQLLLKLLLENNFPRVWVPSPENRDLRQLLWHRHRLVQMRTRIMNQLQALAMNEGNRRKKKLWSALGRAQLEKLPLATWASRRRQDLLELLDRMNPSIEALTAAVEQEAKKRPEVLRLMTHPGVGSITALAFVLIIGTPERFQCGKQIGSYVGLIPSEDSSAGRQRLGHISKQGNALLRYLLGEAAQAAVRCDSDWRRRYVHLAMRREKKHCQSGHGPENRGSLVLDVAERLGVCAVGKFRFERGTARYRTWHELERRALDWASRSLLRESFEIVIMVEVLIEEMFGSD

SEQ ID NO: 464558 - protein, 352 aa, unidentified
MTTTAHDVYGGVDTHGKTHHAAAIDGVGRVLGDREFPASKVGYRQLIAWLVAYGTVVKVGVEGTGSYGAGLAALLREHHVQVVEVDRPDRQARRRKGKSDPLDAFAAARAALSGEADGIPKSRSGPVEAIRVLRVARRGAVKARTAALNQLRGLLVSAPAELRESLSGLAEAALIGRCAAFRVDNDRAADPAVATKAALRAVARRIRMLGDEVHDADRQLRSLTARTAPRTTALLGIGVEIAGQLLVTAGDNPERLRCEAAFAHLCAAAPIPASSGRTDRHRLNRGGDRAANAALYMAVVTRMRYHEPTRTYVARRTAEGLSKKDIMRCLKRYVVREVYAAVLADFTAAQTT

SEQ ID NO: 464559 - protein, 442 aa, unidentified
MAVVNPHAAGIDVGSRQHYVAVGQEPQDVRTFNVYTKDHKALIEWLQQKRIVTVALESTGTYWQTLFSSLQTAGFEVVLSNNYIKDPQRKTDTKDARWLQKMHTLGLLKHSFIPSADVARLRSYHRHRSNIVAAATAHTQHMQKALRLMNLRLDVVLSDLTGLSGTKIIEAILSGERSGEALSKLAHNRVKKSKQEIADSLQGDWKEEQLYILHDEWTMYKNCQQRIISCDQKIEALLKTMIQKTPPSLPQKAMTTKTAKEKNNHSKNAPNFNAAALSRDYFGVDLSRIEGVASNTVLTFISEVGSDIYKFPTMKNFTSWLRLAPNNKKTGDKVFSSRTPKGKSIMANAFRVAANTVAQRKDGVLKKIFSRIAYKKGRSAAITAVARRLAEIFWIMTVKKQEYQPKNEQLYEEQIKRNVIKNIHQKIKRFRLTTEDILVITN

SEQ ID NO: 464560 - protein, 339 aa, unidentified
MGEITTIGLDLAKHVFQVHGVDETGAVVLRKRLRRGQVVVFFGNLPACLVGVEACGTAHHWARELIALGHEVRLMPPQYVKAYVKRNKNDVADAEAICEAVRRPAMRFVPVKMAEQQSALTMHRVRDLLVRQRTMLVNALRGHLAEFGIVEAQGLHKVAGLAAIVRDKMDTRVPDLARQVLTVIAGQLDELKTQIATIDALIIAWHKNNPVSRRLASIPGIGPIIATAIAATVPDAHMFRNGREFAAWLGLVPRQNGTGGKTRLGGISKRGDSYLRRLLVGGALSALLGKTVTTDPWVRSLLAKKPRLVVAVALANKMVRIAWAVMCHATTYQPRVAAA

SEQ ID NO: 464561 - protein, 343 aa, unidentified
MEHFAGLDVSVKQTSVCIVDGTGRLVREVRVASEPEALLPVLTNPLYRFKRIGLEAGPLSQWLFSALAEADLPVICVETRHMRAVLQAQINKTDRNDARGIAQMMRAGLYRPVHVKTLRSQKLRMLLTHRKLLQSKAIAIENDLRATLRNFGLKVGVVGTVKFEARIRELVETLPDLAELVEPLLIVRRTLREQIGILHGRLLAIVRHDDVCRRLMTVPGVGPVVALTYRATVDVPARFRNSKAVGAVFGLTPSRYQSGEVNRTGAISRCGDEMMRVMLYEAAHTMLLRLAKWSWLKAWAMKIARQRGIKKAVVALARRLAVILHRIWVDGTEFRWTRETAAA

SEQ ID NO: 464562 - protein, 343 aa, unidentified
MNQIIRIGMDTSKHFFQLHGVDAAERPVLRRKLRRNEVLAFFAKLPPTVIGMEACGAAHYWARELRKLGHEVKLMAPQHVKAYVKRNKNDGRDAEALCEAMSRPTMQFVPVKTEEQQAALMLAGVRQQLIARRTQLSNAIRGYAAEFGLTAAKGLDKIEPLLARIALDESLPTLARELLAMQGHDYARLQAELKAIEARLMAWHRANADSRRLAQIPGIGLIGATTLVMKTPDPRAFASGRHFAAWLGLTPKDHSTAGKTRLGKITRAGDEMLRSLLVAGATAVIQQMRRGRGRPSPWLVALLARKPPKLAAVALANKIARIAWKLMTTGESYDGARMHGAAA

SEQ ID NO: 464563 - protein, 411 aa, unidentified
MDTLYPRCAGIDVHKGNVVVCVRGGDRPGKVVEEVRTFSTMTADLLALADWLAGHGVTHVAMESTGVYWKPVFNILEGGVQVILVNAEHIKQVPGRKTDVKDCQWIAQLLQHGLLKASFVPPEPIRELRDLTRQRTQLVQERSAAANRIQKVLEDANIKLASVATDVLGVSGRDMLEALIAGETDPEQLADFARKRLRAKIPALQLALQGRVTDHHRFLLRMHLDHVTHLEELIGRLGARIEEALAPFAEAAERLQTIPGVSQRVAETVVAEIGTHMEQFPSAGHLASWAGMCSGNNESAGKRRSGRITKGNRWLKRILVQAAWAASHTKGTYLAAQYKRLAKRRGRKRALVAVGHTLLVIIYHVLKRKTTYTELGPDFLDRLEPQRLTRQLVKRLEALGHKVTLEPGQAA

SEQ ID NO: 464564 - protein, 312 aa, unidentified
MEKLSYGGIDVSKDCLDVVVLPEGWFFSVSNDTAGWAELVARLRPLAVSAIGLEPSGGYERGIIRALLAAGLSVRRINPNKLRQFARARGVLAKNDRLDARLIAEYVAIMPTRVVQRDDAVERLAEIVTMRRQLCDEHVAVKNQAAHLEDAMLRRLSKRRLIRLEADIRLLDKRLAEMVATNAAFAQLYELLTSMPGVGPVLAFTLIALLPELGKMSRKQIAALVGLAPYDFDSGKLRGHRSIYGGRMPIRNVLYMAALSASRHNPALKAFSNRLADANKKSKVIIVAVMRKMITTLNAMLRDNAAWQPQSA

SEQ ID NO: 464565 - protein, 369 aa, unidentified
MSSSSVPSTSSVPRTRRPAGEVVLGVDTHRDVHVAAVLSVSGAVLATAEFPATAAGYRDLLKRARKWGIVRRAGVEGTGSYGASLSRYLLAQGIDVFDVNRMDRADRRRRGKSDPLDAQNAARAVLSGRARARAKTGDGPVQIARMYKLAKVSAVKARTQAVNQLKAVLVTADPVLREELAGLGNAELFRTCAQFTGVSSCEDAGEESVVQATRITLGLLAHRIGRLSEEIRDVEARLTRLVERYAPQLLDVVGIGPDTAVALLITVGDNPERLDSEASFAALCGVSPVERSSGRRNYRRLNRGGDRQANAALHRIVFTRLRVDPRTQDYYERRIKEGKTRREIVRCLKRYAAREVFHLVKQPQPAPRS

SEQ ID NO: 464566 - protein, 416 aa, unidentified
MIKSKKQRIVNGKALIVTVDISKDKHFGYWRCPDGTDIKPFPFLNNGSGFSDFWERISRAKEINHLEEIVFGYESTGPYAEALVHFMKARGVRLVQVNPMHTKRVKELQGNSPNKTDQKDPKIIADIIELGHVLTVVLPEGPAAELRRLTHARERSTGRHTALSNQLQALIAIIFPEFLQIIKNVRTVTAKYLLKNYPTPQSLVAYGFDNLAALIKKLSRKRLREDCAKALYEAAKESIGVVEGQASIILEIHAILAALEASEGFTEELEKEMSHHLKQIPYSHCLLSIKGIGEVTAAGLIGEVGDFRKFTTLGEIMKLAGLDLFEVSSGKHQGTRRISKRGRPLMRKLLYYAAMNMVRRGCIMERQYQQYLDRGMLKTKALIAIARKLLRIIFAIVRDNNVFDYSRSTFQLKEAA

SEQ ID NO: 464567 - protein, 376 aa, unidentified
MGHDSTLYVGLDVHKDSITVAYALGSNEVELLGRIGTTQTDIDRLCKRLQSKAHCIRVVYEAGPCGYGLYRQLAKKGFDCMVCAPSLIPRKPGERVKTDRRDAVKLARLLCTGDLSAVYVPTIDDEAFRDLARAWVSAKDDMKRARQRLKAFLLSHGVRYTGRADWGPAHRRWLSAFSFDNLWQQLALDELRRAIEDRLAQCDRLEVALREAVANWRFYPAVLGLQAMRGVQFTTAVGMLAELGDLSRFAHPRQLMAWLGVTPSEHSSGNKRRQGSITKTGNGYARKLLVEAAWSYRHPARVSPEIQRRHEGLPKPIIDRAWDAQTRLCRRYRKLVAHGKEKNIGVVAVARELGGFIWDISRLAMSLAVPREVHVA

SEQ ID NO: 464568 - protein, 345 aa, unidentified
MHYIGMDCHIKTLDFAVVNEAGRLVKAHSVATSVNGFMEFVKTVPAPRIIYMEEGTLAAWALETCVRFRERLVITDAKKNHWIGSSGQKGDAIDALKLAQLGRGGYIKEIHHPVGQRRRFRELMIAYHDTVRSTTRIKNKIKAKFRQNGIQCRGVTVYSKTYRAEWRGKLPQEATLLLIMDGLWRQQEQSEQTEKELLAAARRQAKYYPEIKHFEGLPGIGFVSAATISAMLETPYRFADKRKVWMYAGLGIMTRSSGGKLYSERLSTDYNRLLKYTLKQATETAIREDNPFRRKYLDMTLLRGIQPHRAKLTIARDMLAIMWAMWQKGEKYNPEIREEAARKQA

SEQ ID NO: 464569 - protein, 354 aa, unidentified
MSQTLNAAIAVIGIDIGKNSFHIVGHDERGAIVLRQKWSRSQVEARFANMPPCLIGMEACVGAHHLSRKLNSLGHDARLMPAKYVRPYSKGQKNDFRDAEAIAEAVQRPTMKLVATKTADQLDLQALHRVRERLVSQRTGITNQIRAFLLERGIAVRQGQRFLRAELPRILATPPDVLSPRMVRVIEGLAGDWRRLDERIEGLSGEIEAIARQEPGCERLMSVPGIGPIISSAMVAAIGTGDAFSKGRDFAAWLGLVPKQMSTGDRTILGKISKRGNRYLRVLFVQAAWVVLIKPMSWERHGLKPWIEAAKKRLHRNVLAIALANKLARIAWSVLARGRSFEARTITNVAAQAA

SEQ ID NO: 464570 - protein, 364 aa, unidentified
MSKKKSIAGMQALYGRVCGLDVHKKVVVACVRILDPKDGMVQSTLRSFGTMTRDILALREWLTELKVTHVAMESTGVYWQPIFNLLEGHFTVWVVNAQHIKKVPGRKTDVKDAEWIAQLLQCGLLRPSFVPERQQRELRDLTRQQTKLVQQRNAVENRIQKVLETANIKLGSVASDVLGVSGRKMIEALIAGEKDVEVLADLAKRQLRGKIPELQRALEGELTDHHRFLLHELLEQYDFLENKIQSISERLGVLAPTSFQAAVEKLDTIPGIAERGARALLAETGTDMSRFPTHKHFASWAGQCPGNHESAGKRKSGKTPDANRHLDSILTEIAHAAVRTKKSYFKGQYHHLAGRRGKNVLLAQ

SEQ ID NO: 464571 - protein, 347 aa, unidentified
MNFYNRQHQYYCGIDLHARKMYVCILDQKGKVMVHENIKTDPEAFIQIISPYVNDIIVGVECVFCWYWVSDLCAKHKIPFALGHALYMKAIHGGKTKNDKIDSYKIALLLKGGNFPTAYPYPAEWRATRDLLRRRMYLVRRCGELVAHVQNTRTQYNLPGFTKRLARKYNHDGVAETFENPEVRKSVEVDLAAIASLNQILNQLEWHIEKTAEQHDYHTLYLLRSIPGVGLILALVFLYEIQDIKRFPSVQDFSSYARLIKPVKESDGKWAGKSNGKIGNHHLKWACNESAILMLRESEKAKQYVAKLERKYNKGKALGIFTHKIGRAVYFILKNKEVFNMDKFFSQ

SEQ ID NO: 464572 - protein, 482 aa, unidentified
MAKRKMSTFERMQHGKMNRKQRRELGRRFNSEDPGLEVVHPDAAGIDIGNESHFVSIPPDRNTVPIREFGSWTADLHEMASWLTEHGIRTVAMQSTGVYWIAVQEVLEQAGLEVYLVNARGTKNLPGRKSDVQECAWLRKLHTYGLLRNSFRPPEEIRAVRTIWRQRDRWVKDSGRAVQQMQKALTTMNVQLANTISDISGVSGQLILRAIVAGIRDPWELAKLRDKRIMASEEEIAHSLQGNWREDVLFELRQVIETYDFYQKQMADCDRELTKYTAAVASREITEKHEMPKGASALPSSKPARRSKTRRKNQPGFDLATELERTMGVDLTRIDGIDVITAQVIFSEIGPDFGAFPDENHFASWLTLAPQRDISGGKVIRHIPAAGRNRVANALRMAAQSLSRSNSYLGARYRRLRARLEGPIAVKAMARYLACLVYRMVTKGQAYVDRGAAHYESKRQEKERLALQRRAASLGLKLVAAT

SEQ ID NO: 464573 - protein, 466 aa, unidentified
MQPNRRRSLGKPRVSPTVFDRLNPHVAGIDCGSGEHYVAVPPDRDPHPVQSFPTFTSDLLRLADWLAACRVTSVAMEATGVYWIPIYEILDARGFEVLLVNARHFKNVPGRKSDVSDCEWIRELHSVGLLRGSFRPTDAIVALRAYMRHRQTLVESAGTYTQRMQKALVQMNLQLPLVVTDITGVTGLRILRDIVAGQRDPQYLAAHRDFRIRASTADIVAALTGHYRPEHLFVLQQNLELFDACQAQLAACDRAIDAHVQTLTAQRPPPVTPLPDPRVTKKPHDNQPRFEIRAPLFQLTGGVDLTQIDGVAPYTALKLIAEIGLDMTRWPTEKHFTSWLSLAPKNKISGGRLLSSRTPPSANRAAVVLRMAAMSLGRTQTALGAFYRRLAARIGKPQAITATARKLAVLVYRALKGELVYRTPGADAYDIQQRARVLRRLRQRAATLGFSLVNRDTGEILAPAIP

SEQ ID NO: 464574 - protein, 343 aa, unidentified
MKLSYVGVDLAKNVFQLHGVDRSGKVRWRRRLRRHQWLGALMEAADPSCEIGMEACTGAHHWARQLQAGGYTVRLIPPQFVKPYVKSNKNDANDAEAICEAMTRPHMRFVAVKSVEQQDIQATHRIRAELKDQRNAKTNQIRGLVAEYGLVAPQTLLALRRAIPDWLEDAENGLTDYFRSLLHGLWGDLLALDERIKELDKQIERLANGNEVTRRLQQLRGVGPMIATALVATVGTGEQYRKGRQMAAALGLTPRQNSSGDKHRLFGISKRGDAYLRTLLIHGARAVMSQARHRDDPLSRWVTDIAKRSHPNVAAVALANKTARMAWAMLQHGTDYDPALAVS

SEQ ID NO: 464575 - protein, 419 aa, unidentified
MSKARKPMRVKSHQLTVGIDIGKYHHVAVGLAGDGRFTKPMKLPNTREGYEQLLLRIMAWKKEYGADEVLVGMESTGHYWEVPARWLTAHSIPVVQVNALHTKRAKEIEDNTPGKTDPKDARIIAQLVAWGKYLDCHLPDGVVAELRQFVRQRSTLTNELTEKRNYLRYLLDCVFPELFTVFKKSSGKTLLHLLALCPSPHELIGADQADVARTLRQHCPTGAAKRLDRVYALARITVGIAPARHAYAVAIRRTATRILALREEKAEVEQQMTKLLIELPEAGSLLSVKGIGPVSAAIIVGETGGLHRFGHAEEVIKLAGLNLFEVSSGTHKGTVRISKRGRPLLRQILFVLATIQAKKGMPFHACYEELLNKKMPRVKALIAVARKMVRVLFALVRDGRCYQDEKPAALKMGRSSRYP

SEQ ID NO: 464576 - protein, 363 aa, unidentified
MSVESSNELVNGEVAITLGVDTHKDAHVAVALDGLGRHLGVISVPTTENGYRKLLRWAEDLGNIERVGVEGTGSFGAGLTRFLIAKGIEVREVIRPKRRDQYRSGKSDPIDAEAAARAVLAGTATSLPKGADGQVEMIRALRATRRSALKARTQAANHMKALLVSAPEELRAELCELSTSKLVKRAARFRLGGCPDDVTAATKFALRSVARRYLRLSEEVSELGEQLDRLVGEAAPELIAVEGVGTDTAASLLIAAGDNPQRLRSEAAFAHLCGVAPIPASSGKVARHRLNRRGNRDANRALYAIAFGRMRRDRRTRDYVARRTVEGKSKKEIIRCLKRYIARELYRVLVVPSPRERPPVSAP

SEQ ID NO: 464577 - protein, 407 aa, unidentified
MTFFVGLDWAAATHAVCVIDDTGGVRWRGTVPHTAAGLTELVERLTRFGPPASLAVALERPSGLVVDTLLDAGFRIVPIHPNVVKASRPRYSAAGAKSDPGDAYLLADLLRTDGHRFRPLRPLADETRALRALVRGRDALVAQRVALANQLRALLERFWPGAATIFADVDSPIALAFLRRYPTPQSAERLGERRLAQFLRRHAYCGRRTPADLLARLHSAPRNRTGDAESEASGELVLALVAVLTPLVAQIQQLAAAIAASLDQHPDGPVLQSLPRSGQVNAAQILAELGDDRGRFPTAEHLAGEGGVAPVTHSSGQHRGVAFRWACHKRLRQALTTFAHNSRHASGWAAAVYARARARGCDHPHAIRILARAWVRVLWRCWQDRRPYDVTCHRAAQPLLALQPARG

SEQ ID NO: 464578 - protein, 372 aa, unidentified
MLYLGMDQHKSQITVNLRSEDGEIVLQRQVSTRWKKIRTFFDNLTERAAREGGFMAIVEVCGMNPWLIEILEEYNCSELVITQPENRSKQKTDRRDANGLSYLLWVNRHRVTGGQQVPGMRRINPPTPQEAEDRQLTTMRQTLTQKRTAVLNALHKILRKHNFEQDRPTKHFKTKKVREWLATMYLPEIDRLEADQLLAQWALLDEQLGELDAKISERVQGNEEVRLLQSMPGLGEYSALAIRSRISNIERFKRPDSLANYFGLTPGCRNSGEATQRLGSITKQGSKIVRHLLGQAVVKVLQRDGTMRKWYKRIKKRRGSKIARVATMRRMVTILWHMLKKNEEYRCASPANRFEEFDKFSGEPEAAQKAVG

SEQ ID NO: 464579 - protein, 341 aa, unidentified
MDIDILGIDQARRVFQLHGADRRGHALHDSKVLRAELLGAVRKLQPRVIAMEACSSAHHWGRQFQAMGIEVRLISPQYVAPFVKTNKNDANDAAAIVEAASRPTMHFVTVKSVEQQDMRAVHRVRELLVHQRTALINQVRGLLAERGLVMAQTPTAFKRALPSILEKCEGELTSICQTLITEMLEQLRTLEERIARTNQWITSFLKSSALCRKVEAIDGVGPITATAVVAAVGDAKEFKNGRHLSAWLGLVPRQYSSGGKSRLQGISKRGDIYLRTLLIHGARVVLRYAIGKADARSRWLQDLIARRGYNREAVAWANKNARVIQVLLSGTENYRSPAVPA

SEQ ID NO: 464580 - protein, 317 aa, unidentified
MSTDHSITVLGIDLSNNWLDAHILPDGRSWHVSTDPKALAKWVSQLPQGIDLVVMEATGGLQNLPAALLAKANLPVAIVNPKQVKDFAKALGQRAKTDEIDAKTIALFGLKLRPSPRPIPSEAQRLLSQLLARRGQLSQNRVAELNRLKRAEVKSIRRNIEAHVQWLEKQMAKIDNEIDEQVLNSPMWLANEKLLTSVPGVGKITARVLLGHLPELGQLPRRQLASLVGVAPFPRDSGRWRGKRFIQAGRARVRASLYMAALTASRFNPVLSDFYSRLIDKGKSKKVALTAVMRRLLTILNAIIRNQQPWRQPLITP

SEQ ID NO: 464581 - protein, 450 aa, unidentified
MQQPQEVEDREGERTVARVAAVDVAKASGVVCTRVPREGEPGRFTTKVWPVAATTNAILELADHLAAAQIEKVVLESTSDYWRPFFYLLEAAGLTVELVNARDVKNAPGRPKTDKLDAVWLAKLAGWGMLRPSFVPPAEIRQLRDYTRLRTDLTRERTRHWQRLEKLLEDALIKVTTVASRIDTMSVRDMIEAMIAGQRDPHKLADLARGRMKAKRAALIEALTGRFDDHHAELAAILLAQIDSLTRQVEALTARIEQLIPAIPAAQGVDPDGTTGPLAGRGPDAPVLPAIDRLEQIPGISRHAAQVIIAEVGLDMTRSPAAAHLVSWAHLCPRTIQSGASIRPGKTAKGNPYLKGVLGDAAAAAGKTSTFLGERYRRLAKRRGKLKALVAIARTLLVIIWHLLADRAARYDDLGDNYYITTINTDRKLRSHIRQIQALGYDVAITPAAA

SEQ ID NO: 464582 - protein, 324 aa, unidentified
MSDSIVGIDVSKDTLDANCARGQRKQARTFENNPDGWKLMLCWLKAMGSKQAHVCMEATGRHSLGVALALHDAGHSVSVVNPAQIRDFARTKLGRNKTDKIDAALIREYATLFKPGRWVPPSPAMRRLCELQTVRAGIVKNRTEWKNRIGSGLGDSIATKLAAATIEHFTSQLEAVDRAISETIDQDAELRGRRDLLLSVIGVGETLAALLLVEMPEPEVLRQSGEMVAYAGLNPSHHRSGTSIDRPTRISKIGNATLRSSLYMPALSAMRFNPAVAALVARLKQAGRLKPKQIVVAAMRKLLVICFGVLKTGKPFDPAIAMPA

SEQ ID NO: 464583 - protein, 312 aa, unidentified
MQILDIGVDVAKDTVVIAQPGCSPRTLANRRVELLAWLKTVPAGSRLAMEATGRYHTLLADLADSLSLEVYVLNPKDVRYYAKGLGRRGKTDRVDAQVIARYLAKEHEQLRVYHTPSPEQRELDQILLRRARVVALRSALRASVQDLPLVGSELAGVLQGLDALILRLDQRRDALIAACPQRQQDQQCLQSMVGVGPLVGAALGQALQRISFGSADAFVAYTGLDPRPMDSGQKAGRRRLSKRGPAELRRLLYNAAMSAAKTKTWKPFYERHRAKGLSTTAALVILARKIARIAWSIHRHHTTFNPQMVLAT

SEQ ID NO: 464584 - protein, 321 aa, unidentified
METATAYVGIDVAKEKLDIAVHSSDQQWTFSNSDAGIGRALSYLQKLNPALIVVEATGGIEMPLVAALAVARLPVVVVNPRQVRDFARATGRLAKTDTLDASTLAHFAAAIRPPLRPLPDAHTQEITAVLTRRRQLVEMLTAEGNRLGAARSKAVRRRISAHITWLEKELANVDDDLDSSIRNSPVWREKDNLLQSVPGVGPVLSTTLLAHLPELGSLNRRQIAALVGVAPFNRDSGNFRGKRAVWGGRSAIRAALYMATLVATRYNPIIRAFYHRLCAAGKPKKVSLTACMRKLLTILNAMLKHRTPWHYAGIQTFEPCS

SEQ ID NO: 464585 - protein, 351 aa, unidentified
MYISHYIGLDVHKKSISYCVKTADGRIVEEGKLRATHQVLREWAQKRSEPWHGAMEATLFSGWIYDALKPFAAELQMGNPSMMKAIGAAKKKSDQLDARKIADLVRCNLLPVCYVASAEMRDLRRMLRYRNLVVGQAVQMKNRMSGMLMEVGAEYRKQRLHGKQYFSELLDQLEEVPASVKDLLRLSRGALEMFETTQRQLLDRLQKEPLLVKRVKLLRSIPGVGEVTALTWALETCDPRRFPSIGDAVSYCGLVSALVSSADKAKRGPISKQRNAHLQTVLIEAAKLAPRWNQPLAELHERELKRGDRNQATLAVARKLVAYLLAVDKSGKRFEVRKPPVREMEEVGQMA

SEQ ID NO: 464586 - protein, 344 aa, unidentified
MEAHASVVGLDIAKSVFQVHAADAVGKAVIRRKLRREEVETFFRNLPPCLVALEACPGSHFWARLLRGIGHDVRLLPAQYVRPYVKTNKNDAADAEAICEAVTRPTMRFVPIKEEMQQEVLVLHRVREMLIRQRTQLINSIRGHLAEFGIIAPNRAHNIGLLTKLIEDDEYEELPAVARHALRYLVEQLREVKTKLFRIERDLMRVVKGSDACRRLMTIPGVGVVTATALVSSMREPSDFKSGRHFAAWLGLVPRQHSTGGKESLGGISKRGDGYLRRLLIHGSRSIMRWRGRSWTWLAKLRDRRPANVAVVAVANKTARIVWALLMFGGTYGHPGEGATMRTA

SEQ ID NO: 464587 - protein, 400 aa, unidentified
MPTLWAGIDAGKRTHHCVVIDSDGAVLLSTKVSNDETELLDLIATVIALDSDGEVCWATDLTDGGAALLIALLAAHGQRLLYIPGRIVHHASATYRGDGKTDAKDARIIADQARMRTDLQPVRIATDVALGLRLLTSHRLDVIHDRVRAINRLRATMLEYFPALERAFDYSKNKAALVLLCHYATPESLRRIGVARLAAWLKARGCRNSSGVAKTAVDAAHEQTTALPALSIGSALVTKLAAAIIAIDEDLAGIDAEITERLAQHQSAANLLSMPGFGPVLAATFLAQIGGTLDAFENVDRLACVAGLAPVPRDSGRISGNLHRPRRFNRRLLRICYLAALSSLKNSPASRAFYDRKRAEGKSHKQALIALARRRMNVIWAMLRDNTHYVEPTVNVPITT

SEQ ID NO: 464588 - protein, 377 aa, unidentified
MKEKAFIPQDYDVFAGLDVDKKSISVTFSSHQQGFIRSLHMPYSVEHLLKHVRKNFAGQKVAFVYEAGPTGYGLYDGLAAQDYKCLVAAPSMIPRAPGQRVKTNRLDSRGLSENLRGGQLKSIHVPSQLYRELRHLTQLRDTLVSEVMAMKQRIKSLLLFEGIAFPVAPAGSQWSLKVKAKLRKIDCSTGVRFKLDQLLDSVEFSEKQVVKVTKEIRRFCQNDPELSQCIKYMMSVCGIGWIVASQLLARIGDWREINNVRQLGAFLGLVPTENSTGEKTDRGSITHAGDARLRSKLIQASWSAIRQDGELREFFRSVCQRHPRSVGPRVAIVAVARKLRARISAVLMEQRLYVVRQKVHSAPLTQEETSPQGTTRR

SEQ ID NO: 464589 - protein, 415 aa, unidentified
MRIVHENVAGLDVHKKVVVAAVIVKQADGNWLEEKHSFGTMTVDLLELSDWLLLHGVIHVAMESTGEYWKPVFNILENNFEVIVVNAQHISKVPGRKTDQSDAQWIAELLQYGLLKASFIPPLGQRELRELTRYRSSFVRERATLVNRVQKALESANIKLSSVATNVMGVSGRAMLEALIAGNASPEQMAELAKGRMREKREQLTKAMEGRVQAHHRFVLTELLCQIDSIEETITRFDQEIEAYCSPFEEVVELLDTIPGVGREAAEIIVSEIGNDMSRFPTADHLAAWAGVSPGNNESAGKRRSGRTRKGNQALRTVLNQAAHAAAHTKNTYLSAQYHRLAGRRGAKKAIVAVEHSILVIAYHLIERKEPYKELGGDYFDKRNVEATAKRLTKRLERLGYQVSLELQQPVGAPV

SEQ ID NO: 464590 - protein, 368 aa, unidentified
MNNTNTKSTSGSEGNEAREQHKGDRVLKLGLDLHYRQVTVAMQEDGGRIKAAGKMGYVDFLNWVGKKLAEGWEIHSCYEAGASGYWLHRELVKLGVKNLVVVPKAMGQGGKKQKTDKRDAGELCDCLDRYLRGQDKALSVVRVPTEDQEQKRALIRFHRQIMADRGRCEARGKGLLCAQGIQVHGRWWQVKAWLEVQSDPRLKDWMKEQLSAWRNKILSTDEEQGALRERIAALAPAILPKGVGAYSAAVLHYEMRGFERFSNRRQVGSMTGLCPGIHQSDGRGKEGSINRCGIGIVRWTLVEMVWRLKIWQPQYPPVRRLATGLVRGKRARKRLVVQAARRLAIDLWRLSTGQTTPEKLGLIMHRAK

SEQ ID NO: 464591 - protein, 359 aa, unidentified
MTVTMTYVGLDVHARSIHAAAVDVASGELRRARFGGGSEEVIGWLQTLPSPLRGCYEAGPTGFALYRAAEAAGVALEVIAPSKTPRASGDRIKSDRKDAELLARLLLAGQLKSVAVPPPAVEAARHLARAREQVRGDLMRCRHRVSKLLLLHGRVYDGSAWTKRHRGWLEQQCFDQAATELAYLDTLAAVDGLVARKAALDERLSRLAREGEWWQTVARLRCFRGIDTLTAFVLALEIGDFARLPRPAQLASWLGLVPSLDQSGESRRQGAITKTGSGYARRLLVEAAWHYLRQPGAGIAIAERRAGQPDHVLQIALRAQRRLHRLHKRLRERGKPGNVTTVAVARELACFLWAAAVAD

SEQ ID NO: 464592 - protein, 455 aa, unidentified
MLRDAIGIDPDSKGCQCAHVKLGECQTQQRGYLATEEGMGRFIRWVKKQGAVIVAIEGSNGLSKPMEKALRSAGIVFYSFKASDTDKFRKAVLGQNKNNKKDAESTARYAMALEAQGILDNWKRVWSPDEELQSLTRSYAQRTKESTREVNRLWKLLRAASVDLYLALGGDHPDIDIPENILQNEGILALLAEKPDIYEWKTLSETDFLAVMGDRNYKGRDKLIKELQKVSRSFKLRSPTLSLMIKNSTEQIILLKRQLTEIKRMIEKLTKDNKAVKTLEQHRGIGIMTASTLIAEIVDIRRFAKDDNLASYAGLGKREYKTGNSKKEVPNCFFNRRLKNAFMTAARNYVRFNPDSHLAGYYRNLVKGEMKKTEARKRVARALVRVFFRDLYSLVEPDDPDKVEDEKRGNESDMANSLNCSDKYHSNIPLSFPIKDNTEEFVKINGEKIKKAVLR

SEQ ID NO: 464593 - protein, 411 aa, unidentified
MIQPDKLVYVGVDLHKQHHTAVIIDCWNRKLGEIKFDNKPTAFPLLEKEVKKHTKKGMSVVYGLEDVGGYGRGLAVYLTEKGCSVKEVNAKLANSRRKSHVTIQKSDSWDAECVAKVVRDELYNLPDAKPIDLYWAISQLVTQRNWQSKNLTNVVKRLHQQLAYHYPSYKKFYSEIDGKTALAFWHKYPSPNHLSGVTSEELAKYLRKLSNNGLSTKKAEQILSLVAEDGDTTRDFQDQRDFIVKGLVRNIRFYKRELGRVEEKIRELMKQLGFQLESMTGIDLVTAAELVAEIGDIHRFATPDKLARFAGIAPIIVGSGNKVRNYKSKQGNRVLHDIIKSLAIRQLLVTRSTKVPRNPYFHAYYEQRLAAGKTKQQAVVCIMRKLVNVIYYMMKTQAAYVIPEVSIPQAG

SEQ ID NO: 464594 - protein, 387 aa, unidentified
MQRPHDDSKVCRAAFLQDSTLVVVIEMSLTGWLVAGMIPGVSREPLKKIDPKPEELLQLLFRWRDEAIKAGKEITRIAVAYETGRDSFWLARWLRSRGIDAHVIHATSVAISREHRRAKTDRIDTAMLRRGFLGWLRGEPGHCSMAIVPTVGEEDAKRPHRERESLVQERTSTVNRMKSILIQFGVRSFNPVLRKASEKLDAVRTPEGIPLPPNAAAALQRHMERFRVIKEQIKAIERTRLQRLQRDPTDKMNAMVFLLVRIIGLGVETAEQLVHEILSRNLRDRKAVARYAGLTGAPDESGSKRREKGLSRSGNGRVRVILIQLSWRLLKLQPGSELVLWYKKRTADAKGSRKPMIVAFARKLIIALWRYVNTGLLPEGFELKAAA

SEQ ID NO: 464595 - protein, 352 aa, unidentified
MHARQQALAMLDTETGELVNLMLWHEGNEVREFYSQLPRPVLVGIEATGSMHWFLSLMEELGIECRVGHPATIRAAAPRKQKTDRRDAELILQMLVEKRFPAIWLPTKELLDLRALVLHRHQWVRIRTRIQNALQAIALANGLRRGPSLWSYDGQAKIAFLPLLPHASYRRSMLQEMYRKMEEEIENLTQQVAEQAGQRCGARLLMTHPGVGPVTALATEVFLGDARRFVDGKALASYVGLIPREYSSGARQRLGGVTKQGSPLLRFLWCEAGAHAVRRDPELKRFYRRKLVQKGLGKARVAVARKLGIRLWIMLRDEIDYQEFCRRGQKQQSGAACAGKPEVANGAKSPAD

SEQ ID NO: 464596 - protein, 344 aa, unidentified
MTSVLKQVAGIDVAQKELVVSLGRIGSSLEKDIYACKSFANKESGFKAMLVWVSKHSVNTTSVRYVMEATGVYHEKLAYYLSDNGYEVSIVLPNKISNHIRSLDIKTITDKTASRGICDFGLGTKLEDWQQPEKGFKTLRQLTRERGQLIAERTVAKNQLHAEQAEAYPNERSVARLKDRIGLFNSQEKEVKEEIDALIKQDAELTKRVRTITSIPGVGWLTAVTILAETNGFNLIRNKRQLVGYSGLDVKVKDSGTSVKSKPRISKRGNRYLRKAMYMPALAAIRSDKHFKAVFVRLVSKHGIKMKAAVAVQRKLLELVYTLWKTGERYDSRYLQVQSEEATS

SEQ ID NO: 464597 - protein, 353 aa, unidentified
MTNTQYIGMDVHKESISIAVRNDVGKIVMECVIETKANVILDFIHGLRGELQVTFEEGTWATWLYDLLKPQVTKLVVCDPRKNSRQGNKNDRIDARELSDRLYMNKLSSVYHGGAGIRTLKELARSYLTISKDLARVMTRVKAIYRSWGIPCAGKQVYAPRHRAEWLAKITEVGVFRRAEFYYQQLDALRSLRHQVRRELLAESKTHKASKLLCQIPSIGPIRAALLIALIQTPHRFRTKRPLWKYSGFAIETHSSADYRKVQGQLERTKKQVSVRGLNRDCNHDLKNLLKSAATIASVKPGPFQEFYAALVAKGMRPEMARLTLARKIATIVWIVWKKGVSFDAKYLKPQTA

SEQ ID NO: 464598 - protein, 354 aa, unidentified
MKRTAKYVGLDVHQATTVVSVRDPGGRVIAHSILHTEEREVVGFLRGLRGSVSVALEEGTQAQWLHDVLEPVVDQVVVCDRRGKKRQGNKGDLVDADEISEQLRLGTLRPVYHGSAHQANLRELARTYRGVVGDATRVMQRLKALFRARGIKTPGARVYHPATRSEWLDKLPKGGARFRAEVLYAQLDVLRMQRPKVKAAMMAEARRDPAWDALRSVPFLGPVRVAQILAIARTPWRFRNKRGLWAYSGFAVVTAASSEYVLVDGRPVRRRRAPITRGLNRNHNATLKDIFKGAATAAIARPGPLQDLHLSMTEGGMRAELARLTLARKIAAVSLRLWKTGERYDPTKLTMQAR

SEQ ID NO: 464599 - protein, 342 aa, unidentified
MGSVKGGGRSGHVMSAFVCGLDVHKDSTYATILDSDGKIVNQTRMNSERVLSYLSRFRVDRVGLEASNQVAPLYRQLVSKGYDVFVSHPKKTRYIAEAKIKSDRVDSKAIAELVRLDALPLAYMPDEKTAALREKVRRRAFLVRERVKLRVKIKSILTYEGIRWPSDHGLFTGKGVEWLHALGLEPVESYLRVIKPLDDEIRLLSKQLRGLAEDDEDVKLLMTIPGIGYYSALLVKSEVGDINRFSFGEKLCSYAGLVPSTHASGASVRHGGITKEGSRWLRWVMVEAAQTHVHKYDTAITRAYHRIAERRGRRVAVVAAARKLLMCCYSVLKNRRAYHDQI

SEQ ID NO: 464600 - protein, 346 aa, unidentified
MENIALDVHKKYTWARVEDSEGRELYASRLAHSRGCIKNFIGRWTPGCSVAVETVGNWYWVVDEIEAGGGKPQLVNARLAKLMMGNVNKSDKLDAKGMNRLQRTGTLPTVWVASSGVRDARELARTRMVLSRQRTQLKNRVHATLSKYGHVVDEVSDAFGKRGREIINELLTKLPPHTGQALQHVLDQLDEVVKNLQAIERDMIGAFSPCSQTALLKSLPGVGEILAVVIWTEIGIIERFNRAEQLASYSGLVAREHSSGGTFYRGAVRRDVNVYLKWAFVEAANSSILNRERSNYQHIDRLYQRIKGRRGHQRAKVAVARHLAEATFWMLKKGEPYREPMLSTQR

SEQ ID NO: 464601 - protein, 349 aa, unidentified
MIIVGCDYHPSFQQIAWVDSETGECGEQRLPHSDGEAEKYYRGLNGHGVRVGMEATGHARWFERLLAELKYELWVGDPAQIRAMRVRKQKTDRQDAQHLLKLLVEDRFPRVWVPSGENRDLRQLLWHRHRLVQMRTRVMNQLQAIAMNEGVRRKKGLWSKQGRRQLESFSLAPWATRRRQDLLELLDRLNPSIQELSIAIEQEAVQRPEVKRLMTHPGVGPLTALAFVLIIGSPERFRCGKQIGSYVGLVPCEDSSADHQRLGHISKQGNALLRFLLVEAAQATVRSDPEWRRQFLHLAMRRERAIAKVAMARKLAVRLYWMWHKGWDYQQMVQFGSHVGQPVVSHGVK

SEQ ID NO: 464602 - protein, 316 aa, unidentified
MPENRETSVNVGIDVGKDQLDVVIHEPQLHFTVTNDAPGIRRLLSRVARYNPTRIVVEATGRREYEFVVAAAERNLPVIICQPLLVRRYAAASGILAKTDKIDAAVLASYAAVMQPDVRPLAIGNIRKIKDLIARRRQLIEMSTMEKNRLDVMPQQLTADIRRHIRHLQAQIEKIDRLVAELVEAIDEWREKRDILSSVPGIGPQVINTLLADLPELGSLTNKQIAALVGVAPFNRDSGRFRGKRRIRGGRASVRTVLFMAMLSSIQHNPVIRAAYRRLLANGKHKKVALTACMRKMICILNAMLRDQVRWSDNYA

SEQ ID NO: 464603 - protein, 342 aa, unidentified
MLITTIGLDIAKNVFQIHGIDAKEKVVARKQLRRSQVITFFKALPPCLIGMEACATAHYWARELTKLGHEVRLMPAKDVKAYVKRNKNDAADAEAICEAVRRPTMRFVRIKSAEQQGQLMQHRTRDVLIRQRTQIINALRAHLAELGLVAAQGDAGVNELRAIVTDEQDTRLPIDARASVIVLAAQLEALESVIGAIEKRIKMQHRSSEASQRVEAIPGIGVIGATAIVATVADPTIFRSGRDFAAWIGLVPRQDSTGGKQKLGPISKQGDRYLRRILVVGAIAVLRRAQENPGKYPWLTQLLARRPFKVVAVALANKMARMAWALLAHGGTYRAPELAETA

SEQ ID NO: 464604 - protein, 339 aa, unidentified
MQVTTMGIDLAKQVFQLHGVDAHGKTVLTKRLSRSALRPFMANLPPCRVGLEAFASAHYWSRQLRACGHDIRLMSPQFVKPYVKSQKNDSNDAEAICEAVSRPTMRFVSPKTIGQQDLQALHRIRQRRIHNRTALSNQIRGLLMEYGITLPRQVAQVRRRLPSLLEDAAQQLSSLGRELLEDLYRELVTLDGQLHEIEGRIKRIFAATEVCRWLAPVEGVGPLIATAMVAVVGDPRAFKNGRHLAAWLGLVPRQHSSGGKHLLLGITKRGDRYLRALLIHGARAVVVRAAAKQDARSRWIAELQRRRGTNRTSVAVANKNARILRALMTTEAHYRRAAS

SEQ ID NO: 464605 - protein, 360 aa, unidentified
MEVGQEVVLHPVVGGVDTHKDLHVAAVVDELDRVLGTRCFATTRQGYRQMLAWMRSFGQLRCIGIEATGTYGAGLLRSMQNAGVDVLEVTAPDKPDRRKRGKNDDLDAQNAAHAAFAGKRTVTPRSRDGMIESLRVLKACRKTAVVARRIALQMIQNTIVCAPDGLREALRQMTRMQLIRTLAAWRPDLTDYRNVDSAYRISLKSLGRRYVELHDEIADLDVMIAAIVDELAPNLVARNSIGHAGAAQLLLTAGDNPERLHSEAGFAALCGVSPVPASSGKTTRHRLNRGGDRAANSALHIIAIGRLRTDPRTKAYMAKRVAEGHSKLEVIRCLKRYIAREVFTLISQRQKEINQARITA

SEQ ID NO: 464606 - protein, 417 aa, unidentified
MAEYAALIGIDWSDRKHDLCLVETASGTREASVLPHSPQEIDGWATALRARYGGRPVAVCLEQSRGPLIYALLKYDFLTLYPVNPRALAKFREAFSPSRHKDDPPDAEHLAELLIHHQGRLRAWAPDDEQTRTLRLLVEHRRRLVSDQTRTSDRLTSLLKCYFPQVLEWFPDIRTEMVCDFLLRWPELSALKRVRRETLLKFFRSHNSVRRETLEARLASIKAAVPLTTDGAVLRSSAAMAKALAAQMKATLSAVAGIEHEIEGLCAAHEDYELFESLPGAGPVYASRLTAAPGSDRGRWLSADEVACLAGVAPVIERSGKSCRVRWRYFCPKFLRQTFHEYAGESIKHSFWARVYYEQQRSKGKSHHAAVRALAYKWVRIIFRCWQERAAYDEVKYLESLRRKGSSLLTYAASNPA

SEQ ID NO: 464607 - protein, 367 aa, unidentified
MQNTIVHNEGAASLEVAGTKVKLSRSIIKIGLDVHARIFVAVAQYDHLLPKSARRLAPSQFVPWVEQLLAAGHAVHVVYEACGFGFGLFRQLQAAGARCYVIAPRKLDEQYTRVKTDPRDATTLCQRLSRYLDGNTGELAVIRVPSEAEEQARHVSRQREQLVQLRQKLEAQGRSLLVNHGLPSPAHWWKNQTWSRLSKLLPGWMVIRLEVHRPALLTLQEQIDALSSQLEAAAPANVPVGIGKLTTVAMTREICSWERFKNRRAISSYTGLCPGEYSSGSKRIPGSVTKHGNPRLRAALVECAWRMVRFQPDYPPVKKRLAVLCQGARATGAQRKKAIVAVARHLAVDLWRLHTGRNTAQQLGLTI

SEQ ID NO: 464608 - protein, 349 aa, unidentified
MEITKIIYGIDIASESFTVSQGVLYQDFQSNVSFTRTFKNDISGFKSFIKYTESLQKKFKSGPQTQLWFVMETTGVYYEKLAYFLNDSKYNVSVVLANKMKNFGKTLTTKSKTDKIDSRTITTYGLEKQLLKWESPSEEMKQLKDLTREVNDLNKLVTMCKNKLHAKQHSYMPDPSIVKRLKEQIKFFKKNIAQVKKQIEQIVKGNKRIEDKVKNISILKGVKTYTIISVVSETDEFKLVNNKRQLVSYSGLDIIQDQSGKTEKKTKISKQGNSDIRKALYMAALSALKHDKNCKQHYQRLIKRYNYKNKKRAVVAIMRKILIIIYTLWKNDKAYDPEYYKNERIALQN

SEQ ID NO: 464609 - protein, 409 aa, unidentified
MAGVVIGIDPHKGSHTAVALDVHEKQLGRLRVRASSRQVDGLLEWASGWPRRRWAIEGARGLGQLLAQQLIASGERVLDVPPKLAARVRLLDSGQINKNDPNDARSVAVAALRAHELPELAAEDQAMVMRVWARRYHDLARLRTQVVCRLHAVVCELVPGGVRKYLRASQATDVLDRIVADSPVAQAKLELARELVADLERIDAQRREAKGRTARAVAATRTSINDVYGVGPIVAGTVLGYVRDIRRFPTRDRFASYNGTAPIEVSSGDRKIYRLSRRGNRQLNHAIHMAAISQIRHHDSEGRAYYENKIAEGMTGKTALRALKRKISDALYTRMIDDARRLAAKDPGGHTGNDSASSAAGSHPETPALRKSHSRATANSKTGTGQRPLRLRPAPDRRRTSMSTMATSW

SEQ ID NO: 464610 - protein, 412 aa, unidentified
MTNQQHSNSETIYMAIDIGKYSHDVAIKWPSGKLKKLKIPNTIGGYETMKSETTGELPVIAGFEATADYHRNIAYWLAQNDIHCQLVSSVASARARDMLFNGWDKNDRKDANVILYLLEQGMGKPFHDPLIHNILDIQELSNTYHQVSLARSRCYHSLLNHYLTLYFPEIEKLHHNSRSEWFCHFLLKFPTPLSITKMRKQTFVKRAWDVVGRKVHKQQFLEGLYEIAEKSVGISVGLDSVAVSTYKLQVQRYLDLTQQRSRLEALADNFLSERDDYQRLRSLPGVGPIVALIILAESGDLTRFAHYRQYLNFCGFNLSSIQSGQKRGDYKLSKRGNARLRYAFWLAGNAAIKMQENSFRRKYSRYIKKDPDNADLKRKARTAVAVKMARIAHALVKNGKDYRGYYEFGCET

SEQ ID NO: 464611 - protein, 342 aa, unidentified
MTLYIGVDIHARQQTLSYLETADGTTGQVVLDHEVDDVPGFYRQFQGEVIIGIEACGYTNWFEELVERLGHQLLVGDAAEIRRLARRRQKNDRRDADLLLDLLVHDEFPALYRYCQESREVLRQLRYRHKLVKLRTMVANTLHALALNAGLRLRAKLLTKGGRKQLSALTLSAISQQQRNELLSLADELTRRIQLVEQWLAVQAAGDSRVQRLQTHPGVGLLTSLCVVHTLGEVQRFSSTRKVAAYVGFDPMEDSSAERKAYGGISKAGSRLLRYLLIEAGQTAAKDDEQLKQFYRRLLPRRGKARAKVAVGRKLLLRCFIMWRAEIDYAEFLRRGQKAETE

SEQ ID NO: 464612 - protein, 342 aa, unidentified
MYYIGLDVHKKTISYCVKDASGQVHREGTVKVTRNELDGWVRTLPEPRIIAMEATIFTGWIYDHLLPHADQVKVAHPLMLRAIAAAKKKNDRIDAGKIADCLRCDFLPECHMASTEIRDRRRSLRYRHLLVRQMVQMKNRISGLLMETGVSHNKQRLHKVGYFRELISKNEEVPESIRPLLRLSRETIDRCRKTEYALVSSLERDPLLAERIQRLRTVPGVGPITALTWALEIGDVSRFRSIKQAISYCGLCGEEKSSADKVLRTPLSKQRNKHIQHVLVEAAKLAPRQNHELALIHEKEKQKGNGNRATLAVARKMVAYLLAVDRRKRDFVPAEGRSTAAA

SEQ ID NO: 464613 - protein, 346 aa, unidentified
MLYVGLDLSRQKLDVCVLDEDGRTVETLAVRPDADALRTLAARIARYGEPVSAAIESMTGARFIHDQLELAGWDVEIADAAKTKGLAPLAAKTDKIDAHVLAELARRELVPAIWLPDPSVRAERERARFRLHLVRHRTALKSRIHATLMTFGHPVPVSDLFGLRGRELLDSLAILEPWATTLARSLALVDELDGEIARSEAELRRLGADHPYVPLLTSIPGISWILGYTIASEIGDISRSASPKKLAGYTGLCPRVYQSGAMDRRGALAKNGPKYLRWALIEAATQAIRDPRYGARYQRTKRRLGKQRGSKVDRVEIARELAGAIWYILTRQEPFRAGGPTSGLVA

SEQ ID NO: 464614 - protein, 349 aa, unidentified
MIWIGVDAHKRVHEAVAISEQGVLATRTLPNTPAAWAALLSWAAQWPERIWAVEGAWYLGRGLAQHLAERGERVHEVNGRWTAARRRGMRRPGKSDRLDAHSVAQLLREEADTLPRVYAEDDEQASVQLWSRLQAELTKDMTRVVNRLHDLLLAADAEYGAKLPALTTQRGIRAVLAYTAPGEGGLARERERAIRATAAQLRLLDEQDRELRRKLERASKARFSPLRRIEGIGALIACGLVAELGRPRPGFGEEQLAALGGLSPLEASSAGAVRHRLNRLGNRRVNMFFHQIVLTQARIYPPAQAYLTRRKVEGRTAREARRALKRLLVRRVFRAWSECFATSIKAVAA

SEQ ID NO: 464615 - protein, 415 aa, unidentified
MSSRTLPKKLASVKPGALYAGVDLALDSNVVVVLDEGARQLARFRFPNDRDGYDFFYGQLERLRERHPAPEVLVGMEPTNYFWKLLAADLEQHQYGYRLVNPYTVKKHREGDQLDRSKDDPRDAFTIGDLLRTGKYTETRLLHGGYAELRQHVTVYDRLQRDLRRQMTLVRNTAGQLFPEVAREFKDVTGETASALLRGHAAASRVRQLPLDIFLAEVRADFQGQRLLVSKLRRIHALAALSVGLTESVQGLQLALRLQLDTLDLLQRQLNETEAALTDVFLTLPEAPYLLSIRGLGLITAAIILAEIGDPRHYRHGRQLIKLAGTQPVPNASGRKSRSQTPMSHKGRPRLRTALFFAVLRLVQVDDAFARDYQQLQQRDKNPLTKMAALGVLMNKLLRILWALMQNQTFYRSAA

SEQ ID NO: 464616 - protein, 346 aa, unidentified
MYSIGIDAHKRYSQITIMQEDGKIINRCKVNNDRKSIKRALSPYAQDGSKAVLESGWNWGLLYDMLSDGDLEVKVAHPLKVKSIAEAKIKTDKISADILAHLLRADLIPECYVRGKSSRRIQQVLRQRMFLVRLQTMVKNKIHNLIDRQEEAREPAQSFTDLFGVKGMQFLRSTPLPLLERKLLDGQLELLEELRTRISWVESILTQLKENDEIAERLKTIPGIGEFFALLIRHEIDKIERFPTSNKLCAYAGLVPSTYSSGGKTYHGRIIKQGNKYLRWALIEAVIPAIRKDVQISSYYYLMRAKKGSNSAKIATARRLLKIVYQVWKENRFYRIKTSRTALIHT

SEQ ID NO: 464617 - protein, 462 aa, unidentified
MTVPRKKGHRKHEAPLPTSLPAIRPMVAGLDVGSSQHWVCGPAREDGKPNVRVFGTTTDQLNELADWLSEQGVESVAMESTSVYWIPIYELLEARGIEVLLVNARQLHNVPGRKTDFSDCQWLQLLHSCGLLRGSFRPVEAITRLRALQRQLANLVAERTRCVQWMQKALDQMNVQVHRAVTDLTGVTGMAMVRAIVEGERDPARLAMHRERRCQKSAKEIARYLTGTWREEHLFNLASALRLFDALETEIASYDGQLLKEVASLQPPDRQEAPVPPHPNPAKEKAIKARGEQQARTTLWRFAGVDLTRLDGISAGTAQVVLTEVGPNIAAFPSEDHFVSWLRLCPRTPISGGKPLKKRRNGLGANRIAGVLRMAATSLHRSKTALGASFRRIARHKGGAVAVFATARQLARLIYRMLRYGHDYVDIGETAYDRRFQIRRLAALTETAKTLGYTLVPNVAAG

SEQ ID NO: 464618 - protein, 405 aa, unidentified
MSFILAFDVSKGESYKVLYQDHHCLTEGKIPHNQEGFCQLLEEIIALPELPEIVFEATGVYSRPLEKFCQNNRLDYCLLNPLEAKKQMEEGTLRSWKTDKIDAHKLAQTHWKNTRLPKTHQAEVFQELRDLARFYQEIEEKISRVRMDLHQALQLTFPELENFFSSRVTPYALSLIEAFPHPTFVLTSTRTKIKNRLVKSTRKHISENRAWQKADQLLAYAQHSYPAVNSSSIHCQKTSYYACLLQDLLEQKEHLMAQMIQSAQALEEFEIYQSIPGIGAPTAALLIGELGDIRRFPTANQLNAFVGIDIRRFQSGNYVGKDHINKRGNPKGRKILYFAIRNMIRQQRAAPNHLVDYYYKLKKQPVPKKEKVATVACMNKLLKCMHAMVRKHTRYAYTYMASNDQ

SEQ ID NO: 464619 - protein, 408 aa, unidentified
MKVLHARCAGLDVHKDLVVACARLQDSAGVQREHRRFETTTKGLLELLAWLVELRCTHVAMEATGVYWKPVWHVLEGHAELVLANAAHIRNVPGRKSDVNDATWIADLLAHGLIRASMVPPTPIQELRDLTRTRRQLVREIGQHTQRVQRVLEDANVKLSSVISDVLGMSGRRILEAIIAGENDPEKLAALGSERLRCSQEQLREALRGRVTAHHRFLLRQHLDTIDHLQRAVDQFDQQIARQLEPFRAQFELLMTIPAVRETAAAVLIAEVGVDMSRFPTAEHLVSWAGLCPRMDESAGKRRSTRLRKGASWLKPVLVQSAWGAARTKRTYTQAQFLRLRARRGPMKAVVAVAATILTAAYYILRDGVSYRELGPDHFVERDRTRIAQRLARQIRELGYEVTIREAA

SEQ ID NO: 464620 - protein, 462 aa, unidentified
MREESARESVAVVGTATEAATGTGGDLRGNTGGVTAPSPPEKGWTKLKGATDLPPLAKAIDAPAWSKPQGMGAQGRSIMRSVGLDLGARHIAYCEVKDGKVIDRTSVKRLEQLKSRIGPDCPPARIAFDSSREGWHVHDTLASWGHEPKMIDTTRVRAMGVGQHKRKNDALDAEVAARAVEQGRIPESHVLSPERRALRVKLSVRGALVETRSQYVTTIRGLCRAAGVLLATCATENFVNKLSDAELEPATRALIQPLIAVLVGIEDALRQVESELSEMAKRDPIIALLATAPGVGLIVASTFVSVIDEARRFRNAQAVGAYLGLVPAESTTGGPDKRRLGSITKQGNTYARKMLVQAGWLILRSRDKDDPVRQWGERIAKTRGKRIAVVALARKLSGVLWAMWRDGTAYDPVGQAKASARGTRKAARSKSVHAEALERAVNKLQRRATARRDQASESTTMT

SEQ ID NO: 464621 - protein, 420 aa, unidentified
MQVAQDDQEIIARVAALDIGKAEVVCCVRVPGQGPRARRMQEVRTYTTMTRSLLAMSDWLTELGVTRVVMEATSDYWKPPFYLLENTFETWLVNAKDVKHLPGRPKTDRLDAVWLCKVAERQMLRPSFVPPPAFRELRDLTRYRVDLITTRTSEKQRVEKLLEDSMIKLSVVASDIFGVSGRAMMAALVAGERDPKVLADMARGSMRGKTARLEEAFTGRFTDHHAFLLRTMLARVDGIDVDVDRVQARIDEQIAPFAKAVTRLDEIPGIGVTTAQVIIAEVGLDMTRFPTPDHLASWARFAPGISESAGRKKGGSSTGKGNRYLARALGEAAVGCRSTKTFLGERYRRIAKRRGKKRAIVAVGRSILMIVWELLSDEEKRFVDLGPGYYDSRVNRNRSTRNHVRELQALGYKVTLEPAA

SEQ ID NO: 464622 - protein, 389 aa, unidentified
MRVEQIAPVAGDEVSPVFVALELSRSKWLVGVGAPQQWTVRRHQVEGGDLEGLLGLLSRIRAGEAKRSGLAVKVHVGFEAGRDGHWLYRALKSAGYEVYEIEPASVAVERRARRVKSDGVDVDKLVRTLSRYVRGELDACRMVEVPSEAEEDAKRPHREYERLVKEQTSHRNRMKALLFAQGVRDFDPSAPDGLTRLAALPILPRLKAELVRECGRLATIAADIAAIVAEMAAAIVPPKRAERKSAASPMASPMQAKAAQLYKLKSLGVHFSTVLAGEVYYRTFQNRRGVGQYLGLAPSPFQSGDMARDQGIAKAGAKRARKAMIELSWLWLRHQPGSALSKWFHERVGDKKGRLRRIAIVAMARKLAVALWRYLETGVIPEGAVLKRA

SEQ ID NO: 464623 - protein, 397 aa, unidentified
MEQARVAVFVGVDVGKATHHAVALDPDGVPVLDRTVANDEGQLRALLGPLRDRGPVLLIVDQPSTIGALPVAVAQAMDVTVGYLPGLTMRRIAETYPGEAKTDRRDATIIADTARTRPDLIRAVVAVEAHLADLTLLCGYDADLAHDGTALANRMQGVLTQTHPALERVLGNRLDHHGVLALLEHWPTPAQLRQAGERRIATFLRRRQSRRAEALAHDIIQALGEQTVVVAGTAAAGLVLAGLARQLATVHQQRAEIGAQIEALAAPDPLYPVLTSLVGVGVRTAAAFLVETAGKEFASAADLASYAGLCPVTWRSGSSVNRDRPSRRGNKRLKHALFQSAFASLRHPPSRTYYDRKRAEGKTHHQAVLALARRRTDVLYAMIRDGAMYQDPTAAVA

SEQ ID NO: 464624 - protein, 387 aa, unidentified
MEVRVENTPSAAVNNDPVQCFVAIELSKSSWVVGFQTPLSKQTSRYQVEACNAKALLELIERVRTRVAREVGLPVAVMSCYEAGYDGFWLHRVLEAHGIHNHVLDPASLQVNRRARRPKTDRIDADRMVRALIRYLRGEPEACSVVRVPSPEQEDARRLHRERGRLIAERVGHVNWIKGLCATQGIYNYEPLRRDRLERLDKLRTGDGRSLSARIKAEIVRGIKRLEVVLEMISTLEAERDAILKDKKSTHLNAEKIKMLAKLKAIGAEFATVLVGEVFYREFANRRQLGSYVGLASSPFCSGSLDRDQGISKAGNSKARATIIELAWTWLRYQPGSALSRWFCERVGNLKGRPRRIAIVAMARKLLVALWRYLQTGVIPAGAELKA

SEQ ID NO: 464625 - protein, 337 aa, unidentified
MNYCGIDLHSNNCVVIVSDEGDRVLYQKRLSNDLVQILAALEPFCGELAGVVVESTYNWYWLVDGLMDAGYRVHLAHPAAIRKYDGLKHSGDFADAAYLAQLLRLGLLPEGYVCPREERGARDLARKRMQLVRYRTAQILSIEGIMVRQTGSRMRSEAVKQLTAEQVKELAFVPDVAMAVEANRMVSEVLGQQIEVLEKRLKERVSLRAEYRLLKTVPGIGETLATTIMLETGSISRFAEVGNFSSYCRCVDSRRESNGKKKGEGNARNGNKYLAWAFVEAANFAIRFSPQAKSFYDRKKSRTNRALATKALAHKLARACYYMLRDQKPFDAKLCFG

SEQ ID NO: 464626 - protein, 359 aa, unidentified
MYFSGLDAHLRYVTVAVLDRLGGVALETTVPTREPDRLLAVLAPFRPLEVVVETCPFWPWLYDLLVPAGIGFHLAHAKALRAIATAPQKSDAVDARLLARMLLSGLIPEAYPRSADQRELLRLLRHRTALVRFRTRLAGRIHSQLHQQRLSLPREKLLRRATRAWLEATAWPRLTVEQRAIVTTHVELIDHLTPLIRALERRIAAAAAGDATAPLLATIPGIGPYRSLLLAAELVPISRFPRAEHLVSYAGLAPVTRSSGGHTHHGSIPPAANRWVRGALVSAIPSHVRYAPTSPVTVAYEQLKARLGWRVARVAAARKLARVVYVLLTRRTPWHGVPAAGDVRDEVQNSHVAPTTSFC

SEQ ID NO: 464627 - protein, 333 aa, unidentified
MYYLAFDVSKSKLDGILTNLRTKCQYFQINNDYQSIIDWLDKVRLPKKMISGCESTGGYHLLVLRLFVEKGFTFKIINPLLVKQFTRTTIRKKKTDLTDSLIIAKLLAQGEGYQIKQSELNTIAKTHQRGLVKLTNERHKFSLMQKSLEFQEKNKTILALSDRFKEIEDKIEETINRYISSLKEDYSQNPIIKLLETIPGIGFKLAFIIWTEIGDIKRFDNSKKIVAFSGLDPKIRQSGHCLNSQGKLTKRGSPHLRRAIFLAANVARLHDPELKAYYLKKRAEGKRYTVTVCAVARKLINRIYAVWKRQTPYLKKEVYSLNIQKAATEIVTA

SEQ ID NO: 464628 - protein, 418 aa, unidentified
MSFKILKFNCCGLDVHKTWIYACIGITDSKNRTEYKQARFSSFTKGLNELCEWLAKYNCTDVCMESTGKYWIPVFNILEQHHVWVTLSHPKYTKPMKGNKTDRKDAKWICDLYMCGMVKPSFIPPADIRELRDLVRYRFKLTCMISGEKNRAQNCLTVSNLKLDDVFSDVFGKSARSIAEHILQHPGEKFDVTPFVDSRCKTPIEDIQAAIDGAFSEAQAVKLRQCLDHIDDLQKHISEVEREILRLSDKYEAALNLIRTVPGFDKNPMTAIQVLSEIGADMSVFPTAKHLVSWAGCCPRNDKSDRKIKSSRISRAGSYFKPVLVQIANALVRSKKHPEITDRYKRIKIRRGHKKAIIAICRMLLTAIWHILSDLKPYTPEGFLEQRPVKESKVLTTSQALNLLRQRGYLIKDDPLPA

SEQ ID NO: 464629 - protein, 380 aa, unidentified
MNKIIRIGIDTSKSVFVLHGVNAAEQPVLRRKLRRGQVLEFFAKLEPTKIGIEACGAAHHWARELTALGHEVVLLPPQYVKAYVKRNKNDAADAEAICEAMSRPTMRFVAVKTTEQQAALMLAGRRDGLIRRRTQLSNTIRGYAAEFGLIAAKGLDKIEPLLTRIAAEEDLPELARELFADYGREYAVLGKQIAKINARLMAWHKQSEQSRRLAEMPTIGPIGASMLTMKVADPAAFRCGRDFAAWIGLTPKDHSTAGKMRLGVITRAGDEALRSVLVAGATAVIQQVRKGRGHPSPWLLELLKRKPPKLAAVALANKMARIAWKLMVSGERYDPQRAAGRFVPPTGRVAPRSPRQGRFAPPAAVAQRPALTRLAHGAPN

SEQ ID NO: 464630 - protein, 404 aa, unidentified
MPTYFVGIDVSKFKHTCCIIDGDGEIIKKSFDFSNSKEGFDSLIETFKSIDQSESLYQIVMEATGHYHECLFRYLVANNYLVQIKNPVVIARFKQSEYLDKAKTDNLDALLIAQYASKHPFSPSMLKSYNIERIRRISRAKYFLYQDKERTINHLHRYLDESFPELIPFLRKRGDIKRYQGRNFFDSKTTLWFIENFPSAKIFSNTRSETAEKLKRMSKGAFSLVKFNELRKIAKESIGVSFQETEEIIIQLVQELRNIQERNDKLDELLIPLIDETAPNLLTVPGIGYRLAGLLISEIGDASEFPSADKIIKFAGLDVRVYQSGTIEKHGAIRKRGSPLLRYALFQAAEKARIHCPEIAEFYSKKKNEGKHPICALTHTARKILRIVWALLKTGQNYNQLVSD

SEQ ID NO: 464631 - protein, 467 aa, unidentified
MQQPVEIRVDEHDQIVARVAAIDVAKASGMVCLRVPHETIPDRRVTTVWPVAATTAALIELGDHLRCERVARVVLESTSDYWRPFYYLLEAAGLTVWLVNATQAKNVPGRPKTDKLDAVWLAKLAERSMVSPSLVPAEPMRQVRDLARARFDLVEDRTRVKQRIEKLLEDALIKISSVLTDVLGVSGRAMIEALIAGQRSPKVLAELAKGRARSRRADLERALHGRFTDHHAQLARMLLGQLDELTARIGEVTELLDAAIAALPPTSPTSPSAGPAGRSNGDNDGDNDGDNDGDNDGRPGQAEYNSAVARLCVIPGGGPDSVRAVIGEIGLDMSVFGTPQRLCSWARVAPRTVQSGRKTGRARTGKGNPYLRSALAQMATGAAKTDTFLGERYRRLIKRMPKAKALVALQRSILVIIFHLLADPSVEFTDLGPDFYTRRIDRARRASHLMRQLHALGYQVQLTEAAA

SEQ ID NO: 464632 - protein, 334 aa, unidentified
MKKRYFMGIDVAKATFDFCLLSRSGACLWRGQFSNDARAIERFFHQLRAGGWKPEQIHFALEATGVYGQRLIAALHQAGLAVSVLNPAQVKYFALSVLRRTKNDTVDAEIIARFCRERKPLATRALRPIETQLKLLVHERESRVVEQTREHNRAKQDPYQIELPKLISRQRQQRLKQLQKELAQLDAEIDSLIANDQRLKTQSQLLCSIPGIAKLTAAKLLSELAGKEFQSARQLGAYAGLTPAECRSGYSLYGKTRISKIGNALLRKALYMPAAVARRWCKPLQPWIAILQSRKLHDLAIRGAIMRKLLHIAFGVLKHQKPFNPMLASIPKTV

SEQ ID NO: 464633 - protein, 349 aa, unidentified
MEHYVGIDVSLELSSVCIVDAGGKIAVEAKVESHPDAIVAFVRKAGVSIERIGLEAGPLSQWLHAGLTKGGFETVLLETRHVKAALSAMTVKTDRRDARGIAQLLRMGWFRPVHCKSPGSQEVRALLVARKQLLGKLLDIEFSIRGILRGFGLKMGVVTRTGFEARVRELCADHAMLEQIAEAVLGARAALRKEYSKLHKTMLALVRRDEICRRLMSAPGVGPLVAITFKTAIDDPARIQKSKAVGALLGLTPRKYQSGETDVTGGISCVGDTMARTALYEAANAILSRVTRFSALKRWGMDVAKRRGMKRAKVALARKLGVILHRMWMEGTSFRWTKEASQAPQVTRA

SEQ ID NO: 464634 - protein, 324 aa, unidentified
MQGKVKPTSANTVSTVYVGIDVCKAYLDVHIHPANETFRVANDAGGWRRLKTILSSHSVERVVMEATSKYHRAAHRSLHAAGFSVAIINPLRARLFAEACGALAKTDTIDARLLALMAEKLDPDATHPVRDIVENVRELASARRAAIMERVAVEQRRSVATSNFLQRELGRRLRLLHSHIDRLEAEIEAAISADAVLASRRDIVLSIPGIGPVVATALITELDEIGDLNAKQATALAGLAPFANDSGPRRGQRHIRGGRFELRKALYMAALSAARFNPDLKRFYQRLRDAGKAAKLAIIAVARKLIVLANTLVSQNRAWIPKTA

SEQ ID NO: 464635 - protein, 410 aa, unidentified
MQGQAMTVLFVGHDWAETHHDLHIEDRDGRCVGKGRVPTGVAGVSQFLEMIAEHDVDPCDVLIASETDRGLFVTALISAGFSVIALNPMSTARYRERQSNSGAKSDAGDAKTLAAVARLDGHSHRPVFGDSGLVEAIKITARAHHNLIWSRQRQMNQLRSALREYYPAALEAFPVLIHSDCFGVLAAAPTPTQGRKLTLSQIKSAIRRGGRKRGFDKRAPQIQQILRSEQLSAPSQVEKAMGSHVTALITMAIEFTSQIHRLEAELGELFDSHQDAEIVRSIPGLGTKLGARVLGEFGDAPDRFIDARARKNYAGTSPVTRASGRSHVVLARHARNLRLADTCYQWAFVTITASPGARAFYDEKRAKGDSHSKALRALSNRLVGILHGCLTNRTRYDEHTAWGHRQSIAA

SEQ ID NO: 464636 - protein, 413 aa, unidentified
MTRMSFGWYVGIDWATQAHYVILLDAERRVLGERSVPHTGRDLAELAGWLTEVCGGEVDRVAVAIEVPRGTVVETLLERGFIVFAINPKQLDRFRDRYTVAGAKDDRRDAFVLAASLATDQPAFRPLRLDDPLVIRLRELSRLEAELHQEEARLTNRLRDLLHRIYPQVLRLSPAADEPWVWELLELAPTPADARRLTRPALSKLLRAHRIRRLAADAVLAHLQAPPLWVAPGTVEAVSEHIGLLVPRVRLVHEQRAHCLHRIESVLETMAGDAPGQRGEHRDVEILRSLPGVGRLVAATMLAEASQLLAQRDYHALRAQGGIAPVTRQSGTRARVDMRYHCNHRLRNALYHWGRVSAQCDLLSRRHYEALRRRGHSHGRAIRGLTDRLLLILMAMLRSQTSYDATRRRAHAA

SEQ ID NO: 464637 - protein, 370 aa, unidentified
MLDTTTFIGLDVHARSIKAVSLDVMTGEVRAATFGYDAGAVAEWVRSVDPRARCVYESGVTGFDLQKRLSGLGVDCVVGAVSKMIKPSADRRRKNDRNDAEFLARMLSVGNVVEVWVPDDECEAARDLTRALEDARDDLSRSKQRLSKFLLRHGLVFDERTPTGRRKGNWTRAHWSWIESIRFAEGADNDALAYYVDAVRRAAEEKARLEGLVEAEARKPRWRRRVDSLRCLKGVDTATAADLVFEAGEFSRFRNARSFAAWVGLTPSEHSSGESDRRGAITKAGNKHLRKALVEAAWHYLTCSGRPKDLAKGQAPDRVARRHAAKGVRRLVERREALLARGVHNNKANVATARELACWVWAVGLMAEEA

SEQ ID NO: 464638 - protein, 320 aa, unidentified
MTILTSSTVIGIDVAKAEIVAYREDLNSTQVIDNTREAIGRWLKALPAQSSIALEATSIYHLDTAELAHGMGHRVYIVDAYRVAHYRESIGLRAKTDPCDARLLARYLTSEQQRLRIWSPPPYAYKLLKSLLKKRAELIKARVSITLSWSGEPLLKDILDQQMEAFKQSERAIQKLMREVSQEAGIAENIKRCKAIEGIGELTAMGLATAFMRGHFVNGDAFIAFLGLDLRPKDSGKKHSPRYLSKKGDGELRRLAHTAAMAACRSPTWKPYYESYLARGLARTQALVILARKLCRVAFALMKKQSEYRPNLTVQGSPAT

SEQ ID NO: 464639 - protein, 411 aa, unidentified
MEVMYPKSSGLDVHLKFVIACVYVVNAKGQSKAVKRRFGTTTSGLRELVSWLQGHGIEQVAMESTGIYWKPVYNVLHAHFDVWVVNAQHVSRVPGRKTDESDAEWLTKLMQYGLLNRSFIPDEWQRDLRDLTRYRTRLIQEKSSGVNRLHKILEDANIKLSSVVTDIQGVSARSMIEALIDDEMDVQQMANLALGTMRPKIPLLVEALTGFMRPHHRYMLQEILQHLDELRDRIASLDRQIQVVCAPYASLVERLDEIPGVGGRTAEIILAEVGPSVEKWPTSGHLASWACVCPGNHESGGKRYSGKRRKGQKWLVSALVEAAQAASRTKNTYLSAQFHRLRARRGAKRATVAVAHSILTIAYHLIQKPEERFAELGGDFFLNKNKEQEQRRAVKMLETLGFHVALIPAPA

SEQ ID NO: 464640 - protein, 392 aa, unidentified
MYIIGIDIGKNHHEASIVSPEGKQIGHSLRFATTHKGADSLMSFIFNSIGNSSCIFGMEATGHYWYPIYSFLKARGYTIYVINPIQSDSLRKMYIRQTKNDSIDSFLIAEVIRFGQFTTTSMADENILAMRQLCRYRDSVISSRTEIKLRISTIMEQIFPEYEKQFSSLWLSTSMGILEKYLTPENIENAPIDELFEIIKDKSHNKLTMKKAISIREAAADTFGIKIAQDAFSFQLKQLIDRMNFLDKQIEALDCQILEYYEKFDCYLHTIPGIGMIAAATILAEIGDINRFKSSSALVAFAGIDPTVRQSGEFSSTHNHMSKRGSPYLRHAIFLVATTCSFHNSPLNAYYKKKRDQGKHHLTATGAVARKLTTVIYAVLRDSKPYEPKSFC

SEQ ID NO: 464641 - protein, 370 aa, unidentified
MKKNNTVAQSPKRASARKQGPITIGMDLGDKTSRYCVLAENGERLAEGSVATTRKAMAQKFAGMRRGRVAMEVGTHSPWLSRWLTSLGFETIVANARQVQLISASSRKNDRMDAHLLARLARVDPQLLRPIRHRSEQAQADLMTIRIRAALVEARTSLVNAARGFAKAQGDRLPACDADAMGVEKMEALPAGMRERLRPLLEQVESLTEKIKTLETKIEQIARTEYPETALLRQVSGVGTLIALTFVLTVEDRDRFQKSRDVGCYVGLRPRQSESGQSQPQLRITKEGDRYLRTLLVQGAHLILNRRGPDTDLKRWGLMLAERGGKNAKKRAIVAVARKLAVLLHRLWVTGEVYEPLRNSQAGQASKQAA

SEQ ID NO: 464642 - protein, 358 aa, unidentified
MNSDKYVALDVDSANIVAGVFDSKGKSMMECCIKTNGTAIRQFFKLLDGTVHVVFEEGTQAGWLYEVIRPLVAEVIVCDPRHNKLLQAGNKGDRIDVNKLGRLLRLGNVRSVYHGDRTIESLKQLVHGYEALVGDTTRVMNRVRAIFRSRGVKCNTTVYNADNRLQWTQKLDIKTAQIRLEYLYKEIDSLMELRKEAEKRMCRQARTHSEYKLIISIPGLGPVRTAQIIAKVGTPHRFRTKRQFWPYCGLAVVTRSSADYEWEGNRPRRRKKPIYTRGLNENFNRTLKAVFTGAALTAIEKNKDFKAYYQRLIDKQIAPEMARLTVARKIAAITLTIWKKGEKYDPERLNQAAGTSSQ

SEQ ID NO: 464643 - protein, 342 aa, unidentified
MQISTIGLDLAKHVFQVHGIDAEERIVVRKQLRRSQVVAFFEKVPPCLVGIEACASAHHWARELEKLGHTVRLMPASDVKAYVKRNKNDAADAAAICEAVRRPTVRSVTVKTPQQQARLMQHRTRELLIRQRTQLINALRSHMGELGLTVAQGREGLRELLAIVRDETDHRLPDDARASLSVLAAQLMTCTAHIADLEKRIHAQHRANEASRRLEAIPGIGVVGATAITATLSDPTAFRTGRDFAAWVGLVPREDSTGGKRRLGPISKKGDRYLRRILIAGALAVLRHARAHPEKHPWLAQLLARKPAKVAAVALANKMARIAWALLAKGETYQAPALAARV

SEQ ID NO: 464644 - protein, 466 aa, unidentified
MARKRKNIKSKGGRPHPQSLKTIQPNAAGIDLGSREHWVAGPPLEDAKPNVERFGTTTPELLRLADWLKEQGVRTVAMESTGVYWIPLFEILDNRGFEVLLANARQISHVPGRKTDMLDCQWLQLLHACGLLRGSFRPADDICRLRSLIRERNTMVERRADWVRRMQKCLDQMNVCVHHAVSDITGVTGMAIIRAIVDGERDPHALARLRNARCRKSEEQIAEELTGNWRPEHLFNLRQALKMYDQLCTVIADYDSEVLTYIAMLQPPDTSDKFAPPSASKSKANNISKRGQEPMRQGLYRLSGFDLTTIDGIGVDTATVIISELGLDYTVFPNENHFVSYLRLAPNLSISAGKKVPNKSKASTCTRIATALRMAALTLRNSKTALGAFYRRVSWRKGASVAVFATARKLAQYIYRLVCYGQAYVDTGAEAYEARFNHRRLSFYTKALNDMGYKVEPLTTNGATLT

SEQ ID NO: 464645 - protein, 388 aa, unidentified
MQSIAERHEEPTAIQTNLGAIFVSLELSRSIWLVTSVSPGGGETMSKHNVPAGAIAALLARFAELKKRALARTGKTFPIIVIQEAGLDGFWIHRVLQGEGIESHVVDPASIATSRRRRRAKTDRIDGEALVRALLAYKRGEPRVCAMVRAPTPEEEDRRRLCRERKVLTNERVLHVNRIKGLLYSQGVSGYEPLRRDRRQRLDELNTGDGRPLPGHLKRQIGRELDRLELLLEQIKTVEGERDELLAAQGVATPAPAAMLLGIKGVGSEFAAVLWSEGLFRRFDNRRQVASYAGLAPTPWQSGSVDREQGVSKAGNSRLRTTLIQLAWLWLRHQPQSALALWFKERVMRNGGRLKRTTIVALARKLLIALWKYVTFGVVIEGAVMKAA

SEQ ID NO: 464646 - protein, 340 aa, unidentified
MFYVGLDIHAKHIAICVLNETGQFVHRSQVRTIDQMMRILEGLPDRFEVCYEASCGYGHFHDLLCPVAARVLVAHPGQLRLIYRSKDKNDRKDAERIAKLLYLGEVPTVHVPSLDVRTWRELINSRSQMIAKRTRAKNVVRSLLRSAGISPPRQPGLWTKQGLSWLCQLTLPTLSQQLRRDLLLEEIETLNRQLRRIEQVLSRWAQHIPAVLLLQSIPGVGVRTAEAVAAFVDDPHRFPNAKAVGRYFGLVPRQDQSGDRNRLGHITREGAPVVRKLVAEAAWQARRHSPTVRAYFERAQRDDPQRKKIALVATAHYLVRVMWAMLKRGTFWEENKAAAG

SEQ ID NO: 464647 - protein, 366 aa, unidentified
MLRKAGLSDEADPENDLGGSSETMYYIGLDVHKKTISYCVKDAAGCVYGEGKIGSTRRELDAWVRMLPQPRMMAMEATIFTGWIYDHLLPHADKVKVAHPLMLRAIAAAKRKNDRIDASKIADCLRCDFLPECHMASTAIRDRRRVLRYRHLVLRQAVQMKNRVSGLLMETGVSYDKLHLHRMGYFADLMSSSDEIRESIRPLLKLCREHIDRSIRLDSALLRSLERDPVLTDRLRRLRTVPGVGPITALTWALEVGDTSRFRSIKQAISYCGLCSAERNSADKMMRTPISKQRNKHIQQVLVEAARLAPRYNDELALLYERERQRGNANRATLAVARKMVAHMLAVERRNADFVPAADFKPAAAA

SEQ ID NO: 464648 - protein, 367 aa, unidentified
MEKYIMVACDVHDETLVLKIAEGRSEPQVCTVENTAPGREEMVRLLQERAKRSGGAKVILAYEASGQGFGLYDQMRDAGFECHVLAPTKIPRSSQHRRRKTDARDAHRILEVLRGHVLGGNELPAVWVPDIETRDDREIVRTRMDLSEKVASVKAQVRTLLKRNGQRRPRGMSAGWTQAFEAWLRGLIRPTSALPYGARVALGSLLRQKAALEQEIARLDGEVEALAQTVRYAEPVRALMAVKGVGLLTAMLFLTEMGELSRFPNRKAIGAYLGLVPTSAESGPDADHKGHITHQGPWRVRRALCQATWARVRTDPQEKGVYERIVQKNPKHKKIAVVAAMRRLAVLLWHIGSEAQRQHGCFAAAAA

SEQ ID NO: 464649 - protein, 447 aa, unidentified
MCASQTHKNHKDRGNSLMKNRTNQRLEEITAGTLIIGVDVAKSVQWVRFVDYRGVEIGKAMSFQNNGEGFESIVARIREICKLKTLQYQIDKIMIGMEPTGHYWKALANYLMKEGFRVVCVNPYHTKKAKELDDNSPTKNDKKDALTIARLVKDGRFFEPYLPKEEYGELRVLTNTRVSVIKRNNAVKNTITALLDEYFPEIWTVFKNPLKGKASRHILKNCPFPSLLLALGEDGVLAEIKKAVKKTVGIKKVRQLIETAKTSVGVNYGMGAAKIRLEWLLDELELIEKQLCEVERLMETVLNRTGYAEQLLGIKGIGIVTAASFLGEVGDPLRFQNARQIANYAGYNLVEDSSGKSKSGTCISKRGRKQLRSVLYQMAFTMVGKNAEMKSLYRHLTARKDNPLKKKQALVVISKKIITVIYSLLKKKETYKPELVLGTVRKEMMAA

SEQ ID NO: 464650 - protein, 388 aa, unidentified
MIYVGIDIAKLNHFAAAISSDGEILIEPFKFTNDYDGFYLLLSKLAPLDQNSIIIGLESTAHYGDNLVRFLISKDFKVCVLNPIQTSSMRKNNVRKTKTDKVDTFVIAKTLMMQDSLRFLTLDDLDYIELKELGRFRQKLVKQRTRLKIQLTSYVDQVFPELQYFFKSGLHQNSVYALLKEAPTPTAIASVHMTHLAHLLEVASHGHFGKEKARELRVLAQKSVGVNDSSLSIQITHTIEQIELLDSQLFHTELEMANLVTCLHSVIMTIPGIGFINGGIILGEIGDIHRFSEPKKLLAFAGLDPSVHQSGNFQAQRTRMSKRGSRVLRYALINAAHNVVKNNATFKAYYDTKKAEGRTHYNALGHCAGKLVRVIWKMLTDEVEFNLE

SEQ ID NO: 464651 - protein, 377 aa, unidentified
MNDLIRIGMDTSKSVFVLHGVNAAEQPILCKKLRRRQVLEYLGKLPPMRIGIEACGAAHNWGRALTALGHEVCLLAPQNMKPYVRRNKNDAADAEAICEAMSRPRMRFVPIKTAEQQAALMLAGVRDQLVRRRTQLSNSIRGYAAEFGLVAARGLDKIEPLLTRIAAEETLPALARELFAEQAEDYAELTRKLRRIDAKLQAWHRQNALSRRLAEIPAIGPIGASLLAMKVPDPAAFKTGRDFAAWLGLTPKDHSTAGKMRLGVITRAGDEGLRRTLVVGATALIQQVRKGRGHPSPWLIALLKRKPPKLAAVALANKTARIAWKLMVSGGHYDRNHAAASGAGRCASLADGFAARPAPEANALPRRIAAPAAMPKI

SEQ ID NO: 464652 - protein, 365 aa, unidentified
MTMVEDTRVLTGGTDADAAHAGAPGITGGAGTHADTHVAAALDPIGGLLGVREFPATAAGYAALLGWLRGFGTVALAGVEGTGSYGAALARHLAAAGVRVVEADRADRQDRHRQGKSDPLDAVSAARAAQSGRASGAPRGRDGAVEAIRALMVAKRSARHERTQAINQARALIITGPDDLRARFAGHTPAALVAELAALRPRPGGVPGYATRITLRELGRRARFLDAQLDRLDELIIPLVTARAPDLLALHGVGPDTAAMLLIAAGDHPGRLRSEAAWAHLCGVAPVPASSGKVTRYRLNRGGDRQANHALWRIVITRLSSRPGHPATRAYAERRAAEGLSKKEIIRCLKRYVAREVYRRLRDSF

SEQ ID NO: 464653 - protein, 374 aa, unidentified
MTDDTALYVGLDVSKEKIAIGLAEAGRKGEVRYYGEIANRADAVRKFVDRLAGRHRRLCLCYEAGPTGYGLYRQLRDLGHECLVVAPSLVPTRPGLQVKTDRRDAVALAALLRAGELSSIWVPDETHEAMRDLCRAREAAVSDLRRARQHLLSFLLRHGRVFEGRSHWSKAHRNWLATQRFDHRAQQIAMEEYIRAIEQIEERRDRLTRQMVELLQDWSLNPIVEAIQALRGVAQISAMTLVSEIGDFRRFSNPRQFMAWLGLVPKEHSTGASVSRGSITKAGNIRARRMLVEGAWTYRLPARVSQEILKRTEGLPEAIRAIAWKAQVRLCQRYRRMQASGRPTNIVIVAIARELAAFVWAIATTVPIPPTKTA

SEQ ID NO: 464654 - protein, 401 aa, unidentified
MNAVGIDVSKGKSMVCVMRPFGEVVLEPFEVLHTAQSLNDLAGKLKALDGETRVVMEATGNYHKPVAFVLHDAGLFVSVVNPVLIHDYDNNSLRRVKTDRKDAVKIANYTLDKWTRLRQYLPEDDTRLALKNCYRQYQQAVAVRTMLKNNLISSLDLTFPDANKLFSSPAKSNGCEKWVDFIGDFWHSECVSSLSSDAFAKKYLKWCQKHGYNFTRSKSDTIYACAVNAASLPKSPTSKLLIQQQVAQLKAVSQSVAAFQQEMLRLSQQLPEFDTVMEMYGVGPSLGPQLMAEIGDVRRFSSKKLLIAFAGIEPQPNDSGKIVGNDSGISKVGSAVLRRTLFLIMTVILKTQAQDEPVFQFMNKKRSEGKPYKVYMMASANKFLRIYYARVKAVMDSKHSK

SEQ ID NO: 464655 - protein, 423 aa, unidentified
MKSSGTQTFTVFIGLDWADAKHDFCLQASGGDRREFGCIAHQVECIDEWAKSLHERFGGPIAIALELAKGPIVYALQKYEFLVLFPINPLTLAKYREAFKPSRAKDDPTDAELALDLLMRHPERFAPLRPQSVAMRTLMSLTERRRELMDDKTRLTNRLTHILKQYYPQALDWFDQHDTVLFCDFLTRWPTPLQARRAHQASLKAFFHAHNAHRPQIIAARLKGIKAVVPLTQDPSVIVPCRLHAMALIEQLRLALQALEQFDQHIAELAPTLPDYRLFADLPGAGPHLAPRLLVAFGEDRERFQRAEELQQYAGIAPVTERSGKKTWVHWRWQCPTFLRQTFIEWAGQTINKSFWAGAYYNQQRAKGSTYQCAVRALAFKWIRILYSCWKTRTPYDESKYLKALKRRGSTLLSNLVPDPLNA

SEQ ID NO: 464656 - protein, 341 aa, unidentified
MKNLFIGVDFSKEKVDVAIIFADGLAETASRVFNEFKTTVSGYKQLIKWVEQNSSGIEPSLWLFCGENTGDYSKGLCNFLYGKGYDMWLENAKSIKDASGLRRLKSDRADASMIAEYAMRNYDRAIMYEPLSESLAQLRELFLYRQMVVHHRCSFQVRRGEKKLTMEKSPIKTMISQSGRHIVSELNKEVEKIDKRISELIKSDEELTEVFTIVTSVPGIGTQNAVCLMVYTDNFRRFNYDSRKIACYYGIAPFGKDSGTSVHSDPRVHYMANRQIKSMLTQAALAAINFNPVIARYYMRLVERGKKKQVALNNVKNKLIRLVTAMVRNRQIFSPEYKISA

SEQ ID NO: 464657 - protein, 347 aa, unidentified
MYYIGIDVSTKESALCILDGKGKIVRETKLPTDPEIIARFIAATGLTIERIGLESGCAAAWLFAGLQRHGWPVICIDARHAAPALQAGFRNKNDRNDASGIADLMRVNKFRPVWIKSPKAQQQGRLLTARATLQSQLVTLENTIRGLLRQEGIGLTDRRTAFEAAVREAIGEDCLLQAALPPLLETRNAVLRHRAGLDREIRRIVHADPVCRLLMTAPGVGALVSLAFKVAVDDPRRYSRSRDVGAHFGLTPREYSSGEVSYHGRISKMGDREVRRLLYVAASRILRRDAAPWCPLKVWAVRLAQRVGIRRTRVALARKLAVVLHAMWSDGQVFQWRRSEASASASA

SEQ ID NO: 464658 - protein, 349 aa, unidentified
MKYIGCDFHPSFQQIAMLDKETGELVERRLLHTEEARVFYEGLKEPVVVGIEASGNTHWFESLLARCQHQLWIGDAAAISRQEGRKQKHDRRAAELILKLMLENRFPKIWVPTVAERDLRQLLIHRQHLVRMRTRVKNQLQHMALNQGWQKKRKLWSEAGLELLRQLKLEPWAGQRRDTLLEMLEELEEKIQPLDQAVAQQAQACAAARRLATHPGVGPVISLATVLTLGDVARFADSRSWVSYLGLNPSEHSSGQRRRLGGISKQGNPFLRYLLVEGAASAARGDEDLGRMYARLKARRHHGVAKVAVARKLAVRLYWMARTEKSYPEVRSHAGEPESSRGRKSRPTG

SEQ ID NO: 464659 - protein, 353 aa, unidentified
MTEYVGIDWAYRRAAWCAMSAGGVINAEGFTPADEDGLAKLVLRLGSEVKACLEMMSGAVWVRDRLRSAGWQVEVADARRVKGVAPLACKTDRVDARVLAELCRRDLVPALWIPSLEERELRERLRRRMHLVRLRTSAMNRIFGLGTQWGLRLSAERLRRQGALELLAQRGVPAVWQRSIQEALAVIDLLEARIAPLEAELAPIARADRDVALLVTIPGVGEMLALTLAAEIADVSRFPSPGKLVGYAGMAPGVKQSGQSSRSGLPLSKAGSRTLRWAAVEAAQHAWRESNPWHQLYSDVAKRSGKNAAKSAVARKVLIASWHMLSRREPFKPSRPRGGARTVPASSISVLAA

SEQ ID NO: 464660 - protein, 411 aa, unidentified
MELVYERCCGLDVHKQTVVACVIISGPGRAAQKEVRSFGTMTPDLLALGDWLASLGVTDVAMESTGVYWQPIWNLLEDRFSLVLANARHIKAVPGRKTDVKDAEWIADLLRHGLIQASFVPDRRQRELRELTRYRTSLLGERSAELNRLQKTLEGANIKLASVATDIDGTSARAMLAALVAGSSDARALAELARGRLREKLPQLERALQGRFGDHQRFLVAQQLAHLDFLEEAVAQVSGEIAERLRPFEQEAVERLDGVPGVGVRTAQVIVAEVGADVERFPRAEQLAAWAGLCPGNNESAGKRLSGKTRQGDKHLRAALVEAAHAASHSKRSYLAAQYRRLVPRRGKKKAAVAVAHSILTIVYHLLSRKVAYTDLGPDYFDQRDRAALQHRLVHRLAGLGNKVTLEPLPV

SEQ ID NO: 464661 - protein, 457 aa, unidentified
MQKKSLKKAKDSSFVPMAVVNPNAAGIDIGDTIRAVAVPKDRDKQSVRIFGAMSCDFEEIANWLEKCEVDTIAMESTGVYWKPLFNFLIRYGFDVYLVNAGHVRNVTGRKSDQSDAEWLQQLHSCGLLKSSYLPSDEQETLRTLVRHRKTLTEESSRFVLRMEKALELMNIKVHTVIRDLTGKTGLAIIEAIIGGERNANNFLPFIDYRIRADHQVIIKSLEGNWRIEQLFILEENYTCYKFFLERIATCDKSIEAQLQRYAAFQNEGEVPLSAVAEVNGLPRGKKKNKNAPKFDTRSFLTSILGVDVMAIYGLSEISALEILAETGADMSKWPSEKHFVSWLNLCPNNKISGGKMISSMIMKKKPNVASQAFRMAANAIQRSDHWLADYFRRMKSKGGNKYAIVATANKMATIYYKMVSKKVGFTPMDLERYREKRKNAKIAYLERKLESLKKQSE

SEQ ID NO: 464662 - protein, 458 aa, unidentified
MKSTLVLGVDVSKGYGDFVLLDAHKRVVEPPFRLDDNKQGHDILKKQLLEWKKNYRVSRLLLVTESTGGYEDNWLRISKDKALSFVESYRINAKIIFHEYQAQRRNSIDDGVSAITIAEHVVKNLENFTVTSSFEETPYTSSRSLIRHYVSLQEESSSHKNALVKLLYQYLPSLEALKPREWPIYWIEIFVRYGSRKSIQIAASKGFKQLKRVPPGKAKEIAEALANGIDMRETPAMVVYAIRSKARQIKRLMEEIKEVKKMIIEVAPVDAQQVSLLKSIKGMGDITPVILLSFIEEVGRFGDAKQMACFFGVQPRVKKSGDGAYRAKMSKQGAGLVRRELYLLAFRTLNKEPYLRAIYAKSRAKGMVHNAAIGVLMHKILRMIYGMLISNTPFNVGIDQLNQHQVADKPKEKRQKKETSRRFQPPSMAAPISGRQRRKRKKDYELQADGISESTESS

SEQ ID NO: 464663 - protein, 351 aa, unidentified
MTSQHDQPTTNFTSIGVDIGKDVFHIVGFDTSGKVVLRKKFKRLALETELTKLPPSIVGLEACLSAHFVSRTLRRLGHSPRIIPAIYVKPFAKGQKNDYNDAEAIAEAALRPNLRVVREKTQEQLDLQALHRVRARLVSRRTATINQIRAFLIEHGIAVRTGAHALRNSVFAILEKRADELSARMISIIQGLCDDWRHLDERIETLTAEIEAISQKEKNCRRLMSVPGIGPMISTAMVAAIGAGDAFERGRDFGAWLGLVPRQYSTGGRPILGRISKRGNKYLRTLFIQAANVILMRPQNWERFSFGAWLTNAATRMHRNKLATALANKLARIAWSVLRHRTKFDEALAAV

SEQ ID NO: 464664 - protein, 346 aa, unidentified
MEHYAGIDVSLERSSVCIVDTQGKIVKEAKVASEPEALVDFFGSLHFAVKRIGLEAGPLSQWLHAGLRRAGFETVLLETRHVKAALSAMTVKTDRKDARGLAQLIRMGWFRPVHAKSMGSQEVRALLVARKQLLGRLIDVELSIRGILRGFGLKVGAVTRKGFEARIRELATGQATLERIAGAMLSARATLRAEYEKLHKAVLAIVREDAVCRRLMTVPGVGPLVAVTYKSAMDDPSRITKSKAAGALFGLTPKKYQSGEKDVTGGITRTGDEMVRTALYEAANVLLSRITRFSKLKRWGMDVAKRRGSKRAKVALARKIAVILHRMWVDGATYRWTAAEQIAAQA

SEQ ID NO: 464665 - protein, 339 aa, unidentified
MSKQPSFAQGLVFCGIDVSAKTLAVSVLQQDQPLRQRELANTAGGHKALIAWLRKAKATVRVSLEATGVYSLDLALALDAAEGIELSVLNPRRVHQFAQTLRRSKTDAADALVLAEYSKRMPFVAWRRPSQRALELRAVSRHLATLTEEQARLHNRLHAAESSLATPRCVREDLKRSLAGIDKRILRLRKAAVALIERDGEMQRKFRHLTGITGIAETSAVHLLGELATLAPEMTARQWVAHSGLDPAHRHSGTSVNLPSRMSRHGNSQLRRALFMPALAGARFDPHMRAFYTLLQQRRKSKMQALMAVARKLLHAIYGIFKTNTPYEGSKLFPQLKVA

SEQ ID NO: 464666 - protein, 321 aa, unidentified
MDGRLVGQGKMNADRKTLDEWAQRLPGAWIGAMEATIFTGWVYDFLKPYALEMKVAHPEMLKAITAAKKKNDRVDAATIADLLRVNLLPECHMLAEDLREFRRILRYRNHVVRTGVKMQNKISGLLMEVGASYNKRRIHGKKYFNELLERVEDIPPSVKGLLKLSRSSYEMFRSVQKKLIETLRTNSLIADRVQRLMTIKGIGEITALTWVLEIGDPDRFGSIRQAVSYCGLCSAQRESAGKEQRSPISKKRNKHLQTILIEAAKLAPNWNEQLAAIHERELKKGNRNRATLAVARRLVAYMMAVDKKQTDFVVPSTLQAA

SEQ ID NO: 464667 - protein, 341 aa, unidentified
MQITTIGLDIAKNVFQIHGIDAAEKIIVRKQLRRGKVTAFFEALAACLVGMEACATSHHWARELTKLGHEVRLMPAKDVKAYVKRNKNDAADAEAICEAVRRPTMRFVRIKSAEQQGQLMLHRARDLLMRQRTQVINALRAHLAEFGITAAQGREGIKELLAIVAQEEGSRLPSDAHASLTVLATQLQAVQTMIGSLEKRIVAQHRSNEASKRLETIPGIGVIGATTIAAVVPDPRVFRSGRDFAAWIGIVPRQDSTGGKQKLGPISKQGDQYLRRILIVGAHAVLRRARQQPETYPWLTQLLARRPFKVVAVALANKMARIAWALLAKGGTYRAPQLVAA

SEQ ID NO: 464668 - protein, 423 aa, unidentified
MEHPRIYAGVDTHSDTHTLALIDEYGRPLATQTFTADPTGYERLAAMIGDPDACLGIGVEGTNSYGAALTRRLVEAGYNVYEVLRPKRAVRRRDGKSDPVDALAAARSVLAGDGTSVPKSADGWVEALRALNAERAQLVTAMTALSNSATGLPATAPEHIRERYRGLRTPIRMRRLAVCRPSGNMVEQGMLVALKAAGKAWKALKEQADLLERSMRLILEDNARPLLDIYCASTVTAATLAIVAGDNPERIRSEAAFAKLCGACPIPASSGKTNRHRLNKGGNRQGNSALHHIAIVRMRYHQPTRDYVNRKTGEGKGKMEIIRCLKRFIAREAYRALVSIRRGRTPLNKPPAERGRRLRELRVAHGITQQQIGDALGVHSSRISEIERGTRNLPELERRAALWIQTITTPNQPTQHTETLDNV

SEQ ID NO: 464669 - protein, 347 aa, unidentified
MKRIAVDLAKSVYQVAESVRSGQVVQRKRLNREAFRRYIQEQTESVEWVMEACGTAHYWGRLAQSLGHQVKLLHPRYVRPYRRRNKTDRNDCDAMLEAARCTDIHPVPVKSHDQQQLQQLHGLRETWKKSRTQRINLLRGMLREAGIEAPASTADFIRAASELVDLPELAPLSCLLHIVLAEINLYEQCMAECEQQLQRWHADDEIVRKLDEVSGIGLLTASALTAAVGKPERFASGRQLSAWLGMTPREFSSGNSRKLGHISRQGNVYVRTLFIHGSRAALLAAQRCQARTPEKLTQLQRWAVQTAARIGHNKAAVALANKLVRICWAVWCHERRFNGNWQSTKPA

SEQ ID NO: 464670 - protein, 392 aa, unidentified
MVCVGIDVAKDKHDCFILSSEGAVLTDVFTIANNRDGFETLLQRIHSCTPPSDIIKVGLEATGHYSYNILGFLLEKGLHPYLINPLHTNLYRRSLSLRKTKTDRIDARTIASMLMSGVDLKSYTDTAYHNEELKSLTRYRFDKVRERAKLKTSISRLVNILFPELETLVPSLHMASVYTILSEFPGAKQIAETHLTHFKTVLSDASKGRYDREKAVEIREAARRSIGSAMPAKSLELRHTIRLIRELDKEIAEIEAAIKAIIDETAPPILTIPGISYRMGAMILAEIGDFSRFDSPDKLLAYAGLSPSTYQSGKRNASGAYAHMEKRGSRYLRYALFNAARYVCVWEPSFAAYLAKKRAEGKHYNVALSHAAKKLVRLIFALQTSGRAFQPA

SEQ ID NO: 464671 - protein, 429 aa, unidentified
MRTESTPGARGPVFCGVDTHADSHWLCVLDWRGRRVLSRRFPADAAGYEALAGAIAAAGEPACVAMEGTSSYGAGLTRHLASLGMPVREALSPARTQRRRPGQGKCDESDAERAARAAMSGSKLGTPKSQDGWVDGVRCMLAARSGAVKARTSAINTARSLLTTAPEGLRSRFRGMGGPRLMEELPSVRAEGALGAALGALADLWAAARDAALDMERAIEASLEENCPALLAMYGCGPVSAAKLAVAAGDNPGRLRSEASFAAICGACPIPASSGKTVRHRLNRGGDRQANSALHEIARQRVMRDPETAEYAERARARGKSDREVMRCLKRYVAREAYRALMRPHEVRRPEDASGLVAARRAAKVSQVRAASILGTSEKYISMLERGQRELKPIRRAYEAWVEAGLPLDWDRQAFEAERKMDSKKHLAK

SEQ ID NO: 464672 - protein, 358 aa, unidentified
MAARTLWVGLDVGADTMAVCATDNRGTVEFEHLIPTNAAVFHQLMKAEKRRIKLIGLESGAAAIPLTRSLRKMGYRVAVFDSRKTSKFLAIRKNKTDKNDARGIAEIARVGRVSVSEVRVKAPECQQLRSMLVTRKKLVTLRTTVENSMRSLFRLNGGRLKKSTTAAALKANVTNELKILRKLAKIDLTEDIGPLLGLSEMIRTHVEVLDKRLAQLAEDHPVCRNFLEITGVGPICALSFYSAVEDPGRFKRSADIGPFLGMTPVVRQSGQSTSRRPISKMGDAMTRSYLVGAALNHLRFGTSAISVWGRGLRERTSYRQARVAVARKLAVMMIAMWKSGERYDPQRGSLQEEALLKA

SEQ ID NO: 464673 - protein, 341 aa, unidentified
MKNLFIGVDFSKEKVDVAIIFADGLTETAPRVFNEFKTTVSGYKQLVKWVEQNSCGIDSSLWLFCGENTGDYSKGLCNFLYGKGYDMWLENAKSIKDASGLRRLKSDRADASMIAEYAMRNYDRAIMYEPLSESLAQLRELFLYRQMVVRHRCSFQVRRGEKRLTMEKSPVKTMISQSGRHIVSELNKEVEKIDKRIAELIKSDEELTEVFTIVTSVPGIGTQNAVCLMVYTDNFRRFNYDSRKISCYYGIAPFGKDSGTSVHSEPHVHYMANRQIKAMLTQAALAAVNFNPIMARYYMRLIERGKKKQVALNNVKNKLVHLVTAMVRNRQTFTPEYKISA

SEQ ID NO: 464674 - protein, 341 aa, unidentified
MGDFSTIGVDLAKSVFQVHGADASGAVLFRKKLRRHQVLTFFAAQRPCTVAMEACGSAHHWAREIGRLGHTVRLIPPAYVKPFVKRQKNDAADAEAICEAAQRPTMRFVVPKSEQAQAAAVVFRARDLLVKQRTQIINALRGHLTEFGIVVAKGPAHIAQLVRAVEDGAEPIPELARPILQGLIEMLQALDDRIAGLDREIAQRAKEDETARRLMTIPGVGPVTATALAALAPPAETFKRGRDFAAWVGLTPLQHSTGGKQKLGTTSKMGERTLRRLLILGASGVLRWVARNGAPAGSWIARMLARKPPMLVRVALANKMARIIWAVMAKGGIYRAPAASV

SEQ ID NO: 464675 - protein, 462 aa, unidentified
MAERNDHETGESNRRQLQGLPVIRRNVAGVDLGSERHWVCAPTQDGSGREIASFGATTLELLRLAEWLKARQVESVAMESTGVYWIAPHEVLEAQGLQVLLVDTRQLARVPGRDKKTDPSDCEWIQRLHSCGLLRGSFRPEEAVCMLRTLVRDKANLVAESADWLRRMQKSLDQMNVRVHRAVSDIDGVTGMAILRAIAAGERDAQKLAQLRDRRCSKTEQQIAEQLTGHWREDHLFSLQQALKMYDAVQERIAAYEQEILRQLGEMEGPGQRGQSAPPLNNANKANAIKKRGQEAKRQALYRMSGVDITQIDALGVETVEVVLSEYGPDLSRFPTEKEFVAHVTLAPRVPSSGGKPLKKKKRNSASTRVAAALRMAALSLRHSQTALGAYYRKLAQRLGGDVAVFATARKLATLIYRLLRWGQPYMDEGIEAYEKRYRQQRVKSLTAKAKDLGYELTALNT

SEQ ID NO: 464676 - protein, 344 aa, unidentified
MITIGIDPHKNSLTAVAVDPTGRDLGTVRLPVTENLGAQLLAWAQSWPDRHWAVEGATGLGRGVAQLLATAEEQVLDVPAKLAARARLLGSGSARKTDVTDAASVAAVAQRNGRLRPVRAEDHTVVMRLLSDRRDDLVAERTRTMNRLHVLLRDLHPGGAKRDLSTRQAGALLRTIRPLTAPDQLRKSLARDLLADVRRLELAIKGATKTLTAALQENGSSLTEIHGLGPVTAAKIVAHTGDVSRFPSRHHFASYCGTAPIEASSGDLRRHRLSRAGNRQLNAAIHVVAVCQARDDGAGRDHYRRKLTQAKTPAEARRSLKRQLTNVIYKRLLADQQRIPQHDA

SEQ ID NO: 464677 - protein, 316 aa, unidentified
MIDALKKCVAGLDVHKKTVMCTILTEKKGGDLKKITREFLTFRDDLNRLAKLLYASEVELAVMESTGIYWKCVYEEIEEMGTPCYVVNARHIKNVPSRKTDVSDSEWLAELARCGLLRPSFVPPKDFREIRMLTRYRKKVIGMLGSEKNRLHKILESAGIKLGAVVSDIDGVSAREMIAAIIKESHTPEQIAQMARGRLKSKESDLNRSLKGRLSDRHRFLLKKIQNHMQWLENHINEIDRQVDKAMIPYKEQWQLLQTIPGVDKTSAAMLLSEIGVNMDCFGNKDRLSSWAGMCPGNNQSAGKKKVVVQGTAINL

SEQ ID NO: 464678 - protein, 325 aa, unidentified
MTRIICGVDVSSASLEARIGRQGAAGSFPNHPEGIAALAAFCHAHQVELVAMEATGGYEQQAFAQLSQAGLPAAILNPRAVRQFAQSMGRLEKTDRIDAGMIAWYAEVKQSPPVCLASQSQQQLRALVTRLRQLTDIRTAQLNQQRLVTDRAVQASFTKLLAFVARQIRDLEQRIAKLISEDPLWRQLDQTFRTIKGVADRTVCRLMAEMPEIGTLSNKTISKLAGVAPLARDSGKYQGKRVVRGGRASVRDILFIVASVVGRYEPDFIAFQQRLRAAGKPPKVVRIALAHKLLVRLNAKAREVRQHLAASAAHPSGSVLVKEYA

SEQ ID NO: 464679 - protein, 350 aa, unidentified
MNVNHYIGFDVHRKSVSYCVKLADGKIVEEGKLRATHDALRQWAGKRPEPWHGAMEATLFSGWIYDTLKPFAAELQMGHPALMKAIGASKKKNDKLDARKIADLVRCNLLPACYVAPAEIRELRRMLRYRNLVVAQATRMKNKVSGLLMEVGAEYHKQQLHGKQYFTELLDTLEEVPESVKDLLRLSRGALETFETTQEQLVVRLQKEPLLAQRVMLLKSIRGVGPVTSLTWILEVGDPQRFSSVAKAVSYCGLSSALDSSADKQQRGPISKQRNAHLQTVLIEAAKLAPRWNPQLAAVHAREVELGNRNRATLAVARKLVAYLLAVDKSGKPFQISTPATVEQEVETAV

SEQ ID NO: 464680 - protein, 321 aa, unidentified
MDAIGIDIAKRKFDLAWFPGGKLKTKVFENTEKGHAELLAWLKKNKLTAENCHLAMEATSQYYEPVALALFDAGYNVSVVNPLQIKAFGESLMRRQKTDRADAELIARFCEVNKPEPWHAPPPKVRELQRLLARLEAVQAMHVQEQNRRHEAHGFALESIRRVIETLDLEIDYLEEQIRDHIDRHPDLKEQDELLQSIPGVGPVVSRYAIAWLRGERFDDVRQAVAFVGLSPSHHQSGSSVNGKSRISRLGHGRLRKILYWPAMSAMRYNAAAAALTQRITAAGKNKKVAIIAVMRKLVHWMIGVIKSGKPFDVNLALAKA

SEQ ID NO: 464681 - protein, 359 aa, unidentified
MKTQSNKLDFNGQNIYVGFDVHLKSWTVTIMTEKLTHKTFSQPPKPEILHQYLNKNFPGGAYHSAYEAGFCGYWVHNKLTSLGINSIVVNPADIPTTDKEKVQKEDARDSRKIARSLRSGDLTAIYVPTLKTLDDRCLVRMRSSLVKDLTRNRNRVKSFLHFHGIDIAETFAGNHRSWSNRYVQWLEGLKFQEPSAKEALNTIVGSSKNLRASVLDITRKIQQLSKTETYRENVDLLRSIPGIALLTAMMLLTELENIERFESIDTLCGFIGLVPSTDSSGDNDIIGDITPRGHNVLRRAIVESAWVAARLDPALSLSYHNYCKRMDPNKAIIRIGKKLLSRIRFVLKNKKPYVCAVVK

SEQ ID NO: 464682 - protein, 482 aa, unidentified
MTVSNKSRESTSPTRRRSGSRKGRRGLCLEDRPVHNPNAAGIDVGAREIFVAVPAGRDEQPVRVFNTFTEDLEQMAKWLVGCGITTVAMESTGVYWIPLYEILERHHLELCLTDARHMRNVPGRRTDWHECQWIQYLHSVGLLRAAFRPPEQVCAVRTLMRHRGQLVEMASQHVQHMHKALTQMNLQIHHVLTDITGQTGLAIVDSILCGERDPDVLAGLRDPRVKASPDTVRKSLVGTWRMEHLFTLKQSRELYRAYQTEVAACDQQIEQLLGQFSPRVDPTERPLPPDRKKRQPRKRTRKGEPAKATPDLDLRTEAYKLFGVDVTQIPGIAVALALALFTELGRDLSKWPTSSEFASWLGLCTDNDKTGGRVVFRRARRGKHRAGQLFRLAAYSLHSASGPLGDYLRRMKTKLGPRAATTATAHKIAVIFYTIVRNQVEYDETIWAARDAARAQRLEAKLRRQAKGLGYQLIPIPEQPAA

SEQ ID NO: 464683 - protein, 320 aa, unidentified
MTAFTPVGIDIASKKFDAAIWIEEKKYKNKVFANTPTGFHAFLLWLAPYGPCHICMEATGAYSLPLATYLYDAGYPVSVENAARIHAFGQSELIRNKTDKGDAKMIARYCHLHKPPEWKPVPVNERKLQVLINRLNTLKEMKRMEENRALTSETIVQDSIQKVIAALDEEIKEIEQAIKEHIDNDPDLKKNQALLESIPGVGEILSTTLLGYVGDMSRFSSNKALVAYAGLNPMLKESGCWKGSTKLSKKGNALLRKALYIPAITALKYNPVVAALCNRLKEKGKRGKCLVCAAMKKLLQLAYGVLKSGKPFTAEIPLAR

SEQ ID NO: 464684 - protein, 276 aa, unidentified
MEHTTIAVDLAKSVFQVAVSHQPGRVDEERRLSRDCFLDFFAQRPPATVLLEACGSAHYWARQLQPFGHAVRLLAPHDVRPYVRRNKTDRTDAKGLLEANRNEEIHPIPVKSIVHQAIASLHCLRSTWLATRTARLNTIRGLLREFGIFIPVGAHHVVPAVRTLLAEPTTVPMLLHTTLAAACDEIDVLEANMRAVERQLAALAADMADVMRLQTVPGVGLITATALVALVTDIRRFPSGRHFASFLGLTPKEDSTGPRRRLGRSASKGTSICACS

SEQ ID NO: 464685 - protein, 460 aa, unidentified
MNRKRSKPRVDRTMPMMHPNAAAIDVGATLHMAAVRADRATEPVRSFGTFTTDLHRLVDWFTECGVETVVMESTSVYWIPIFELLDARGFTVFLVNARDAKHVPGRKTDVSDAQWLQRLHSYGLLRASFRPKGQIAELRAYVRQRERLLEYAASHIQHMQKALTEMNLQLHHVVADITGSTGLRIIRAILAGERDPEVLACLRHYSCHSSAETIAKALTGSYRTEHLFALEQALALYDAYHEKASACDVRIEAVLKELSIHRGRDVGPVPPASRRRHRTDQANALAFDARAALFALLGKDITRIDGLGPYLSLKLIAECGDDLSSWPSAKHFTSWLGLAPSNKISGGKMLSSRTRRSGGRAAALLRLAAVTVGRTDTALGAFYRRLSSRIGKAKAVTATARKVAVLFYNAVRHGMQYVDPGASSYETRYRTRVVNNLHRRAKAFGFVLQPLEPKADAVVS

SEQ ID NO: 464686 - protein, 342 aa, unidentified
MREKRYIGIDLHRRRLTCCVRLANGRNYLSEWALDRLPEFVKKLRPTDEVAVEVTGNTRLFYEAVAPHVERVVVVDPNQFHVISHSVKKTDPNDARALALYLSKGLLPEVRMKEKAQAEVASLTQTRDRLVKLRTALKNKVNNLLSARGIELGKEDLSGEKGLKRVLEQSLEGLAQVELEIIVEQIRSLNRGVSRLEQVIEGAAKKLPGFANLTSIKGIGSLGAGVLLSVIGDVKDFQEEGKLASYFGIVPRVQNSNATEHLGRITKRGSKLGRTTLVQCALIAKRYSPYLNRYYEGIRARRGTGKAIIALARKFLGIIYHTLKNNWVFEDFPNFVLAEAKT

SEQ ID NO: 464687 - protein, 388 aa, unidentified
MEQVIIGVDPHKLSATIEVVDKHEKLLGSGRFTTDRAGYAAMRKYASTWPERVWAVEGSNGAGRPLAQRLLEDGQQVVDVPAKLAARVRLFDTGHNRKTDAHDAHAVAVVAVRTKNLRVLQLDGELEALRMLTDRREALTRRRVQTVDRLQALLAELLPGQAKRDITTGQARAMLAGVRPRDIAGKTRRRIAAEELAELVAVETKIKKATAELKEIVIARGSHLMDLHGVGPVVAARVLADTGDVTRFADRNRFASWTGTAPLDASSGEQNRHRLSRAGNRRMNHMIHIAAISQIRLDTEGRTYYRRKRAEGKKPLEAIRCLKRRISDAIYRQLLDDLEQATGPTDGTGPGGHCGATLKSSAVDLPPHIDTSDQPLPGPAGKTLRPTG

SEQ ID NO: 464688 - protein, 344 aa, unidentified
MAIVGGLDIHRRQITHDWIDSDSGETRRGQLSPATRLELRAWLTRFTGQQADFALEATTGWRFVAEELARAGCAAHLAEPADTRALRGPKRRAKTDRTDARHLRELLRAGTLPESWMPPAHIADARTQVRLRRALVGERTGWYQRIHAILFHHGLPERSQLLTADGRAWLARAELPAVARQAVELALRMIDHLEVELDTLDAQLAGIARVQPGCQALQRRYGIGWLTAVAIWAEFGDVRRFANSRQAVRFCGLDITISESDGKRARGHLARQGSPVLRWALHEAAMCAARPTSPDHPYYLQVKQRLGGKRAALSVARKLAREAYHTLRELGDQALVPADLPTAA

SEQ ID NO: 464689 - protein, 430 aa, unidentified
MKFNTQNAKIKAITETTLVLGIDVGSETHYARAFDYRGIEYSKKPFKFSNDEAGFVTFKAWILDIKEKHGKDKVVPGMEPTGHYWFNLGKFLQDNEMKLVLVNPHHVKKSKELDDNNPTKNDRKDPKVIAGLVREGRYMIPYLPEGVYADLRTASNMRFQLQAELTRIQNRISRWFNIYFPEYKTVYGQPDAKSGMLILKVAPLPEDIMMLGIDGVNQIWRDAKVRAVGKARAKTLIEAAEHSAGSKEGERSARMEIRMLLEDYESRNTRLQEVVALIEELVKKIPMAEKLLEIKGVGIKTVSGFLAEVGDISRFNNPKELQKLAGLALVENSSGKHKGEITISRRGRKRLRYLLFEVAMSLVSKNPEFRELHSYYTTRKLNPLKKMQSLMAVAAKLLRVFFAMLTKGVDYDPKKLVGDIKRPAVYLQVA

SEQ ID NO: 464690 - protein, 364 aa, unidentified
MKRKVYVGMDVHKETIQIAILPSNTKALVKEQQIKHEEGQIKKFIQKLKSEGTEIHCCYEAGVTGYPLYRYLKTLGVNCIIAAPGKIPRQSSDKIKTDKRDAIKLARLLRSGDLESIHVPSEEDEAVRDYLRSRDSLRLDLGRNRQRLMKFLLRKGITYSTTKYWTASHYKWLNNLHFENEILQATFNDYYSRVRVQEENLKAMDQKIREIAESEPYREKVGILRCFRGVDYLTAMFLLSEVNDFKRFKTAGSFMSFLGLVPGEYSSGPKRKQTSITKTGSPRLRRILVEAAWQHRFPGTGSKVVAARRVGQSALVVSLAEKASLRLHKKFKSMQLRGKTPQVMITAVSRELSGFLWAAMNLVA

SEQ ID NO: 464691 - protein, 342 aa, unidentified
MKRKIGVDLHKNSFRVCYYQNDKKYDFETYQVSVKGLDQFKKDLKKTDELAVESTGNTGHFYRAVEGKVNRIRVVNPMQFKVISESVKKTDDEDALKIAKFLSKDLIPEVRMKSKAESQLGSLIGTRDKFVKLRTVLKNKVHNILNANGIVTKTELLTSSKSLDKVLCHELDETCLFELEVIINEIRNLNEAIKKIDEQIKDKGSKLDGHKNITSITGIGDTSAAIFLNTIGDVKYFRDEKALASYFGIVPRMRISNETAHMGRITKMGNKIARTALVQCTFVAIRYSPYLRAFYDRLKAKKGSGKAIIATARKLLGIIYNTLKNKWVFEDFANYKLASQCA

SEQ ID NO: 464692 - protein, 386 aa, unidentified
MQKLNDLSRSLTALEPNGTLIAVIEMSLSSWLVAGIVPGVERQPLKKLAVDESALLKLLHRWREEAEKAGRRIERIAVAFEAGRDGFWLARWLKARGIEAYVIHASSVAVSREHRRAKTDRLDTELLKRSFLGWLRGERDHCKMVEIPTMQDEDAKRPNREHDSLIGERSRIVNRMKAALVRLGIRGFNPKLKRATTRLDGLHTPEGEPIPPNALAELRRDMERRRLVNNQIRQIEEERLERIDQAPCDGAHVMVRLLARVMGVGIETADMLVHEVLSRNMRDRRAVARYAGLTGSPDESGRKRREKGLARSGNARVRRGMIQLAWRFLLHQKNSALTKWFRSRTENARGTRKPMIVALARKLLIALWRLMREGIVPDGVVLRPAQ

SEQ ID NO: 464693 - protein, 483 aa, unidentified
MSDVEEKLSVENGAEVQPMYDYGVGIDTHKKFIQVCVLVRQGNAIRRYEQEWPTSWACMVAAGEWARKIIKEKSIPTLEPDPLRYSIESTSTYHLPVLKAFQGHPSVVNPVMAGQMSRKTDVLDARSLSLQSMTGLWPASFEVSPAIQEFRLLLKQHDYHLKESIAITNRINNYVLRFGHTLGGYQSIRSMENRSLLEDMCEDDYVYNDALTVEAGKFVCPDGLPDEVKKIIKSMYAEYDQHDKNVDYYQNLAINYAKKLLWETDSGYVKGDLLIHNLLTVPSVGELTILRWLAEIMSPLRFENERKLAAYCGCDPSLKVSAGKVTAMTRRKGNERMHYQLMTVAGACINRHSEPFGRWGYAISQKHAKGGYKKACGAVARRIAVSMYYVHKHNEPFRYDGYNFYKIDVPDIQISDMGLSKRVVNLLTDNGLTNSKTIAEAFTVGDIFRIARFGKKASQEINFWIQNNKNHNSKKTRSQENEE

SEQ ID NO: 464694 - protein, 436 aa, unidentified
MKSERIQVGFDISKKKLDMCVLDSEGRALLRQRSFANSLAGYQSMKQSLLPMLQSVASQGVDIGGESTGYYWLPLFLQLQQDPDLAAYDPKAYLLNARQVHWFKKGYAEDDKADDTDNFYVTEKLRTQKRKHAWQPDLDWMRLRFYSRYRFHLGQNLTRLKNYFWAHMFLWCNTYRRGNPFSDGLGACGRALLQEFPDWQALQEMPAETLIEQLLSWSDNKLPDPADNAQQLREVIQESFPVQPEFSAALHDLLTMTIAHIAFIEKQAAQVEHSMEQEVYTHHPEVVHLMNIRGIGIVFAAGIAAEIGDLYRFFDGQKWDKRKKRFRDKNLRDVEDAVAKYAGLWWPRKESGDFQGQERRMNKNGNHYLLYYLIEAADKLRQYLPEYQAFYQSKYRETKKHQHKRALVLTARKSVGLFVGLLHRNEPYRSPEVCKT

SEQ ID NO: 464695 - protein, 391 aa, unidentified
MIYIGIDVAKDKHDCFITNSDSEVLFKAFTIFNNLDGFNDLYQKIESVMDDVTKVKVGLEATGHYSYNLLGYLIDKGLPTYVINPLHTNLYRKSLSLRQTKTDKVDARTIASMLMSDVNLKSYSDTSYHNEELKSLTRYRFDKVKERAKLKTSVSRLVCILFPELEKLVPTLHMASVYALLSEFPGAKQVANAHLTRLTNLLSEASKGRYSKDTAITFRDAARTSIGSNMPAKSLELKHTIKLIKELDSEIDEIENEIKIIMDEINSPILSIPGINYRMGAMIIAEIGDFSRFDSPDKILAYAGFSPSTYQSGHLYGAYAHMEKRGSRYLRYALYNAAKYVCHWDPTFTAYLAKKRAEGKHYNVAISHAVKKLIRIIYHLEKTNQQYIKAS

SEQ ID NO: 464696 - protein, 341 aa, unidentified
MDQYVGLDVSLKQTWISVRQNRKRIWRGKCLSHPRAVAEAIRQHAPNAVLVVFETGSLSTWFHHELTAAGLPAVCIDARHAKAALDTAPNKTDATDADGLSLLAEAGFFREVRVKSWAAMPVRTLVGGRAQLIGISSDLSNQIRGLMRTFGLVVPAGGGRIFEANVRALLEGQAALAGSILPLLEAWRAVRAQATALDRQLVAVARQNPACRLLMTVPGIGAVTALSYTTMIENPANFGNSRAVGAFVGLTTRGYQSGEVDYDGHISRRGDKHVRALLYEAATVMLSRVRSDSMLRSWGLKLREKVGFKRAAVALARKLAVVMHAMWRDGRVFDPATGAPA

SEQ ID NO: 464697 - protein, 347 aa, unidentified
MATMAQPRPQVTVGVDTHGDVHVAAALDGVGRLLGTMSVPSTAAGYRRLLQWASAFGEIAAMGIEGTGAYGAGLARHLAGCSIRVVEVDRPDRRTRRAKGKSDPIDAEAAARAVLSGAARGEPKSRDGAVEMIRTLRVCRRSASQARTQTINQMHSLVTTAPEEFRALLRDLNPRQLVAKAAAFRLGGVFTPTSATKLALRELALRHRFLTEQLRRLDAELKPLVALAAPRLVAISGVGTQIAGQLLVTAGDNPERLRSESAFAHLCGVAPVPASSGKTTRHRLSRAGDRAANYALWRVVMVRLTSDDRTKAYMARRRSEGLSKREVIRCLKRYVAREVYRSLVDER

SEQ ID NO: 464698 - protein, 325 aa, unidentified
MQISTIGLDLAKHWFQVHGVDVYGRVVVRRRLWRSGVIAYFRSLEPCLVGMEACATAHYWARELMALGHTVKLMPPAYVKAYVKRNKNDAADAEAICEAVTRPSMRFVPIKEAEQQAVLMLHRARSLLVRQRTMLVNALRAHLAEFGIVAPQGLRYVEILTKTIAHQQARLPELARSILQTIVDQLNGTMARIQEIEGRLARWHRQSRVSRLLATVPGVGIMGASAIAATVTDPSLFRSGREFAAWLGMTPWQNSSGGKERLGRTSKRGDKYIRSLLTAGAVAVLPHARNRPTRDGEWVRALVARKPTKLAAVALPTKPPASSGQ

SEQ ID NO: 464699 - protein, 371 aa, unidentified
MADIDGVAGIDAHKHVFTVAVLDARGGRCGIESFPTSPDGLAEVLALLDSFEFAIGRIGVEGSAGLGRHVAGFLVAAGYDVREVQANRTAERRRRRRRHKTDREDAEAIARETLADPDLPPAGKQRRPDPCWDELVAVRNRRKSLIGQRVRLLNEAEAVLTGLPLTIRAALPQTSRVRPRLRALDRGAASSVQVTAADRVNLAWLVEAVGDIARLDMRVTELDKQIPALLGQLGCTLAEEYGIAAVGAMDLLVEVGDPTRFTTEAQFARWCGAAPVAVSSGEGDQAPLHHRLDLAGNRQVNSTLHVMHVTQVRSYPPARDYIAKKRAEHKTKREARRAHKRHLANIVIRRMWADHAQRFETPANLATPAAA

SEQ ID NO: 464700 - protein, 338 aa, unidentified
MKTHVGVDLHQRFCYLTAVDASGKMRQQGQVVNEGEALRAWLRQLPGPRQVVVEASGFWPAFARAVAPEQERLVMVHPQRVKAIASAKLKNDRVDSETLAHLSRCDLLPEAWMADEATQQLRLRVRLRITLGRQRARAKNQLQAVLHQEGFKKPVTDVFGKRGRAWLAELELSAAGRLVVDTWLREVDHLDVELAAQTRELERLARADARACCLRTVPGIGAYAAMVILAELGDVERFGSKRALASYAGLTPVVRESAGKRKRGGITHQGSNTLRWMMLQVAQVAARCSPGARSYYAGLRARKPAQVAKIALARKLLTVVWALLRHGECFDEESFARG

SEQ ID NO: 464701 - protein, 356 aa, unidentified
MGEDITTNRGITIGLDVCDRFTEAYAIDGEGKWIESFRVPTTREGLAKGLSRYAGARVVLEVGAHSPWISRQLKEQGFEVIVANPRRVRLIAESDSKNDRFDAEHLARLGRLDPALLSPIVHRGEGAQRDRVRLLARDGLVRARTQLINQVRGFAKSLGSRLPSSSAEAFAKQMRAARPADLFPGFETMLRVIEQLTLEIRKMDREIEGLCKERYAETAVLRQISGVGPLTSLAFVLTLEDPQRFAKSRSVGAYVGLRPRQRDSGGRGPQLRITKAGDALLRRLLVSAAHYILGPFGPDTDLRRFGLRLAERGGKAAKKRAAVAVARKLSVLLHRLWLTGETYKPVGYAKRGGRAA

SEQ ID NO: 464702 - protein, 338 aa, unidentified
MTTKINILAIDLAKGSFQVCAVGPEGTVLYNRSLSRTRLATLLAEQPACIVAMEACATSHHWGRVAQRHGHKVRLVPAAYVKPFVKRQKNDRADAEAIAEAALRPTMRFVAVKSAETQGRAVAFRTHQCLVRQRTQLINALRGHLAEFGLVAPKGPASLKVLENALEDQATDLPSPVREMGAIYLEQIARLTEVIEQLADELEAASKTDAQLRRLCTIPGIGPVTAGAVAAFAPDLDTFDSGRNFAAWLGLVPRQRSTGGKSRLGSVSKMGQTDIRRLLIVGAMSVIRWVVRKGGSSNRWLAALVARKPRMVAAVALANKMARMIWAMTTKQEDYRMA

SEQ ID NO: 464703 - protein, 326 aa, unidentified
MEHELHYIGIGTTKEKLDVDVLRPDGRHRTKKFANTTKGHNELVSWLKGHKIDHAHICIEATGTYMEPVAECLYDAGYIVSVINPALGKAFVQSEGLRNKTDTVDARMLAEFCRQKRPAAWEAPHPLERALRALVVRHQALTDMHTQELNRTETAREVQRPSIDAHLLWLEAELKRLEKQIKDLTDDDPDMKHRRKLLESIPGIGEKTSAVLLAYIGLKDRFAHARQFAAFAGLTPRRYESGSSVRGANRLSKAGHVSLRRALYMPAMVATSKTEWGRMFRDRLAANGKKGKVILGAMMRKLAQVAYGVLKSGVPFDASRHNPVAA

SEQ ID NO: 464704 - protein, 402 aa, unidentified
MTVRPQVWVGIDVGKSSHHACAVDETGKMAWTQKLANEQAAIEALIDRAQNTAVAVRWAIDLTSPMALMLITVLLAAGESVVYVPGRMVNTMTGAFRGEGKTDAKDSRVIAETSRMRTDLAAVTMPDELVVELTQLTGYRTDVMADWVRGINRLRSLLGSIFPALEAAFDYSTRTPLILVAGLCTPAEIRAAGTEGVMTHLAGNKAWPPGIAKTATTAVALANAQHLALPGQAGTAALVKRIAAKLLELDREIKDLDKTIAERFRDHPYARIIESLPGFGPNLGAEFLVVTRGDLTSFATSGRLASYAGLVPVPQDSGRVTGNLRRPKRYNRRLRGVFYLAALSSLRTTGPSRQFYDRKRGERLIHSQALLALARRLVDVLWALLRDGREFTLDRPAALAAA

SEQ ID NO: 464705 - protein, 417 aa, unidentified
MANEEVIYERCAGIDVHKRMIMVCLRIGRKTQVREFGTLTHELREMTAWLKENDCQMAAMESTGSFWKPLYNIFEIEELPAMVVNAQHMKTVPGRKTDVKDAEWIAKLLSQGLLKPSFIPDREQRELRELTRFRKSQIEERSRNLNRLQKMLEGANIKIASMVSDIDGKSSTEFLELVIGKSDFTVDDVAARRHGKMKASADELFRSLEGIVTPIQRELFKHVMKVIREQTAQIEQTDALIKNYMTQTYRDAATALTKIPGIGQISAQQIVAEIGCDMSRFPTAAHLCNWAGICPGNNKSAGKQKSGRTNYANKTLKTTLVQCAQAVKRNKNTFFSAQYQRLVVSRGKNRATVAVAHSLLIAIYYVLQGSDFCDLGADYYTQFNREKKINSYIKQLEKLGVSIPDDVLTAAIAEAVT

SEQ ID NO: 464706 - protein, 400 aa, unidentified
MSGLKGSFDCFVGIDVSKDKFDACGIIGEEAKLFQISAGMDRKGFEKLKGHLASVSVSSVLIGMESTASYHVNLFSYLVSEGYKVILINPLLISNYVKMQLRKTKTDKKDAVVIAQFLLANGDTLIQRITPSLISDLRDLSRQRESLVDEMTSLKIEIKQLLNITFPELEHMVGIFTKSILNLLQQYPSAFALRDADLDQLSQMLIADSYGHKREAFAAALIKAAHSSIGINSTAKEMILKQKIALLFHLEDALQEITGMLIEMARKLMEEDINIMTSIKGIGDKTATNFLVEMGGDINQFERSGKIIAMAGLDPAVYQSGKHEGKGRITKRGNRHLRRIIWLMTTKVIQYTDIFNAYYQKRRKEGLPYKMAVLATAHKLIRVIYAMLTQRTTFCPQMNS

SEQ ID NO: 464707 - protein, 354 aa, unidentified
MKRTTKYVALDVHQATTSASVREESGRVIARSVLPTDGAVITEFVRGMRGAVHVALEEGTQAQWLHDLLAPLVDRVVVCDRRGAPRQGNKADQVDADQLSEQLRRGGLRAVYHGSADRTTLKELTRTYQNLVEDATRVMLRLKALFRARGIPASGKRVYHPRARVQWLAQLQDPGARLRAEALYAELDVLRTLRPRAKAAMVTEARRDPAWPLLRTIPFFGSVRVALLLATMQTPWRFRTKRNLWAYAGLAVVTRSSADYALIAGQAVRRRRPPLTRGLNRNHNRVLKDVFKGAATAATARPGPLQDFYHCVIARGTREELARLTLTRKLAALTLRLWKKGERYDPTKLTTPAR

SEQ ID NO: 464708 - protein, 312 aa, unidentified
MKDGFVSIGIDISKAWLDVHGPGKQCPARVANNQQGIARLLEALAQAMPDVIICEPSGGYERRVVATLQAAGMPVAVVNAKWVRDFARAKGTLAKTDRLDAQILAAYGAAMRPIPTRNIAHNVLADYVARRRQVVELLRRERQQREHASCDVIRCDIEDSIARLEQQVAVWEQRIRDTIAAHQQVAQRHAILTSCSGIGDVTAATLIAELPELGQCSHAQIAALAGLAPFNHDSGTLRGTRHIRGGRSSVRSALYMATVAAIRYNPDIKACYDRLRRAGKHAKVALVAAMRKLLITLNALVKDNRKWQPAYD

SEQ ID NO: 464709 - protein, 349 aa, unidentified
MRFYSQQHKFYCGIDLHTRVMYVCITDGAGKILVHKNLRANPDSFARVIEPYREDLVVAVECVFVWYWLADLCRQLGVTFVLGHALYMKAIHGGKVKNDRIDSQKIAQLLRSGMLPEAYAYPEAMRSTRDLLRRRMYLVRRQAELQGHIQNTRHQYNLPAYEKRLDRAANREGIADHFEDPMVAASIQVDSNLLESLHQQILYVEQLIGEQAHDQDPVAVQLLRTIPGIGKILALTVLYEIGDVSRFPQVGNFISYARLVKCAHESAGKKVVGRNNKIGNAHLKWAFSEAACLFLRESDQAKTWHQKLVSKYGKGKALSIIAQRLGRTAYTMLKRRTVFDREAFFASLT

SEQ ID NO: 464710 - protein, 442 aa, unidentified
MRSIGLDVGKHVAEVAIREPGRPTRSGGRISASPESLQAFAATLGPNDQVVLEATTNTWAIVELLERHAGRVVVSNPLRTRAIADAKVKTDTIDAATLAELLAADYLPTVWQPDPETRALRRRVAGRTALVAERTRLRNRVSAVLMRNLVACPWSDTFGRRGRAWLTTVELPADERELVDVTLRLLDGLAAEIEVVEGGLARAVVDDARVRHLLTIPGIGLQTAVGLVALIGDVGRFARPNKLVGYLGLDPIVRQSGGRPAYTGHISHAGQGHVRGLLVEAALGAIKVPGPLHAFYARLAERRGPGIALVAVARKLAVLAWHLLRHDVDYRWAPARLTATKIRAIELAAGAPSQRGRVPGSGDARERAKLGRQLERAVLAQAEAAYVVFIEARREKDAVAANGERLSSAKAEPGKAARRSQIPKPPPFATGSTASRSTIRRR

SEQ ID NO: 464711 - protein, 313 aa, unidentified
MTGRFAGIDVSKATLDVALVLDDRVWQVERSESGIASLIEDFRGGAVDLIVLEATGGMETSLVAALAAARLPVVVVNPRQARAFARATGALAKTNAIDARLLARLGQTLNPDVRPLKDEQTRELEGLLTRRRQLIDMLTMEKNRLEAAPARVRRDIAAHIDWLTKRLKDVDGELKNAIEAHEAFRLKDDILRSAPGAGPVLSVTLLAAVPELGRLNRREIAALVGVAPLNRDSGTFRGARRIWGGRAAVRTVLYMATISAIRCNPAIRAFHARLRAAGKPPKVAITACMRKFLTILNAMIRSNTPWQLQNVVG

SEQ ID NO: 464712 - protein, 358 aa, unidentified
MLSKINKLDFTGQNIYAGIDTHKKQFTVSIRGDNLFYKTFTQPPKPKVLIDYLHRNFPGANYYVAYEAGFSGFWIQEQLQSSGINCIVVNPCDVPTTDKEKKQKRDPIDSRKIARALKNEELHAIHVPDKTRQQDRSLLRVRQMIVGNQTRCRNRIKALLHFYGVTYPEQFQSAGSHWSKNFLAWLKQLDLGRSSGNTALALIIQEAEFLRYLLLQAHRHIRALSNEDRYAENARLLQTIHGIGLLTAMIFLTEVGDIKRFKSRDHLCSYVGLIPNVYGSGDKEKVGDITRRGNKYLRRHLIESSWVAVRNDPALAMKFNKLCKRMSGNKAIIRITRMLISRIRYVLFNKQEYVTALV

SEQ ID NO: 464713 - protein, 355 aa, unidentified
MDTTKYVGMDVHTEAITIAVVNSAGKIVMESTLETKANTILEFFQGLRGNVQVTFEEGTWAAWLYDLLKPHVTTVVVCNPRKNALLKDGNKGDKIDARKLAKLLHLNNLKPVYHGENGIRALKELSRSYLTITKDLGRVMNRLKALYRSWAIPCAGQQVYAPRHRSEWLSKITEAGVRRRAEYYYQQLDALQALRHEVRRDLLAESRKQAATKLLRQIPCIGPIRAALLIALIQTPHRFRTKRQLWNYSGLGIQTRDSAQYRFVKGELQRSKRPQLLRGLNENHNHDLKNIFKSAATMATISPGPFHDFYESLLVKGRKPTMARLTLARKIAAITLIVWKKGDSFDAKHLKQQAA

SEQ ID NO: 464714 - protein, 345 aa, unidentified
MQTVTTIGLDIAKSVFQVHGVDAQGKVIVRRQLKRRYVLAFFQKLPPCLIGIEACASSHYWSRELQALGHTVRLMPPAYVKPYVKRQKNDCADAEAICEAVTRASMRFVATKTVEQQSCLMLHRTRHLLIRQQTAVINAIRAHFAEFGIVAPVGRTGVEELLKVASDGNDKRLPDVARVCIAALGAQLQMLKARILEFDRLIMAWHRSNQVSKRLDEVPGVGPALATALVGSIADPKAFRSGRDFSAWIGLVPKQHSSGGRERLGGISKQGDRYLRSLFVAGALAVIRYAKKRGSKHRPWLAALLARKPTKVAAIALANKIARMAWAMMAKGERYKQPVALAAAW

SEQ ID NO: 464715 - protein, 412 aa, unidentified
MNAVGIDVSKGKSTVTIRRPGDIVLMPPCDIPHTQSAINDLIERIRGLDGDTKVCMEHTGRYYEPVATWLSDAGIFVSAVNPILIKDFGDDSLRSPKTDKADSKKIARYTLDRWAKLKQYGSMDKTRNQLKTMNRQFGFYMDQKTAMKNNLIALLDQTFPGSNDFFDSPARSDGSQKWVDFAYTYWHVDCVRSKSLDAFTEHYRNWCKRKGYNFSTQKAATIYQASSDLIAVFPKDGCTKLLIRQAVALLNTASETVESLRLKMDQTASTLSEYPVVMEMNGVGPTLGPQLMAEIGDVTRFTHRGALTAFAGVDPGKDESGQHVRKSVPTTKKGSPYLRKTLFQIMDGLIKRSPVDDPVYAFMDKKRAQGKPYYVYMTAGANKFLRIYYGRVREYLAALPETSDGEAQNDGI

SEQ ID NO: 464716 - protein, 268 aa, unidentified
MSGCSYFCGIYLAKNHFSLHAVDQNGKVILHKSVTRSKLLTTIANMPLMRIGVEACGGAHYWARTLNKLGHDARIMAVKYVIPYQTKGKNDLNYVVAICEAVQRPSTRFVPIKSPEQQAILSVHRMREHWVRELTALMNRIRALLSEFGLIIPVGRSSLMKHVPLMLEDAENELPHLARTVIADAYHHLGELNQRIADTEQVFDSFAKVSANVQRVMKVQGISPQTATAILASIGNGTQIDKSRDFSAWLGLVPKQYSTGGKPRLGRM

SEQ ID NO: 464717 - protein, 346 aa, unidentified
MRIIGVDLHARQQSISMLDTETGEVIEKTLQHEGEQVRKFYAALPHPVLVGLEATGSMFWFLRLLEELGIEYRVGHPAAIRKAETRKQKHDRRDAALIRRLLEQDRFPSIWLPTAEQRDLRTLLLHRHQLVRLRVMTQNGLQAVALSQGLRRGSSLWSPAGQQALESLPLADYAATRRRELQEIRRELQRRILELDQRVSEQAQQRTVARRLMSHPGVGPITALATEVFLGDASRFANGKALASYAGMIPSEHSSAGRQRGGALSKQGNPLLRFLWVEAARQAVRRDPRLKQFYRRKLVQKGLGKAVVATARKLGIRLWIMMRDQIDYQEFCQRHSRTAGCPCGNA

SEQ ID NO: 464718 - protein, 346 aa, unidentified
MLHAGLDLSRRRLDFHLLDEGGEGVEVGAAPPDADGLRSLAERVGRHGQPVRAAIESMNGARFVHDQLELAGWQVEIADAQKVKGLAPLACKTDRIDAWVLAELSRRELVPAIWLPDPSVRAERERARWRLHLVRHRSSLKQRVHAVLLAHGKPCPVSDLFGVRGRQLLAQLQLPEPWQGTVAASLRLIDELDREISDRESELRRLGADHRYAPLLLTVPGIGWVLAYTIAAEIGDIDRFPSPTKLAGYTGLCPRVYQSGESDRRGPLARQGPRYLRWALVEAATHACTHPAYRDRYQRTKTRLGKQRGAKVAQVDLARRLAEAIWHMLTRDQPFAPAGATDPLAA

SEQ ID NO: 464719 - protein, 317 aa, unidentified
MASEMFIGVDVASRELVISSPQGLTTTTNTQAAIEAWLMGLPAGSHIGVEATSHYHELVADRAVLAGMVVYVLNPRDTRHYMLGLGRRSKTDRVDAGMIQRLILAEHAQLRPYQPAAAVHRQLALLQRRRGSVVRHRQALHKALRQVGILATALDQALAALDTLIAQIDQQLDTLLNSQEGLAKEARRLETIPGIGRQTSTQLVALFKRVDLANSDAAVAFVGLDPRACDSGQKSGRRRLSKRGSAELRRLLYNCAQAAARTVAWKPYYSQLKSGKFSTTQALVIVARKLLRIAFSLWQQPGIQFNAQKVACLGLIG

SEQ ID NO: 464720 - protein, 317 aa, unidentified
MSKHSIVFAGIDIGKRKLDLALKGSKARLEVENEPAGHDKALSWLKRHKVERIGVEATGGYEKNVVRALRRAGLVVVVLQPLQVRAYAQFRLKLAKNDKLDATIIADCVASIEEIHAAPDPRFEAFAASQTLIDQLNDDIVTYKTRLESAPDETARMFWKQEILARQAQARNARKQLRAAMREHSDLAAKLDLIVSVQGVAEKTAMAVLIRMPEIGALSREKIAALAGLAPYDDDSGDRTGQRHIKGGRTRLRASLYAAAFAATFHWNPQLKSLYQRLRAKGKKHKIALVACARKLLVFINTVVARATPWQASPATT

SEQ ID NO: 464721 - protein, 518 aa, unidentified
MKHRVLGIDLGIRAPSVAVVADTDGTIIGNAVRFELGIDELEGVEVGALKGAKEGSKLHVIMEQTYPTSEYVTAFFLTRGHKVSFAKPDQVKAFRKCLSPKVKTDDVDAYVMARLPWLDPNQLARTYVPPPEIRELKIQVSQRASMVKQLVELKNQLIAYANAVWPGIARAFGDFDSAHARSFLREQRPKNIATLQVDELAKLLKDRGKIQHSYAKRLAGKLLAIAQRTIGLHQLLPEEQIESTRSHTIELVDMVEELELRIRSKEKRLDEAYVRCDPQRLLMSIPGIAEKTAPTIFCYFGEPERFASTRKAQGFVGMFPETDASGTSDRKGTHITKAGPALLRRDLFLAADHFRRNDPHGAKLYHNQMVHHGKHHNSALCIIANRSLIPRILAVLREQRPYELQDFEGHSITKTEARELAEKWKVPEEVRKRLRNKKTLTQERWEAPPSVTSEPKAPRNGRPSQPAHPNPETLSLTTDQLKMLVFKSLEKMLNSGGNVEEIRLQLREEAADLLQEKA

SEQ ID NO: 464722 - protein, 362 aa, unidentified
MQTVIGVDPHKHVFRAVALDERGGLIGDWHGDTTRQGVTGLLRWGSDCAPGAKWAIEGTNSLGRSLAMALIAADADVRDVCPTQTANRRRKLPGRGKSDVVDAEAIARELLAHPDLPCAFKAATASGPDPARDALAVLIRARRQVVDHHRRLLNEAEPLLGELPANLIERLPGGSKVEPRLAMAARLRPTGQPATDLRLRLLRSQAHEERTLSKERDRLEREITRLLRDMGTSLPDLFGLGPLGAADLLVEVGDPRRFRSTDAFGSYTGTAPIPASSAEIHGRPVHHRLNRHGNRRINSVLHIMAVTRLRTHPETQAFIERATGSGKTRRDALRIVKHRLARLVWHTMMNDLASTALEEHVA

SEQ ID NO: 464723 - protein, 392 aa, unidentified
MDKGIRFVGLDVHKATIAVAVAGPGGLVRSLGTIPNDLEAIQKLIRKLQKETTDELRVCYEAGPTGYVLYWQLTKLNVSCVVIAPSLVPVKAGDRVKTDRRDAEKLARCYRAGDLTPVWVPTPEHEALRDVVRAREAAKKDQRRARHRLQKFLLRRGISKPAKMREWTETHRKWVWGLTFELAAQQATLNDYATEVDHFNARVTRLDKAIDEAIDASPPTMQAVIAALQAMRGVSKITATTVVSEIGPMSRFEHPRELMSYSGAVPSEHSSGSKTSRGSITKTGNAHLRRVIGEAAWHYRHRPRVIGGLRRRQEGLSNEVIELAWKAQERLHGRYRHLLLRKCKQKVVTAVGREMLGFLWDIGVHVERKLAKEEREKGPAKKAVEQTEAAKN

SEQ ID NO: 464724 - protein, 368 aa, unidentified
MNNYTLEVARTAGAKELKNQKAAKAKRIVIGTDVHKNSYQAARKIDNGAIGAVAKFRSQEELLLYVEKQKEQAEEVVVVYEAGPLGYVLYRALKAREVRCYVCAPDSREQKRKRRKNNTIDTRTLTSNLFNYLHGNERALQLARVPTEEQEQARLQSRQHDQLVEERKRLGAKGNALLLSRGFGSWANWWRPKAFSRLSQLVPGWLLELLETWVDLLRKLDEKIRRAKVALAQRWSGPRPKGAGAPSLVQLQSEVLDWGRYSNPRKIGCLAGMVPSEWSTGDRQWQGSITKVGVPAIRRVITEMVWRIILFQPQYRPVQKWQEVLRGSTRGLKKKAVVAIGRQLMVDLWRLQTGRVSAQELNLVMIGG

SEQ ID NO: 464725 - protein, 357 aa, unidentified
MRCIPTDSEGITLGVDTHKDTHVAVALDGLGRRLGTLSIPTTLEGYKELVDWANGFGPLEDVGIEGTGSFGAGLARFLRSEGTEVFEVDRPKRRDQYRSGKSDPIDAELAARAVLAGTATTRPKDADGEVEMIRTLRLARRSAVKARAQAVNQLKNLLVTAPEGLRSELRELSTTKLVAKTSGFRPGANPSDVEAATKFAMRSVARRHQRLSEEISELDEQLDRLVAEAAPELVALEGVGTDTAASLLIAAGDNPERLKNEAAFAHLCGAAPIPASSGKSVRHRLNRHGNRDANRALYVIAVCRMSREERTRSYVAKRTAEGKTKKEIIRCLKRFIAREVYRILASASSNKPPILAP

SEQ ID NO: 464726 - protein, 342 aa, unidentified
MEYYVGLDVSLKQTSICVVDQAGLVVREGVVGSDPEAISVFVRSKAPGAVRIGLETGPTSTWLWTELKRLDLPVICIDARHAKAVLKMQINKNDRNDAIGIARIMQTGWFKEVHVKDIDSHSVRALLASRALLVKIKRDLENHIRGLLKNLGLVIGRATFNVFAVRAEELIEDRPDLVAAVRPLLEARNAVEQQVSELDRKVMKLARRDAQVQRFMTVPGVGPITALAFKATIDDPARFARSRSVGAYVGLTSRRHASGEIDWSGRISKCGDGMPRSYLFEAAGVLLTRVPKWSTVKAWGTRLAKRNGLRKAKVAVARKLAVILHRMWIDGTEFNWSKEVAA

SEQ ID NO: 464727 - protein, 499 aa, unidentified
MVLGHVGDIGETVRTVIPFERVSITTYPSRRGIPNDMMEEGMTVRKRMALELAHPNAAGVDIGSASHLIAVSPDRDDEPVREFKTFTADLEQSADWLVRCGVDTVAMESTGVYWIPFYELLEARGFKVYLVNARHVKNVSGRKSDVLDCQWLQQLMSYGLLSGAFRPADEVCALRAVSRQRDMLLASQARHIQHMQKALTQMNVQLANVISDVVGETGQKIVRGIIAGERDGQVLAKMKNARIRASEEEIAKSLQGNWREEHLFVLKQAMALYDAYGAQLTECDAKLQSMLAALVAGDDGEPTKGRQIGRSKNAPRFDVRRYLFKLCGVDLTRINGINPTTALKVISEVGPDMSRFKSAKHFACWLGLCPGTKISGGKVLSGASKRTTNRAAQALRLAAAALHKSQSALGAYFRRLAARLDRAKAITATAHKLARLIYTLLTKGTEYTDKGQDYYEERYRQRVMHHLTKRAEKLGMQLVPLSVNPPGIIQSIMEINCVS

SEQ ID NO: 464728 - protein, 397 aa, unidentified
MYIVGIDIAKRKHEAAVIDGEGTVIIKPFSFTNNCSGYNRLLAMLAKAKLPLDEVSFAMEATGHYWLALFTRLQKEGFRVQVINPVQTNSIRSFYIRQAKTDPRDALLIAEVIRFGHFSESTLHPENIYELRELCRGRHAIVSMQADVKRKVVALLDQVFPEYETAFTNLFSDTSMAILQTCPTPKELSEMPLEELCHLIEVSSRKRFRMVKAQELQELARNSFGFAMAGDVFSTMIRLYAKHLVFLKQQVQEMDRKIAEIMDTLDTPITTITGIGPTLGAYILSEIGDISRFSSAAKLAAYAGIDPTMRQSGEYNGVRNRMSKRGSPYLRHAIWLAASSAVLHDPALKLYFQKKRDEGKPYMASVGHACRKMVSIIYAVMRDNKEYVPCIPGEISA

SEQ ID NO: 464729 - protein, 359 aa, unidentified
MNSIAQPPTRRKVAIGVDTHKHIHVAVALDELGGRLGELTVPADSGGYAQLTQWAVGHGLILAFGIEGTGSYGAGVASHLHRQGHRVIEVNRPDRRERRLNGKSDALDAENAARAVLSGRATATPKVADGQIEMLRQIKIAKDTAVKARTQAIITLKTLIVTAPPELREQLDGLPKMTLIERCAGLRPGPMTTPLAATKHALRGLARRWQQLQVEIKEHERHLAALTEAVAPEMVAAFGIGPDTAAEMLIVAGDNVDRIRSEPAWAKLCGVCPIPASSGKTNRYRLNRGGHRQANSALYRTVIVRLRFHQPTIDYVARRTAEGKTKAEIIRCLKRYVAREVWAYLHPERHEAPAPELAA

SEQ ID NO: 464730 - protein, 406 aa, unidentified
MITQNPPSTPPATATATAATATPPSATATPSPKPHRVIKLGVDVHWREHVVVRQIDGTSPQPAQRFAPEAFVAWVAKQAQQADVVHCCYEAGPFGFVLHRRLVGLGVKSLVVRPRNWDEYGKKVKTDRRDALALVSCLDRYVAGNTEALTSIRVPTENEERARSVSRQREQLLEHRKRLAAQGLSCARYYGHDLPDEWWRAKKFELLQAELPEFLVGLLASVQRIALLVHAELEAHSAEVESAQTQELPTGLGALTAQILDREIGDWGRFKNRRQVASYTGLVPSEHSSGERRQRGAITKHGNPRVRHILIEASWRLQQFQPGYRPLKSRQGALDTAKRKGDKPARKKLCVALARQFIVDWWRIRTGRTTPAKLGLQMSWPAAYVLRGKAPQPVVAPLAVPQPAAA

SEQ ID NO: 464731 - protein, 370 aa, unidentified
MPKYSTAFGMDVHLRSTTVCALDADTGEAVTRRFPGNPWGEIAGWMDGFPGPSLAAYESGYLGFAPQRELAGLGVECVVAAVSKIPRSAADSASKNDRNDAARMAKAILAHDISPVWVPSPEVEGIRDLAGAYDGATARLATAKQRLLAFLARRGFVYGGTTPAGNPRKYWTYDFLRWLDKVRPEDDGGVRALAALRNEVEAAAEARADLLSEYRAAVDASPIAAEVAALQSIKGCAFALAAAFSAEVGDFTRFRSGRQVTAYFGLAPSQRSSGDSVRLGGISGAGNALVRKLAVEGSWCYAAARHQPKLMPRDTGVPLEIRVHGRKGLLRRREEMLARGMPAAKANAATAAELVRWLWALGMMCREGAE

SEQ ID NO: 464732 - protein, 378 aa, unidentified
MPSETTVHVAIELSVSSWLIATRPPGAEKSRLYHIEGGDTTALLALIAELRTRASTKLGRPAEVVCCFEAGRDGFWLHRALTMHGVTAYVLEPTSILVNRRARWAKTDRLDAEGMLRVLAAWLAGDRQVCSMVRVPTPEEEDAKRPHREREHLVQERLRIENRIEALLFTQGIRKRPSLRSWERAVAELRTGDGRALPSLLRVELDRLRRRLVLALELIREVEAERAEALAVTADDEMTQKIAALQRIRGIGTNFAAVLVREVLYRSFANRRQLASYVGITPMPYQSGGMDRDRSISRAGNPRARTTLIQLAWLWLRYQPGSALAAWFRQRVGTLQGRTRRIAIVAMARKLLIALWRYVETGVTPDGVEIRAEADVTA

SEQ ID NO: 464733 - protein, 382 aa, unidentified
MQASTVGTPTAGHCGTIFVAIELSQKTWLVTLHSPDRDRISRHKLEGGDHAGLLAQIEKVRGRAAQKLGSVPRVVSCYEAGYDGFWLHRLLEAAGITNFVFDAASIAVEQRSRRSKTDRIDGELLLRTLMAYLRGEPRVVRIVRVPSVEQEDARRASRERDRLVEEQTAHTNRLKALLRLAGMAVGNPRRRDWLAWLERQRDWRGEPLPPHLLAEVKREHARLMLLREQLAALEQAQAAQDITVPAPMVERRNKLQRLKALGPAFSTTLVNEVFYKDFRNRREVASYNGLSPSPWKSGGIDREQGISKAGNHRARVKAIELAWLWLRHQGDSALSRWFRARTANAGKRARRIAIVALARKLIVALWRYLTTGLVTEGAAMKA

SEQ ID NO: 464734 - protein, 416 aa, unidentified
MNAVGIDVSSRKSTVAVLRPLGEVVCLPFDVTHDIAGLASLVEKLKALDGETRVVMEHTGRYYEAVEKALHEAGLFVCAVNPLLIKEYGANSLRRVKTDKADAVKIARYALDNWADLRDFTPMDAIRYDLKTLNRQFQLASKQRTASANNLIALLEQSFPGIRKCFDSPVRSDGTQKWVDFAHSFWHVDCVRKQPFAAFCERYRKWCKRHAYLFKLSNAEEVYALAKRAVVLTPKSKVVKVLVQEAANQLISISRSVEVYRAEMDRLAAMLPEYPIVMAMYGVGKSYGPQLMAEIGDVRRFERKQALVAFAGIDPMPNQSGDKNVRSNKSSKRGSPYLRKTLFNVIRTYLQCAPQDEPVFQFLNRKRAEGKPFYVYMLAAANKFLRRYYAKLRDYFASLDTLQSVDPIPATLKASL

SEQ ID NO: 464735 - protein, 369 aa, unidentified
MDNITFVGLDVHKATVCVAVAESGRDGEVRQIGVFENRPEVLRRVITRLSKTGRRLNFCYEAGPCGYGLQRLLTGAGHECMVVAPSLIPIKAGDRVKTDRRDAMMLAKLHRAGELTAIWVPDHAHEAMRDLVRARATAVRILSKARQHLQGFLLRHERIYHGPRAWTLAYRRWLTTVRFEHPAQQIVLQDYIHAVQDAETRRDRLTGQIEELLPNWSMAPVVAALQAMRGVALVAAVTVVAEVGDFRRFINPRQLMAYLGLVPSEHSSGGSVRRGGITKAGNALARRVLIEGAWTYRMSARGSRTINQRLEPLSAEIRDIAWKAQVRLCARYRRLTASGKLKVVVTTAIAREMVGFIWAIARIAQPKLA

SEQ ID NO: 464736 - protein, 469 aa, unidentified
MNKAKKKKRKNNGKYHNSLSQLEQINLHAAGIDIGAEEHYVAVPQGRDTEGEDIRHFNTFTVDLFSLADWLKKCKVDTVAMESTSVYWIPLFEILDSQGFDVKLVNPRFIKNAPGRKTDVLDCQWIQQLHTYGLLQGSFRPDDQICELRSYLRQRSMLISYASHHIQHMQKALEQMNIKLNHVITDITGATGIAIIRAIIAGERNPVKLARMRDPRCKNDESTIAKSLQGNWRSEHIFALRQAVELYDFYKNQIIACESRIQQHLETFGDRSDGKPLPKPPVKSGGCRNKFHFDARTYLYRMTGVDVTRIEGIDTPTALTIISETGIGMNKWPTDKHFASWLALCPGSKISGGKVLSSRSRPCANRAAHAFRLAAYSLHKSNSALGAFLRRKKSHLGSPKAITATAHKIARIFYNMLKNGTEYVDLGQDYYERCYRDRMITNLKRKAKQFGYDLVNVKEHELLTTHLQI

SEQ ID NO: 464737 - protein, 350 aa, unidentified
MARSIVPEPDDVVVGVDTHADVHVAVALSGVGAWRGSIAVATTPAGFDELLRWASSFGRVRCFGVEGTGSYGASLARYLQELGEVVVEVDRPDRRTRHLEGKSDPVDAEAAARAVLAGTATGIPKAGDGRVEMIRSLRVARRSAMKARTQAANQLIALVLTAPPELRGSLRALPVVDLVEVASRFRPGALTDPTAAAKLALRHLGRRHASLSAEIASLDRDLAILVMQAAPALVALHGVGTDVAGALLVAAGDNPARLSSEGAFARLCGVAPLPASSGKTNRHRLNRGGDRIANNALWRIVLVRMSGEGRTRHYVERRTKEGLSKKEIIRCLKRYVAREVYRCLERVDGL

SEQ ID NO: 464738 - protein, 415 aa, unidentified
MGYKVAGIDIHKKVLMVVVMLIQAGGLVEKIERRRFGTTTPELEKLAAWLQALGVQEAVMESTAQYWKPVWGALEGKIPTLNLAQAFSNRARRGRKDDFRDAERLVRRLVAGELVLSFVPDPEQRNLRTMTRMQVHLTYDRGRLHNQVECLLEEMRIKLSSVLSDLFGVTGRHILGAMVKGETDPQKLAAWAGNRLQCTAKELVAALTGHVQPMHQRLLGLYLERLQLIDQQIDELQHMIAEALQSEQDAVQRLAEVPGFGADSAQQMIAEVGPQAATFPSAGEMSSWVGTCPGQNQSAEENHSSRSAKGNRYARRVLTEAANAAVKTKGSHWQVVFRRLLPRLGYQQAAWAVAHRLCRVVWKILHDKVRYVEQGVNRDPKARAHRARTLARALRQLGYNVELTPLTPAPAPTSP

SEQ ID NO: 464739 - protein, 355 aa, unidentified
MCGLKHQKEKRSMDYFAGLDVSVKATSVCIVDDAGKIVREVRVASEPEALLQVLTNTIYRFKRVGLEAGPLSQWLYSVLAEAGLPVICVETRHMRAVLKAQLNKTDRNDARGIAQMMRVGLYRPVHVKTLRSQKLRMLMTHRKLLQSKAIAIENDLRATLRNFGLKVGVVGAVKFEARIKELVENLPDLAVVVEPLLIVRRVIREQVGVLHRRLLAIVWDDDVCRRLMTVPGVGPVVALTYRATVDVPARFRNSKAVGAVFGLTPAKYQSGQNDRTGAISRCGDEMMRMMLYEAAQSMLARSAKWSWLKAWAMKIARHRGMKKAIVALARRLAVVMHRMWVDGTAFRWTREVAAA

SEQ ID NO: 464740 - protein, 328 aa, unidentified
MHLIGIDVSKLTLDLACFEQQSERWSRPCKLDNNSQGWDTLIQWVEQQTRAPREDICIVMEATGVYHLKVAAYLSRKGLKVIIVNPQLASQYAKSQNQLNKSDKLDSRSLQQYGSQLKKRHLFIPDTPEISQLKALLSRMHQLGKDLQRERNRLEKCDFQEGSSWARTSVERLIEFITSEQQLTQLQIDQLIAQNPTLKHNQKLLCSITGIGKLTSQWLLPLLSAQRFTSARETAAFLGLVPCHKSSGTSLHTRGRLSGRGDANLRAKMFMPALAAVRHDPAMKAFYQHLVAKGKPKKVALTAVMRKLVHICYGVIKHQTPFIEQYAT

SEQ ID NO: 464741 - protein, 370 aa, unidentified
MKYVGIDLHTNRFTCCYLFDEQGKKQTKTFGLDKEGLAGFYKTIDKDTYVLVEATINTFAFATLFKDLVKEVIVANTYQLKSVGIPEKKTDKLDAFKLAEKLKAQAVSGVQQIVPVIIPPKEIRDIRALFATYGTLRKEIGRTKNRIHSLLKENLYPFTKEYIFGKKTRKAIRDISSDAVLAFQINMLMDTLEHLEETFDKLVIAIKKAGAVFMPQIEVLTSMSGISVITALAVIADVFDVTRFKNAKHFASYLRSVPRVESSNDKTIIKSTTKAGRKLSITLLSQSLNHFRDNNKTLCRWYEKTKVFKKKGVVRMALCRRVITQIYQMLKKGEYHYFRNPVLHEKKLLEYSRFLKKEMVFFNENPVNAA

SEQ ID NO: 464742 - protein, 394 aa, unidentified
MKLIGIDIGKNKHFFCVMDQQTGEIISQPVSFSNDKEGFDFLVQEIKSYPKDSILIGMEDTGHYHFALLKYLLDLQYTVALINPKTTDFNRKMQGGITKNDKLDTINICDVLDTPERKKQYRITKVNSFDLYEQKQLTRHHHNLKEEENVYKNRLQKCIDIVFPEFNKLFNSKYSTVYINILKTFGSAENIANTDIRTIRKCFEIEGRGNRISLTPERLKECARSSIGISSSAEVIQIKHLTAQIELIEEQLTEIDKKIEEFSIQNNSPILSIPGISHFSGTSILAELGDISNYSKPSQIIKFAGVAPLHHESSQFNAQHTSITKKGSKYLRKTLYQIILPVIRHNPVFNKYYQLKISQGKGHRCAQGHCVRKLLRIIYHLLKTNQQFDPQLLR

SEQ ID NO: 464743 - protein, 361 aa, unidentified
MGHRRLVGIDLGIASAHTVRVIDEAGQTIAKRKCWPTTVSLGEVEAAALATTPSGTRLEVIMEPTGPAWLPIAVFFGSRGHLVYRVSSAKAADLRRFFSRHTKTNGIDADTLARLGLVDPAGLQPLELPGPGRRGVHRGPPAQSRPGRTGSPRRGAGKLLSLGRPWGLARSLPGLGEVGGPALVATMGNPARFRRGKAFRSFTGLAPRASETGDTDRKGQPMSKAGSSLLRTTLVRAADTARKQDPQLARIYYIQMVERGKDHLGALCVVAANLAERAWAVMDRGMPYVICDTDDTPVSAEQAKAIIAKRWTVPAEVRARRRSKRAGKAPKNVLGGQSKPGAQGAGERGGLPLPPSSALAS

SEQ ID NO: 464744 - protein, 422 aa, unidentified
MSDQEAVVYSVYVGIDWADTKHDVCIQSRNSDVRVFDVIRHRAEAIDTWVKDLHQQYGGPIAVAVELSKGPIVSALQKYDFIDIFPVNPSSLAKYREAFQPSRAKDDPTDAELAVDMLLRHPEHFKALKPQSAEMRTLATMVEQRRCLVGERVRVTNRLRCALKQYYPQVLEWFDHIDTPLFCAFINRWPTLTQAKRARANTLNRFFHEHHMYREGVLDHRRQAINSARPLTLDDAVIVPYRLQTLVLVEQLELIFRAINQFDDEIEKLATEHPDYDLFQSLPGAGPALAPRLLVAFGEQRERFKSAADLQKYSGVAPVTERSGQKHWVHWRLQCPTFMRQTFVEWAAQTINKSYWAGTYYRQQREKGSTYQAAVRSLAFKWIRIVYRCWQTGVAYDESRYLKVLERRGSPLLKRNNILKTT

SEQ ID NO: 464745 - protein, 340 aa, unidentified
MSLVLQSILPYPDSCLGTSPHQQGWDTKMAELSFGGIDVSKDRLDVLLLPEGLCFSVCNNAPGWAELIVRLRPLAVSAIGLEPSGGYERGIIRALLAAGLSVRRINPNKLRQFARARGVLAKNDRLDARLIAEYVAIMPTRVLQRDDAIERLAEIVTMRRQLCDEHVAAMNQATHLEDAMLRRISKRRLLRIEADILLLDKRLAELVAADPRLAHRYQLLISMPGVGPTLAYTLLATLPELGQIDRKQIAALVGLAPYDFDSGKLKGHRCIYGGRMPVRNVLYMAALSASRYNPALKAFSNRLAAAGKKSKVIIVAVMRKMIITLNAMLRDNTEWHPTAA

SEQ ID NO: 464746 - protein, 330 aa, unidentified
MKNWDFTLGVDVSKNTLDVCCSEIKEHIQIKNGSEGFLQFKKWCKHFDIKLQRSFLVMEYTGGYEYKLIQFCEANNILYTRIPGLAIKNSLGIARGKNDKVDSARIAQYGEEKHKLLNADKPLNVAIVKLKELLNFRKRMVRENAGYKSSIKERRHMYGDNKKDIIVKMLEQKQKENEKKIVSVERAILKVVTADEKMRTNYTLLTSIKGIGKINALMTIAYTENFVSFTNPRSYAVYVGVIPFDHSSGTSIRGRKRVSHIANKELKQELNQAARSAMEWDKEMKLYGQNKMKTKCYKIVLNNIKFKLILRMFAVVKKGEMYVDNYQNVA

SEQ ID NO: 464747 - protein, 389 aa, unidentified
MSQDKYIGMDVHQATISVAVRDVQGKLIMECMLETKAATILEFVQGLSGTLALTFEEGTSAAWLHDLLKPHVSRLVVCDPRKNALMKDGNKNDRVDARKLAELLRTNQVKPVYHEKHGTRALKELGRSYLTVTKDVTRLMNRIKSVYRSWAIPCAGTSVYTPRHRGEWLAQLVEPGVRIRAEHLYQQLDSLQPVRLDARRQLLLESRKHAAVKLLRQIPSIGPIRAALLVALLQTPHRFRTKRQLWAYSGFAVEVHDSGEYRWLRGKLQRNRERITVRGLNNNHNKDVKNLFKSAAISASTRPGPLHDFYLARVESGMRPTMARLTLARKIAAITLTMWKTRSEFRPQTVAVTSSLSIAEKQAFTSHEFLVGEDWSGSRDARFEGSISQ

SEQ ID NO: 464748 - protein, 343 aa, unidentified
MYFIGVDHHKQASVMTVLDEDGRELKNGRVLNVREKVERFLEGCHPFTAVLEAGRSSYVMADLLRELGGEVKIANALQVKAIAHARIKTDKRDSRTLAHLLRADLIPEIYQRGVWNRRAQRVMRMRAYWVAKQTEVKNKIRALLAQQREEIRLEVEKRESGLFSGKGVEFLIKLPLVDPDKMVLDDLVQGYREAQAHIKRSDGLVRVLYGEIEEAARIDTVPGFAATLSVLVAVEIADIKRFARPEDLHSYAGVIPSTYASGERTYHGRITKQGSAWLRWAALEAVYPAIKKDLGLRVLYNRLTKRKGPNVAKIAVARRLLTIIYRVLTEKREYITDMKTSAA

SEQ ID NO: 464749 - protein, 449 aa, unidentified
MAAVMIGVDPHKASHTAVVIGAAEEPLGELRVRACAAQAERLLAWAAAWPERTWAVEGAGGTGHLLAQQLLAAGERVLDVQPKLGARVRLLDAGDTNKNDPNDARSAAVAALRSAGVREVRPDDHAVVLKTWSKRYRDLGRTRTQVVCRLHAVLCDLVPGGLGRPIYASHAARILEQITPPDAVAAARCELAADFLDDLRRIDAQLRETRKKLATAVQAAGTCLTGLFGVGPVIAAAVIGDVRDVSRFPGRDHFAAYNGTAPIEVSSGPHKIYRLSRRGNRRLNHAIHMAAITQIHHRHRRGRAYYDKKLAEGKTPKEALRALKRQISNAIFACLQADARRAAARAQGPGGQQGNDSVASAAGLHPRHRLFGQATPGPGHHPTTAAGGPAPGPAHARGRAGHSPVVATLPPAPPQVQVERPQRSEDERPGGAARRRPHSAARKDRAKDP

SEQ ID NO: 464750 - protein, 404 aa, unidentified
MELTAIYRCVAALDVHQSKLTVCILYENESGEIITELKEFGGFKRDRRAMADWVASFQPELVVMESTGIYWKSPYAALEKQGLTIWVVNARHVKQVPGRKTDFADAQWLAILARNGLLRGGFVPPAIFRELRLIARQMQRLAGILSGEKNRLHKILSDGGIRLGVVVSDLHGKSAKAMIKGLLAGESPEQVLKYASNRLKASEEELLDALAGDLSPAHQFVLTELMAHIDELEARIETFRQALLQGLAPYQAILRSLQTIPGLDETGAALLLVEIGDDMSAFGTPERLASWAGVCPGNNESAGKKKTGKTRKGNPYVRRILCEASNAASRTQCRLQDMFKGLLIRRGRKRAIFALAHKILKIVFLLIERGDYYRDATVDYEKLSVQRNAPRWIKTLKKYGYIAA

SEQ ID NO: 464751 - protein, 430 aa, unidentified
MKSNTQNAKIEAITEKTLVLGIDVGSKTHYARAFDYRGIEYSKKPFKFSNTKVGFATFKEWILDLKERHEKDKVVPGMEPTGHYWFNLGKFLQDNEMKPVLVNPHHVKKSKELDDNNPTKNDRKDPKVIAGLVREGRYMIPYLPDGVYADLRTASNIRFQLQAELTRIQNRISRWFNIYFPEYKTVYGKPDAKSGMLILKAAPLPEDILTLGIDGVNQIWRDAKLRAVGKARAKTLIKAAEHSIGSKEGTMSARMEIRMLLEDYESQNMRLQEVMVLIEELVKEIPMAEKLLEIKGVGIRTVSGFLAEVGDISRFNNPKELQKLAGLALVENSSGKHKGKTTISRRGQKRLRYLLFEVAMSLVAKNPEFRELHNYYTTRRLNPLKKMQSLMAIAAKLIRVFYAMLTKGVDYDPKKMISDIKRPTVYLQAA

SEQ ID NO: 464752 - protein, 341 aa, unidentified
MSEAFIIGIDLAKRVFQIHGADAAGKVLYRRKLSRPQFNKFLNEHPSCIFAMEACASAHHWGREALAAGHEVRLVPARYVKPFVKRHKSDVVDAEAITEAAMRPSMRFVPVKAPEQQAQAMLFRTRELFVRQRTQLINSLRGYLAEFGIVLRIRIRNADILKREVEEQAHKLPDEAKRLAERLLAQIETISAEVEGLDHSIKMHAKTSEETRLMQTMPGVGPMSAIAISAFCPPAKNFRTGRDFAAWLGLVPRQHSTGGKERLGRITKMGQKDVRRLLIIGAMSVINSIERWKRCAEPWLARMLETRPRMVVAVALANRMARRLWAMLMTGQIYRIRGAVA

SEQ ID NO: 464753 - protein, 415 aa, unidentified
MKFEKDTSGIKRYVAFDIHKEYALAGGQNAQQEWVMTPRRIGMEKLREWAKANLHKGDAVVIETTTNVWDVYDIVSPLVSYVVVAHAGGVRQIAEARVKTDKKDIERLIRLLIADIVPEVWVPPVHVRELRGMISYRNRLVKTSTMIRNRLQSLIHRHNLILPKGMLRDKAWWETQKMSALEKIQIRQELAMLDELEKHKAEVDAELGRQSLGDVWGKQAMRLLQLPGFGVIMTMTVLSAVGDASRFESAKKLVGYSGLGAGVHDSGKEHIEKRITKSGRKELRWALVEAAWRAIRISPYWKAQYEKYLRRMRKPNQAIVVIARKLLVVVWHVLTKEEKDERVSEEDLAYKMLVLSWDLDENVRMGLTYKQFAKYALMKLGIETDITRFVRKEVPRRLAPRAEVLERMAELGIAQ

SEQ ID NO: 464754 - protein, 321 aa, unidentified
MNPASIYVGIDVSKDSLEVAQRPDGEAWCVGNDEADIAALVARLAQSPPALVILEATGGMEMPLVRALVAAQLPAVVVNPRQVREFARATGRLAKTDTIDAQVLAQFGEAVQPEIRLLPDAATQELGALVTRRRQLIEMLTAEKNRLRTATRTVRADIQGHIRWLEHRLSDLDDDLDQAIRSSPVWRERDNLLQSIPGVGPVLSLTLLAELPELGALNRKEIAALVGVAPLNRDSGHFRGKRKVWGGRSHVRSALYMAALVATRHNPVIKAFYGRLLAAGKPKKVALTACMRKLLTILNAMTRDHRSWQIMPLSLDTQDSY

SEQ ID NO: 464755 - protein, 413 aa, unidentified
MEVLHRALAGVDVHLRKAVVCLRIQKGSKVVREVRSFGTTTPELLELRAWLVAEQCPIVVIESTGVYWKPIFNVLEGELEVILANAAHVKTLPGRKTDMRDAEWLAEVGAHGLVRGSFIPGAAFRQLRECTRYRRSLVRSRATEVNRLQKVLESANIKLGAVVSDVCGVSGRAMVRAMVAGEHDPVRLAGLARGSLRSKVDQLVPALTGYFAATHAFVIEQILDHIEYLEGRIEAIGAEVERRCEPFIEVIELLKTIPGVGPLTAEVIVAEIGLDMGRFATAHHLASWAGLCPGNNESAGRRRTGRTRRGNAWLRDVMCEAGWAAVRSKGTYLNALYRHLAFARGKGAKKALIAVAHSMLIAVWHILTDHVPYQELGPNHLAPAHPDRLRNALIRRLEKLGYNVTLAPTPLAA

SEQ ID NO: 464756 - protein, 381 aa, unidentified
MDLNRRIDPTPDGGEGMRIDIGVDLHKTQFTVFAQGGETSGVNGQYPTNEEGYGAFLRKLGQWKRSGHDIRIGVESTGNTRYFKHRLEAKGYPVVVINTLKFKVINESVKKTDKHDAATIAEFLSKDMLPESRLCSEDSEQLRRLLKVRSTLVRTRVTVKNQIHGLLVSMGLEDTRASLQSKRGRQRILDTLAGAGNGLVVQPLFETIDRLTENVKAIEYEIEKLVSGDKVVELLQTIPGCGPVTACTIRAYTDDIRRFSNHKKYASYAGLAPWVQCSNESEHYGRITKRGPEELRTAFVQLVIGIRRSRQSTSWRLMERYEAMKIVKGSGKSIIATARKMSKIVWFMLTREEGFNVGFMTDNSLEKKIDSMRAALNEMSA

SEQ ID NO: 464757 - protein, 312 aa, unidentified
MYYIGIDVSKKDLSVFDGKKDLIFINQEGLKSFKKYLKKKVNFSDLVIIFEPTGIYSLYLKEFCAENSIKAYIVNPKKSHNFTRALGKRSKTDKIDARTLYQFHKLIDAKDIKVPQIDQEAKALASYLVSYEFALKQRVSLSHHLESLRDKRLIDLMKKDLKRAKKLEDKIFNDIKEYLGKNQNLKEDYQRLSTIPGIGEKAAIALLTLFKTYQGTNRAQITALAGLDPVKRESGTSVKGKVKISKNGKGIYRKILYLPALCATVHHQKIRVFYQRLLAHHKPKKLAIIASMRKILLIAHAMYRDKTEYVTA

SEQ ID NO: 464758 - protein, 363 aa, unidentified
MMKQNIIFGIDVSSKSSTVCVVIDRIKQGETFKITNDSFGYQDLLDRLNQYLITPLVVFEATGVYSLSLQAFLEDYHIKYSKLNPLKAKKLMDNNLRHNKTDKVDAYRLALIQFNAPQKLRAPQPKEYHELQNASRYYEELAQALIINKNQLHRNLQSAFPQIESILSTSSGRVYWTIVSLFPHAQYVLNHNENQVFQSLLAISGIGRQRAHYLTTRLYALARQAYPYDNESSITIRAIQRNIANLLSLSAERDNVINYMEKLAMQANARSLNIYESIPGIAKTTAVRLVAELGDLRRFDTSAQIDAFVGIDPGRYQSGEKDSHLGITKHGNHLARKILYRTITQMETVKATQPCHITVSVQN

SEQ ID NO: 464759 - protein, 420 aa, unidentified
MKVISTMDVIYRCCAGLDVHKQTVECAVRRLTLTEGGSVQVEIRQFGTMTDDLLEMVKWLTAQGVTHVAMESTGVFWKPIYNILEGHCTVLLVNARHVKQVPGRKTDIRDCQWLAQLLQHGLLKGSFIAPRWQRDLRDLTRERTQLTDEQTRVANRIHKVLEDANIKLGSVATDILGVSGRDILERLMAGEEDIDQLADRARGRLRGKIPELRRALQGRLSGHHRFQLRLNWDHLQYLAQLIEQLDQRIRELCKPYQAQIEQLDTIVGIDQTSAESILAEVGVDMKVFPSEGHLSAWAGICSGNNESAGKRRSGRTPKGSRWLRRTLVLAAQAAGHAKDSFLAARFRRLAARRGKKRACVAVAHSILKIVYHILKDGRSYHDLGGTYFDRLDPQRLTRYLVHRLERLGLKVTLEPATVAS

SEQ ID NO: 464760 - protein, 407 aa, unidentified
MEVLYPRCAGLDVHAKTVVACVRIASGATVSYEHRTVSTNTRGLLELADWLTAHGVTHVAMEATGVYWKPVWHVLEDHVTLVLANAMHIRNIPGRKSDKNDATWIADLLALGLIRSSFVPPAPIQDLRDLTRTRKHLVRENARHKQRIQKTLEDANVKLTEVISDILGTSGRAILQALVAGETDPERLADLTAGRLKATRAELVEALHGRVTAHHRFMLTPHLTQIAALDTAVADVEARIRDALAPFRAAVSLLKTMPGVSDTAAAVIVAEIGDDMSKFPSAGHLLSWAGLCPRLDESAGKRRSTRIRQGAPWLKTTLVQIAWPAARKKHSYFQAQFLRLKSRRGPKKAIVAVAASMLTDVYYMLRDGVEFHDLGDQHFVQRDKTRLTNRLLQRLRDLGVEVEVKAA

SEQ ID NO: 464761 - protein, 346 aa, unidentified
MTIIRIGLDTSKHLFQIHGVDENETPVLRRQVRRLAVAEFFAKLAPARIGIEACGASHHWARVLRGLGHEVVLMPPQYIKPYVKRGKNDAIDAEAICEAMSRPTMRFVPIKTAEQQAALTMLGARNLLVKQRTMLINAMRGHAAEFGVTAPKGPQQIAELQRRLAADESVPALAREMLALLADQLEGLNAKLKTIEARLMAWHRQDQTSQCLATIPGIGPIGGVSFALKVPDPRAFRSARHFAAWIGVTPREASTAGKSRPGKISRQGDEDLRRLLVLGATAVIGAANPRVKPAGQGPTGRASAWLLELLARKPKKLAAVALANKMARIIWAMMVSGETYRRPKEA

SEQ ID NO: 464762 - protein, 335 aa, unidentified
MQVYGIDLSKEKFDVNFIDAKGKEKNQEVKNAVVSISKYLSSVSEDSILCAEHTGAYGDLLVYLCNQMKVPIALVPGYTIKHSLGLLKGKSDPLDSKRIREYGERFTDKLEYAEYAEESITELKQLYTLRHQLVKQRKALRTVDKGRGHLPLQSISVHNHTITILVELDKEIATIDEEIEILIKLDPEMKENYELVTSIIGIGPVIATDLIIKTGNFKTIDTHRKASSYAGVCPFPNTSGKMLGKSKTSPFADKKLKSLLYMGAKAAVKHNKEYKLYFQKKELEGKPYFLIMNNVSNKLLRTAYSVVRNKTPYDKDHVCLDPRERNINSSTKKVA

SEQ ID NO: 464763 - protein, 312 aa, unidentified
MDAIVVGIDVSKERLDVAVRPTGETFVVSRDAEGLDALIAKLTPLAPVAVAVEATGGYETVVAASLAAAGLAVVVVNPAQVRSFAQALGKRAKTDPLDAGVIAHFVEATRPQIRPLPDEETRLLADLVARRRQIVAMIVAERQRQKRLTNRRLQKSIARLLAALQKELSSLETDIDETVRGSPAWREKEDLLASVPGVGKTIARTLIAELPELGTLDRRKVAALVGLAPWTRQSGKWKGKSCIGGGRADVRSALFLGAMVAARRNPDLKAFRDRLVAAGKPKLVALVATARKLLTILNAILRDQKPWRQQTA

SEQ ID NO: 464764 - protein, 344 aa, unidentified
MNHYAGIDVSLESSTICVVDGAGKILRETKVASEPEALIAWFGSLGIPLERIGLEAGPLSQWLYAALRQAELAAELLETRHVRDAFKSMPVKSDRNDARGIAQLMRLGWFRPVHCKSIEAQETRAVLTARKLLQSKLRDIENSLRGVLRGFGLKVGKTSDLTFAGRIRELVAGHPSLEVVAQALLEAHAVLQREFGGLDKRTQKLARLHPQARLLMTMPSVGPIVALTYASAIDDPARFRSSKATGAHFGLTPRKHQSGQTNYTGRISKIGDASVREALYQAAHVMLTKPVKNCSALKSWAMRIKNRTGMRKAKVALARKLAVILHRMLADAKPFSSMAKVAAT

SEQ ID NO: 464765 - protein, 342 aa, unidentified
MSEITTIGLDLAKRVFQVHGADGAGQVILRKKLSRDQVLPFFSKIPCCTVAMEACGGSHFWGREIARLGHEVRLIPPAYVKPFVKRQKNDAADAEAICEAAQRPSMRFVAVKSEEVQGAASVFRVRELLIRQRTQAINALRGHLTEFGQVAPKGAANISRLIAIVDDPGSGLPDQAIATLRVLVDALAGFDTQIAKLNAEISHRAKENEVARRLMTIPGIGPLIATAIATLAPPPETFRRGRDFAAWLGLVPRQHSTGGKQRLGATTKMGERSIRRLLIIGANSVIIKRSVHRAARPGTWLAGMLSRKPSMLVRVALANKMARIVWALMIKGEDYRAPAAAA

SEQ ID NO: 464766 - protein, 386 aa, unidentified
MTRIEDLSRSLVALEQDSTLIAAVEMSAKSWLVGGLLPGVQRRPEKKLSVDPEALLQLLQRWRAEAEKQGRTITRIVLAYEIGRDGFWLARWLRARGIEAYAIHPASVAVSREHKRAKTDRLDLEMLRRVFLGWLRGERDHCSMAAIPTLEEEDAKRPGRERQTLVGEQTRLVNRTKSTLARLGIRGFKANLRKAAQRLAGLRTVEGTPVPPNTLDEMRRDLERLALVREQIKQIERARVERLQQAPELDYNAMVLFLARVVGLGVDTADTLVQEVFRRVFRDQRALAGYVGITGSPQQSGSKRREKGLARSGNARVRRALIQLTWRFLLFQKDCDLVQWYQARVAVKGVRKSTMIVALARKLLVALWRMVETGEVPAGLKLRPAV

SEQ ID NO: 464767 - protein, 315 aa, unidentified
MAMLVAQTKPVVGVDVAKNELVIYQDQSDRLEAIPNNKASISKWLRTLAGTVSIAVEATNTYHVLFADMAYEAGCTIYMIDGYQLSHYRKGVNVRAKTDALDARLLARYLKKEADELHPWVPPCPLYRQLLSLFRRRTALVQARTGLVQSWSNEPLLKTAFAAQINSMKRLEALVEKKIKDVLQRAELMGQVSRCMKVEGIGFLTAARLVTTFQRGEFSNANAFIAFLGLDLRVSKSGQSDGPRRLTKRGDPEARRLLHNAAMSGSRTAAWKPFYEEQRKRGFSTTQALVMLARKMARVVFALLKNQSEYQSKAA

SEQ ID NO: 464768 - protein, 345 aa, unidentified
MQLHTIGIDLGKTVFHLVGLNQRGEVVVRKKFSRKQLLHFTANLQVELIGMEACGGSHFLGRALREQGHEVRLMPAQYVKPYVKTNKSDYIDAEAIAEAVERPKMRFVPIKSDDQPDLQSLHRVRERWVMRRTAVINQIRGLLLERGITLRQGRRHVDAALPGILEDACAKLSGAVRVLLMQLKLELDHLQIRIDEADAMINKAAAENDACRRLVAIPGIGPVTATAIIAAIGNGAAFKKGRGFSAWLGIVPGEYTTGGKQKLLGISKRGNSYLRRLLVQGARAVLQQRAKQSSGLSAWLAQLTTRTHSNVAAVALANKLARMTWAVLAKNETYRPPLLVGAVTP

SEQ ID NO: 464769 - protein, 401 aa, unidentified
MVFCGWDWGATQHGVCVIDDAGQVLWRAVVPHHQEGLTAVFDRLAGLADPGQLPVAIERGEGLLVGLIADAGHPVLVADPFGFKAARPRWGSTPTKSDLADAFMLADYARTDGHRLRRYEPVAPATREISVLARARTGLVAARTAASNQLWALLSEYWPGPAGLFAKLTSKIALAFLTDYPTPQSASRLGEQRMTQFCRRHHYNGQRTPAELTARLRSAPTPAEAVSPVALEAAVHALVAQIRVLNTEIATVEEQTARALQTHPKAALLRSLPRTDTVSLAQLIGEVGPILDRCATVEQAAALCGVVPVTRASGKVHTVGFRYACHKPARVALTGFADNSRHASAWAAHRYQQARDRGARHPHAVRIVARTWLRVLWVCWHTNTAYDPEVHHAERRARAGT

SEQ ID NO: 464770 - protein, 347 aa, unidentified
MTAVMIGVDPHKGSHTAVAIGTGEEPLGELRVRASAAQAQRLLAWAAGWPERTWAIEGAAGLGHLLAQQLLAAGERVLDVQPKLGARVRLLAAGAVNKNDPNDARSVAVAALRSASRREVTADDHAAVLKVWSKRHRDLGRTRTQVACRLHAVLCELIPGGVSKRLTAAHAGGLLEAITPSGAVEAARCELAAAFLEDLRRIDAQMRDAKKKLTVAVAASGTTVTGVFGVAPVVAAIVIGAVRDVSRFPSRDHFAAYNGTAPIEVSSGPRKIYRLSRRGNRRLNHAIHMAAVTQVSHRHSDGRAYYERKLAEGKTPKEALRALKRQVSDTIFARLQADAQRAAAGTR

SEQ ID NO: 464771 - protein, 454 aa, unidentified
MCLEDRPVLESNAAGIDIGAREIFVAVPPGRDAHPVRVCATFTEDLQQMADWLVTCGITTVAMESTGVYWIALYDILESRNMKVCLVNARHMKNVPGRRTDWHECQWLQYLHSVGLLRGAFRPEAEVTAVRTIMRHRNELVQMSSQHVLHMHKALTQMNLQIHHVIDDITGLTGLTIVDAILAGQRNAVELAKLRNWRIKADEETIRKSLVGNWRDEHLFTLRQSRELYRTYQQQIVKCDQEIERLIGGFEPRADPEEKPLPVDRKRYRGDKKRAKKNGRPETKFNLRTEAYKIFGVDVTQIPGLETMALPLFGEVGRDMSKWPTADHFASWQGLCPDNDISGGRVLWKGTRRVQNRAGQMFRLAAHSLHHSLTPMGDYLRRMKVRLGPAAATTATAHKIAVIFYTMVKNQVEYDETIWATRDLKRQQRIQARLKRQANQLGYQLVPLEEKPAA

SEQ ID NO: 464772 - protein, 453 aa, unidentified
MRVVGIDTGVTSKHCAVVVDSEGTKDSKPILFGTSIQEYDRMIEEANKGGKTDIFAIETAGEAWYTLALHLHKKGYQVAIVSPEKSHDFRKSLRKHTKTNRIDASSIARSLIIDRTSITYFSPRTTKIEALRRLTRRYTSLQKEQAAHRTIIRAELRSLLPSWRQPEGIFTMPYKKWFKKGVDPWYWNETNKAELQELLKDPVETERIIEACEQTRKIYSNIHQEGLDSGVLAVQQEVAILELLEDQIKELKRKISQIYRELDEDRVLTSICGIGEFTAAVILGEVGDITRFRNNAGFSSYCGVVPKRNDTGDTHRQGQKMTKQGNRHLRRVLFLAALSGTRTDPELATIYYRQKEVLKKHHNKAMGFVMNALARRIYAVLKRNPHLFSGGKGEKAPYIIKIEGITVDKKVAREWIEKNKKTTSKKNGSRAGKYPPETVKDVSRISNGLPLIV

SEQ ID NO: 464773 - protein, 313 aa, unidentified
MPVSLSKPIVGVDVAKNELVIYQYDGDSLQEIPNTKTSIKQWLKALSGTVAIAIEATNIYHLDFADLAYEAGCTIYMVGGYELKHYREGVKIRAKTDALDAKLLARYLKNEAEELRPWTPPSPLYRQLLSLFRRRAALVQARVGLVQSWSNEPLLKAAFAEQVKSMQQLETLIEKTINDQLKEAGLLGQLKRCLKVEGIGFLTGARLITAFQRGDFRNADAFIAFLGMDLRVAKSGQKDARRSLSKRGDPEARRLLHNAAMSASRTKAWKGYYEEQRTRGFSTTQALVMLARKLARVVFALLKGQSEYQPKAS

SEQ ID NO: 464774 - protein, 343 aa, unidentified
MKITRVGVDLAKKVFQVHGVDGAGRRVWKRQLKRSNWLSVLTETVTPGCEIGMEACGGAHHWARELKSRGYKVRLISPQFVKPYLKSLKNDVNDAEAICEAMARHHMRFVAVKTVEQQDIQAMHRVREGLMNHRKAKANQIRGLVAEYGLVAPRQMAPLRRAIPCWLEDAENGLRQPFRVLLHGLWEDLQRMDERLKVLDKEIFALSEGHPDAKRLKQLRGIGPLTATAMVAQFGDGRHFKRGRQASASVGITPRHAGTGGKNWLFGITKKGNPYLRSILIHGARSVVSKAKHKDDRLSRWVTELAERKHPNVAAVALANKTVRIAWAMLRNGTDYDPELAMA

SEQ ID NO: 464775 - protein, 422 aa, unidentified
MAHGIRWVGLDVHAHESTIAVFDQDTGELTTRRVVGRPHELLPWLKRIARPARIVYEAGPTGYGLVRRARAAGLEIAVCAPTRTDRRPGDRIKTDKRDAIRLARLLAAGELTLVTVPTVEHEQLRDLVRCREDIRADLMRARHRLGKFLLRREIYYEGPNVPWSRRHREWLASLTFADRASQLTIADYLHAHDLLIARRDRIEAELEQVAADSPWTGAIARLKCLRGIDTLSALGLCAEIGEWDRFEHPDQLSAYLGIVPSENTTGERRRQGAITKAGSTHARRLLIEASYHYQRHPGISAALERRQRDQDAAVINIAWRAQRRLNARWHQLKHMRKKPNGIVAVAIARELAGFCWEIALATRTAQPTTRCGWRGGPRLPAIAHNQSPREPVEQPRSPAAALDPRQRTVRRNQGLGVSSPRI

SEQ ID NO: 464776 - protein, 350 aa, unidentified
MLIIGADYHPGFQQIAFVDTETGELQERRLQHREEAEKFYRDLAAQGMKVRVGMEASGHARWFERLLSELQFELWIGDAAEISARRVRKQKTDRQDAQLILKLMLKDDFPQIWVPSWENRDLRQLLWHRHRMVQARTRMMNQLQAVALNEGLRCKKKLWREAGREKLESFQLAPWASQRRRDLLELLDQLNPTIAKLTQAIEEEVKRYPAAQRLRTHPGVGPLTALAFVLIIGKADRFQCGKQIASYLGLVPLEKSSGNQRRLGHITKQGNSLLRFLLVEAAQVTVRSLPEWRSKYCHLTMRRGRKIAKVAMARKLAVRLYWMLRKEWDYEQLTKFGSHAGQPGNRHGVK

SEQ ID NO: 464777 - protein, 385 aa, unidentified
MDVLYQSCAGIDVHQANIVVCILHGPLTSTRPKREMATFDTTTKGLRACHDFLSQFHVEAVGMESTGVYWRPVWHALCDDFKLILAQPAHMKAIPGQKTDKKDAHWIAKLTRIGLLPRSFVPDETIQELRELTRQRKHYVESRNRETNRIHKILQSGGIKLTTYIEDIMGLSGRNLLQLLVDGTPITPRIVHQSVYTSLKKKVPQLLEALDGYFSDHHRFMLKQSLEIYDFYQKQIELLEERITVYLSQYENHVEILDSIPGIDVITASVIISEVGVDMSQFPTSGHLASWAGLCPGNNESAGKKRSTKIRHGNSYLKKCLCQAAFAVKRQKGSPLAERYYQIQSRRGSQKATIALAHQLLKIAYILLKEQITYPEFLAQKKKDY

SEQ ID NO: 464778 - protein, 397 aa, unidentified
MYIVGIDIAKRKHEAAVIDGDGAVIIKPFSFTNNCSGYNRLLAMLTKAKLPLDEVSFAMEATGHYWLALFTRLQKEGFRVQVINPVQTNSIRSFYIRQAKTDPRDALLIAEVIRFGHFSESTLHPENIYELRELCRGRHAIVSMQADVKRKVIALLDQVFPEYETAFTNMFSDTSMAILQNCPTPKELSEMPLEELCHLIEVSSHKRFRMAKAQELQELARNSFGFAMAGDVFSTMIRLYAKHLDFLKQQVREMDRKIAEIMDTLDTPITTITGIGPTLGAYILSEIGDINRFSSSAKLAAYAGIDPTMRQSGEYNGVRNRMSKRGSPYLRHAIWLAASSAVLHDPALKLYFQKKREEGKPYMASVGHACRKMVSIIYAVMRDNKAYTPYIPNEISA

SEQ ID NO: 464779 - protein, 482 aa, unidentified
MKHSHQDKSQKASPHKEQNSWQQMNRKQRREMTRKMHAEDLSLEVVHPHAAGIDIGNEVHYVAVPPDRDNKSVRRFGCTTAELKEMAASLKQCGIRTVAMQSTGVYWIAVYDILEAAGLEVYLVNARETKNLPGRKSDVQESQWLMKLHTYGLLRNSFRPPQEIRTMRTYWRQRNDLIRSAARHVQRMQKALTQMNIQLANVLSEVSGVTGQAIIQAILAGERDPRKLAAFRDKRVKASEEEIARSLEGNWQEDLLFMLKQEQDGFEFCQKQMNECDERLQQYLRQKQDRSKGAELPEENRKERLRKKKTNKPRFDLRTELFRMTGTDLTQIDAIDVRTAATVISEAGWDMSKWPTEHHFVSWLRLCPDNRISGDKVIGKGRLPINNRLSVALKIAASTLRQSNTYLGAQFRRLKTRLGPPIAIKAMAAKLARLVYRMLRYGMRFIDRGAQFYEAQHRWRQINSLKRKAANFGLKIIDAPAA

SEQ ID NO: 464780 - protein, 338 aa, unidentified
MPLYGGIDLHANNSVVVLLDEQDQVIYQRRLSNHLPTILEQLAPYHSDIKGVVVESTYNWYWLVDGLMEADYRVHLANPAAMQQYSGLKYTDDHSDARWLAQVLRLGVLPEGYIYPKAARAVRDVLRKRAHLVRQHTANVLSVQNILARNTGSRFSAKRIHECTKADLEGLLPEANQVLAVTSSLALLDCLSQQIKTLEKAVTKSLKHTPAYEQLLTVDGIGTILAQTIGLETGDIGRFPTVGNYASYCRCVKSTKISNGKRKGQGNVKNGNPYLEWAYMEAAQFAIRFNPTVQRFYQRKHAKSHLMVARKAVAHTLSRACYDLRRDLVPFDVHKAFG

SEQ ID NO: 464781 - protein, 416 aa, unidentified
MKIVRPICCGMDVHKNIIVATIGITNKKTRITEYIQETFSTLNPDLLNLKQWLINHKCFDACMESTGKYWIPIFNILEDEINIYLTHPKYVKAIKGKKTDKKDSKWICDLFKHDLIKFSFIPPKEIRALREISRYRYKLVGMRSSERNRYQNCMTVSNIGIGSVFSDPFGKSAQAIMKEVLESDIIEDEKILKCIHGSCKNKDKILDSIKHCNIETDQRFKMNESMTHMEELQVHIDNCEIEIMKRAAPMFDRFMHITQLPGISTLSAILIISEIGVDMKQFESDKQLACWAGLAPANNESANKKKSVRISKAGQYLKPLLVQCALGAIKDKEGYFGIKYSRIKKRRGHKKAIIAIARMMLVSIYHMILTGETFNPSDYESFKNPKPPIKQQVLTEESAIEFLKKSGFDVSKLTKP

SEQ ID NO: 464782 - protein, 354 aa, unidentified
MDKTTSRTVSALSSLGVDIGKDVFHVVGFDLEGEVVLRRKIKRLGLERAFKKLPRCIVGMEACLSAHFVSRTLRELGFEPRIIPAIYVKPFAKGQKNDYNDAEAIAEAALRPNLKLVQEKTQDQLDLQACHRVRARLVSRRTATINQIRAFLIEQGITVRRGAQALRKSLFAILRNREDEMSPRMSDLIVGLYEDWLWLDERIETVTREIEEIGHSEANCQRLMSIPGVGPMISTAMVAAIGTGEAFARGRDFGAWLGLVPRQYSTGGRPILGRISKRGSKYLRTLFIQAAHIILMRPHHWPCFSFGAWLQQAATRLHRNKLATALANKLARIAWSVLRNQKRFDAHRIEVAAI

SEQ ID NO: 464783 - protein, 424 aa, unidentified
MDVIYDRVAGLDVHKETVVATVRVMVGRQAERECRTFETTTAGLSALLAWLTETRCSHVAMEATGVYWKPVWNILSDGAFELIVANAAHIKNVPGRKTDVNDATWIADLLACGLIRGSFVPSEKFQELRALQRTRKQLTREQTRHVQRLQKTLEEANIKLDSVISDIMGLSGRRMIEAIIAGVRTPRKLADLADRRIKATPKELYDALHGRVTDHHRFRLRLHLGQYDALAEAIAALDREIDAAIGRIDEERESAGQAPFRAASREVCEIPGINLLAANMILAEIGLDMQRFPTEAHIVGWSGLCPGQNESAGKRKSSKLRKGAPWLKTTLVQCAVSATNKRGSYFRAQFQRLKSRRGAPKAYCAVAASLLTTIYHMLKNRTKFRDLGHEHFDKRPTKAKVNRLLAQLAKLGYHADVRPLANAA

SEQ ID NO: 464784 - protein, 338 aa, unidentified
MKKYSGIDLHSNNAVLVITDEEDRVLYQKRLQNRLQDVLSALEPHRRELAGVVVESTYNWYWLVDGLQENGYTVHLANTGAIRQYDGLKHSGDETDATYLAHLLRLGILPTGYILPKAQRAARDLARKRLQLVRSRTSHVLAVENLFARNTGDCPRSNVVKRYTVEDIVPFGFDPDITLAIQSNVAIIQALNTEIERLEQRLHTCVAAQAEFTLLKSMPGIGDTLATTLWLEMGSMERFAKVGNYSSYCRCVDSKRISNHKKKGEGNSKNGNKYLAWVWVEAAHFAIRFCPQAKRFYERKKARTNGIVALKAVAHKLARACYHILKEQQPFDVTRCFA

SEQ ID NO: 464785 - protein, 401 aa, unidentified
MNAVGIDVSKGKSMVAALAPGGKILARPFEVFHTKSGIKELVSFVRTLDGDTRIVMEHTGRYYEPMLQWLASCDLFVTAVNPKLIKDFGNNTLRRVKTDKADAKKIARYALDNWCDFRQHTGMDTTRTQLKTMNRQFAFCMRQRTSCKNNLIALIDQVYPGANTYFESPARADGSQKWVDYVSVFWHVDYVCSMRLSTFTERYRKWCHRHGYNFQQDKPQLLMEKAKDLMAMLPMDKMTKMLVQTAVAQLNVLSKTIETLRTQMIELAEKLPEYPVVISMNGVGPTLASQLIAEIGDVSRFSRRGSLTAFAGVDPGAKQSGTMQLRSNRTSKAGTPHLRRVLFLVVSGLLMRAPDDLVYNFMDKKRTEGKPYYVYMTAGANKFLRIYYGRVKEYLASLPEK

SEQ ID NO: 464786 - protein, 460 aa, unidentified
MSRAQKGSQGAPSVKPVAEVDTLTTIHPNAAGVDIGMDETWVSVRADRDAVPLRRFGMNTPDLIAMAEWLQGCGVETVAMESTGVYWIPLYEILEARSFEVYLVNARHAKNLPGRKKDEADAQWLRRLHTFGLLNNSFRPESEICALRAYMRHRADLIEHRAAHIQHMQKALQQMNVRLSPTVKDITGVTGMAIIRAILAGVRDPLQLAQLRQPTCAKPEAEFVKALTGNYREEHLFTLKQALALYEAYTQQIRECDQELERKFSTLKPVHDDDLPPLDPSDKPNTHSKNAPAYDGRTLLYQLLGVDLVAVHGLNQVTAQIIVTEVGTDMSRWKDEKHFCSWLGLAPHNDISGGKVLRSRTLKTHNRAAQAFRLAAQAVSKTETAYGAFFRRMRAMHGPKKAIVATAHKIARAVYFMLRDHKPFHSPNAEEYTRREREREIVRLSKKATKLGFTLAPISP

SEQ ID NO: 464787 - protein, 366 aa, unidentified
MKKTSTVRVNGNMIFKGHKLTIGLDLGDRWSYYCVLDETGEVLLEQKLATTPEAMKQTFQRIPRSLMALETGTHSPWLSRLLKELGHEVLVAHAQKVQLITKSNRKDDRHDARTLARLARIDPELLGPVRHRSAKAQIHLTVIRARAELVSARTALVNAARGLTKSYGERLPKCGTEQVSRELAAKLSAELREVLEPLLQEIESLNEGIKEYDARMEKIARESYPQVALLKQVKGVGTQIALTYVLTLEDPHRFAKSREVGCFVGLKPGRRDSGESQPQLHISKEGDRYLRTMLVQGAHYILGPFGADSDLRRWGLRLAERGGKNAKKRAVVAVARKLAVLLHRLWVSGEVYEPLRNSHKAMRAVA

SEQ ID NO: 464788 - protein, 319 aa, unidentified
MAQNDRVVVGIDVAKDKVDACIRALSQRQTFPSTAEGRRALIRWLRKHKVGKAVMEASGGYERDWAKALREARIEVRIVDPKRVRSFAQSAGRLAKNDAIDAEMIAWFAEAFDEARGQAYDAAREELVQIVNARQALLEQQTQMQNRCEHTVPIPVRKMHERLLKAIALEVTKLEAVIAALTKASPHFAETAEIIERVPGLGKITSAGLIAAMPELGQVSNEAISALLGVAPYDDDSGKRQGERQIKGGRRKVRNLFYMACMGAATQHNPVLKAFYRRLIAKGKKPKVALVACMRKLIVILNIMIARREKWDAGRYAVG

SEQ ID NO: 464789 - protein, 427 aa, unidentified
MVISWLRRFTTGNKEPGNIGKSPAESTGAKKGEFAMIIVGIDVASQKHDYFMVRPDTGEVFSKASVTIRNSENGYKKLHEDITAFCGATGDYDVRIGLESTGIYHTNIIMFLLSQNYQVMMINPILTNMARKSSRVHCPKNDNLDSQTICKYLIENPDKFSPYTLSSYHNEALKSLSRKRFFIVDELRKAKLTVNNLIQVIFPEFKSLFSNIYGATAISILKHYQTPKRIARAHADSLARFIHGSCSCTAAKLIEAAKSSVGISNDYLAFQLADAIEEMEHIQQRVKKFDEQIKTYVDELCPELLSIPGVGYVTAGLIMGEIKDISKFRTVDSLTAYSGIDLETYESGNYKSKNLHPTKKGSKYLRYALFQVARVAWIHDPVFNAYYRKKLSEGKHYYVALGHLQKKILRVIYSILKNNSTYSVKIA

SEQ ID NO: 464790 - protein, 439 aa, unidentified
MPFFPTYIKLEGGYPLKVVYPICCGVDVHKAFFVATIITTTDGIMPHYQKKRFSTFNKQILAFKKWLLENNCRDVCMESTGKYYIPVLNLLEDSINVTVANPKWVRAVKGYKDDEKDSKWIGNLFRIGLVPGSFMPSKPFRILREYTRYLFKMVNAKSSEKNRYQNVFTVCNVALDAVVSDMFGVSASNITDYITNSDTFDPDYCVSLLRGTLKNKAESVVESIEGFQMTEAQKARARLIRDHYDFLVNHISILESSIEALAAPYKAAIQLLCTIPGIKERSAISILAEIGDDMSQFGSAKRLCSWGGLTPSNNQSAGKKKSVRITRAGVYLKPALVEVAHAAVKDLKNPYYGIKYERIKRRRGKKRGIIAIAIARMILTAIYHMLSTGEVWNPCDLPQIDMTPEFQEKQLKRDIRRAAKLLVANGIINLSDIKFSDTA

SEQ ID NO: 464791 - protein, 348 aa, unidentified
MRDGITAVVGVDVGDDWSHICAVDLATGEVLVEGRVRTRREALRARFAAMPAARVALEVGTHSRWMQALLLSLGHEVVVADARKLRMIFQGTNKQDRLDAWSLAKVARLDPQLLYPVRHRGVQAQSDLSLIRARDQLVRTRVKLVTMMRSMVKATGERLPACATERFAERTRGELPDCLRDSLEPVRAVVAEISASITRLDQRIEAAARSRYPQVWPLTTVRGVAVLTAMAYILVLEDPARFARSRDVGPALGLVPRRDQSGQTDRQLGITRTGDGLLRRLLVECAQHILRDCSADSDLKRWGMAIAARGGGKAKRRAVVAVARKVAVLLHRLWVTQEDYVPLRNDAA

SEQ ID NO: 464792 - protein, 447 aa, unidentified
MAQGNGLTRGDRNRNRKLGELRAVVRADRAVLAIDLGEDKQVAVVMDHDNRVLARTTVRAKAHRLGGLVEWGEKVAGKQGFAGLVVACEPTGHRWMALMALAENRGHGFVGVQPLAVHRARESDDYTYAKTDHRDSYLIGKLAARLECYLPEQATEEWAQLRHLGARRAELITAVTGYRQQAGDLLGCAWPAALDVARRPLESVTWQAAMMVVLSRCGGHPGRLRRMGYEKFLAAVRRELPRWGGQKLCHAIVKGLWDALADPAGVTAQRPGALERLHMVLEDWLALRARLAGTQKRMLEVLDSLGLTELAGSIDGVSPLSAAVILAESGDPSRFSSGRALVKHAGLNPSEHSSATMTGQSRISRRGRPGLRTAAWRAVWAGLRHNTVLQAKYRHLTTREESRLAAGQARVACAAAILRWLRAVITAGTAWDPAIAAGHAAPEAIAA

SEQ ID NO: 464793 - protein, 338 aa, unidentified
MTVETLGIDIAKNVFQLHGVNHHGSVVLKRRVMRDQLLDIVAQVERCTIVVEACTGAFCWARRFEALGHRVKIISPQYVKPFVRRQKNDGNDAEAICTAARQPHIPLVPKKTVEQQDIQALHRARQRMVNHRTAVVSQIRGLLLDRGFAIAKSITRARRLVPEILSDLENELTPLAREAIAELHDLFRDLDRRIAIFDKKIDAVFRGSERCQRIATIKGVGPKTATAIVAAIGDGAEFKNGRHLAAWIGLVPRQLSSGDRTTLMGISKRGSQHLRSLLVHGARAVVRTAPSKTDLNNQWVNQLRERRGFNRATVAVANKNARIIWAVLRTGEPYRAAF

SEQ ID NO: 464794 - protein, 420 aa, unidentified
MERMVERCAGLDVHQATVVACVLINERGRRPRKELRTFGTMTHELEALRDWLVAERVTHVAMESTGVYWRPIHAVLEEHFTVIVGNARHIRNVPGRKTDVKDAEWIAELVCCGLIRPSFVPAKPLRELRELLRYRRKLTVAQAAERNRLQKQLEIANIKLGSVATDVFGVSGRAILRALIEGASSPVEMAGLARGRLRRKRDELAHALKGRLDDTQRFLLSMQLRRVEDIEILIKELDQHITGKLGPYQTELALLMQIPGVDWVVAAALIAEIGVDMSVFVSVHHLAAWAGLCPGSHESAGKRKNTTARKGNVHLRTMLVGAARPAARTKGSYFKDKYYRLKARRGSMRAALAIAHKILVAAYHMLARRVDYRELGEAYLDRIDQTRTAINLKRRLERLGYVVSILPQTTPSDAQATRPA

SEQ ID NO: 464795 - protein, 343 aa, unidentified
MDQYVGLDVSLKETFVCVVDACGEVVCEKSVGTTPETIAKFIDKRAPSAVRIGLESGLLSTWLWHGLRALGLPVVCLDARHAASALKMRINKTDRNDAAGLAQIVRTGWYREVEVKSLGCHEVRAVLLARSRLVASRRDLENQMRGLLKPFGLLVGKVRGKGFEGRLRELIADAPAMAEVIDALLLARRALCAQIARLDVRVRALAKAVAPCRRLMTVPGIGPITALAYVTAIDDPGRFRNGRSVGAYLGLTPRRYQSGEVDRAGRISKCGDGLVRTLLFEAAGVLLTRVQRMSPLKAWGLRLAKRIGAKKAKVAVARKLAVILHCMWTDGTEFWWTKEEATA

SEQ ID NO: 464796 - protein, 381 aa, unidentified
MPDVSSTAPEQVRLWIALDVHKHSIVAATLPPTGGTPELQRIENTERAIRRFIDWLGGPDGLAVSYEAGPCGFDLLRLLGRLGVACDVIAPSLVAVRAGDRVKTDKRDAKKLVRLYRAGELSFVQPPTPQQEGLRDLVRCRDDLMCARRAARHRIAKALLRHGHIFCEGRKSWALQHIAWVRRQRLDDELAQRAVDHMLCHLDSLDAQIAVVDHELEQIATREPWSDAVAWLCCFRGISIRTALGLLAEIGDFRRFGSARELMSYLGLTPSEYSSGDQQHRGHISKCGNQHARRLLVEAAWHYRHAPRRGQRAARLADRVPDDVSTRAWQAQVRLHHRHRALAEHGKRSTVTNVAIARELTGFVWAAMTHQPLRDQETAAA

SEQ ID NO: 464797 - protein, 343 aa, unidentified
MQAVTTIGLDIAKSVFQIHGVDAAGNVIVRRQLKRRYVLPFFQRLPPCLIGIEACASSHHWSRELKALGHTVRLMPPAYVKPYVKRQKNDAADAEAICEAVTRANMRFVETKTLEQQSCLMLHRTRHLFIRQQTAVINAIRAHLAEYGIVAAVGRNGVEELLGVVADPSDKRVPEIARACLAALGAQLRMLKAQILEFDRMITAWHRSNETSKRLDAIPGVGPALATALVASVPDPKAFRSGRNFSAWIGLVPKQHSSGGKDKLGSISKQGDRYLRSLFTAGALAVIRYAKIHGTKHRPWLTALLARRPTKVAAIALANKIARMAWAMMARGDRYKEPVALAA

SEQ ID NO: 464798 - protein, 307 aa, unidentified
MFVGIDVSKDRLDVHVRPGDQTFAVERDHGGIERLVAQLRELMPRLVVLEATGGFETVVAAALGAAGLPLAVVNPRQIRAFAKACGRLAKTDALDAAVIAHFAEAVHPQPRGIPDQATRALGELVTRRGQIITMMVAERNRRRQLTQPRLTKTVDRVLATLQEQLSAVESAIDETIRGTPAWLEKEELLTSAPAIGPKIARTLIADLPELGTLTRRKISALVGIAPFNRDSGKRKGPRAIAGGRARVRTALYMAVLVTIRRKLPLAATYHRLRGAGKPGKVAIVATMRKLLVILNAMMRDKTAWHGA

SEQ ID NO: 464799 - protein, 347 aa, unidentified
MLRFELMIERGAVKETAVCIVDESGRICREVRVVSHSDDLLAVLKDPALNIERVGLEAGPLSQWLFEGLACAGLPVICIETRHVKAFLKAQPNKTDRNDARGIAQMMRVNLYRPVHVKTLTSQKRRALLTARKLLQGKAIAIENDIRGLLRNFGLKVGVVGTVKFEERICELVEGMPDLEEIMEPLLAARRKLRAEFARLHKKVLTIARNDATCRRLMTVPGVGPIVALAYAATIDIPQRFRSSKAVGPILGLTPKLNESGESKRVGCISLCGDGMMRTLLYEAAQTLMTRVTKWSWLKAWAMNVAKRRGMRKAIVALARRLGVVMHRMWLDGTEFHWTRETMASAI

SEQ ID NO: 464800 - protein, 413 aa, unidentified
MTNSYHLFVGIDLGSDCHQVCVVDQEGTILGQRKVEHGGGAIQQMLAWLAELAGGASPETVAVAVEAPRGAIIDALLGHQYAVFSINPKQMDRFRDRYSVAGAKDDPRDAYVGANSLRTDLSHFRRLRPDHVQVVRLRELSRAHDALQEDWRRHANQLWSYLQRYFPAVLKLSSAADELWVFDLLEQSKALSQRAATLSIEELTKLLRRNRIRRFSAEHLHQTLQDRLALAAGVEEALAEQVLLLLPRLRLLHQQRIEVDRRTERLLEEMAEESFPEHRSVEILRSIPGLGRVFLATVLSEATRPLLERDYHALRNLAGAAPVTRRSGKTTIVSMRRACNDRLRDAVLNSANTHVQKDPRAKQIYARLRAHGNTHARALRGVGDRLLELICILLSSDQLYRLERRQPPKTDAV

SEQ ID NO: 464801 - protein, 392 aa, unidentified
MIFVGIDVAKDKHDCFIISSEGEVLADVFTITNSKEGFEHLLQTINTCTGIGGGEIKVGLEATGHYSYNILGFLLDNGLPTYVINPLHTNLYRKCQTLRKTKTDRVDARTIASMLMSDVSLKPYTNIAYHNSELKSLTRYRFDKVKERAALKSSVTRLVNILFPELEKLLPTLHTASSYALLSELPSAKHIAEVHLTRLTNLLYTASKGRYDRDKAVQIREAARNSIGTYMPAKALELKHTIKLIKEFNNEISEIESAIQSIMYKIDSPITTIPGISLRMGAMIIAEIGDFNNFDSPNKILAFAGLSPSTYQSGKLNNCYAHMEKRGSRYLRYALFNATKFVCNWNPLFADYLAKKRAEGKHYNVAISHAAKKLVRIIFALQKSGQPYIAKT

SEQ ID NO: 464802 - protein, 388 aa, unidentified
MSTEDCDIIAQAPVQTTLAAIFFSMELSRSTWLITSLSPGDGEKMSKRTLPAGDLAGLLSLLQRLSEKARARTGESYPFVSIQEAGLDGFWIHRALEQEGIDSNIVDPASVATSRRRRRAKTDRLDGETLLRTLLAYKRGDPRICAMVKPPSPEEEDRRRNSRERRVLIGERVRLINRIKGLLFCHGIRDFQPLKADRRARFDALITAAGELLPPHLRAEIGRMLDRIELILQHVKANEATRDAMIATPPSVEASAGGAANLMMFRGVGPDFAEILWSEGLYRRFDNRRQLAAYAGLAPTPWQSGNVSREQGVSQAGNPRLRTIMVQLSWFWLLHQPDSALTRWFRERTKAGGRSKPTIVAMARKLLIALWKFVHDGVVIEGAVMKRA

SEQ ID NO: 464803 - protein, 395 aa, unidentified
MKVNELQVAVDVGAHAHRVAVGDGSGGLLEEFDLEHTAAGFAGFFTRIERLRGKRSAPVAVAMEGFNGWARPLDRQVLEHGWRLYNVNNLKLARYKEIFPAPAKTDAIDARRILELFRLRGDLAVARGVLQEIVAATQEAEQLKRLTRRRRQLVNEKARVLNRMQADLQAVCPGLLAITAEADNLWFLSLLSAREDIRRLAGLHQSSLRALEGVGRAYCAKIQAWQREALFSHEAEWAGPMIVADARRVLALKGEIAALDQLIEPLTEGCESARRLRTIPGFGPTCSGELAGEIGAIERFGSEASLALYLGMAVLDHSSGTHTGTRRPRQVNTRAKAAMMIAVARHMEQVPTSRAYYDKKRAQGKAHNQAVRALGRQLVRVIWSMLKHQRDYELR

SEQ ID NO: 464804 - protein, 382 aa, unidentified
MRALTVATPTAEYCGTIFVAIELSQTSWLVTLHSPDRDRISRHKLEGGDHAALLALIGKSRSRAEQKLGSAVRVASCYEAGYDGFWLHRLLLAAGIMNFVFDAASIPVEQRGRRAKTDRIDGELLLRTLMAHLRGEPRVVRVVQVPSVEQEDARRASRERERLVKEQTAHTNRIKALLRLQGMAVGYPRRRDWLNWLAKQRDWQGQPVSPHLLTEVTREHARLMLVRQQLAALEHAQAAQAAPIPEAMAERRDQLQRLKALGPSFATTLTSELFYKDFDNRRQVAAYCGLPPSPWRSGGIDREQGISKAGNPRARLKAIELAWLWLRHQPESELSRWFNTRTADAGKRARRIAIVALARKLIVALWRYLTTGLVPAGATMKA

SEQ ID NO: 464805 - protein, 373 aa, unidentified
MPKYSTAFGMDVHLRSTTVCALDADTGEAVTRRFPGNPWGEIAGWMDGFPGPSLAAYESGYLGFAPQRELAGLGVECVVAAVSKIPRSAADSASKNDRNDAARMAKAILAHDISPVWIPSPEVEGIRDLAGAYDGATARLATAKQRLLAFLAKRGFVYGGTTPAGNPRKYWTYDFLRWLDKVRPEDDGGVRALAALRNEVEAAAEARADLLSEYRAAVDASPIAAEVAALQSIKGCAFALAAAFSAEVGDFTRFRSGRQVTAYFGLAPSQRSSGDSVRLGGISGAGNALVRKLAVEGSWCYAAARHQPKLMPRDTGVPLEIRVHGRKGSERLLRRREEMLARGVPAAKANAATAAELVRWLWALGMMCREGAE

SEQ ID NO: 464806 - protein, 417 aa, unidentified
MGILVERCAALDVHKDTVVACVRVPGRDRDGGRQQELGTFKATTAGLLTLADWLESYGVTLVGMESTGCYWKPVWQVLEDRFECWLLNARHARNLPGRKTDMADAAWLCQLVEHGMVRPSFVPPRPIRELRDLTRYRKAQIQERTREVQRLDKVLQDAGIKLSSVASKTLGVSVRLMLDAMIQGTHDPEVLAELAKGRLRAKLPALREALAGRFRSQHHGLLVGQILAHIDYLDETIAFLSARIEQVIDPFSAKVALLRTIPGVDQRTAEVLLAEIGADMAQFPSAAHLASWAGMCPGNDESAGKRGSGRTRKGSKWLRGALVEAAKAAARAKGSYFSAQYHRLKGRRGPGRATIAVGHSILVTAYHMLDRGVAYQDLGEDYFQQRQQEAADRYAKRLVRQLEQLGHKVTLEPADAA

SEQ ID NO: 464807 - protein, 325 aa, unidentified
MSKITIAVPEITIGIDLGNKKHDLCVLNSMGEVVEQIQIDNHIEALHEYFEQYKNRSSIRIALEVGACSMWVSSILKEMGFKVIVANARKLRMIWGDTNKCDEKDAEKIARVARMDPKLLHGIEHRSLSAQKMLSVIRVREHFIGARTRCINCVRGILKSFGVTDLPSCASNRFGERMLAHIPDDLISTLGELLEESKDLTNRIEGLDDRIYMLSEESCPEAIKLQELPGVGPVTALTYVLTIDDPKRFQKSRDIGAFLGLTPKRDQSGEIDKQLSITKQGDRYLRALLVGSAQFILSDRSPASDLKNYGRRIARCTPTVHSRGS

SEQ ID NO: 464808 - protein, 407 aa, unidentified
MTDSGKRYLGLDVHKHYLIAFGVDKDLNVVLSARRVELSRIEAWMKKTLTKQDEIVLEMTTNTWQLFDELVEYAGSVMVVHPPHVALITRSQVMNDKIAASILARLLAKGLLVGIWVPPQDIRELRGLVAQRRKMTTLATQAKNRLHAVIQRHHLVPPAGNPFGASNKEWWRVLPLGKLEKLNLQSDLDTLQCAEKQVKRMTEMMEGMAAEQEPIGRLLHLAGFGVVTAVTVWAAIGDIRRFAEPRYLVGYAGLGTRVHDSGMMMRSGKITKAGRRDLRTVLIEAANVAANSHPHWKAELARLEPRLGRNKAVVAIARKLLIAVWYVLQGKTDKYAEPEAIAQKMLKFAYQVGKANRPKQQTAAQFARLRLDALGLGQELTSIPWGSKKPIPLPPSTNKVSDVPNTE

SEQ ID NO: 464809 - protein, 346 aa, unidentified
MPETEIDTFAGIDVSARELSVALRRGKGEDKPAMAKFSNHPSGHKALIAHLLRGSRRVRVCLEASGNYTLDLALTLQAHRQVEISVINPRRARRFAESLGQRSKTDPVDARVLGEYAARMPWVAWQPPSSVALHLRAVARAIADLGVIHTQQNNRAHASAASQALPVLVVKEMQRHQKYLEQRMTRLRREALRIIAGDPELDRRFRLMLTTTGIAETSALLILGELAVLPDMLDARQWVAFSGLDPRLFKSGKSVEKRPRISRGGSRHLRRALYMPALVALRRDPYLRCFYQNLLARGKARLQAVVAVMRKLLHALFAMFRTNQRYDGSKLCCAFEMAGHAIATRA

SEQ ID NO: 464810 - protein, 348 aa, unidentified
MLADELDYVVGVDTHRDEHVLVVVGPAGAVVAQRSVRASASGYAAALRFANTHANGARVWAIEGAGHYGAGLARHLSGRGETVAEVGRGPRDERRLRGKDDSLDAIRAARTALASETLAMPRAGQRREALRLLLLARRSAVDVRREALVQLRSVVVTAPDRLREQLRGLPAQRLIVRCSRLRRSSSAPPDELATRQVLRSLARRIEAASNEAAELEREILAHVRALAPQLLDEAGVGPIVAAQVIVAWSHHGRVRSEAAFARLAGAAPIPASSGQTTRHRLSRGGDRQLNRALHTVILHRRLHDPATQTYIARRVAEGKSRRDAVRLLKRYLARHLYRVLQEQAPLMT

SEQ ID NO: 464811 - protein, 347 aa, unidentified
MAIVGGFDIHRRQVTFDYLDTMSGQVRRGRIDPACRQELRSWLERFAGRDDVTFAVEGCTGWRFVVEELQRAGITALLAEPAETAHQRGPKKRAKTDKADARHLRMLVAEGRVPLSWIPPEQVRELRVLLQLYLDLREERTAWAQRIHATLFHQGVPSLAGRLWDPQARALLEHGQDIGLSPAGAQAVAVALRRMDDLEAALAPVRAQIAAFARRQAGCKTLAAELYGVGPLVAAIVWAFLGDTRRFSSSTQAVRHTGLDVTVYSSDDKRAPGHLSHQGPPILRWALFEAGHQGSRASSPDHLYYTDVAARIDANRAALSVARKLARRSHHILRRLGDAAYAPLPGW

SEQ ID NO: 464812 - protein, 403 aa, unidentified
MMTAVIIGVDPHKGSHTAVALGADEVPLGQVRVRASAAQAERLLTWAKSWPERTWAVEGAGGLGHLLAQELAAAGEQVLDVQPKLAARVRLLASGAVNKNDPNDARSVAIAALRSPSCLPVRPDDHAAVLKSWARRHRDLSRTRNQVACRLHAALCELVPGGVSKEICAAHAAAILEEAEPCGAVARARAELAAELVADLRHVDALLLETKKKLATAVRASGTSLTEIFGVGPVIAATVTGDVRDVSRFRGRDRSAACNGTAPIEVSSGNRIIYRLSMRGNRRLNHAIHMAAITQIRYRHSDGRACYDKKIAEGKTGKEALRALKRQISDAIYKHLKADAARAAARSTQGPGGQPGNDSVASAAGSHPERQLFGQATPGPAPTLRSRPKKTTSRARKKAARIT

SEQ ID NO: 464813 - protein, 341 aa, unidentified
MVDQKKTSLIKRFCMSKVSKKVIGVDVGSKFLTVSFKDSEERDQVFNIENTKRSILSFLKKFSVEEYFFVIEATGNYSRRILHLSLLHGFESSLINCMMIKHFARLKNIITKTDFEDAKLIRLYGETFECEVYLAKSMEMEYLDQELKLLNDLEEEKRRYESRLKSLRYNLHINSSTEKHYERKLKQLDKEINEVIGRLPELQDEEFKETKNLLQSVSGIGEKTSLQLMTATSGFKNFNSAKSLSKYFGLAPRIYQSGKNSYSPGKCRTSKTHIRGLLYVCSWSAIRYNKHCKEFYEKLLCQGKAKKLALIAVCNKLLRICFGVVKIKRNINRIIKKTLKF

SEQ ID NO: 464814 - protein, 363 aa, unidentified
MQNPIMVGLDLHTETMTLSVATRAGRKWNGVYPANQAGRKKMFQELKKVALGDEIHLAYEASGLGFKLYDEAVERGIHCYVLAPTKIEKSVSDLKAKTDARDAEKLLEIVRGHVLAGNKMPSIWVPDQETRDDRELLRARVDLSDETVRTKVKIRSLLKRHDIRPPKSAGTSWTQDLRIFLEKQTEGRRRLGSGGQEALDVLLERLKELEKEKARLDKAIKKLSKAQRHQGPLKEMTKIKGVGLLTAMVVLTELGDFSRFSNRQQIGRYIGLVPKTDETGEANDRKGHITHQGSSRVRKLLCQAVWTQVRLPGAEREAYERIGGRNPRHKKVAVVAMMRRLAIRLWHVGLDAQLKEKAKLQVA

SEQ ID NO: 464815 - protein, 397 aa, unidentified
MYIVGIDIAKRKHEAAVIDGEGAVIIKPFSFTNNCSGYNRLLAMLTKAKLPLDEVSFAMEATGHYWLALFTRLQKEGFRVQVINPVQTNSIRSFYIRQAKTDPRDALLIAEVIRFGHFSESTLHPENIYELRELCRGRHAIVSMQADVKRKVVALLDQVFPEYETAFTNMFGDTSMAILQTCPTPKELSEMCLEELCHLIEVSSHKRFRMAKAQELQELARNSFGFAMAGDVFSTMIRLYAKHLDFLKQQVQEMDRKIAEIMDTLDTPITTITGIGPTLGAYILSEIGDISRFPSAAKLAAYAGIDPTMRQSGEYNGVRNRMSKRGSPYLRHAIWLAASSAVLHDPALKLYFQKKRDEGKPYMASVGHACRKMVSIIYAVMRDNKAYVPCIPSEISA

SEQ ID NO: 464816 - protein, 410 aa, unidentified
MDVFLERCAGLDVHQASVVCCVLIGAPGRKPQKLLRSFGTTTRDLETLRAWLAEHGVTHVGMESTGVYWKPVYAVLEGHVDLTVGNAHHIKNVPGRKTDVKDAEWIAQLVRHGLVAKSFVPPPAIRDLREMVRYRRTLIETRTAMRNRVLKLLEGANIKLSGVASDVFGVSGMAMLEALAAGTSSTTEMAGLARGRMRRKHAALEAALEGRMREHQRFLLGMQLRSLGTINQDLEALDARIGTQLEPYQAQHQLLTQIPGVDWVTAASIIAEIGTDMDVFASARRLAAWAGVAPGNYESAGKPKGAGTRRGNVFLKSALFAAASAAVRTKGSYYRDKYNRLRARRGPVRAIMAVAHKLLIAAFHMLSTGEAFRDLGEGYLDQVARKRSTTKLVQRLSNLGYDVMLVPKAA

SEQ ID NO: 464817 - protein, 337 aa, unidentified
MEYFAGLDVSMAETQVCVVARDGTVIHKAKVPSTPADIAAALAQFPTCRRIVFETGRMAPMLYHGLRQFGLPVICIESRQAYQALKLLATHKTDRNDARGLAHLARTCFFKPVHVKSLPAHAVRSLIIARKKLVGQRVTLENQIRGLAVVFGVRLPRALSSTFISQALRASDGIPGLSAAMQGLVAARAAVLAAILAIDADIRRMVRASDACRRLMSIPGVGQLTALAFTAAVDDPGRFRRSRDIGAYLGLVPRRYQSGEIDYSGSISRCGDRRVRTLLYEAANVMLTRYKAPLKLKDWAVAVARRSTMRKARVALARRLAIIMHAMLRDGTEFKPA

SEQ ID NO: 464818 - protein, 320 aa, unidentified
MKQAMYVGVDVSKKQLDVAIRPLGKIFAVSNHRRGIAQLVRRLKKLEPVYIAIDATGGLEKELAYALAAENLPVAIVNPRQVSNFAKSTGQRAKTDAIDAAVLAHFAEVMKPEVRRLPDAASRELSALVTRHRQLVEMMTAESNRRDLASKSVRKLINSLLRSLKDQLAVVDREIRKAISASETWRHKAELLRSVPGVGKVTTATVLAGLPELGELDRRQIAALVGVAPFNRESGTWKGKRMIAGGRGWIRAVLYMSTVVAVRRNPVLKEFYERLRARGKPAKQALTACMRKLLVILNAMVRRQTHWSVPVSFPTLSVHT

SEQ ID NO: 464819 - protein, 347 aa, unidentified
MLHAGLDLSRKKVDVCLLSEEGEHLGQLVTAPDGDALRSFARRIEQAYREPVCAVIESMTGARFVHDTLEQAGWAVEIADAQKVKGLAPLACKTDRIDSRVLATLSQRDLVPAIWLPDPRVRAERELARFRLHLVKHKSALKNRVHSTLINFGKPCPVTDLFGVEGRKLLERLRLPEPWRANITASVVLIDDLERQITEINKRLKEGHADHPYIPLLMSAPGIGWVLAFTIAAEIGEIERFPSPEKLTGYTGLCPRVNQSGDKDRRGPLTKHGPTYLRWALLEATMHALKHPAYAHRYQRTKRRLGKQRGAKVAQIDIARRLAHAIWHMLSRSEEFAPRGAAFRLAA

SEQ ID NO: 464820 - protein, 393 aa, unidentified
MLFVGIDVAKSHHDVAVLDDNGLVVLRHLRILNSRQGFATLHQSLIQLSADTNDDIRIAMEATGHYHLNLLLFLQANAYPTFAYNPFLIKEFARTLTLRKTKTDKADALTIAKKLATDLSSDRFKPNFNMQELKFLTHHRNRLTDSRSKLKTQYIRLLDILFPELAGFIGKTNLHYQYVYDLLTKYPSPAKLSRAHTNALVKLLHNHGNRLDMAQQLKVLAKQSIGLSSPANALELVQTISVIRLYDEQINAIDQEIAQIMNSLDEAAIVTSITGISNRLGSVILAEINHINNFQSPDQLLAFAGLEPSVYQSGQMNATGKIVKRGSTSLRWALCQAAEYASHWSPTLRQYRQKKLDEGKHYYVVMTHVAKKLVRIIYYLLKHHQYYDESKLI

SEQ ID NO: 464821 - protein, 350 aa, unidentified
MIIIGVDFHPEFQQIAWVDTESGEFQEQGLAHREDAEKFYRGLAAAGQKVRVGMEASGHARWFERLVAELQIELWIGDAAEVRTKRVRKQKTDRQDAQLILRLLLEDRFPQIWVPSWENRDLRQLLWHRHRMVQARTRIMNQLQAVALNEGLRCKKRLWRERGRKQLEAFRLAPWASRRRHDLLELMDRLNPTITELTQAIEQEVEKCSEAQRLMTHPGVGALTALAFVLIIGKAERFHCGKQVASYLGLVPLEESSGNRRRLGHITKQGSSMMRFLLVEAAQVTVRSVPEWRSKYLHLMMRRGRKTAKVAMARRLAVRLYWMWRQGWNYEQWNKFGSHAGQPEHRDGVQ

SEQ ID NO: 464822 - protein, 415 aa, unidentified
MLAQSQRRRYCPADFDLFIGMDVDKKSIDLTCADARQLIRSVHIPNHSEGLIRYVRKHFPGQKVLFAYEAGPTGYGLYDGLAAAEFACVVSPPSMIPTAPGQRVKTNRLDSKKITEALRAGQLKSIHVPSPTYRHLRHLTKVRDLVARQIAGYKCRVKALLLLEGIPFPEAAPKSHHWSRSVIAQLQKLPCSGAVRFRLDRLLEALEFQRRQYLKITREIRIFCRQEPELRRCLSYLTSLPGIGQIVAPHLLARIGSWQNLQEHRVDELAGLLGLVPTEHSTGDRVHRGSITHGGDGRLRSKLIQSAWTAIRQDPELREFYRSVCRRHPQHLAARKAIVAVARKLTTRIFAVLKEQRPFVVRPVIHSRPLLPGEIGPRERLDASQKKEDGNLPSFVLETETLPGPPPKWGASKRV

SEQ ID NO: 464823 - protein, 376 aa, unidentified
MQNVQEGFAKGKPIYVGIDVHKRDWVVSVLCQGEELYHAAIPTDAKGLIRLLRRFEASEVHTVYEAGPTGYWLHEALTEVGYDSIVTPPSLVPHIGARVKTDRRDSKKLASMLAGGFLRRVHVLTPEERAHRQLLRTRNQVEHHRRQTQNQIKSLLLFHGVRVPSTLKERWSEIYVHWVETLQWDHDALKKSVDAMIQVFRFLDGQYKTLTHEIESLALTEKYRERAHLLTQIPGIGLFTAMAILIELQDIERFHRADQLASYLGLTPSQHSSGERIRMGHITRCGNYHVRTRLVESSWTLIRYDAQAKATYERIKHQTGSGRKAITAIARRLALRVRRVLLDKAPYRLVEGGRLATGRDKTRETKRLVLKRVHAV

SEQ ID NO: 464824 - protein, 339 aa, unidentified
MAQVTTLGVDSAKNGVCIHGVDAHGHVIVKKRLARQKVLPFVAQLPPCLIGMEASGGAHYWAREFTKLGHTVKLLSPQFVKPYVQSQKNDPNDAAGICEAVARPRMRGIPVKSVAQQDIQALHRIRERQIKARTALINQIRGLLMEYGIVIPQRASQVRHKLPFVLEDAENGLTITAREWLQALAEELQVLDQRLAATDHRIEQVFEADEACQRLAQLGGIGPLTATALVAAVGDATGFKNGRQFAAWLGLVPRQHSTGGKTTLLGITKGGNRYLRMLLIHGARAVLRVVDRNTDAWSRWLQGVQVRRGTNCASVAQANKTARVAWALLAKGDRYRRAA

SEQ ID NO: 464825 - protein, 353 aa, unidentified
MASSSSKIPAELSVIGVDIGKDTFHLVGFDSHGKIALRRKIRRLALVATFEKLPRCIVGLEACLSAHFVSRTLRQIGFKPRIIPAKHTKPFVKGQKNDYNDAEGVAEAALRPNLKLVKEKTQEQLDLQALHRVRARLISRRTATTNQIRAFLIEQGIAVRAGANILRNSLHSILQNRAAEISPCMADIITGLYEDWLWLDKRIESLTVEIEKISKAERNCRRLMTVPGVGPMISTAMVAAIGTGEAFDRGRDFGAWLGLVPRQYGTGGKPILGRISKRGNRYLRTLFIQAAHVILMRPHNWHKFSFGPWLKRASERLHKNKLAAALANRLARIAWSILYNGGRYKSITDEVAV

SEQ ID NO: 464826 - protein, 459 aa, unidentified
MPRKAQAKTNAAPSAPVLNPHAAGIDIGATTIYVAVPADRDPQPVRRFGTFTQDLLALAHWLKQCGIRTVAMEATGVYWIPLFQVLEEEGLEVCLVNARHVKNVPGRKSDVADCQWLQHLHAVGLLRGSFHPPQAVRAVRALLRHRDSLVKMAASHVQHMQKALTQMNLQLHHIISDITGQTGLAILGAILAGERDPEVLAQLRHPGIKASKETIVRSLQGDWRPEHLFTLRQALGAYRYYQHLLAECDGEMERQLQEFDSRLDPGPPADPPRKRTIRGNQPRFASLDLATELYRILGVDLTRVPGLDTLTIYTFFSEVGPDLSKFPSGRHFASWLGLSPDNRVSGGKVLSVRTRKVKSRAAGALRMAAYTLSRSHSALGNYYRRMRARLGAPKAITAAAHKLARTIYHLLTTGQEYDESIFTRDEERYQQRRARRLEREAAALGYCLVPSEPAAQPVS

SEQ ID NO: 464827 - protein, 418 aa, unidentified
MGKINERCGGIDIGKRFLLCCVLTGAAHEEPRSQTRRFDTTVADLVRMRDWLAEERVTHVVMESTGSYWVPVFNILEDRLIIVLANPEEVKNRKGHKTDRKDAEHLADLLRHDHVRASYIPPKPIRDLRDLTRRRLQLIQDATRERNRVEKLLEHVNVKIGNVLSDVFGVSGQSMLLALLDGKATAEEIAQLARGQAKRKVPQLTEALEGHGMRDHERFLIRSCLRHLACLEEEVEQVDGEILQRMQEPPFTGAFLRLQTIPGVGQLAAASILAETGVDLTTFPTAEKMASWAGLCPGNRESAGIKKGSQTTQGNSYLRTTLVQCAWAATRKKGCIFQARFRELSPRRGQKRAIVAVAHQMLTALYFMLRNDVPFLGVENPPKQRRRQRRAHHHLRCLRRLGISVQVLGPPEFSPQIE

SEQ ID NO: 464828 - protein, 313 aa, unidentified
MNENPCYVDIDVSKESLEVALRPSGKWQTFPNADEGVARLVQLLRTEAPALIVLEATGKYELRVARALAEEGLLFNIINPRQSRAFAKATGILAKTDRIDALMLARFAEVLQPEARSLKTEETEALGELVTRRRQVVEMITAEKNRQGTASKRVRRDIQAHIRWLEKRLKDLNDEIDDLIRKSPLWREKDKLLQSASGVGPVLVSTLLGALPELGTLNRKQIAALVGVAPFNRESGRHRGKRTILGGRGPVRSVLYMGTLAAIRANAVIRAFYQRLVQAGKPRKVAITACMRKLLVILNTMLKNGACWKYQPA

SEQ ID NO: 464829 - protein, 468 aa, unidentified
MNEVRLGIDVACRADHWASLADERGEFIWSSWKFRTTTTDLERLWAKIPDGASVTVILEPTRNAWVPLSAWLQGRGATVILVPPEQSADLRDYYNKHTKTDRLDSRVLARLPLLHPEGLRGIDNLGPAQSLRRAVRHRSSLVKRRTAASLRLDALVELLGPGWADALGSGTVSKTALVVLEKYADPRALKRLGRARLTALLIRSSSGLWRQDKADELLAMASETLELWSCGGIDFTELAHDIASEVRVLRQLDDEIAAADKRIAVLYDEADPKGIVASTPGLGPVLSAAILANAGDFNRFANLAGVRSFTGFVPKIDQSGLVAGHKGITKAGDAGLRQALYLAADHARHIDPTLARRYYRLVMVEGKHHNSALCSVSAVLITRIAACWRKGELYELRDEDGEAITEAEGKAACADRFKIDPKVRAARRRITSAKTFKNRAAGRGRKESAQKVAPATDPPAENASENVA

SEQ ID NO: 464830 - protein, 329 aa, unidentified
MVTASSLPVVGLDVSKATLAVCYQVNDQLKHLEVSNTKAGFQQLVKACGAQCQFVMEATGTYNLALAYYLHEQGGQVAVLNPLVIRRFIQMHLGKGKSDRKDAQWLLRYGQQQALKIWQPDEAVLVECRQLEQVNEQLLKQKIMISNSLEALQYQPIVSKPALKRLQQMLQTLTQQVEAVEAELLALLERRFAAEMTLLCSIPGIGRKTAGMLLLFAGGFTHFDNYRQVIALAGLSPREHTSGTSIRGKVRITKMGGGLIRGKLFMCSFSAKKTNAACAALFDRLVAKGKNKKLALIAVCNKLLKQAFAIIKSGVPYQADFCSKLAQAS

SEQ ID NO: 464831 - protein, 412 aa, unidentified
MLKIVYPICCGMDVHKSFVVACIATTNDHGVTNYKSKRFSTFTGDLRRCADWLSENNCKDVCMESTGKYWIPIYNILEHTCNIVLAHPKYVKAIRGKKTDKRDAKWIADIFKHDLVSGSFIPPADIRQLRDLVRYHWKLTNFNVGEKNRAQNCLTVSNIKLDDVFSDVFGKAASAITTRLLESNEPFDVKPYLTKNIKKPIEQIQAAVDGEMCAEQAEKLRIIRSHMDSLELCKLNLESLILSTAEKYIPQLNLVMTAPGIQSFAAIGIISEIGVDMSVFPTSKHLCSWAGLTPQNNESAGKKKTTRISRAGAYIKPLLVQCALSAIKAKKFPEVRNRYLALKKRRGHKKAIIAIARMLLTAIYNMLKKNESYNPELYRKGEPPPAHREVSVEEAIFILQRQGYLVTAPPTT

SEQ ID NO: 464832 - protein, 324 aa, unidentified
MSKHSTVCAGIDTGKHKLDVALEGRSQDLQVPNTAEGHRQVSNWLRKQRVARVGIEASGGYEQAVVRQLRQDGFVVIVFQPAQVRAYAVFHLQKAKNDKIDAGLIADCTAAVKKIHEPPDPRLAPFAEVATLLDQLTEDIAHLKTRRESFRDERIKAHLTGEIRRHKALVRAELKKLAADIRRHDDLGKRLDLILSVDGVGLRTAVAILVRMPEIGRVTRERAAALAGFAPYDNDSSDHSGPRHISGGRTRVRGNLYTAALPASMRWNPQLMALYKRLIAKGKPHKVALVACARKLLIFVNTVVERETPWTKEVPALANVERGA

SEQ ID NO: 464833 - protein, 338 aa, unidentified
MSLYAAIDLHSTNSVLAIMDGDGKAIWQSRRPNELSQLLADLAPFQTELTGVAVESTYNWYWLVDGLMDHGYAVHLVNTAAIPQYDGLKHGDDHTDALHLAQLMRLGLLPEGYIYPREQRATRDLLRRRFALVRQAVRVMLSIQSSFSRNTGKQLSSNAMRQLTPMQLEALFPDLTTRYGVLIQFKLWLTLQDQIAALEQWVRKDVLHPDQLSCLQSVPGIGPILSMTILLESGAIDRFASVGDYASYCRMVERVRLSNGKRKGQGNRKCGNRYLCWAYMEAANFAVRYHPSIRRWYERKRARKHRVVAIKAVAHKLARACYHMLHDATPFDVHRVFG

SEQ ID NO: 464834 - protein, 352 aa, unidentified
MIWVGLDLHKRYITACALDDTGAIVAEHRRLPTDAAALVEWLNGLRGSVTVAMEATLYWAWLHDQLSAVGIPAVAAHPYQVKLIWQARAKTDPIDARKLADLLRTDLLPIVWVPSPTIRAHRKLLRGRAYLVRLRTSVKNRIHGHLTAENRRTEVSDLYGKAGRTWLATVALSPMGRVQVDLLLELVDLLDVRVKRLDRRVQALVKADPQARLLQTWPGIGPFGAALLLAEIGDIGRFQSSHALAAYAGLTPSTQSSGGKTTHGGVGRSGSPWLKWILIEIVQSLKLAPGPVGEQYQKLLRSKGKAKATVAAARKLSCYLYWCLKEGWSYELWLRQHEGREVRPVQTLGSAA

SEQ ID NO: 464835 - protein, 370 aa, unidentified
MAKRSMFVGMDVHKESIDVSLAEEGRDGEVRHYGVIPGDLEAVAKVVRALRAPARRLRFVYEAGPCGFGIHRYLTGQGEDCVIVNPSSMPKRSGDRIKTDRRDGDALARLHRAGELTAIYIPTPADEALRDLARAREDAVGLSTQAKHRLKAFLLRQGRRYPGRAGWTRPYRRWLADLSFPLAPQHIALQEYRDTINETERRVERLTDQLRQQTPAWRWAPVVDALQALRGVSFVTAVGLVVEVGDIRRFDHPRQLMAYLGLVPSEYSSGPSVRRGGITKAGNPHARRLLAEAAWAYQGVPRIGRQLLYRQEALPTTVCEIAWKAQLRLTSRFRKLVARGKAKPKVATAIARELTGFIWAIAREVPPPPA

SEQ ID NO: 464836 - protein, 342 aa, unidentified
MEKHTVASVDIAKLIFEVAVSHEPGRIAEKRRLSRNVFLLFFAQMPAATIVMEACGSAHFWARKLQHLGHTLVLLPPSQVRPYVTRNKTDRTDAKGILEAYRNADIRPVPVKSVPQQVLVSLHRFRSGWIASRTAQVNSLRGLLRELGFVIPMGIEKVLPQVRALIADPDADLPAALRPTLARACDEIQALGESIKATDQQLEALAKQTPLVDRLRSVPGIGLVIATALVAFIGDVQRFPSGRHLASYLGLTPREYSSGMKRRLGRISKRGDSYLRMLLIHGARSVLCHAKKAKEHDRLRSWALGLQQRTGHNKAAVALANKLTRITWAVWKHQRPFESLAA

SEQ ID NO: 464837 - protein, 345 aa, unidentified
MKYFVGLDVALRSLALCIIDSEGEIVLEQALDCEVNDVVDCLTQFGHPIVRIGFEAGTMSQTLFHGLKAAGYDVVCMEAWQVYAALSAMRNKTDKNDARGIAQVLRSGWYNKVHIKSNEAHYDRLLLTARKTVLRKCLDLEAEIRGLFKVFGIRLPSHVKRNRWDEAARPIIEADERLAFALKPMLDARLVLYKTYLEMEKRLRAVTNKDPVCIRLQTIPGVGPVAALTFKAGVDDPTRFKSSRIVAAHFGLTPRRFQSGEMDNMGRISKAGDASVRGALYSAANVLLMRITKSCALKTWGLRLARKKGRKRATVAVARKLAVIMHRMWIDGTTIQWDDQEVIVN

SEQ ID NO: 464838 - protein, 314 aa, unidentified
MENYVGIDIAKHTFDLCGLPRQDIRQFKNDPEGIRQATRMIGQLQPKLVVMEATGGYETPLAAELYAAGLPVAVVNPRRIRDFARAAGQIAKTDKLDARIIAQFAATMEPMPTERINENTQKLKALVARRRQLVGLHTAESNRLEHAQSKAIQRSIAAVLKAIEAQLETMDRQIEEHIHNTPPLRQRSEILDSAPGVGPTTAHMLVTELPELGRLNRRQIAALVGVAPMARDSGTFRGKRMTGGGRKGIRSRLFMPTLVAVRHNPILRAYYTRLIRHGKCKMVALVAVMRKLICILNTMIKNNQLWNPNLIKIT

SEQ ID NO: 464839 - protein, 453 aa, unidentified
MTKRKSGDNPDLKMVNVNAAAIDIGSTMHMAAVNPDTDIMPVRAFGTFTQDLHDLAVWFQSCGVTSVAMESTGVYWIPAFEILEAHGFEVILVNARYAKNVPGRKTDVSDAAWLRQLHSYGLLRGSFRPEAEIATLRAYVRQRERLIEYAAAHIQHMQKALMEMNLQLHHVVSDITGATGMRIIRAIVGGERDPEALAAFRDVRCKSSVDTIKAALVGNDREEHVFALTQSLELYDFYKAQIETCDRRLEAAVAALTVRADDDLAPLPKARIKGKQHNAPSFDVRAALYGVLGTDLTQIHGLGPSLALKLVAECGTDLRAWKSAKHFTSWLCLAPGNKISGGKLLSSRTRRSSSRAAALLRLAAVTIGKSDTALGAFYRRLSSRIGKQKAVTATARKIAVLFYNAIRHGMTYQDQGAAAYDERHRQRVLSNLQRRAKIMGYALAPIPETAGVS

SEQ ID NO: 464840 - protein, 336 aa, unidentified
MFQLGIDVSKNTLDLCLLREGVKGRVKTRRLKNDVNAASSVITWLGKQQCAPADVHIIMEATGVYHEPLACGLYKAGAKVSLANPHRSREFARGMDILTKNDQIDAYMLACYGALKEPEPWVPPPESIRYLSALLRRRDALVTDRSREKNRLEKCRATDIPPVIAESIENVLRNLSAEIERLDELLLTHLNQHPELKKDFDLLTSIKSVGFQLGLNMLVILRGHRFDTAGQLAAFRGVVPVEKSSGTSIRGKPKLSKNGPPEIRAKLYLASMCGLRFNPVMKEMYERLCLSGKAKMCAIGALMRKLVHLCYGVLKTQKPFDAEHLSSDARSACKAA

SEQ ID NO: 464841 - protein, 342 aa, unidentified
MTITTIGIDLAKNVFQIHGVDQSGKAVVKKQLRRNQVLAYFIKLSTCTIGMEACGGAHYWARKLSAMGHTVKLMAPQFVKPYVKANKTDAADAEAICEAVTRPTMRFVAIKNAEQQAILSLHRARQGFVKARTAQANQIRGLLGEYGITIPQGIKHVMENVLTLANSSEYELPGAFTSLLKRLHAHLLVLDEQVSELETQINVWHGNNEYSQRLCKIPGIGPLTATALVASIADANCFRNGRELAAWLGLVPRQHSSGGRPLLLGISKRGDKYLRTLLIHGARSAVRVAKNKSSPTDKWTNEMLNRRHQNVASVARANKNARIVWALLAHGRDYNAEYKIAA

SEQ ID NO: 464842 - protein, 340 aa, unidentified
MSNITTIGLDIAKSVFQVHAVDTAGEVVVRRKLTRGRVLAFFESLPRCLVGIEACSSSHYWARELIALGHDVRLLPAQYVKPYLKRQKNDAADAEAICEAVTRPTMRFVPVKSPEQQSVMMLHRVRLMLNRTRTQISNALRSHLSEFGVVAPIGRNGIEQLLVVINDENDARIPADARLCLRMLEAQLRVVKQQILENDRRVRASARESELGRRLMEIPGVGPLLASAFVATVADPHAFRSGRCLSAWIGLVPKQNSSGGKERLGSISKAGNRYLRQMLVVGAMAVIRFAERNGTRRPWLVQLMARRTTKVAAVALANKTARIVWALMTGGERYREPAIT

SEQ ID NO: 464843 - protein, 355 aa, unidentified
MTSTKYIGMDVHKESISIAVRNVAGKIVMECVIETKASVILQFFEGLRGDLQVTFEEGTAAAWLYDLLKPCVSRLVVCNPRRNALLKVGNKDDRIDARKLSELLRGGQLLAVYHGEHGLRTLKELVRTYVTVSKDLARVMTRVKALYRSWAIPCSGTQVYSRLYRVSWLSKISESGVRLRAAFYFQQLDALRELRQEVRRELLAESRKHPVWKRLCEIPSMGPIRASVALGILQTPHRFRTKRQLWSLSGFAIETRSSADHRMVNGQLQKTKKRVTIRGLNQDHNHELKNLFKAAAVIASTKPGPFHEFYDALLAKGMRPEMARLTLARKIATTVWIVWKRGVSFDAHYLKPQTV

SEQ ID NO: 464844 - protein, 411 aa, unidentified
MDKIYDKCCGIDVHKKLIVACFRRGRKQELREFGATTRELLALADWLKEGGCEMVAMESTASYWKPLFNILESSDLNAIVVNARHMKAVPGRKTDVKDAEWIADLLQHGLLQPSYIPDKDQRELRELVRYRKSLVGERTRELNRLQKMLEGANIKLSGTVSDINGKSARSILEYLLTGESFDGAKYDEMYEQKVIAHNLKATKEQIIDDLNGVMSPLQRRMMKELLSHLDELNEHIKNLDDEIDNFMKPEEKQASQAIQDVTGIGNTSAQAIISVIGTDMERFPTDKHISSWAGLCPGDNESAKKRKSGKTRKGNALLRTTLITCAHAAVKNKKSYFYAQFMRISAHRGAKRAYVAVAHSMLIAIYHILKDGVVFKDLGAEYYNQFNKERKINAYLKKLKALGWEAPVVAA

SEQ ID NO: 464845 - protein, 394 aa, unidentified
MIYAGVDIAKTDHVIGAVDERGAEMCPPMPFKNTEAGLERAVAWLEGLAGSPSDVVVGMEATGHYWMACYSFLVARGYSVAVINPMQVKAVRKLKGLDKVKNDRVDAGLIAEALRIGQYDETRLATDEVASLRSLSRYLQSLRGMAAELKTQCVCLMDAHFPEYAGIFSDMFGAGSRAVLSKSPLPFELARRRADSLARDIAEASRSGGKSSGYAAKIKAAAKSSIGVRLGQEAASFQVKSLIRQIEFADSECAGVEARLRSLLDEVEPLVLTIPGVSYVTGAQIVSEIGDVSRFRNAPALVSYAGLNSSVSQSGQFDSGGGPITKHGSPYLRRALWLAANRARQYDPGLRAFYDKKRAEGKPHRVAVTAVARKLCHIVFAVMRDQVPYDPGRE

SEQ ID NO: 464846 - protein, 399 aa, unidentified
MFYGLDVHKEFIQVCVLDAKGTKREEYRVGGSAEEVEAFAKKLQPSDQVVLEATFHTWILHDILSRHVDRVVVANPLQVKAIAQAKIKTDKVDAFTLAKLLRADFLPEVQLPDPKAWALRQLVSHRRLLVKQRTATKNSIHAVLNRRLVHNPNKDPFSKRARQWMKSLELPAAESFLLQNSMTLLEDLDDRIDAVDQELLEQASIESNARLLMTIPGIGVTAAIGLIAAIGDVHRFATPDQLASYFGLVPRVSQSAGRCHHGRITKTGSSTVRSLAVESAQILARSSSPLTATYWRVRRKRGHNVAVTALARKIIVLVWYLLTKQEPYRYTDLRLARRKLRKTTLPELRQRSKRVPQTLDAVYAEAGLPPLTHPAEAERRTAAINRRARTRISNSLKSQ

SEQ ID NO: 464847 - protein, 308 aa, unidentified
MPQPVAGCDLSRAFIDLHCLPVGKVDRIANTPEAITTFLDTLERDVLVVFEATSGCDGDLIAALAERGHPFSRVNPRQAREFARATGVLAKTDRVDARVLAQMGASLSLSVTVPVSAARSRLSDFLRRRRQLVEMRKAEKLHRHSAGQEEIASAIEAMIDLLGRQISDLDRRIAELIEDDATLSAQARLLTAVPGIGPTVLATLLGEMPELGTLCRRRIASLAGLAPHARESGTWRGARRIWGGRRKVREALYIAALSASRYVPTLVALRDRMRQKGKAPKTILIAVARQLLVILNAMLKTGTPIALA

SEQ ID NO: 464848 - protein, 310 aa, unidentified
MEHRRIAGIDVSKDRLDVHVLPSQEAFAVSRDVTGFVELCRRLGDTVDLVAVEATGGYETLVAATLSDHGLPVVIVNPAQVRAFARALGQRAKTDPIDAAVIARFAEATRPQIRPLPDGAARLLADLMARRRQIVEMIASERQRLHRTEPPRVRKSIERLLKALERELGTIDHDVDGAVRGSPLWREKEDLLASVPGIGRIIARTLLAELPELGRLDHKQIAALAGLAPHTRQSGLWKGKARIGGGRAVVRTAMFIGAQVAKRWNPPLKAFYERLIGAGKTKMVATIAVARKLLVILNAILRDRTSWQNA

SEQ ID NO: 464849 - protein, 330 aa, unidentified
MRLNVGIDVSKETLDLCLLLNQAKSGSKFKCFKNRKIDYLAINDWILKLSKYQPNDIVITMESTGVYHEAIALYLYSMGFQIFISNPGKAKKFSQALGLIHKTDKSDAYMLARYGAAQNEHIHLWKPDDTNIRNIKTLTRRLSALEKDRLRENNRLEASEISDAHDRVLFSITRIIRILEGEIQEIENEIDTIISACPTMKKNHDLLMSVIGIGKVMSRELVYLFSAKNFSTAKQAAAYVGLTPKLNESGSFKGRTTLSKIGPSRIRSKIFLAAVSAGTHNPDIKAQKNRLLAVGKTKMQALGAAMRKLIQICFGVIKNQTRYQSALALN

SEQ ID NO: 464850 - protein, 408 aa, unidentified
MKRYYLGVDWADEFHQVWVSDPEGKKIAEMKVVQSTAGLGELGRWLHERKAEEIELWAAIEKPHGRIVDFLLDHGAVVYPVNPKALDRARDRFRMSQSKSDLFDAYVLAEFVRTDHVHLRALEPNSEPAQELKMLTRDHDRLMRQKTRLLNQIEITLKEYYPRPLEVFSDLETHIARDFLKEYPTPQALSKLNRRRWNHFARRDHHLSEARCDELWEKIDKPQLTSPPYVIRAKAKLLLALVVQLEALLPAVESYSEEIKRFFDSMPAAELVKSLPGGKSGTTIPKLWAELGDAKNRWQSFRHLQAEGGGVPVTKSSGKSHVVHFRFACNKYLRHAIYWVSFNSLNRCEWANKYYRDQRAKGHSHPRALRALGAKWLKIIFVMWRDHKPYDENYHLANMARQRMRQAT

SEQ ID NO: 464851 - protein, 348 aa, unidentified
MSDNKVVVTYGIDLAKSVFHICGLDQHGKIVVSRKLRRNQAIIYFSKQSACKVAMEACAGAHWIARKLAALDYDVRILPAQYVKPFAQQQKNDANDALAIAEACQRPSVKPVPIKTLEQQHLQAMHRVRDRLVNQRTRLVNQMRGFLLEYGITIRGGIGNFRAQLPDILAADNEDLTPGMLGLLESLLAEFQDLDEKAKDITRQIEAWAARDETARRLQAIPGIGPLSATAIIAAVGNANQFRRARDLSAWLGLVPKQHSTGGKTTLGGISKRGNGYIRRLLIHGARSCTLHLNREKDKLGQWTDELSQRKPFNKVVVALANTLARIAWVILVKPGATYQRVDPILVS

SEQ ID NO: 464852 - protein, 340 aa, unidentified
MTITTVGIDLAKNVFAVHCVDQHGKTVLVKPKVPRAALPELIASLPPCVIEMEACSGAHYWARLFRQYGHEPRLMAAKFVSPYCMAGKSGKNDAADAQAICESVRRPHMRFVPVKDESQQAMQCLHRTRQGFIEEKTATYNRLRGLISEFGVIAPQSTDALRHMVSEQKKSLPLQVQQCVDDLLEHIDRIENNVTEYDRILSRMAKADHRSQRLMELKGIGPTTACALVASIGNAHDSKNGRQLAAWLGLTPSQYSSGGKSKLGRITKAGDSYLRTLLVQGALSVLIGAEKKTDSFSRWVCSLVERRGYWRAVVAIAAKNARLCWASLHYGDDFRLYSVS

SEQ ID NO: 464853 - protein, 451 aa, unidentified
MEKKKISLEVVNQNAAGIDIGSRSHWVAVGQNAEDVKEFGVYSEDQIKMAEWLKLKDIQQIAMESTGTYWQNLFSTLISYGFDVILVNGKQTKNVKGKKTDIKDCQWIQKLHSLGLLSSSFLPDSKTEILRTYSRHRQNLIEQSADCTRRMQKYLRLMNMRLDVVVNDINGETGQKIISTFINGEHNGNELAKLRHYNCRKSESEIAKALQFNGRKDFLFALRQEWNTFQHLQLQLRDTDLQIKELLQEIIDDDDNKKQHVADEKPFKRKNKNSIFNTNMNQLSYKYFEGVDLLRIEGVNESTIMVLMSEVGLEGIKKFETAKQFASWLRLAPNNKISGGRVLSHHLPKGSSRLKLALRHAANAIGLLKEGILAEFFKRISYKKGRAVAISALARKLAVIIWNMISKGQAYTPPTNYLCLDEKRKLGIVKRIRKSIAKFDLKPDDFGFTPC

SEQ ID NO: 464854 - protein, 465 aa, unidentified
MAACPLLFFLLGHKLPLTKLEKRKVMQKVTVFETVYEQAAGIDIGAAKIFVSVDGIEVVSFDTFTSGYYQCAEYLQSKGVLHVAMEATGVYWVALYAMLESCGLKVCLVNPKETKQVKGRKTDVKDCQWIQKLFSSGILRQSFIPETNYLEVRQLVRERLDVIEMGSVYVNKMQKCLELMNIKLTEVISQIHGTSGIKMIKAIIAGNRDKEYLLSLCDKRIISNKGESVVKALEGNYNDTFLFMLEQNLHMWEIHQQQLSVIDNRISQLLQKMCTVKEPVAVTSKPKPVRHHAPKIAGLHGMLIQLYGVNASSISGINDYTLLRLLGETGPDMSRFATAKHFASWCGLSPKHHQSGKINKRVKGPQCNQAGQLFKVIAQSLLNSKHIAIGAFIRKLKARKDSAIAIKAGARKLALAYYTALTKGTDYVEQGIKQYEDQIRQREKASLYKLAKKYNMQITEKQVAA

SEQ ID NO: 464855 - protein, 420 aa, unidentified
MEGSHNPVFVGIDWATEAHQICMVNGQGDVLYERIIPHSGQAVAEFIGWLLGLCPGERSRLSVAIEVPGGALVEMMMERGLVVYAINPKQLDRFRDRHFPAGSKDDRRDAYVLATSLRTDLRCFHRIRTDEPAIIRLRDLSRFDDDLRLSFNRHCCQLREQLQRYYPQMLELSSSADDPWIWSLLEMAPTPEAGAKLTGDPVEKLLKQHRIRRIDAQQTIEILRHPGFQLVPGTVEAASEHALLLLPHLRLLHAQRLALGHKMDSVLQQMSGSESKEPDQCPHHDVELILSLPGVGRVVAATMLAEASQALGERDYHALRAYSGMAPVTRRSGKKCTISMRPGCNGRLRNAMYHWPRVSIQHDPVSREHYQQLRSAGHQHGRALRGVTDRLLAVLVARLKAGELYDPTRRHASARAAVNS

SEQ ID NO: 464856 - protein, 346 aa, unidentified
MEHYVGLDVSLKLTAICIVDRTGKIEREGVVASDPETIAAFVKSHAPHVARVGLETGATSTWLWTELSKLGLPVICIDARHAKAALKMQINKSDRNDAVGIARIMQCGWYKEVRVKDLDSHAIKALLVSRALLVKIKRDIENQVRGLLKNLGLVIGQAKMNVFSVRATELAEARPELAAAIEPLLKAREAIERQIADLDRKVMRLARNDAQVRRFMTTPGVGPITALCFLATIDDPTRFKRSRSVGAYVGLTTRRFASGETDWTGRISKCGDKMLRTYLYEAANVLLTRVAKWSALKAWGIRLAKRSGLRKAKVAVARKLAVILHRMWIEGTEFNWSSKEAANQPA

SEQ ID NO: 464857 - protein, 323 aa, unidentified
MNKYNETFGIDISKDVFDVHGSKSGHDQFKNGAEGFKSFLKALPKNSLVVMEATGYYHYRLAQYLFKSGIAVSVVNPLSVKRFIQMKLAKVKTDKSDAKAICEYGQVNEVPFYTALTDVQSECLQLFRLLDNFLKKRTSAKNKIHGEEVLGVPSNWVYRSLIRDKKHLNKEILGIEAKLLSLVKQDQQQQLTLLQSIPGIGLKTALFLIVITDGFNKFETASQLCSYTGITPTIRASGSSVRGRSRISKVGNRKLRNLLFLCAFSACKQNKACREVYERIVNKGKSKKLALIAVANKLLKQAFAIAKSGRPYDENFVSVLVIK

SEQ ID NO: 464858 - protein, 343 aa, unidentified
MEVAIGIDSHKGTLAAASVDALGRVIDVREFNNDPKGHRSLLQWVNRQGRPRRIGIEGALHYGSAAASRLLGQGEDVREVSPSLTHVERCRRSKGKSDPIDAVAIARVVAAEDTLPSARRTALLVDLRLLVDHRDQLVRARTQVANRVHADLVVLHPGYEETVPNLRARQHVARARSLVVKDRSVRAELVRHRLRDILRLEAEIAEANHRIADRIREVDTTLTQIPGVGPLIAAKILGEVGEVSRIRSKASFALLSGTAPLAASSGQTHRHRLNRRGNRQLNWALHYIALVQSRTTPEAKAYLTRQREAGKSSKEAMRCLKRHLSNVVYRHLLMDGRRLEQAA

SEQ ID NO: 464859 - protein, 373 aa, unidentified
MSKIRFVGLDVHAETIAVAVAEPGGEVRSLGIIANRLESIRKLLGKLGPVQHLKACYEAGPTGYVLYWQLTQLGVDCEVIAPTLVPTKAGDRVKTDRRDAEKLARCYRAGELTAVWVPDAAHEALRDLVRAREAAKKDQLRARHRLGKFLLRHGQRPTDAGKAWTKKYLEWIKTHVRFDQPALEATLSYYVQEVEHMAERILHLEKAIEEAVAQANPEIRTVIEALQALRGVAQMTAATVVCELGSLSRFQSPRQLMGYSGLVSREHSSGNRIQRGAITKTGNAHLRRVLVEAAWAYQHRPNVTGFLLRRQKSLALSDEVKHIAWKAQYRLHKRYQTLAARGKNKNQIVTALGRELLGFLWAIAVHTEKQKAA

SEQ ID NO: 464860 - protein, 468 aa, unidentified
MTSRLRTSITVEIVSPGPSRATIEARPERAADRAPAHGRTSLPPRGPVGCCRRGTRRPRRLIGKCRAGAAAGNVSAEGEAIRSNDYRKDTTVKAPSTRPAAVLGLDVGKSSHWACLIDRGGEVLASAPVRNREGALDALFSSAPAGTLVVVDQFRNIGSLAVRRARAAGLAVAYLPGLAASRAAGLFAGEAKTDERDAEVIARTALGVPDSLSGVPGRGEALEAARALSSQRDHVVACATRDKNRLRAVLLESCPALEAAVDLSDRRWLELLAGFGGAWGIARSGAEGPQAEAAGEAAAASTAPPPALVEAENRQVRFLAARISEALDEAGALEAETAGLLEGDETYACLLTVPGIGPRTAAQLAVSVDIARFPDHDHLASYCGIAPRVRSSGTSVRSVRASRRGDARLKSLLIFSCNSLVRSSGRYGEYYRACRARGMGHGRALKAVARKRLRAIYAVMRDRVPYRE

SEQ ID NO: 464861 - protein, 338 aa, unidentified
MRTYAGIDLHSSNCYLAVIDEEQRRLFSKRLPNSLDHILSALQPFKEELSGVAVESTYNWYWLVDGLQEQGYRMHLANPSAIRQYEGLKHTDDQWDAFWLAQLLLLGILPQGYIYPKAERPTRDLLRRRLLFVRHRTAHILSLQSMLDRCGGRRLSANKIQQLSPSDAEALFSDTQLGFTARCQVEAIGFLTQQIRSIEKAILPKVKLRPEFVILLTIPGIGKILALTIMLEVGDIGRFAKAGNYASYCRCVKSQKISNAKKKGEGNRKNGNRYLSWAYVEAANFAVRYSPRAKAFHQRKCAKTKKVVAIKALANKLARASFYILRDQCAFDEKRLYG

SEQ ID NO: 464862 - protein, 323 aa, unidentified
MQGKITPDHGAPEAVSVGIDVCKERLEVCVHPAGPCLRVANSGAGLRRLKRALGGRAVAVIVMEATAKYHRLAQRTLAQAGFAVAVVNPLRARLFAEAAGARAKSDRVDARMLALMGAALAPQARPPAPARLEALQEFGRARSAASRDLTRLKNRRGAAQTAFLKDELGRQIDALEGAIARLGAEIERRIEADPALARRARILRSIPGLGPTVAAVLLADLAELGTLSGKAAGALAGLAPIARDSGASHGPRQIGGGRKSVRNALYMAALAAARANPPLRAFYQRLRAAGKKPKVALTAVMRKLVVLANTLLKDDRLWLPANP

SEQ ID NO: 464863 - protein, 368 aa, unidentified
MSDIIRIGVDTSKSVFQLHGVDAAERPVLRKKLRRRDFLSFFAQLPPTKVGLEACGGSHYWARELMALEHEPKLLPAQHVRPYVRRNKNDKQDADAICEAMSRPRMSFVRIKSAEEQAAQMLMTTRQRLIDYRTQLINTIRGHAAEFGLTAAKGPAHVEPLLARLAKDVTVPALAKELFAIHGQEYDRLKIELREIEAKLKAWHRGNEMSRRLAEVDAIGPIGGCLLAIKAADPRAFRCARDFAAWIGLTPKDHSTAGKMRLGVITRAGDEALRRTLVVGATSVIKQVRNGKAHPSPWLRDLVARKPPKLAAVALANKVARIAWKLMVSGERYDAARAGIVSPTARVAPCSRRQGRCAPPAAVACGQP

SEQ ID NO: 464864 - protein, 337 aa, unidentified
MKYSGIDLHSNNSVVVVTDEQDRVLASKRLPNQLEAIIGLLSPHRGELAGVVVESTYNWYWLVDGLQGAGFVVHLANTAAMVRYDGLKHGDDESDAIQLARLLRLGILPVGHIMEKVARATRDLARKRMQLVQDRTRHVIAIENIMNRETGGRLSANAVKRLTAQAVDEMPFHEDVRLAIQANTAIVHSLNEEIERIETRLHLRLSPRPESALLKTAPGIGSILSGVILLETGPIQRFAEVGNYASYCRCVNSNRVSNGKKKGEGNTKNGNKYLAWAYVEAANFAVRFCPEAKRFYERKKAKTNRIVAIKALAHKLARACYHMLREGTAFDLKRCFA

SEQ ID NO: 464865 - protein, 371 aa, unidentified
MNSIVYVGMDVHKEQYTICCYSYETDKVEYKQTIPSDYKLVLKYIEQVRSRYDGEVTFVCGYEAGCLGYSLYHQLKEHAVDCKILAPSTMAVTNTHHVKTDKRDAANIARCLAFHTYSEVYVPDNDDNDVKEYIRMRDDQKLYLKKVKQQILAFVLRQGKHFEGGKTYWTIAHLKWLKTLELSDLQRETLNEYLLTYEYLTEKISRFDERIEELASVERYEEKVKHMSCLLGIKTHTALSMIVEVGDFERFEKAPKFASFLGLVPSEDSSDTRVNRYSITKAGNSHLRRLLVEAAQSYTRGNVGHKSVALKQRQKGNPPEVIAYADKANERLRRRFYKMTLNKGVNRNVATTAIARELACFIWGMMTEHVS

SEQ ID NO: 464866 - protein, 424 aa, unidentified
MATRRRTNKVDINALVDLYERCAGIDVHKETVTVCVIRPGTDGSAQGEMATYGTTTRELRQLSQWLQECGVTHAVMESTGVYWRPVWQILETGGFRLFLANAKQVRNMPGRKTDQADAVWLATLLRKGLIKGSFIAPPQIRALRDLCRSRASLVHDRTRVVQRIEKVLEEANIKLDTVASDLMGVGSRMMLEELIGGETDTTKIAELALGRMRSKIPQLVGALEGYFRPHQTFLLKQLLSQFDDLYRRIERFEQQIEEYSRPFDKQVARLDSVPGIDRLSAAAILSETGVDMDPFPTPQQFCRWATIAPGNNKTAGKQRSGKIGRGNRWLRGSLTQCAWAATHDKNSYFAAQYHRLLHRGKRRALVGVGHSMIAAIWHMLRRDVEYRELGADYFEKQNLEGLKKTYLKKLERLGFKVSLEPVAA

SEQ ID NO: 464867 - protein, 401 aa, unidentified
MPAVWAGIDSGKRAHHCVVIDQTGEMLLSQRIDNDETVLLEIIATVTEIADGHEVVWATDLNSGGAALLISLLVDHGQQLLYIPGRIIHHAAATYRGDGKTDAKDARIIADQARMRTDLQPVRDSDQISVDLKLLTARRLDIIHDRVRAINRLRATMLEYFPALERAFDYSTSKAALTLLSTYQTPGALRRMGVTRLAAWLKARGCRNSATVAQKAIDAAREQETTLRTEIIAATLVSRLAAVITAIDADLVDLDKTITARFNEHENAEILESMPGFGPILAATFLANTGGDLRSFESPDRLASVAGVAPAPRDSGRISGNHHRPRRFNRRLLRTCYLAALSSLKNSPASRAYYHRKRREGKNHKQALLALARRRINVLWAMLRDHTLYQEPAEIPMLKTA

SEQ ID NO: 464868 - protein, 399 aa, unidentified
MVVCQIANHDVTEGTVPDLWAGVDIGKRNHHCVVINADGERVLSRRVQNDEPDLLQLVDDVLIMSEDVLWAVDINHGIAALLLGLLLGLLLGRNQPIAYLTGRAIHQASATYRGEGKTDARDAFIIADQARVRRDVSMLRPGDELAVDLRLLTARRLDVVFDKTRQINRLRAQLLEFFPALERCLDLTKKGPVTLLTGYQTPAAIRRMGVKRLENWLRNRKVSDAAALAGRAVEATQAQQTTLPGEQLGAELVARLANAVLAHREKVAELDARIEARFRLLGAEFIAATGGDLSAFGSPDRLAGFAGLAPVPWDSGNVSGNLRRPRRYHRGLQRSLYLSAQVSVFFCPVSKAYYNRKRSEGKGHKQAVIALARRRTNVLWAMIRDKTPYQGAPPLAAAA

SEQ ID NO: 464869 - protein, 337 aa, unidentified
MSEISILAIDLAKNSFQVCGVRADGVVVFNRSVSRPRLYQLLSEQDVCVVAMEACATSHHWGRVAQSYGHEARLIPANYVKPFVKRQKNDHADAEAIAEAASRPSMRFVAVKSAEKQARAVAFRTHQCFVRQRTQLINSLRGHLAEFGIVAAKGPASLKLLTSVLAKPDVDLPGPVREMGALYLEQIGQLTEIIEQLADNLESATKTDEDLRRLCTVPGIGPVTAGAIAAFAPDLETFESGRNFAAWLGLVPRQRSTGGKTRLGAVSKMGQCDIRRLLIVGAMSVIRWVVRKGGSANRWLASLVARKPRMVAAVALANKMARMIWAMTTKGENYRMA

SEQ ID NO: 464870 - protein, 349 aa, unidentified
MSPKLNAAIAVIGIDIGKNSFHVVGLDWRGAIVLRQKWSRGQVEGRLANLPPCLIGMEACVGAHHLSRKLTSLGHDARLMPAKYVRPYSRGQKNDFRDAEAIAEAVQRPTMKFVATKTAEQLDLQALHRVRERLVSQRTGIINQIRAFLLERGVAVRQGLRFLRAELPRILATPCDVLSPRMVRVLEDLAADWRRLDERIERLSSEIEALARRDAGCERLMSVPGVGPIISSAMVGAIGAGEAFSKGRDFAAWLGLVPKQISTGDRTILGKISKRGNRYLRVLFVQAAWVVLIKPKSWQRHGLKPWLEAAKRRLHHNVLAIALANKLARIAWSVLAHGRTFETSKIHAA

SEQ ID NO: 464871 - protein, 324 aa, unidentified
MDVIHQRVAGLDVHKETIVACVRIMVDARVSRECRTFDTTTAGLKDLLAWLTASGCSHVAMEATGVYWKPVWNILSDGTFELLVANAAHIKNVPGRKTDVNDATWIADLMACGLIRGSFVPDQAFQELRTLLRTRKQLTREQTRHVQRLQKTLEEANIKLDSVISDVMGLSGRRMVEAMIAGERNPQKLAALADRRIKASPKALYDALHGRLTDHHRFRLRLHLAQYDVLAAAIGAVDQEVDAAIDQMDEVEKGGQAFFRSLIRLLSGIPGVNTLSAQTILAEITPDMTRFATAGHLVAWAGLCPGQNESAGKRKSSRLRKGAP

SEQ ID NO: 464872 - protein, 346 aa, unidentified
MYQDNLFCLDLAKKSIQGCLLDKKHREQFNRRFSRQKLIEWLSRQQPMTVAMEACSTAHYWSRVIQRLGHNPLLVPTRTANRYREGHKTNATDALAVGVAARQPKTRFVAPKTIAQQEMQSVERIREHISDDLTATSNLMRALLGEFGLLIPRGKAAFKRNMVELLEDAENDIPQVLRTELISEWMRYRQLELRLKEVERARDILFNQHESCQRLAQLGGVGPVNAIGLYLALGDRGSSFKNGREAATCIGTTPKQHSTGDEVKMMGISKKCANKRLRSNLIQGARAVIQALKRREPQNAQETWLKALIERRGEGRAAVAFASKTIRVAWAMLHYGNAFKLHSNLA

SEQ ID NO: 464873 - protein, 347 aa, unidentified
MRFYTRQHRHYCGVDLHARTMYVCVLDREGNVLVSKDIASAPEPFLELIAPYREDLAVAAECMFTWYWLADLCAREGVVFVLGHALYMRAIHGGKAKNDRIDAHKIAGLLRGGMLPQAYVYPQAMRATRDLMRRRNYLMRQRAELLAHITNTNHQYNLPALGVRPARPAERSGLLEHFAEPQVRRSVAVDLSFVEHYDRELPALERYLESNAQAHDPVGLAIVRTIHGMGKVLGLSILYEIQDISRFARVQQFLSYGRLVKPAKESGGKILGHSGKKIGNAHLKWAFSEAAVCFLRANKPAQALRARLAAKHGKGKSLAIIAAKLARAVYFMLRRGEPFDAERFFAH

SEQ ID NO: 464874 - protein, 315 aa, unidentified
METFRVVGIDVSKKELENFFLPSSGGWAEPNTEAGIEALVARLKELKPELVVLEATGGYETAAAAGLMLAGFAVAVVNPRQVRDFAKAMGKRAKTDKIDAEMIARFGDRIRPEPRGIPEKDVRELDALVTRRRQVQGMITAEKNREQTAAPAVRSRILEHLRWLAADLATIDDEMGGLIEQSPAWRAREELLRSVPGVGETTARTLIAELPELGRLGPKRVASLVGVAPWTRESGVFRGQRKIAGGRASVRCSMYMATFVAIRCNPVIRAHYLALKARGKLFKVAMVACMRKLLGILNAMVRDNQPWLVPAATAA

SEQ ID NO: 464875 - protein, 346 aa, unidentified
MATTKVKRYTYFIGIDISRNKLDYAIMQGKSFIFHREAENNVQSINAIIEEIKTLPKFTMTKAVFAMEQTGIYANHLLTTLKKVKANIVIESALHIRSSLGVLRGKYDKIDAIRIANYAYINRENLKLWTAKRPAIEQLAYLSSLRLRLLETQLKLKTPLGEQKLFVKTKLHKIGTLLCSKSIQAIQFDLAEIETAMNDMVRSDEELNWLMKIITSVPSIGPVTALQIIITTNEFKDIKSPKQFACYAGIAPFVRDSGTVKVRAKVSHIANKRMKSLLHICALGALRCDQELKTYYQRKVIDEGKAKMSVINALRYKLILRIFACVAQQRLYQNDYERPIRNTLSI

SEQ ID NO: 464876 - protein, 342 aa, unidentified
MKDISIVGLDLAKRVFQVHAAGRDGAAVLRRKLSRGQLLTFFAGLPRCTVAMEACATAHYWAREIGQLGHEVRLIPPAYVKPFVKRQKNDAADAEAIVEAALRPSMRFVVPKTKGQQASSMIFRTRDLFVRQRTQLINALRAHLAEHGVIAPQGVGNLALLTQIVEDDSAGLELLVVETARLYLEQIDMLSSRIVSLEKVLRSEAKRSESTVRLMSMPGMGPITAMAIEAFAPTMTTFRRGRDFAAWLGLVPKQHSSGGKQVLGRTSKMGQRDIRRLLIIAAMTVIRWACRKAPPANSWVARMLARKPRMLVAIALANKMARSIWAMMTKNESYRDSGLAAA

SEQ ID NO: 464877 - protein, 387 aa, unidentified
MIYLGIDVAKNSHVAAAMSSEGEVLLMPFSFANSANGFTLLREKLNSLPKLPLLVGLESTAHYGENLIYFLCGNGYHVAMINPLQTAAIRKSAIRKTKTDKVDAFVIAKALMMEGYTELQQADIQILKLKGLCKTRQNLILMRTRCKIQLASFVDQLFPELNQFFRSGLHINVSYTLLKAHPRPAEVCSLHLTYLSNLLHKASRGKYKKEDAIRLRELARNSIGTDSPALALQIRQAVSQIELFSAQLKQVENEISTIMDSLDSPIMTVPGIGYLNGAMILSCIGNIQRFSSPAKLLAYAGLDPAVVQSGNFSAKSTRMSKRGNSMLRYALINASHNVVRNNETFAQYYNSKIAQGKSHYCALGHTAHKLIRIIFTLLTNNIAFDLA

SEQ ID NO: 464878 - protein, 382 aa, unidentified
MRLFVAIDVSSEKLDVCFLDSHDTVLKEICLSNDVNGANAIKEDVLHFHQLYNYKKIVIVMESTSVYSFHPSMFLTEDKDLRALDVEVVVQNPKAIHRYKKLFEEDKTDKIDAFRIADFLRIGRYNKFLIKEEKYVALQRLTRSRYQLVHQQTECKQHFLKNLYYKCNTLSKELNTSVFGATMMEILSDSLSLDEIAEMDLEALATLLQKKGKGRFSDPEDLAKTIKKAIRESYRLGKVVQDSVDVVLATYARLIQTLKKQIKEIEKSITAFFEAIPEARYLTSVPGIGVVYAAGIIAEVGQIERFENEAQLAKYTGLYWKKSQSGNFESERTPMTRTGNQYLRYYMVEAANSVQLREATYRAYYLKKYDEVPKYKHKRALV

SEQ ID NO: 464879 - protein, 423 aa, unidentified
MMKLKYSICCGLDVHKNVIVATIVITNKDGISEYMQKSFSTINSDIQRFHNWPIENNCYHVCMESTGKYWIPIFNYLENDIDVCLTHPKYVKAIKGKKTDKKDSKWIADLYKFDLVRCSFIPPKDFRQLRELARYRFKLVCMKSSEKNRIQNCMTVSNVGIASVLSDPFGKTATEIMSYLLEHTADSIDEKAVRKLIKKGAKAKSDEIIEAIRGYNIETDQAKKLELARGHLEYLDNMITQTEVELYVRIKPYYEFVEFVSTMPGMTELSSTIVLAETGVDMNIFDDAKHLCSWCGLSPANNESAGKKKSVRIAKAGDYLKPMMVQCALAAVQNKKQPYFAIKYGRIKKRRGHKKAIIAIARMMMVCIYHMVSEKKPFTPTDYEDLMAPQNHVERVVLNENNVFAYLESLGYDSSKLVKRNDN

SEQ ID NO: 464880 - protein, 324 aa, unidentified
MIDGILGIDVCKNTLDVSISSYTKVRTKSFTNSPDGWRHLLDWLIAQKIQRVHACLESTGRYSLGIACALYEADHVVSIINPAQIRDFVRTKLGRNKTDGVDASHIREYCELFKPSPWAPPSEAHRRLGELQTIRSGIIAGLTEWKNRKNSGIVDAEAQALADATISHFTSQLGAVDKAIALTIDNDCDLQSKRDLLLTISGVGETLAGVVLAELPGPDVLRSSAEVVAYAGLNPRQHQSGTSIDRATRISKIGNAVLRAALYMPALSAMRYNSAIVALVSRLKSRGRLKPKQIVVAAMRKLLVLCFGVLKTGRPFDAAIAMGG

SEQ ID NO: 464881 - protein, 341 aa, unidentified
MSNANAYIGVDLHKNSCYITVMDKEGTIKKRTEVSTDTEKVRKFFSNYQKAQVAVESTMNWIPFYENLESLGCKVKLSNPLQTKAIASARIKNDKVDSKILANLLRTNLLPTAYIQPKEIRDLKELIRQRANYVEIRTRIKNKIHSVLFKTNTKHSFSNLYGKAGMKFLKTVRLRKIYSEELNRYITTLELLDKQIEELSETIRKAAKLDYDCRLLMTIPGISFYTALMIKAEIGNISRFPNANKLCSYAGLIPSTYASADKVRNGRITKRGSKWLRKALIDAITSNARNQNKISVFYQKLKRNKGTGKAKVATARKLCSIVFAILTDKQPFKEFTPVKQR

SEQ ID NO: 464882 - protein, 356 aa, unidentified
MLIIGCDFHPGFQQVAIFDNQTGEYAERRLGHREEAEQFYRSLAGQEVRVGMEGCGHYPWFEGLLAGLGQELWLGDAAQIRAKVVRKQKTDRRDAEHILQLLLDPDPEQFPRIWVPSLEERDVRQLLVHRHKQVQARTRVKNQLQAMALSQGVQKKRKLWTEAGRAELEQLELLPYAAERRKQLLQSLDGLEAEIAQLNRRVEEEVQKRPAAVKLQTHPGVGPVTALAMVLTLGPAKRFPSGREVGSYFGLIPSEYSSGGRQRLGHISKQGNSFLRFLLVEAGQSAARGDAELGRFYRRLAVRKHRALAKVAVARKLAVRLYLMLREDWTYAQLCRAVVQASPGHSVAERKYRPLE

SEQ ID NO: 464883 - protein, 338 aa, unidentified
MSMYCGIDLHSTKSWVAILDDQLEVVREKGLGNKLEDILGLLKPYREEIEGVAVESTWNWYWLADGLMDAGYRVHLTNTWAAQQWDGLKYTDDRHDARWLARLLKLGILPEGYIYPKQERPLRDLLRRRAFLVRKRTSFLLSMRGAFECRTGMRTNSNDLKRWEAEDVEAYMGDDVSALGMTCLLEPVKVLSAQIKTIENEALSRARLRDEFAPLLTVWGVGKILALTIMYEVGDIERFRKVGNFTSYCRLVKTSRLSVGKSKGSGNRKNGNPYLSWAFSEAAHHAVRHREQARRYFQRKRSKTNGIIAIRALAHKLARASYHVMRDQVDFDAAKLFR

SEQ ID NO: 464884 - protein, 416 aa, unidentified
MNAVGIDVSSRKSTVAVLRPLGEVVCLPFDVTHDIAGLASLAEKLKALDGETRVVMEHTGRYYEAVEKALHEAGLFVCAVNPLLIKEYGANSLRRVKTDKADAVKIARYALDNWADLRDFTPMDAIRYDLKTLNRQFQLASKQRTASANNLIALLEQSFPGIRKCFDSPVRSDGTQKWVDFAHSFWHVDCVRKQPFAAFCERYRKWCKRHAYFFKLSNAEEVYALAKRAVVLTPKSKVVKVLVQEAANQLISISRSVEVYRAEMDRLAAMLPEYPVVMAMYGVGKSYGPQLMAEIGDVRRFERKQALVAFAGIDPMPNQSGDKNVRSNKSSKRGSPYLRKTLFNVIRTYLQCAPQDEPVFQFLNRKRAEGKPFYVYMLAAANKFLRRYYAKLRDYFASLDTLQPVAPIPTILKATL

SEQ ID NO: 464885 - protein, 434 aa, unidentified
MILLIIMGATTFAQILTFSGASNGIVAAITTIGLRPMAIIAGMMLILIFLGIFVDQVSMMLITIPIFMPIVQQLGVDTVWFGIMFLVCMQMGLLLPPHGLLLMTMKGVAPPTVSMAHTHLDTHVGALISDTGRLLGTLSVSTDAAGYLDLLTWASSFGHLRRAGVEGTGTYGAGLARVLRDHEIEVLEVNRPDRAMRRSRGKSDPTDAENAAHAVLAGRATAIPKDQSGAAKAMRAVSVARRSAVKAKTQAINQSRALLVSAPQEIRDRLLKGKTAECVEGYARLRSLGKTPMLQTLTATLRLLAKRWLTLAEELKALDTMLDSLTSQHARRLRERFGVGPQTAAVLVAVAGDNPERLKSEAALAALCGTSPLQASSGKTVRHRLNRGGDRSANNALWTIAMVRMRSDPRTRAYVDRRTKEGMSNKEIHRCLKR

SEQ ID NO: 464886 - protein, 407 aa, unidentified
MELSALYKCVIGLDVHQAQITACALIQQPDGSTRIEQRQFGGFARDRRELADWAASLHPDEVVMESTGIYWKSPYAALEAVGIRAKVVNARHVKHVPGRKTDVGDAHWLAMLARAGLLRASFVPPAALRELRLIARQRQKLVGQLASEKNRLHKVLTDSGIRLGVVVSDLHGQSARAMVKAIIAGQAPQQVINLASRRLKASREEIFDALQGELTASHRFVLDELMQHIEEIEARIDRFDVRLLAGLESERGTLALLQTIPGVDLIGAAMLLVEIGSDMGAFGSADRLASWVGVCPGNNESAGKRKSGHTRKGNPYVRRLLCEFAHAASRTTSVFKSKFQALVVRRGYKRAIIAIGHKILRTLFFMLKRREHYRDCATDYEALSVQRNAPRWIKALTKFGFITPASA

SEQ ID NO: 464887 - protein, 410 aa, unidentified
METIVKRAAGLDVHKAQVTACVRIPGRGGARTQEVAEFQTTVRGLLSLLDWLKAHRVTQVAMEATGVYWKPVWAILEDEFDCLLVNARHVKQVPGRKTDVSDAAWLCQLLEAGLLRRSFVPPKPIRALRNLTRYRKAQIGERQREANRLHKILEDTGIKLDCVATDILGASGRAMLDALVAGTTDPQVLAELAKGKLRAKIPALKEALVGRFDRQHALIVSAILAHLDFLDEQIQLLSDEIEAQLAPFARAVELLCTIPGVQRRTAESVLAEIGTDMSRFPSDRHLASWAGQCPGNDRSAGKRRSGKTRHGSKWLDTALTEAAMAATRTNDVYLAAQYQRLRPRRGHGRALGALKHSILCACWHMLQTGELYREAGGDYFSRRDPERATRRLVAQLERLGHRVTLEAAAA

SEQ ID NO: 464888 - protein, 351 aa, unidentified
MIIGIDPHKMSHTANAVDPATNTTTASVRIDATLAGYRELMRWSKQFPERRWAVENASGLGRHLAQWLVARGEIVLDVPCTATARVRELSRGSRRKTDVIDAAAAASVAALHGDATVVVAEDHTTVFAMLEERRANLATQRVRITNQLHAVLRDLVAGGAAVAITAKSAASLLRTVRPESPAERTRKQLAHDLVRDVRAVDASLADIEKRMTAALDDHGTRLREIDGIGAITAVRLIGRTGPAARFGSPHAFATYAGTAPIEISSGEHSRHRLSRAGDRRLNSAIHLVAVTQVRMRDSIGRAYFDKKIAEGKTRNEAMRCLKRRLANHIWRMMISDEQCAIKDQHGLETAA

SEQ ID NO: 464889 - protein, 326 aa, unidentified
MKLKLGVDISKAKFDVALLLDGKKYRSKVFSNTGAGFRALLEWIASNVPGGQANVHVCMEATGVYHESLALFLHEQDIDVSVVNPMLVKRFVESEGARSKTDSADAKALARYADRTQPELWQAPSPAVRKLQALVGRLETLKGMRQAEDNRLEVAHEAVRSSLLEIISQLDASIEEVRAQIRQTINDDPDLKSRRGLLETIPGLGDKTIPQLLAYIGRPERFKSVKALIAHAGLAPMIQQSGTSLNKKRGTHPIGHEALRQALYFPAMVAGKYNPVVARFWQRLKEQNKPGKVIVVACMHKLLAIAYGVLKSGKPFDPGRSLAATA

SEQ ID NO: 464890 - protein, 472 aa, unidentified
MVANRSSSHESRLRQQAEEAAKLASMPVRNPHAAGIDVGDRTHWVCVERTPDGSATTREFPAHTPGLRDLMAWLASCGVTTVALEASGAYGHVLFLALLEAGWNVLITSPKFTRQIQGRPKTDRLDCQWIQRLHKHGLLPSIFQPDEATQTLRDFVRQRASLVRLSGHHIQRIQKALELMNLKLTNVVEDITGVTGLKIIRAILKGERDSQALANLRDRRCKHSVAEIAIALEGRYRAEHLMELRCCFHLWEQYLAMIVEVDRAIAAQLGSLKKTTELPPLAKRKHVRGRRPHDPAFDVRTALYLMLGLDLTEFEGLDELNALTLISELGTDFTKWPTVKHFTSWLGLCPNFKKTGGKVQSSRTRRGKGRAAYTFRLAAWSLMRSKSYLGAHLRRQRSRLGAPKAITATAHKLARIFYTVMRYGVAYQKRSEEEFAVDHRKRMEKTLHRRAKELGYELTKIETPTGAEPQPA

SEQ ID NO: 464891 - protein, 371 aa, unidentified
MTEAVKYVGLDVHKETIAVAVADGQRGGEVRFIGTVANEDDAVRKLVKRLTGPGVTLNVCYEAGPCGYGLHRLLTKLGQDCIVIAPSMMPRRPGDHVKTDRRDAMTLARLLRAGELTAIWVPDEAHEAVRDLIRARRNAQDDAIGAKQTVRSFLLRHDRRFGGKAAWTKMYWRWLSEQRFDFPHQQLAFEEMQKRVLEAQARVGRLEAALAEAVDAWCFAPLVRNLQVLRGIRLVSAATLVAEVGDLTRFDNPKQLMAYVGLVPSEHSSGARTKRGRITRAGNAQARTMLIEAGWSYRLPAREERRYRERVIDLSEDIQAIGWKAQVRLCQRYRRLAATGKPQPKVTTAIARELVGYAWDIARRVSPAIAG

SEQ ID NO: 464892 - protein, 339 aa, unidentified
MTRYVGVDLHRNQFVVCILEENGRQSLSEYRLEQLPGFVGKLRPTDKVAVEVTGNTRLFYDAVAPHVAEVVVVNPTQCQVIRQSVKKTDPHDARTLAWYLSKGMLPEVRMKDKLHAQLASLTQTRDTLVKQRTALKNKVNNILSAHGINLRKEGLSSEAALEEILGMKFDAIVQTELRVIVGQIRALNQSIAELDQAIQAEGPKLPGYRNLRSIKGIGNLGATILLSVIGDIQDFADPGKLAAYFGIVPRVRNSNEVERSGRITKRGTKLGRTTLVQCALIAMRYSPYLARFYHKIAARRGAGKAIIALARKFLGVIYHTLKNNWVFEDFPNFVLAEAS

SEQ ID NO: 464893 - protein, 415 aa, unidentified
MEDAPRYFTGIDWASDKHDVCVINATGAVQARFVIAHTAEGLADLVRRLKRFGKPQDLPVAIERPSGLLVDSLVEAGFPVVPIHPNALKATRPRYSAALGKSDPGDAYILADMLRTDGHRFRALRPASDETKALRAAVRTRDDLVATRVQLANQLRALLDSFWAGAAAIFADVDSPIALDFLDTFPTPDSAARLGTKRLVRFLKRHAYCGRRSVDELLDRLRSAPLGLAGELERETKGQLVRGLVALLKPLVTQIHELDGLIAALLAQHLDGALLQSFPRTGSINAAQILAELGDDRLRFATPDQLAAEAGVAPVTRASGKHRGVFCRFACNKRLRRALTTWADNSRHADPWAAAVYRNARARGCDHPHATRILARAWSRVLWRCWQDANPYDPARHGRAIPFHVPQLQPTSAAA

SEQ ID NO: 464894 - protein, 342 aa, unidentified
MATIVALDVSKGKSFYVMYQEMTCLYEGEITHTKSGFQELHALIKNLPEVPEIVFESTGIYSRPVETFCQKNQLIHYVLNPLQAKQQMEKESLRKWKTDKRDAHRLAQTHWNNSRTKSVSAEPLYKELRDLSRFYQEIMDEIGRMRMHLHNAIQLTFPELEQVLSNRLTPYGLTMIAQYPHPSFVLKQSRTIIKNRLMASTAKKISENRARNKADELIAYAKDSYPAVSETAIPVAKTRYYAEQLQALLNQKERLANQMIETAKQLEEFSVIASFPGIGELSAAQFIGELGDLRRFSDPRKAYAYIGIDIRRYQSGNYLAQDHINKRGYPKGRKFSFLLSSI

SEQ ID NO: 464895 - protein, 326 aa, unidentified
MQGKEASEQETKGKSNAGIDVSKSWLDAHVLPAGATLRVANTREGIRKLKRWLIQFDLALVVIEATGKWHRDVRRSLHAAMVPVAVVDPFRVRMFAKACGVLAKTDRLDARVLAQFAAVMAPAVRAPASEVMEELAELVTARASAVAEQTALKNQLSTATGTFLKRQLGRRIQRLAKDIAALEREILKCIQADQGLARRYAILTSITGFGPVVATTLIACLAELGTCSRKQIGMLAGLAPVADESGQRQGIRVVWGGRPNIRRVLYLAAITAARFDADMKAFFNRLIAAGKPAKLAIIAVARKLVVLANILISEGRMWQPHSPKHA

SEQ ID NO: 464896 - protein, 341 aa, unidentified
MSNANAYIGVDLHKKICFITVMDEAGKIKRQTEIKNEKNKIFKFFKRYSSASVAVESTMNWMPFYENLESMGCNVVLSNPLATKAIAAARIKNDKVDSRVLADLLRTNFLPTAYIHPREIRDLKELVRQRMNYVNMRTQIKNQIHSVLFKSGVSHNFTDLYGKAGMEFLKTLELRDVYRQQLNWHLTALSNISIQIKEMSDIIEETAQADYDCRLLMTIPGIGYFNALLIKSEIGDISRFTNANKLCSYAGLIPSTYASADKVRHGRITKRGSKWLRKALVDSVTSGCRHEGRLAYVYRKLKKSKGTGKARVATARKLCHIIFAMLSDKQPFREFTPVKQR

SEQ ID NO: 464897 - protein, 425 aa, unidentified
MEAESIDYAAWIGLDWGSQKHAICLKPADSEAVEHYTLEQKPQVLHSWFMNLIARFGGRKVAIAIEQTRGAVIHFLLGLAYVHIFTIHPKSLKNYRDAIHPSGAKDDPTDAELLLQFLTLHQHMLKRWIPDKPEVRLLVRLVEFRRKMVGKRVRLTNELTQLLKEYFPAALDCAGTLDRIMACDFLLKWPTLEKLQKSRPETIRRFYYAHGARCRNVIEDRLKQIRSALPLTTDAPVIEPSVFMAQSIAPQLHSVIDSIAQFDQRIKEVFEKHPDAPIFSSFPGAGPVLAPRLLAVMGSDRSRFNSSLEVAEYSGIAPVTERSGKSKWVHRRFACSKFVKQSFHEFAAQSILFCDWARCYYDQKKAEGKPHHSAIRALAYRWIRIIYRCWKDRIPYDESKYVKALQQRKPDWVKFLGESKNSEHA

SEQ ID NO: 464898 - protein, 355 aa, unidentified
MNEIKYIGMDVHQKTTSIVVLNAAGRVLTSAVVETQAQTLRAFVEGQRGTLRVTFEENTCAAWLYDLLTPHTRQVVVCDPRHNALLQAGSKSDPVDAHKLADLLRLNALRPVYHGQNSLRPLQELSHSYLALVQDTTRVMNRIKALYRSRSIPCAGKEVYSPRHRAGWMAHLPEAGVHTRAQLLYQELDLLRALRREARCALLAESRQHSVSHTLRAVPGLGPVRIALLLAVVQTPFRFRNKRLFWTYVGLGLVTRVSGEFCVVNGQLRRSGKAPAIRGLNPNHQRQLKEIFKSAALAAVGQPGPWQQFYQQRVAAGRKPELVRLTVARKLAALTLSLWKKGGRYDAERLKSPSA

SEQ ID NO: 464899 - protein, 409 aa, unidentified
MERVIERCAGLDVHKDTVAACVRVPGPGRRREQEIKTFGTTTGDLLALRDWLEAHGVTHVAMESTGVYWKPVFYILEEAFTCLLVNAAHIKQVPGRKTDVQDCAWLAQLLEHGLLRGSFVPPVPIRELRDLTRYRKVLIQERTREANRLHKMLQDAGIKLASVATDILGVSGRAMLEALVQGTTDPAVLAELARGKLRAKLPALREALAGRFRAHHAFLVSQLLAHLDYLEEAIGALSAQIAEVIAPFGEEVTRLDTLPGVDRRTAEVLIAELGVDMRVFPSDRHAASWAGLCPGNHESAGKHRSGRTRKGNGWLRTALTEAALGAIRTKGSALGARYRRIMRHRGHKKAVIAVAHALLRAAYHLLARRLPYRDLGADYVDRRHTERVTRRAVQALERQGYRVTLQPAA

SEQ ID NO: 464900 - protein, 420 aa, unidentified
MRTSTDTEFAAFVGIDWADRKHDVCLQAAGSSKRELSVVPHRPEAIAQWAEGLRQRFGGRPIAVCLEIAKGPLVYALQRYPFLVLFPVNPTTLAKYRETFCVSGAKDDPTDAQLALELLVTHPDKLSRLNPESGPMRILQQLVEQRRTLVDDVRRLTNRITDALKQYFPQALEWFPDKDTLVFCDFLTNWPTLKQAQRARKARLSAFFREHNVRYPHLVEQRIQAILAATALTSDNAVIAPKRLLVETLVQQLRVLLQAVARFDREIAALAPTLPDYAVFASFPGAGPVFAPRLLAAFGEQRSRYQLADEVQKYTGIAPVTERSGNKCWVHWRLQCPKFLRQTFVEWAALSIPHCYWAKAYYEQQRGRGSTHQAALRALAFKWIRIVYRCWQNRTPYDEARYLTALKRRGSPLLNGAQNP

SEQ ID NO: 464901 - protein, 451 aa, unidentified
MEEITEERAEVVERVAALDIGKASLVCCVRVPHESKPGARRQEVRTYDTVTPALLELRDWLVCQGVTRVVMEATSAYWKPPFYLIEDDLECWVVNARDVKNVPGRPKTDKIDSVWLCKLAERGMLRPSFIPDRPQRQLRDLTRYRRSLTQERSREKQRVEKLLEDAQVKLSSVISDIFGVSGRDMLAALIAGQRDPTVLADLARKSMRAKMRVLRQALTGHFTDHHAFLLGMMLGRVDALTAQIDTLTNRIAQAIAPFATQVAQLDEIPGIGLTTAQEIIAEIGADISRFPTPGHLVSWAKFAPKARQSAGRSKAASTGQGNPWLGGTIGEAATAAARTSTFLAARYKRIVKRRGKKRALVAVGTPSSPSAGTCSPTPTPTSLTSARTGTTASHPSGANASSSPNWNACPARSSASTTQPDDSPAPSLTTATTRQEPSSLTLRRCCRLPAD

SEQ ID NO: 464902 - protein, 345 aa, unidentified
MSQKVCCGIDFHKRTSTLCFIDQDGKHQETVTIASEKLPLYLSNRKDLLVGIEASGGTNDVVQKLKDRGIEVRIINPNKFRAIGLGGKKTDERDAKAIAEALRLNYIPEVHHKSIYARRLKTMIVGREMLVRSRVNMVNHVRGTLREYGISMPVGMDKFQSEVNEAIKKIECEFIRGHLQDLVGRISDMIKRQIEMEGQLENLASEDPRCELLRTVPGIGLMTAVTFVAVIDDYQRFADGKHFASYIGLVPREHSSGDRRRMGSITRSGSELLRRYFIHGARSVLMHTKEKTAEKDRNRSWALKLKARIGMNKATVALAHRLSRIAFAIVRDGLEYGKQKENRAS

SEQ ID NO: 464903 - protein, 335 aa, unidentified
MTQPAELYIGADVHERESQLAIFEPSGTLLTEKRLPTTNLQTFIDSLPGEKHVAIESTGFIYPIYDKLSTLKSCHVSVAHPNKVKLIAKSKLKHDRADARILGELLRTNYLPASYMPDPETREKRLLINDRVRYGLRSGELKGSIRWLLKRRGIQIQHTFKPEGKRKLRELDLQEINIRLDELQLIEAIIRKLNIQIAKIVQEDPNAKLLDTLPGVAPYTALFLSSEIGDVNRFPDSKHLCAYLGLVPSLHQSGDTTVTGHITREGNKWLRRNLTECSRAAVRKDPHLRRFYLKLTHKRGEKKATIAIARKLVAYAYWMLKRNQTYEELSPWDGS

SEQ ID NO: 464904 - protein, 331 aa, unidentified
MYFSQFIGVDISKNTLDAAIYPAKDKKLDFLHFDNTQKGLGEMLSWLKRRGVKPSEMVICAEHTGVYTNPLIAFVDKKGLALSLNSPLDIKHSMGIARGKNDAVDAGRIAEYAHNHRDKLRLYEKPSEAIMKLQYLLTERRQYMRQRTAIINLNSAMGKYETPEARYRNESAIHHCEKLVKKVEEQMMDVLCSEPEVKQNFDLVSSVKGIGLINAINTVVYTNNFKAFETPRRYACYIGVAPFDHTSGTSVKGKTQVSKICRTQQKAELSMAARSAVVHDPGLKRYYQRKMKEKGGGKDAHGVVLNAVKFKLILRMFAVVKSGQPYKVLNY

SEQ ID NO: 464905 - protein, 419 aa, unidentified
MSFKILKNNCCGLDVHKTWIYACIGITDSHGRTEYKQARFSSFTKGLQELCDWLAKYNCNDVCMESTGKYWIPVFNILEKNNIWVTLSHPKYTKPQKGNKTDRKDAKWICDLYMCGMVNASFIPPADIRELRDLVRYRFKLTCMITSEKNRVHNCLTVSNLKLDDVFSDIFGKSSRSITEQILQHPGETFDVTPFVDGRCKTPIDEIQAAVDGAISTEQAVKLRQCLNHIDELEMHKAEIEREIFRLSDKYEEVLTLIRTVPGFDKNPMTAIQVLSEIGGDMSVFPTAKNLVSWAGCCPRNDKSNQKIKSTRISRAGSYFKPVLVQVANALIKSKKHPEFTTRYRRIKARRGHKKAIIAICRMILTAIWHILTDLKPYTPEGFLDSRRVNKSKVLTTSQALNLLKQRGYVIKDDAVPVT

SEQ ID NO: 464906 - protein, 311 aa, unidentified
MKQSVVYIGIDVAKAHLDVAWGGASRRFANDQKGRAALINWIKQSSDPSAVQLICEASGGYEQALLESLKQNNLKATLVQAMRVRQYARAAGILAKTDKIDAKVLAAFGSAMQPKPTQPPSAEQKRLRELEAQRRHLSRVLLGEENRLGQMSCAELRSLSPSLINKINKQIALLDARIECLIAQDRTLCAKAQKLTAISGVGARTAALLLAQMPELGRLNRRQAAALAGLAPFNHDSGSIRGKRAIFGGRPALRSGLYMAALSAARYNPILSNFYRRLRVKGKPHKLALTAVMRKLLLALNSTLKPIARPP

SEQ ID NO: 464907 - protein, 341 aa, unidentified
MKRYFVGLDVSKDATAVCLRDDRGNILMSFKKPTDPDVLTRALGAEMEHIVCVVLETGRMANWLYGELSQRGLPMVCIDARQAHAVLSQMHNKTDENDAAMLSELARTGFYKKIEVKSRLAQERRALLRAREVATKMRMNAENRIRGLLASFGIRLPKHLKTYEQRVQKVLEGQAVLAGVIEPLLKLRTEALRQTAVLTKEMTRHSRDDEACRRLMTIPGVGAVSAVTFVATIDTPDRFKRSRSVGAYIGLTSRRYQSGDIDFGGRISKRGDRMLRTVLYEAANSLLCRVKSGPGQYLKDWAMALKKRTSHKKAVVALARKLAVIMHAIWKDGTEFEMKEA

SEQ ID NO: 464908 - protein, 325 aa, unidentified
MKLSVVGVDISKLWFDIYIPLLFLKMRFSNDVSGFKLLLKLLQQKHIVTARVCMEATGLYFEALAEFLHANGHEVVVVNPQCIKSFSRSELRRSKTDPLDAALIAQYCDEKYARLNLWQPLKPIYKNIRELLRRRSVLVADSTAEKCRLKAGFSCKDTLDSIERHLVWLQKEIEQIECLVQENITQDPELAKAIALAVTIKGMGWLTVTTVLVEVPQVLWNGRLAAAFAGLVPHQNKSGSSQNSTRLSKVGSEHLRSTLYMPALSAARTNPLLKAFYQRLRKGGLKHQQALSAVMRKLLHLVFGVLSSGQPFDLNFESKRRLQPA

SEQ ID NO: 464909 - protein, 438 aa, unidentified
MRAKCNDDLSTVNFSTIGLDVHKNRLVACAVHVQHDAKGREVHEKEYFESTGTYSGRQRLTEWCSSQNADLILMESTGIFWKAPFRDLEKADLHPVLINPRIFNRGSDKRKTDKSDATWLANLARLGLYRASFIPEEPYRSLRLVQSQIKSLVAERQRLKNRLVKVLDDSGFRFTVAFADIGGASSQSLIAGILEDAPREELALMIDPLCKKSIEEILDAVSGELSQINKDIVQSILRLIETHTKEIETLEQTVIRELKKCEKVKQNIRLMTTIPGVSEKSAQLLMSMIGPDFVENFSSPHAFARWLGVCPGNNESAGQIKSGRTPHGQRLIKKVLTECAQAACHTKGSHLSVLFGGWKHKGFCKAVMAVAHKLALLIHWVVVNQKPYIDKEFDYTGVFKQDGQRRPRWIRALRRYGLMTLADVEKEKAARGWIIAKA

SEQ ID NO: 464910 - protein, 354 aa, unidentified
MKSKSIEFSGMNVYVGMDVHKKSWSVTILTDDMEHRTYNQPPSASALHRYLIKHFPGADYYSAYESGFSGYGHHRKLLGLGINNMVINPADVPTTGKEKAIKTDKVDSRKIAKGLRSNTLKAIHIFSEADQDLRSFARMRHIMQRDLRRSKQRIKMYLLFNTISIPLALDNESWTNAFEAWLKKVSFPTPRAKRAFEFLLCNYHFQKQQVRQISKELRAYFRKHHKQIYYLLRTIPGIGPLSAIAIITELGDINRFANINKLSSYVGLIPLMSNSGETEKVGRITYRCNNYLRTILVEASWQAVRKDPAMMMYYRQHAAKGNGKRAIVKVAGKLLNRIRYVLKNKQAYVLGVVE

SEQ ID NO: 464911 - protein, 346 aa, unidentified
MVLIGCDFHPSWQQVSWLDMETGETGEQKLVHAGGEAKQFYEQLAAPVLIGMETTGNSQWFIELVEDLGHEIWIGDAAQIRASYVRKQKTDKRDAAHILKLMVEGRFPRLWTPDREQRDLRQLVLHRHKLVMIRSRVKNELQHLSLNKGMQRKRRLWSQAGQKLLRELPLKKWAACRREDLLGLLTMLDEQIGKLDGAVQHAAEENPQSKLLMTQPGVGPNTALAFVLTLGDVGRFPRGKQVASYLGLIPREESSGGRQKLGAITKQGNRMLRALLVEAAQVAVVHDPGLRKQYRHRCHQKPKAVAKVAVARKLAVRLYWMLRTNVAYPEIVRIESSSGLALVGAS

SEQ ID NO: 464912 - protein, 428 aa, unidentified
MTEDTTLTSQTWLVAIDIGKSFHAVLVEAADGRRQHFRMANSVEDYDRLVAFLRALLGTVRIALEPTGDFHRTLAHRLLREGFPVVSVSSVAGARYREAMFNSWDKNDPKDATVILHLLKQGIVQHYHDPLLAGDHDLQELAKTYHQVVLARKRLADSLLNHYLPLYFPEMGRYWESTRVEWFVDYLDKFPTPAAVCGLPKEEFVKAAWSVIGRKVNKRAKLEELYELAHQSIALPVSVDSVAIETFRLQLGQLRRLAELRQALEVRAHALLKDRADFQHLCSLPGVAAVLAMVILAEGGDLRRFPHHRQFLKYCGLDLAKCQSGQFRGRETLSKRGNARLRMAFWMAAQRAVRMNENSFRDKYERYTKQDPGNPDVRRKALTAVAAKMARVAYAVVKRNQPYRGYHEHALPSGSIPLMRAVGASATP

SEQ ID NO: 464913 - protein, 464 aa, unidentified
MSRKAQNQQERRSARPKVDWKALEVVHPDAAGIDIGGSEHWVAISPDRDEHPVRCFDCFTADLEQMADWLKARGVRSVAMQSTGVYWIPVFEILQQRGMEVYLVNARHTKNLPGRKSDIAECQWLLKLHTFGLLQNSFQPSDEIRAVRTLWRYRSGLVAQASSTIQRMQKALIEMNIQLTNVLSDLSGVSGMAIVQAVLDGKRNPEELASLADPQVKASKEVIAKSLRGNWRPELLFVLGQEMDSYRAYRKRIADCDREVQQQLQRMESKVDLSTQPIGPRPKGKRARGNAPQVFDLRSELYRLTGVDWSQVDGIDVQVAQTVIAEVGADLKAFPSEKHFANWLGLCPTNETSGGRVLKRRTPKVVNRAKAAFRQAASTLIRSNSYLGAQYRRLRTRLGAPKAITAMARKLSCLFYRLLTKGQKYVDRGAQYYESRYREQQIRSLIKRAQRLGLQVLSPEVKPA

SEQ ID NO: 464914 - protein, 341 aa, unidentified
MVCSLRIAASKVPEWLFLFNHLNFGGESMSNITSLAVDLAKNTFQLHGTDAKGKIVLKKKISREKLLEFIVSLKPCNIHMEACGTANYWGRKFKEHGHKVKLINPRYVTPYVKRNKNDVNDAAGIAAAARDPDMRFCDVKTEEQQDMQSVHRIRSLLIQQRTALANQMRGLLAEYGVVIPQGISYIRSELPRIFGNNPNDMGGLILGCLMELYDHFGYLDNKIAAYDKKIEAIFKNNEGCQRLEEIPGIGVLGATILVSVLGNGGAFKNGRHFAAFLGLTPRQHSSGGKERILGISKGGDTYIRTLLVHGARSVLLRSNKKTDKQSKWINSLMSRSGYNTH

SEQ ID NO: 464915 - protein, 337 aa, unidentified
MHSENIAAYVGLDVHKETLAVAIAAPERLGEVRYYGTINNEAQAVRRLFQKLQGLYGNILSCYEAGPCGFGLYHQLTAMNIKCQVIAPSRIPKSPTDRIKNDHRDAISLARLLRAGELTPVWIPDLTHEAMRDLIRARAAAKRDSRVARQRILSMLLRTDKHYAGKHWTGKHRTWLANQSFSQPSQQIAFQHYCQSLEQIEDRILQLDQEISRLLPEWSLCNLVCQLQALKGVGQLIAITLVAELGDFSRFSNPKQLMAFLGLVPGEYSSGNSIRPRGITKVGNSELRRLLYEAAWSYRTPAKVGAWLIYYRPDSVTQYSKILHGKLNNDCVLVTEV

SEQ ID NO: 464916 - protein, 349 aa, unidentified
MEAYDGPQIVGMDLHRRRSVLVRMAEDGHKLSTARIASSPARLTAEIKRAGLHPKVVLEACYGWYWAADTLTAAGAEVHLAHPLGVKAFSHRRVKNDELDARDLADLLRMGRLAEAWIAPAEIRELREITRYRGKLVQLRTSCKDQVHGVLAKLGIEVTCSDIFGAWGTRWLDELPLPQPYSWKVASLRQLTGWLTSEITVLEQVTADLLAGHDGYRAVQQLPGIGPVLGAVIVAEIGDITRFRHPARLCSWAGLTPRHYESDTTVIRGRITKQGSRPLRWALVEAVQRTPDGTPVRQARDAIIARRGPQARNIAKVAAARKLLTCVFYAMRDGHVRSLAARPAEREAG

SEQ ID NO: 464917 - protein, 370 aa, unidentified
MLDTTIFVGLDVHARSIKAVSLDVMTGEVRCATFGYDAGAVAEWVRSVDPKAKCVYESGVTGFDLQKRLSGLGVDCVVGAVSKMIKPSADRRRKNDRNDAEFLARMLSVGNVVEVWVPDDECEAARDLARALDDAREDLRRQKQRLSKFLLRHGLVFDERTPSGQRKGNWTGAYWSWISSISFAEKADNDAFAFYVDAVRQAEEDKRRLEKLVADEASRPRWKKRVDSLRCLKGIDVMTAADIVFEAGEFARFRNARSFAAWLGLTPSEHSSGESARQGGITKAGNKHLRRVLVEAAWHYLTCSARPKEPARGQAPDPGARRHAAKGVRRLVERRGALLARGVHNNKANVATARELACWVWAVGLMAEEA

SEQ ID NO: 464918 - protein, 397 aa, unidentified
MKSNTQNAKIEAITEKTLVLGIDVGSEMHYARAFDYRGIEYSKKPFKFSNTEAGFATFKEWILDLKERHEKDKVVPGMEPTGHYWFNLGKFLQDNEMKPVLVNPHHVKKSKELDDNNPTKNDRKDPKVIAGLVREGRYMIPYLPEGVYADLRTASNIRFQLQAELTRIQNRISRWFNIYFPEYKTVYGKPDAKSGMLILKAAPLPEDILTLGIDGVNQIWRDAKLRAVGKARAKTLIEAAEHSVGSKEGAVSARMEIRMLLEDYESRNIRLQEVMALIEGLVKQIPMAEKLLEIKGVGIRTVSGFLAEVGDISRFNNPKELQKLAGLALVENSSGKHKGETTISRRGRKRLRYLLFEVAMSLVAKNPEFRELHNYYTTRACLKNKNCTKRMFYFPFS

SEQ ID NO: 464919 - protein, 348 aa, unidentified
MDKEAAMPTYQLFVGVDIAATTATVVWQAPGAPATRPVTIEQSPQGFAALERRLRTTGYAPATTLVVMEATGSYWLSLATALADAGFAVSVINAGQAHHFAKALLQRAKTDAIDARMLTQLAALLQPARWTPPPAIYEELRQRLAQRDALIAVRQQVRNQLHALVQGPMVVASVRERMETLLATLAEQLAAVEAELAAVVEQQGSWTDAIKRLQSIPGVGLLTAAWVVVGTLNFTLCATAEQASAYAGLAPMPRESGSSVRGRAGIGRGGNSRLRTALYMATLSAAQHNPLLKAFYRRLRDAGKPPKVARCAAARKLLHLIWAVGTKDKPFDPGYKQQQHEVLPELAA

SEQ ID NO: 464920 - protein, 437 aa, unidentified
MTTESIKNKFAPGEFVAWVGLDWADKEHKVSMYDVASGQVEASVLRQSGEAFQQWLAGLRKRYGGGKVAVVLEQWRGGVLYGLMNCDFIVLYPVNPESLANYRKALYPSGAKDDPVDSSLLREMVQKNPERFRQWIPDDPDTRALRLLVEGRRKLVNQMTRLTNRLTSELKGYYPQALEWAGELNSAQACAFLERWPTVEAVQKARPSQLRKLYLKYGRPRPETIDRRVEQIKEATPLTQDPAAILAGSVMVQAIVKQIRPLNAAIDDYDGEIGRLFQKHPDRLVFESFPGAGPVLAPRLLAAFGADRERWRSAAEIQKISGIAPVTKKSGTQHLVHWRLACPKFLRQTFHEFAGSSIQWCSWAKGYYQHLRDRGKAHHAAVRSLAFKWIRIIFACWKTRTLYDNGIFLEALAKRDSPLSARAAAVAAAGQAKAQMA

SEQ ID NO: 464921 - protein, 356 aa, unidentified
MPLQDALTIPKIFIGLDIHKKSWTVSIQTDLFFHRTYSMPSVAEDLFRYVEQTFPNHEVDLVYEAGCCGFSVARYFLNLGWYVLVVNPSDVKTADKERYQKTDALDSKNLSNQLKAGVLRGVYIPTEEHEQFTTLARHRTQVTKKLRQSKLHIKSMLLFHGIAIPQEFDNSNWSKDFIAWLENIKFSTSCGELALQGKIRMYKFIRSEYLEIANQMRAHCRKSHKKDYNLLKSIPGIGGYLASVILAECGDLRRFNNEGQFSSYIGLVPGVYNSGGSEKCLGITPRSRSQLRSYLVEAAWVAIRKDAEMQNYYRKHQGKNVKSVIIKIAHKMARRILSVIKTETPYQINRNLVLEK

SEQ ID NO: 464922 - protein, 338 aa, unidentified
MKGVLIVGIDIAKKDFAVAYRVGAVETEVGKFANDQTGYALLQDTLLRACKEEELSTIQLILEATGGYEAALMAYAYAQGWGVSLPNPMRVREWAKGVGYRVKTDRIDARILAHYGVERRPPLRPQLAVEVSQLDSLLKRRQDLEQALQKEQTRLSEMAGRPGLAPQVTESLAQVIDALTQALANIQQAIDELCQAHDVLQQNMTRLLALPGVGPKVVLPLLVKLLQWQNMTTGTGEASGLVAFIGLDPQPYDSGGSVHKHPGISKMGDSELRRLLYMGALGSLRGDNPLKAFYHRLVSRGKSKKVALVAAARKLLVWAWTIFSQQIDWNPNFHQIGA

SEQ ID NO: 464923 - protein, 456 aa, unidentified
MARRLVGIDLGIASSHTVRVLDETGQQVCRRRCEPTVASLTRIEDAASLGAPPGTVLEVVLEPTGPAWLPVAVFFASRGHRVFRVSSAKSADLRRFLSKHAKSNGIDAETLARLPLFSPGGLLPLELADAEHAALDRRVRACDRLTRAASEHKTRIKDLVRQLLPMTPLIEDIGVADLAVLERWADPRTLLRIGPSKLKSLIVKASHNHHGAERAEQWRNAAAAAVELYGEHPAVAWQDLAAEVATEVRLLKAIQAELAVHSARREQAYRWADHGQLARSLPGIAKVGGPVIAAAIGRAERFPTGAQFKSYAGLAPRASETGNTDRKGQPMSKAGSSLLRTTFFRAGDTARKQDPQLAKIYYTQMVERGANHVKALCVVAAHLAERAWAVMARGMPYVICDINGEAVTAQQAKTIIAEHWTVSPQVRARRRSTKTAKAGKAPQKVHTGPAKPNRRP

SEQ ID NO: 464924 - protein, 366 aa, unidentified
METIYIGVDFHARQQTICYLKTETGELVTCELKHQDKEVVRAFYAQFVGQVIVGLEASGYSPWFERMLEELGCQVWLGHATEIRRRARWRQKNDRRDAELILDLMLHNEFPRLHRPAVQSREVLRMLRYRQKLIKMRTMSKNSLQAIALQAGLAKGSRLFTKAGQQELGTAEMSPVLHWQREHWLQLMEPLNQQLLETMVWFKSQSKDDDRITRLRTHPGIGLLTSLCIVHTLQPVSRFRNTRKVAAYAGFDPIERSSAERKCFLGISKAGSRLLRYLLVEAAQTAVRKDEDLKRFYQRLADRRGRPKAKVAAARKLLIRAYIMMRDEIDYAEFRHRAVAARLARRSQGPANVPEVLIGQPASPEQ

SEQ ID NO: 464925 - protein, 314 aa, unidentified
MKKAEEIFVGIDVSKAWLDIAVHAKEETFRASNDEIGIADLVKRLKKLKASLIVLEPTGGFEMRVVAEFTQAGLPVAVVNAKRVRDFARATGQIAKTDKLDAKVLAHFAAAVRPAVRSLRTEQEEQLTALMTRRRQVIDMLTVEKNRLVTVRAKMRTDIEAHIHWLSNSLKELDQEIEEFVKGLPVWKEKDALLQSVPGVGRVTSATLLGMLPELGVLNRQEIAALVGVAPVNKDSGKKRGRRRVYGGRADVRSVLYMAALSAKKFNPVIRKFYQRLIQQGKEKKVALTACMRKLLVILNAMIRSNQSWRVQPV

SEQ ID NO: 464926 - protein, 360 aa, unidentified
MIVQGTSVGLDVHALSVVAHAVDEETGKVARARLCPDHGEVLGWLHQLRAPVRVTYEAGPTGFGLARAITGAGMECLVAAPSKLQRPAGDRVKTDARDAAHLARLLRLGEITAVRVPEREIEAVRDLVRAREDARADLMRVRHRLSKLLLRQGIVYSGGTPWTCVHEEWLRRHRFDDIHLKAAFDHSFDAVLAATAARDRLDEQILVVAASPRFADPVNRLGCLRGISALTGLALTVEIGDWSRFSGSSIGAYVGLVPCEYCSGNSRVQGSITKAGNTHVRRLLIESAWHHRKSYSTSGPTLRARWAKVDPALRARGHAGNRRLNKRWRSFTERGKNPLVANVAIARELAGWCWSLATMH

SEQ ID NO: 464927 - protein, 336 aa, unidentified
MKYSAIDLHSNNSVVVVTDEADRVIVERRKPNELGAIIALLAPHQEELAGVVVESTYNWYWLVDGLMDAGYRVHLANTAAIKQYDGLKHSGDESDARYLAHLLRLGILPTAHIYPKGQRATRDLARKRMQLVRNRTQHVLSVQNIVARESAAQIRSIDVKGLKIDMAALGLHGDVALAVQSNLAVIETLNEQIDRLETRLQEAVRPCPEYALLTSAPGIGKVLATVILLETGAIERFREAGHFASYARCVDSARVSNGKKKGKGNVRNGNVYLSWAFVEAAHFAQRFCVEAKRFYDKKRAKANTALATKALAHKLARACYHMLKEKQPFDAKRCFA

SEQ ID NO: 464928 - protein, 312 aa, unidentified
MTETNSVVHAGLDIAKAQLQLHLENQQHVLPNTVTGHQRLIRLLRVVAGVHVVCEATGGYERKVVSALHSANLPVSVVNPAQVRHFALAQGQRAKNDPIDAALLTAYGHALRPNATPVPQAVLAELRELVQWRDHLKEQLVRARQPAEHATLAFVHRQQSKEVTHLEKQMAAVEKELAAALTRHPCWREQVQRLAELDGVGTLTAVSVLSQMPELGHLNRGQAAALAGLAPWTRQSGPWEGQRHIGGGRAVVRRALYMSAVALARQTGSTLGKFYARLRAAGKPAKVALTAVMRKLLLQMNQVLKYHLPEPA

SEQ ID NO: 464929 - protein, 350 aa, unidentified
MIIVGCDFHPKWQQVAVFDAETGEIGEHKLMNGDGEAERFYRSLPAPALVGVEACGNSQWFVDLLERLGHEVWIGDAAQIRASYVRRQKTDRRDAAHILRLLVEKRFPRLWVPSAEERDLRQLLIHRHRLVEIRTRIKNGLQHLALNRGMQKQHRLWTLKGMDAFKNLPLKGWSGKRRGDLLHLLEELNVQVDALDAAVAEAAANDRRARLLMTQPGVGPITALAFAVTIGDVGRFATSGQVASYVGLIPREHSSGGKQRLGAISKQGNRFLRQLLVEAVQTTNRLDEGFRREYQARCHKKPKGVAKVAAARKLTVRLYWMLKTQTGYPEIAHIESSSPVPMAGASMPGI

SEQ ID NO: 464930 - protein, 370 aa, unidentified
MKSIIYVGMDVHKASFTLSCFSVTTQETFATVKISPDAKAIKKYLDGVSLSRSEECEFVCGYEAGCLGYTLYHQLTAMNIRCVIMAPTTILRNSKRVKTDRIDVENLARYLAYGGYKSVYIPTAQDEAVRDYLRMRDDHKLMLKKIKQQINAFCLKHNKIYPGNKSKWTQAHVKWLNALEFDGYLQDAFNEYMITYRELTDKVERLESQIEQLAELEEYRDKVKKLICIKGIKTHTALSLIVETGDFSRFQSAERYASYIGLVPGEHSSSEDQNRLGITKAGNRHMRMLLIEAAQCYSRGVPAKKSKNLKSRQKGASPEVIAYADKASIRLRRKYIRMELVNKKKANVAKTAVARELACFIWGMMTDNIA

SEQ ID NO: 464931 - protein, 482 aa, unidentified
MKKKNIYVNQSQELLTLFEEAGNSAKIMCVPIDYAKKDHVVMFCNGHGDILRKPFSVKNNPEGVKYITEQVSRSCRHHKINQNHVFFGGEDVGYYAENFASTLRSGGWLVAGVNAHDAKKQRANLQASTDRLDLMGIATMLLNRRANCSPAQSGIYRNLRTLVRHRRRLVVMTTEVRNRIHAIVDRLFPGFLDERKSGITPFSKSSLYLMENRFSASQIRRRRRSTLIEALRGLGTPKPDCAVAKLEEYAQQVLKTPDEYVSTLQLSMAQHVKHYRCLQENIEQLERETALWLAQTQGAFLTSVRGIGIVLAAGVTAEIGDPFEQKPLNNLVSYSGIIPRVIQTGGPEGEIYTGKVAKRSNRILKDYVVQSASHLGLHGPEDLMIDHKRRDAAGQHADFGIARRYLRMAMCLMRTSQVYLPPRLRKPGIKPEERAGYYLMTWPYLRDKWQKLGALEAAFSEDRPLGRWRNMVQEFYKIKLTL

SEQ ID NO: 464932 - protein, 368 aa, unidentified
MKKNSTCLKSPKQSKTRERSITIGMDLGDKTSHYCVLDSKGEMVREGTVATTKKGMKQRFGSLPKCRIAIEVGTHSPWVSRLLSSFGHEVIVANARQVKLISASSRKNDRLDAQTLARLARLDPELLRPIRHRGEKAQGDLLQVRVRAALVDTRTSLVNTARGLAKAMGERLAYCDADQMGVEKMQGLPAVLVEALRPLLETVESLTQQIQASDQKLEQLAGRDYPETELLRQVSGVGSLISLTFVLTLEDPNRFRKSRDVGCYIGLRPKRSESGESRPQLGISKEGDVYLRKLLVQGAHCILSQKSPDTDLKRWGLKLAGKGNKNAKKRALVAVARKLAILLHHLWVNGEVYEPLRNSRLLEQKAVA

SEQ ID NO: 464933 - protein, 375 aa, unidentified
MTTHQRTTRYVAGIDLHKRPLVMTIMDHDGTVLYHGSTQRRKQAWLAKTLAPYGTDITVCVESTYNWYWVRDWCVARGIPFALGHAYYLSKLSASKHKDDDCDSRSVAHRMRLSDVPVAYALPKDIIAVRDLCRRRLKYVRMRAGVVNHMQCVHDQYLLEERHEELLNGPEHEIYQPVWDSLDADQQVSKYLEDLTRELEEKIARYTRRLQNRAWQLLMRIRGVGAVLAMTLLLEIGELKRFKNVQAFSSYARVVNARHDSSGKSAGRGNDRNGNPYLCYAFHELVETSRRYVPEIARVFNALKRRRGLRHAHRVLAHRWAQVIYFMLNHETEFSLEKFVKPYRGCVSMARHDIGLDAPAVREPLRTIGRQPASA

SEQ ID NO: 464934 - protein, 375 aa, unidentified
METIYIGVDFHARQQTICYLTTETGEFVTHELKHQDKDEVRSFYAQFGGRVIVGLEASGYSPWFEQLLEDLGHEVWLGDATEIRRRARWRQKNDRRDAELILDLLVHDEFPRLHRPSLESREILRMLRYRHKLVKMRTIIKNSLQALALQSGLSRRTKLFTKAGQQELRAAPMSPVMKQQQEQWLELLLVLNQRIVETTLWLKQQSLNDARIRLLRTHPGIGLLTSLGLVHTLAPVSRFRNQRKVTAYAGLEPMERSSAERKRFLGISKAGSRLLRFLVIEAAHTAVKKDDDLKRFYRRLQERRGRPKAKVAVARKLLVRSFIMLRDEIDYAEFCRRAVAARLARQSSRPSVPDRLIGQPASSESQECVRSESKK

SEQ ID NO: 464935 - protein, 424 aa, unidentified
MLGVGIDWAESFHDVALGRPGEGVISQFRIEHGPAGVQRLVARCLELQPDPAEVRVVLETRHGLLVEALADAGFTVLPVNPDLVARRRGPAKKKDDAEDARICCLLALDAYLDLRKLIPHGQAGTELRAIARDDERAARDERRIGNRLRADLLAVFPAAIDIAAGDLGAAVFLKLLERWPSADALAQASQHDLEAFARQARHGWPARFAARVTEATAASRLPVRPELARAKAGSIRLAATQLLAIRGQRRQWERRMGELLPGAPRTGRDNTPKDPDPGKAFPGGEIYLSMPGLGDRLAARVAGEIGEHFEQFPAPNALQCYAGRAPVTRRSGRSEFTIARRLACNRYLGEAVHQWAFCSLSQSAWAREFYDTKIAAGNNHHSALRKLGNRWLEVLWHCLHKGVVYDEATHTANRAKALSLKPAA

SEQ ID NO: 464936 - protein, 412 aa, unidentified
MYYVGIDIAKITNVTSIINDKDVFIKKSFKFNNDEKGFKEFTNLLSSIDKNIDNFIIAMEATGLLFENLYLYLKGKGYNVILLNPYQTSKFREMDTMKKVKNDNIDAVMIASLIKSGRYSKAYVSEEVYASLRALHRHRASLEEELKKHKRQVSSLLAVVFPEFEQVVKNPFSVSGLALLEKYPTAKHYTYTSPQRILKVFRNIKGNNFNIQKAEKLLELAKSSIYSGNAYDERAFVIQSHIRAIKFLQKEIESIDNEMLKLFNASPSFTKEEEQEVIDIIDNLRSIPGVSDKTLFTIMGECGNLDRFKNINAFIGYLGLYPTLEQSGNKTSYGKLAKRGSKLAKKALYQAAVAAVRHNDEMKKLYCDKVSQGKAKKEALVIVARKLAAIILAIYKNNTPYNSKRVFNQNTA

SEQ ID NO: 464937 - protein, 304 aa, unidentified
MKNINLNVACAGMDVHYKFSNVTFRDKAGRVVRRERLRHPRRAELREHLNHWPKGVSIVLEASFGWGWLSDLLVEAGLEPQLSNCYKLEQMRKARGWVKTNKKDADMLSLLPFETTDWWKVWRAPVEVRNRREQMRFRSDLVGLQTMVKNRIHAIFHRQGIFHEFSDLFGGKGRKFLTELCLENPTELSSEALLALRGQVMLLDHLRRQLADVARTLRKQLVKTPLIKRLETIDGIGLILAHVLTAEIGRIERFRSHKALASYSLLAPRSDDTGQDDPSRSPLGRHLGTHGNRTLKWAFIEAQW

SEQ ID NO: 464938 - protein, 379 aa, unidentified
MNKRIIFIGLDVHKETVSVAIAEHNKEPRTLGKITNKPEAIYKVMRKLGPFKRLKVCYEAGPCGYVIYRQLSKLGIECLVVAPSMIPKKPGVRVKTDSKDATMLARLLRSNDLAPIWVPDENHEALRDLSRAVEAAQGDLVRARHRVRKLLLRQGVRKPEGMSSWTYRHRVWLHSVKLPRANQQVVLREMMLTLEQAQERRQRLEAELEHSVEFSPLADLIRAWQCLRGIKVVSATRLAAELGDIRRFTNPSQLMGYVGLVPSERSSGSRERRGSVTKTGNAHVRHIMVQAAWHSRHPPSLSEDLRRRQRGQPERVKAIAWKAQDRLHRRFRRLVGRGKPRQKAVVAVAREMLGFVWAIAQEIPVQEYNQQPDSFSQAA

SEQ ID NO: 464939 - protein, 353 aa, unidentified
MRRPKEKLIAGMDLHSNNVVIGVIDQDGKRVAQRKVECDLKQVTQFLKPLKSRLQSMAVESTFNWYWLVDGLRAADYPVDLANPAKIEQYSGMKHADDQHDAFFLAELQRLNILPKAHVYDPALRPVRDLLRRRMNLVHQRTSLLLSFKSLYTRTTGQKLDLREVKKLEPKEAPKLYEHPANQLIAQVQAEHIQGLEKSIGRIEKGVLASAREIPFYEKLVTIPGIGRILGMTITMEVGDIERFPTDGDFASYCRMVDARRLSNGKCKGDNNQKCGNKYLAWAFVEAANYARRFDEHCRRWYDRKAAKTSHVIATKALGCKLAKAAWHVMAGNCDYDQSRMFPELANKTMKTK

SEQ ID NO: 464940 - protein, 371 aa, unidentified
MKKDTTTKASASGRKKLRNGKLTIGIDLGDRSSRYCILDEQGEVLKEGSLATTQNGFNQILGALPHSRVALEAGTHSPWVSRHLKKLGHTVIVANPRRVRLIAQSRNKNDQLDAETLARLAHADPQLLYPIQHRSEQAQTDLAMIRVRAGLVESRTALINTARGLTKSFGERLPKCDAGNVHAELAKPLPDGVRQAVEPLLEQVGELTERIKNYDTEIEKIAAERYPEVQLLTPVWGLGTLSALTYILTIDDPHRFKQSRDVGSFLGLRPGRRESGQMRRELGITKEGDVYLRKLLVQCALVILSRGGRDSDLRRWGLKLAGRGVKNAKKRARVAVARKLAVLLHHLWVNGVVYEPLYNSSKQKQEQKAAA

SEQ ID NO: 464941 - protein, 392 aa, unidentified
MVTPTRIGAGCRGRPLTQKRKDTATVTIVAHTHPFVIGVDTHARNHALSILGMPHGEVIDDGEFSTTSAGIARAIEWVGRRTGGDLGVLWVIECSATYGAQLARSVTAAGYQVVEAARMSAADNRGVGKSDPMDARRIAASVLALRADQLRYLRKDDGPRAGLRVLLAARDHMTSERTATINALIALLRILDLGIDARRPLTGKQVIEVSRWRSRAEAVEVGIARAEAVRLARRVVDLDDELAQNIRTTTVLLRKSAARVLLDKPGIGPVTAAVALAAWSHDGRLHSEAAFASLAGVSPIPASSGNTVRHRLNRGGDRRLNKALHMAVIVRMTHDAETRAYVDRRLAEGLTKREIRRILKRYLARQIHRALTAASRADHLPINSTPATSFPT

SEQ ID NO: 464942 - protein, 389 aa, unidentified
MQEQNNRSEFTIGLDLGERRHRFCVLNGKGEVVEEDTLGNDRASLGRLSARYRGALAVMEAGAHSPWISRYLEGLGWEVIVSNPRKVRAIYQHERKSDRRDALMLARIGRMDRALLYPVRHGSEEAQEDLLRIKLRDSLVRARVALINSVRFSLKSLGYAVGNPSSERFHKVAMETLPAVVREMITPSVQALAELSARIAVLEREISVLARTKYPQTLWLQQVPGVGAITALYFVLKIEDPKRFKKVRDVGAYTGLCPRRDQSGGSDPQLRISKRGDAYLRRLLVSAAQYILGPFGPQSALREYGLMLAADGTTRAKKRAVVAVARKLCVLLLSLWKNQTPYQALPCLRQKLEDKRITERLRCIAWKRFLLHDFDNQMATFHHFALNWI

SEQ ID NO: 464943 - protein, 343 aa, unidentified
MNQIIRIGMDTSKHFFQLHGVDAAERPVLRRKLRRNEVLAFFAKLPPTVIGMEACGAAHYWARELRKLGHEVKLMAPQHVKAYVKRNKNDGRDAEALCEAMSRPTMQFVPVKTEEQQAALMLAGVRQQLIARRTQLSNAIRGYAAEFGLTAAKGLDKIEPLLARIALDESLPTLARELLAMQGHDYARLQAELKAIEARLMAWHRANADSRRLAQIPGIGLIGATTLVMKTPDPRAFASGRHFAAWLGLTPKDHSTAGKTRLGKITRAGDEMLRSLLVAGATAVIQQVRRGRGRPSPWLVALLARKPPKLAAVALANKIARIAWKLMTTGESYDGARMHGAAA

SEQ ID NO: 464944 - protein, 330 aa, unidentified
MKVAGIDVAHKTLGVVLRSEEKAGKAQEFANTASGHLALVKVLKAARVERVCLEATGSYHLDLALALDTAGLALMVVNPKAAKRFTEALLTRTKTDAVDAAVLAQFALRMPFEPWKRPDAQALALRACARRLAALNRAKTEAKNQLHALIQTQTTPEVVLADVRLSIRQCEDQIEDLRTWAEGLIQTDAGLKEVFDLLISVKGIAAASAIQLMGEILVLPADMRAKQWVALAGLDPRQSISGTSVHKKPRLSKAGNRYLRLALFMPALSAARHDRHVNGYYRHLIEGRGLKKIQAVCAVMRKLLHAIHGMLKSRQPFDGRRFYTLAATPT

SEQ ID NO: 464945 - protein, 347 aa, unidentified
MKFYNNTHPYYCGIDLHARSLYVCIIDHAGETCVHKEISADPDKLAKLLEPYLGQVVVGVECMHCWYWVADFCEELGVDFILGHALYMKAIHGGKAKNDRIDSFKIAKLIKGGNFPVAYVYPKEMRATRDLLRRRMKIVRHGADLKAHVANTTSQYNLPPNKVNLKNVSAREHIRSTFPDPVVQRNMDLNMAILECYAKELSKLEWFLEQQTRQHNPVHLHLLRSVSGIGRILALTIIYEIGDIARFESVQSFASYSRLVKCKAESAGKNYGTQGNKIGNAHLKWAFSEAAVLYLRGNEKAQHYLQQLQKRMSKAKALSALAHKLGRCVYFMLKNETVFDERKFLTG

SEQ ID NO: 464946 - protein, 415 aa, unidentified
MSCPREAMGRAAEVVAPSSSIRTDGDCPVAQVNDLSRSLTAFDPISTLVVVVEMSKASWLVSGAVPGVERQPLKKLEPDATALLRLIERWRNEAVRAGRPISRIALAYEAGRDGFWLARWLIARGIEAHVVHSASVAVSRERKRAKTDRLDAAMLMRVFLGWLRGERGHCGMVAIPTMEEEDARRPSRERESLVNERSRITNRMKSALARLGVRGFKPHLRKAPERLAGLRTAEGTGLPANIIEEFRRDMARLALVREQISSIEKTRAERLERAPDTGPHAMVRLLARVIGIGIETADMLVREILSRKLRDRRAVARYAGLTGSPDESGLKRREKGLAKAGNARVRRGLIQLAWRFLMFQKDSALARWYRMRTEGPSGARKTTMIVALARKLLIALWRLVTTGEVPDGVELRPAA

SEQ ID NO: 464947 - protein, 468 aa, unidentified
MSRRTGRSHKRKSKRRKNSLPPGLEKVNLNAAGIDVASGMHAVAVPAGSSPDGEDVKEFEAFTRDLYAIASWMKECRVTTVAMESTGVYWIPLYEILESLDFDVNLVDPRQLKRAPGRKTDILDCQWIQQLHTFGLLSGAFRPDEQICTLRGYVRQRAMLVEYASHHVQHMHKALEQMNIKLKRVITEVTGTTGMRIIRSILAGERDPKKLAAMRHGRCKNDQDTIAKSLEGTWRQEHLFALRQAVDLYDSFQEMIKQCDKAIEEYFATLECADPRHEPCKRTGTTRRRNEPHFDAQGVLHQFAGVDLTRIEAIDGNTALKIISEIGTDVSAWPSVKHFSSWLCLCPGNNKSGGRQRSGRTTPSANRVASALRLAARSQWNSNSAMGAFLRRLAARKGMPKAITATAHKIARMVYFMLKYGTEYVVKSQEEYERQHKERQLKNLKRRARELGFDLAQRPDRNQLTCTV

SEQ ID NO: 464948 - protein, 318 aa, unidentified
MLIRYIDIAKRNFVIAVSSLSKTKTETNNPKGIAHTIEYLKKHKVALVVTESTGGLEIPAAKAIRRAGIAVIIANPRQTHQFAQSQPLTKTDAKDAKMPAFFAQMTAQKEDSQTMPYQPPTEAEEVLEALVNRRNQSADMRTAEKNRLHQFHETQVGSVKQLIAHFDRLIDELDKQIDDHTHTHFDGKAQVAEQIKGIGSITTATLMAMLPELGRLSHKRIASLAGIAPHPRESGETKFKSRCFGGKSAVRKALYMATVAATRFEPLIRDFYQRLLSEGKPYKVAVTACMRKLLETFAKFLSLPTAETQTQVFVYFRS

SEQ ID NO: 464949 - protein, 416 aa, unidentified
MNAVGIDVSSRKSTVAVLRPLGEVVCLPFDVTHDIAGLASLAEKLKALDGETRVVMEHTGRYYEAVEKALHEAGLFVCAVNPLLIKEYGANSLRRVKTDKADAVKIARYALDNWADLRDFTPMDAIRYDLKTLNRQFQLASKQRTASANNLIALLEQSFPGIRKCFDSPVRSDGTQKWVDFAHSFWHVDCVRKQPFAAFCERYRKWCKRHAYLFKLSNAEEVYALAKRAVVLTPKSKVVKVLVQEAANQLISISRSVEVYRAEMDRLAAMLPEYPVVMAMYGVGKSYGPQLMAEIGDVRRFERKQALVAFAGIDPMPNQSGDKNVRSNKSSKRGSPYLRKTLFNVIRTYLQCAPQDEPVFQFLNRKRAEGKPFYVYMLAAANKFLRRYYAKLRDYFASLDTLQPVDPIPTILKATL

SEQ ID NO: 464950 - protein, 368 aa, unidentified
MRARHRRLVRYFSGLDAHLRYVTVAVLDRLGGVALETTVPTREPDRLLAVLAPFRPLEVVVETCPFWPWLYDLLVPAGIGFHLAHAKALRAIATAPQKSDAVDARLLARMLLSGLIPEAYPRSADQRELLRLLRHRTALVRFRTRLAGRIHSQLHQQRLSLPREKLLRRATRAWLEATAWPRLTVEQRAIVTTHVELIDHLTPLIRALERRIAAAAAGDATAPLLATIPGIGPYRSLLLAAELVPISRFPRAEHLVSYAGLAPVTRSSGGHTHHGSIPPAANRWVRGALVSAIPSHVRYAPTSPVTVAYEQLKARLGWRVARVAAARKLARVVYVMLTRRTPWHGVPAAGDVRDEVQNSHVAPTTSFC

SEQ ID NO: 464951 - protein, 412 aa, unidentified
MEVLHPRCAGIDVSKKDAKVCVRIQGSTRRKTSSTVTTWGSMSNQILALKDHLLAAKVTMVVMESTSDYWRPFYYLLEDDFEVMLVNARDVRSLPGRKTDVSDAAWLADLAAHGLVRASFVPPEPIRRLRDLTRTRTHITRERTREIQRLEKLLESARIKLSVVASDITGVSGRLMLQALIDSQGTADPAVMADLAKRRMRSKIPVLTEALNGHFTEHHAFMTRLFLDRIDAHTKDIELLSQRIDELMTPFLPARALLESIPGFSQVLAEIFIAETGGDMTQFPTAAHLASWAGVSPGSNESAGRVKSTKTRPGNRYLKGALGVAALNQARSKRTYFSAKFRHLAPTRGPMKAIVAVERAMLVAAWHMLTNGDSYRDPGADYYTRRDPARTKARAVKQLEALGYTVTIQQAG

SEQ ID NO: 464952 - protein, 334 aa, unidentified
MNCIGIDVGHKELVVVVSVKGKSRKAKTFKNTATGFNMIIRLLSKLKGDVKVCLEATGVYHFDLSVALSKAENIEIMVINPKVSNNFAKVLMKRSKTDAVDAEILAIYCEKMPFEAWERPAIEKITLRAFSRRIAGLNKMKAQTKNQLHALVSTDETPALVIQQINELIDVLEKQIETQRKAAVKLIQAHSELKESFLIVTSIKGIAEASCIQILAELMILPPDMSAKQWVAHAGLDPRAFESGTSVSKKPRISKAGNKYIRQAIYMPALVATRFELHIKGYYLHLINDNGLKKMQALCAVMRKLLHAIHGMLKANKNFDGERFYQFPAEATKS

SEQ ID NO: 464953 - protein, 448 aa, unidentified
MSKIKTKNDQVKRISQLVVINPTAAGIDVSDNEMMVAYPINSEQLEVRVFGCFTRDLYSIVQTLKSNGITTVAMESTGVYWVSLFLLLQEYGFEVYLVNAKHVKNVTGRKDDESDAEWIQKLHSCGLLTASFQPDNMTRTLRSIVRHRKNLVQTSSTYLNRMQKALELMNIKLHTVISDIDGKTGVLIIESILAGERNPEVLAGLRDKRIKASKEDIIKSLEGYYTTEHLFELKQCYQLYCTHRKMIDECDKEIENQLGVQIASRDEGVLPDIPNAKRKASGKNRVSFNLTSYLKEILGVDVTEVVGISEISGLTILAEVGKDMSKWKTEHHFTSWLGLAPNTKISGGKVISSKLKKKKHHAGQAFRIAANSLYKSQSPLGDHYRMLKAKVGAAKAVVATARKLAIIFYKMVSNQQAYNPKVLEEYQQKYKQKRINQLKRKLELLEAA

SEQ ID NO: 464954 - protein, 422 aa, unidentified
MLQETQDREEIIERVAALDIGKAELACCVRVPHEGRRGRRLQEVQTYSTMTRSLLGMSDRLASLGVTRVVMEATSDYWKPVFYVLEAAGFETWLVNARDVKHLPGRPKTDKLDCIWLCKVAERQMLRPSFVPPPPIRQLRDVSRYRADLVAARTAEKQRAEKLLEDACIKLSVVATDIFGVSGRAMMAALIAGQRDPKVLAQLARARMRAKITALEEAFTGHFTDHHAFLLGKMLARVDQISADIADLDAKIEELIAPFVSAVARLDEIPGIGSVAAAAIIAEIGMDMSRFPTPGHLASWAKFAPGVKESAGKKKGAGSTGHGDPYLARILGEAAVGASKTNTFLGERYRRIARRRGKKKAIVAVGRSILVIIWHLLSDPQAHYADLGPGFYDSRISNSRKMRNHIGQLEALGYKVTLEPAA

SEQ ID NO: 464955 - protein, 350 aa, unidentified
MDIVGGFDVHRKQITFDYIEMDSGEVHRGKIRPATRQSLREWLDEFTQRFSGKQIAIAVEATTGWRYVVEEIKRAGIEPHLAEPAETKSLQGRKKRAKTDRLDAGHLRDLMVIDRLPESWIPPDHIQEIRTLMRLRHSLIEERTTHKQRIHAQLFHNGYPRQSNLDSIEGRTHLEDIELPAAARKVVDLSLAMIEHINGELEPVEKELRAYARSQAGCKALMMSHYGVGELTSVALLSELGDTRRFSSSRKAVRYAGMDITVHSSDDKRAAGKLSRQGPPTLRWAAFEVAKRAWRKSSPDHKYYLQNKERIGANRAALSIARKLIRRAHHTLRELGEEAISEPVLTSGSA

SEQ ID NO: 464956 - protein, 438 aa, unidentified
MSNKVIFNLDELFISVGIDVGADFSWMSIALPNQQFVGKPYKILHNSIDSLTTAVSKIKEAEELYSLESHIFLESTGIYHYPLFCYLRDKGFNCSVINPIITKNSTNINIRKVHNDRFDSKKAALVGLKPDLKVSLMPSDLALNCRNLCREYYDLMDNRSAYVNKLQGELRMAFPQYLGIFSKVTINTSLTLLETYTSPSAFLKADKQEIIDIIKSTARFGLTYAQNKYNAIIQAATDANQFGYIIDSNIKRIRLYISFIRKYDEEINNILESLHELVDANEDADFVKQIHLIETFKGAGFLSAVSIMGEIGDFSAFSKPKQLFAYFGLDPAVKQSGKFEGTKVQMSKRGSAIARRVIHTLTLQSISISRNGEAKNPVLREYYLKKCDSKPKLVAMGAVSHKVCNMIFAILRDNKPFKIIAPQEHIKQYNAAKCDIAA

SEQ ID NO: 464957 - protein, 405 aa, unidentified
MKIGMTSTDTSTVRQHVTLFASVEMGSTNWLLTSRAIGESKVRRARVSTNDWQAVVAMLQRWQKARGAERVVCCYEAGREGFWPYRALRGAGIEIAILDPASIAVNQRGRRLKTDRLDGEIELDAIEALSLGRHTAARLVVVASEEQEDARQVGRTRSRLVKERTGLIAYIKSALARVGADLPAANQSGWQEKLAQARQWNGERLPRNLLRDIELAHERLMLICRQIAALEEEQRVAIVSRDSAGKRRVVKTKQAAQRWDEQASASERRMADQAERLTRLNGIGPVISFTLCGEVYWRDFANRRQVGGYLGLGGTEHSSGAERRELGISKAGNRRARFVLIEAAWLWLEHQPNSPLTSWFHKHAPKGAPARQRRIAIVGLARKLAVVLWRYLSDGVVPEGAVMKA

SEQ ID NO: 464958 - protein, 333 aa, unidentified
MLPPNCGTATPYILRNTVGLDISKLTFDATAIVGNAEYSAKFDNDSKGLDQFSDRLKSLGCQNLHICMEATGSYYEEVADYFAQYYSVYVVNPLKISKYAESRFKRTKTDKQDAKLIAQYCRSAQESELVKRQKPTDEQYRLSRMTAAYAQIKSECAAMKNRHHAAKDEEAAKAYAQIIKAMNEQLEVLKEKIKEQTEKPNCKEGVKRLETIPAIGRMTAAVLFHHLTSSKFETSNKFAAFAGLSPQQKESGTSVRGKGKLTKFGNRKLRAVLFMLTMVAYRIRAFPDFIARLEEKKKPKKVIIAALMRKLAVIAYHVHKKGGDYDPSRYKSA

SEQ ID NO: 464959 - protein, 490 aa, unidentified
MGSQSTVQVAPFVADVTPRLGDTLVFGLDADSTVAVIEHPLLAKGVVLRDAGGTYVLCALDWCTLGNDAYDLFRATIAQAAGTSPSHVVVHTVQQHTAPGVDINAQRRRPEDSIGMALGLLSRTRESERKRKEPSAMVHVGIDLHQKTCFLNALDDQTGEICLDQEVPSERQALLDCLEPLRERGPMRLIIEACGFAGYWWDQLDPLGEAVAVHPKHVKDYRGNKRKNDRRDAAFLVALSQLNRLPCAYLGSTAERDLKDLLRYRVGLVRIQTRLRVRLRNVAQRYGTVLAASDVDSAKARQLWQEWPLRETHRLIVDQLLLVLEEGGRKLSVVDERILAAARPDRRVQLLDTLPGLDYFGALLVAVEIGDWQRFHSGDAVACFAGLVPRESASGGHIQRGRITKDGSPYLRWIMVQAALHADQSPRLQRLQERVAKRRRPMQARVAVAREMLVIAWHMLRADQPYEERAPRASGGRPTSSGKPESPLTP

SEQ ID NO: 464960 - protein, 355 aa, unidentified
MSQEKYIGLDVHQASISAAVMDPSGNVLMECLLETKAATILEFIQGLRGTLSLTFEEGTAAAWLHDLLKPHVSRLVVCDPRKAALLKEGNKNDRVDARKLAELLRTNQLKAVYHGEHGIRTLKELGRSYLTVSKEITRTMNRIKSLYRSWAIPCSGTTVYAPRDRREGLAKIMEPGVGVRAQHLYQQLDNLQPLRLEARRELLLESHKHAAVTLLRQIPSMGPIRAALLVALLQTPHRFRSKRQLWAYSGFAVETHDSGEYRWVRGKLQRNRERITVRGLNDNHNHDLKNLFKGAALSASARPGPLQDFYLARVAQGMRPTMARLTLARKIATITLTMWKKGANFDPQQLHRQAV

SEQ ID NO: 464961 - protein, 337 aa, unidentified
MDHYVGIDLHSTNNYIAIIDNDNKRVFKKKTKNDLSLVVEALKPYQEQIKGIVVESTYNWYWLVDGLIEEGYTIHLANPSAIKQYEGLKYSDDVTDAFHLANLLRLGILRTGYIYPKEERPVRDLLRKRLQLVQQRTLQILSFQNLIARNLGMGMNGNAVKKLSEDDVEELFRDEHLVIAGKASIATILFLAEKIKEIEKTIHRVAKLKDEYTLLMTVPGIHKILALTIMYETGPIERFKKVGNYASYCRCVGSKRLSNEKVKGKGNRKNGNKHLSWAYVEAAHHALRYEYVKRYYQRKMVKTNTVVARKTIAHKLARACYYIIRDQTRFDPARVFV

SEQ ID NO: 464962 - protein, 523 aa, unidentified
MSATRSRKRRKPRFDSFIQKPRGIVHPRVQRVGPEHFGVVSVDCAKARFKWMFCDFYGNVLIPPTEVAHNRVELDAALAQLRQARADHDIQDLVVAVERTGRYHHVPRKAFAQECSDVRTVHPFTTKQFRQPSDPGVKTDDTDLAAIHRAAVNGFALVETAGDPLYRELQLSIRHRRDLVHKSTAVRCQLREHLDAAFPGYAACFTTFWQSDVAMLLVRHFDAAEALLQAGPAGLRDFLRQRRIQFQQRTLETILVWAAQAAPADTAAARHRRIALALDDDRLRKTQEIQAAERDIAAQLVRTPYIILLSFPGINVVSAADFAGEAGPISNYATAKTLTGRAGLFPSRYQSDRVDRADGPLVRCANRSLRAVILGIADNLINCNRHFGLLAEIWRAKGHDPRLRHVRVGCRFCRIAFHMVAGRRVFKHPSMQQRHYILDKLSAFHRDHDTPMHQTMTDLLAAIEQLPRSAYAEEAEPLRAELDRIEAGRRRGPQLLGDILPIVLARLGVGRVQSSKSGESDPT

SEQ ID NO: 464963 - protein, 388 aa, unidentified
MNRIIKIGMDVHSTNYTLCAMEPVLDGEDRIFANIKVTPDYKNVIQFISKLKNKLGASDTYSIECGYEAGCLGYSLYHQLTDAGIKCTILAPTTMLTPLGKRIKTDKRDALMIAQCLSYGGYHAVHVPDEKDDAIKEYLRMRDDHKLVLKKIKQQINAFCLRHGHFYDGNKWTIKHREWLKTLKLSDLYRETLDEYMTTCEEQESKIERLDRRIEELASDSAYKEKVKKLGCFLGIKTHTALSLIVETGDFKRFAKGNTYAAFLGLAPGESSSGDNVNRTGISKAGNSHLRTLLIEGARGICKGKIGHKSKDLRLRQAGNSAEVIAYADKANVRLRSRYYRFMRHEKKKNVAVAAVARELACFVWGMMTDNISIVPESFLYTLKAGCD

SEQ ID NO: 464964 - protein, 355 aa, unidentified
MSQEKYIGMDVHQATISAAVMDVEGKLLMECVLETKASTIVGFIEGLRGSLYLTFEEGTSAAWLHDLLQPHVSRLVVCDPRKAALLKDGNKSDRIDARKLAELLRTNQLKAVYHGEHGMRSLKELGRSYLTITQDTTRVMNRIKALYRSWAIPCSGTTVYAARHRQAWLAKIVEPGVRVRAEHLYQQLDSLQPLRLEARRQLLRESHKHAAVKLLRQIPSIGPIRAALLVALLQTPHRFRTKRQLWAYSGFAVETHDSGEYRYVRGKLQRNRERITVRGLNNNHNKDLKSLFKSAAISASTRPGPLRDFYIARVESGMRPTMARLTLARKIASITLTLWKKGASFDPEQLQRQAA

SEQ ID NO: 464965 - protein, 482 aa, unidentified
MKKRNIYQNQSQELLSLFGSAGSSAKVMCVPMDYAKRDHLVMFCNGHGDILRKPFSVKNSPEGIEYLIDQMTRSCRRCGIKKEHVFLGGEDANSFAENFINTLRVKGWLVAGVNAHDAKKQRMNLQASTDRIDLMGIATMLLNCRANCCPAASGIYRNLRSLVRHRRKLVVMLTEVKNRAHGIVDRLFPGFLDENKSGIVAFTQSSLFLMENRFSPKQIRRRRRQKLIEILKRFGTSKAEETACKLQQYAATVLHTPDEYIDTLQISLAQHVKHIRCLKESIVLLEKEIAVNLAQTQGAFLTSVRGIGIVLAAGVTAEIGDPNEQKPLNNLVSYSGIIPRVKQTGGLEGKTYTGSVAKRCNRILKDYVVKSGFHLGLHGPEELKIDYKRRDASGQHADFGIGRRYLRMAMSLMRTSQVYLPPRLRKADSTLEERAGYYLMIWPYLREKWKKYGVLEAAFTKDRPLGMWRQIVQELYDIKLKL

SEQ ID NO: 464966 - protein, 357 aa, unidentified
MKYIGCDFHPSFQVIAMLDKETGELVERRLLHAEEARVFYQQLRGPVVVGIETSGNTHWFESLLARCGHQMWIGDAAAIARQEGRKQKHDRRAAALILKLMVENRFPQIWVPTVAERDLRQLLMHRHHLVRMRTRVKNQLQHIALNQGVQKKYKLWTQAGLKVLRELELEPWTRLRRDTLLEMLEELEQKIQPLERAVEQEAEARPAARLLATHPGVGPVIALATVLTMGEVKRFENSRSWVSYLGLNPSERSSGEKRRLGAISKQGSPFLRFLLVQGAASAVRGDKNLARVYARLKAKKHHGVAKVAVARKLAVRLYWMARTQKPYPEVVRMQGSQSHPVAEVMAVRLSRPPASRP

SEQ ID NO: 464967 - protein, 343 aa, unidentified
MAYYVGLDVSLKTTAICVVDRDQNVVWQGSAETHPEMILNALDRWMGSVMRIGLETGSSSPWLARALKARNLPVIVMDARRAASALKARPVKTDRADARALAEMLQSGWYTEVFVKSEESHRIKALLSARDQLVRNKRTFFGQIRGMLRPFGIRLPARQGTRRFDEAARAACRHDDLLYACVNALLEALGAIEVQIAALDKRVRAMVQTSKACWYLTSVPCVGPITALAFAAAIEDPGRLRRSRDVGAYLGLTPRRWQSGEKDIVGAISKQGDAMARHCLYEAANCLLTTWGGRSALKSWGLRLVKRVGAKKARVAVARKLACLLLRLWKAESHYDEDQVRTA

SEQ ID NO: 464968 - protein, 347 aa, unidentified
MEQMQLFAGLDMHTESITGTIKDEQGNSVRVLKVETSKEGVKKLFERLQKKGITAVFEASRNWPRYAELIQPYCNKVIMAHPLKVRAIASARIKTDVIDSNTLSDLLRADLIPESFMPPLDIVELREILRYRAGLSRMRGQLKTKSKNILSREGKKCEFDEVTGKRARLWLNNLELTGLNRKELDYTVALIDNLSAEIAKFDKVIEKLQYKYPEVDILKSIIGISTFSGMMILAEIADFSRFSSPNKLACYAGLVPSTYQSSQTQYSGRITKQGNSYLRWILTQCVHASIKSRYSHKLKTFYLRIQRKKGKQKAVVATARKMLTTIWHLLNKNEYYAYRDIPSKNGL

SEQ ID NO: 464969 - protein, 367 aa, unidentified
MKKVSTAEAKQSRNISRQRLTIGLDLGDRNSWYCVLDEAGGIQLEQRVRTTAKALQEVFGAMPRSRIALEIGTHSPWISRLLSELGHEVIVANARKVRLIGESRKKDDRLDAQTLARLARIDPELLYPVKHRSAQAQADLMMIRARASLVRARTGLVNAARGLAKSYGERLRGCNVRNLDPEKAEGLSPELQRALEPLLATIEELSERIVEYNDRIEALAQTRYRQVELLKQIKGVGTLIALTFLLTLEDPHRFRKSRDVGGYLGLQPGRRKSGESEPQLHISKEGDPYLRTLLVQGAQHILGPFGIDCDLRRWGLKLAERGGGNGKKRAIVATARKLAVLLHHLWVSGEVYEPLHNSSRLTVTAAA

SEQ ID NO: 464970 - protein, 374 aa, unidentified
MADYSEVFVGIDTSKLRNAVAIAEGGRNGEVRYLGEIANTEAATSKLVKKLAAQHRRLTFCYEAGPTGYGLHRLIKTLGHECVVVAPSLIPKKPGDRVKTNRRDALNLAKLLRAGELTAVWVPDARHEAMRDLVRAREAAVDDLKSKRQQVLSLLLRLGRHFTGKRTWTRAHMNWLVSQKLAHREQRIAFEEMLLAVRQADERVIRLERAIAAAVPDWSLAGVVTALMAVRGLDLISATIFLAEIGDLSRFASPRQLMAYLGLVPGEESTGDRVWRGGITKAGNHRARRILVECSWSYRHPPRVGKKKLAKVEAAPPAVQEIAWKAQARLTARYRALARRGKRPTLVVTAIARELSGFIWAVSRAVGAPAAPTR

SEQ ID NO: 464971 - protein, 374 aa, unidentified
MSANGITFVGMDAHKKAINVAMLLPGQHQPVEWQLANEPAAIRRLAKKLQREAPGEVRCCYEAGPCGYVLQRQLEAGGVICEVVAPSLIPVKPGERIKTDRRDALKLARSLRSDDLTAVHPPTSADEAVRDLSRCREDARKDLLRARHRLDTFLLRRACLYTLTRRRWGQPYRAWLGSLKFEHVADQVTFEDYVRTIEQAEERQRRLDERLAAVAEQDPYREPVGWLRCFRGIDTLTAIAVVAELHDFRRFLSARALMAYLGLVPSEHSSGERERRGAITKAGNIHVRRLLIEAAWHYRHRPHIGVGIRQRRKGQPDKIIAIADRAQERLCHRFRTLTARGKIPNKVVVAVARELVGFVWAALYPATHGQSTHS

SEQ ID NO: 464972 - protein, 374 aa, unidentified
MNEEVYLKVWSLTDFRHHSAQYGMHKAPSDWRLHSMKYTPVGVDIAKHLIQVHFINEHTGEVVDKQLQRQDFLTFFSNRESCLIGMEACGGSQHWARELQKLGHKVRLMQGRFVKAFVMGNKNDVMDARAIWMAVQQPGKAIAVKTEEQQSVLVLHRSRRQLVKFRTAQINALHGTLLEFGETIHKGRSAMDRELPAALERLKTKLPPYLITVLEDQYHRLNELDILIDGLEKQLISVARQNETCKRLMDIPGVGPLIATAAIATMGEASAFKSGREFAAYVGLVPKQTGSGGKVRLLGISKRGDTYLRTLFIHGARAASLRAKEPGTWITELKKRRPAGVAIVAMANKLARTIWAIAAHERQYDKNHVSIRPY

SEQ ID NO: 464973 - protein, 430 aa, unidentified
MTHPKMQYTYVGIDSHKATHTAVFLDCFFEKKGEITFENLPSAFPKFLKKAEKLKLPGTTLLFGLEDVSMYGRLLALFFRDNHQKMKHVNALLVARERKNQNVTEKTDSVDAECAARVLLSKFGELPDATPDDNYFILQSLVMRRDFIVKNNISLKNHLHSLITQHYPNYRNWFPDISKKASLAFLMQYPSPSTLEGVTCEELADFLRKAANNRVGAGLNPTARAQKILDTLQDTTVPHQAIRDRSVQSTLRQIGANASEIEQLDKDIAEFMQNFNCTLTSMSGISGVAAAQLLAIIGDIRRFPTPAKLARYAGVAPVSYASGKSEKQYADKRGNRELNAILYLLAVRMIGSASKKVLNPIVREYYHRKISEGKTKRQALKCVQRRLVSIIWRMLTHNEPYENPPMCDLPSSEDDVIMEETGNAKEQKGD

SEQ ID NO: 464974 - protein, 414 aa, unidentified
MEKNGRIAGIDVHKKMLAVVAAEGSSEGPLRFERAKFGTMESELRRMANWLKERNVGEVVMESTAQYWKPVWQQLEGQCQLYLAQAQSNRGPRGRKRDFVDAERLVRRQMAGELILSFVPDGEQRLWRIMSRTKYQLRRDRVRLHNQLEAFLEEARIKLSGCVSDLLGISSRRILEALSQGESDLQKLAAMVEANLRATPEQLQDALQGAKHLSEPHRQVLGLFLARLKLIEEQIEALNSNLGQSLRQYNDAVVRLAEMPGLGVDSAQQVIAEVGPTAATFPSPQELCSWVGTCPGKEESAEVSKSNRSPKGNRMMRRLLNQAANAAVKTKGSIFQNLYRRWVPRLGHNKAIWAVANRLCRLVWKILHQGDRYIEYGDRPNPKTVKERAKRMIRELQALGYQVQIVQPAEPLFS

SEQ ID NO: 464975 - protein, 428 aa, unidentified
MVRYIGMDVHREFAQLAVLEDGRLRDEGKIGVTPEALRAWAEGLHSDDQVALEATGNSDAIANLLIPLVGRVVVSNPSKTRAIAEAKVKTDKVDARILAQLLAADFLPPVWLPDERTRSLRRQVMRRAHLVRQRTRIKNQVHAILARNLAPTPPVSDLFGKTGRHWLSRQQLPVDERTTVSALLRQLDFHAGELAIVDKELAREALADPMVARLITIPGVDAIAGISIVAAVGDFTRFDDPNKLVAYVGLNPRVRQSGNSAPVHGRISKAGRAHVRGVLVEAAWSASRAPGPLRAFYQRVKARRGFQKAVVATARKMTVLAWHLVTKDQDYAFARPSLVTHKRRKLELAAGAPSRRGNYGLPGAAYNDKQRRNEEKLAVEQAEHAYQVLVAHWQPKRANTGVTTAVCGPDKMSSGGRGRQQRDATIKP

SEQ ID NO: 464976 - protein, 344 aa, unidentified
MNLGQQMHTLYVGIDVAAASASVALMTPGQPAHSVFTIEQTEQGLTTLIAKLVATGHPVGQVHVAMEATGTYWMRLASRLYQAGFAVSVVNPSQAYHYAQAWLQRAKTDELDALSLARLAYQMQPELWVPDPAVYEELEQRLVERESLLSIRQQLRNQLHALRHRSMVIAAVEARKRALLASIQAQIDTIEREIADLMHQEHALATSAQLLQSIKGIGPISAAWLLVATHNFTDCQSPDQLAAYAGVVPYKHESGTSIRRREQIGHAGHARLRRALYMATLSATRHNPAIKVFYDRLRDKGKPMKVARCAAARKLIHMAWAVVTKQTPYDPHYQSNRQLQLPIA

SEQ ID NO: 464977 - protein, 359 aa, unidentified
MYVAGLDAHLKYVAIAVVDRMGQVALETTVSTKEPERLLGALAPYRPLEAVVETCPFWPWLYDLLVPAGIGFHLAHAKQLRAIAVAPQKSDAVDARLLARMLLSGLIPEAYPRPADQRDLLRLLRHRTAVVRFRTRLVCRIHSQLHQQRLSLPREQLRRRATRAWLQETAWPRLTVEQRAIVTTHLELIDHCTPLIRALERRIAAAATGHATAPLLATIPGIGPYRSLLLAAELAPITRFRRAEHLVSYAGLAPVTRSSGGHTYHGSIPQGANRWVRGALVSAIPSHVRYAPTSPLTVAYAQLKARLGWRVARVATARKLARVGFVMLTRRTPWRGAPAARDVRDEVPNSQVAPTTSFC

SEQ ID NO: 464978 - protein, 386 aa, unidentified
MPQPNDMSRSLATFDHDRTLIAVIEMSQSSWLVAGIVPGIERHPLKKLAVDEEALLRLVQRWQDEAAQAGRKIERIAVAFEAGRDGFWLARWLRARNIEAYVIHPTSVAVSREHRRAKTDRLDTELLKRAFLGWLRGEPDHCSMAAIPTMEEEDAKRPHRERESLVAERTRIVNRMKGCLARLGIRTFKPTLQRATDLLPTLHTPEGTPLPPNALAEMSRDLARLHFVEDQIREIEAARLERLNQAPDERSHAMVRLLARIIGVGIETADMLVREVLSRNLRDRRAVARYGGLTGAPDESGSKRREKGLARAGNARVRRAMIQLAWRFLMFQKESALAQWYRGRTADGRQGTRKSLIVAMARKLLIQLWHFVTNGQALVGVEMRPA

SEQ ID NO: 464979 - protein, 383 aa, unidentified
MSSWRASVKALHPPTQMTNEKLNNSKARVEQVASTKPQTIKLGLDVHADSIMVVRMVDHSAPQPAQKFTPAKFREWVKGQLRLAEAVHSCYEAGPFGYGLHRYLVELGIQNLVVQPVCLDERHTGVNHDKSDAKELALRLDRYVAGNSHALATVRVPPLVEEQKRIASRQREQLKREVRRLAAQGRSLLLTQGYRAKGGWWGARRWAELQVKLPAWLDERLEVFRRLLAVLTVELDAATAVLEAAAPAMRPKGLGGLTYEVIEREVGDWGRFANRRQVASYTGLCGGVSASGQSHHLLSITKHGNVRLRTALVELAWRLVIWQRDCKLVQKWWPLLGQAKATRAARKKAIVAIARQLAVDCWRWRTGRVTPQALGWVMVGPPA

SEQ ID NO: 464980 - protein, 347 aa, unidentified
MVIVGIDAHKRNHTAVAVDASGRKLGQRTTGTTSEDHLALLGWAERFGPQRSWAIEDCRHLSRRLEADLIGAGEVIVRVPTKLMAHVRDAARTYGKSDPIDALAVARAALRETDLPTAQLDGPARTVRLLSDHRDHLIAERTRVINRLRWHLHELGPGNEPPARTLWRPKHLNAITAVLADFDGLVARLARGLIEDCRRLTDQIQALDEELQTTVAQLAPALLDICGCATLTAAKIIGQTADVRRFRSRHAFARHNGTAPLPVWSSNKPRHRLSRTGNRQLNAAIHRIAITQAHYHEPARQLLDRRRGGGKNKAESLRILKRRLSDVVYRALLADADLALSAAPLAA

SEQ ID NO: 464981 - protein, 481 aa, unidentified
MSKATKQLPKSGEKKRKAGKGKRGGRRKGMCLEDRPLLEPNAAGIDIGAREIFVAVPPDRDEHPVRVFSTFTEDLEEMARWLVSCGITTAAMESTGVYWIPPYDMLQQHGIQARVVDAHGMKNVPGRRTDWHECQWIQFLHSVGLLRAAFRPDREVCAVRALMRHRSDMVQMTSRHIQHMHKALTQMNVQIHHVIGDITGLTGLGIVDAIIGGQRDPVELAKLRDPHIKASPETIRKSLQGNWQREHLFTLRQSRQMYQHYQEQISACDEEIEKLLVMFPPWVDPREKPLPPDRKRKQRGRKKKNVNPKTGFDLRTESYKLFGVDLTQVPGLMGMVLTLFSEVGRDMSRWPTARNFASWLGLCPDNDISGGRVLWKGKRKVKNRAGDLFRLAASSLHHEPSPLGAYLRRMKSKMDASAAITATAHKIAIIFYTMVRKQVEYDGTLWAQRDVEREKRFEVKLRKQAQQRGYKLVPIEERPAA

SEQ ID NO: 464982 - protein, 329 aa, unidentified
MENIIIGIDISSKTLDICVKKETDVEYFNIENTQKVIKKFFKRFDKQIIVAMENTGRYNWNLYEVFEDFDFKVYVLNPLHLSKSLGLIRGKNDKIDAYRIALYIEKNEEKTELWKPSKKAIKQLKVLITERNARIKSKRRLLKQQHDYKLMKSIALDKTLLKLNKKLIKNLQEQINILEEHIEVIIKQDNKLKKQAELIKSVPGVGKVICWYMLAKTEGFEKISDPRKMACFSGVVPFDHQSGTSIYRKPKVSFYADKSIKSVLHLGALSAIRLDNDLGVYYRRKVNEGKNKMSVLNAVRNKIIHRIFAVKKSNFLSKSFGYVIEIRLT

SEQ ID NO: 464983 - protein, 343 aa, unidentified
MSTYYYIGLDIHKRTISYCIKAIDGSLIDQGKIEADRKSLDEWAKGLPGPWVGAMEATIFTGWVYDFLKPHAVALKVAHPEMLKAITAAKKKNDRADAEKIADLLRVNLLPECHMLSEEIRDLRRVLRYRNHIVRTAVKMQNKISGLLMEVGVSYSKRRIHGKKYFHEILERVEEIPPSVKELLKLSRSGYEMFRTFQKRLVETLRTNTLIHDRVQRLMTIPGVGELTALTWVLEIGDSGRFTSIRKAVSYCGLCSAQRESAGKEQRGPISKKRNKHLQTMLIEAAKLAPHWNEQLAIVHERELKKGNRNRATLAVARRLVAYMLAVDKKQADFKLPAEMQAA

SEQ ID NO: 464984 - protein, 390 aa, unidentified
MEGKAISVEQEARASTRTNEMDPPLCGSTSMSHNDYTRGETMKPQEASPMKQDISVLGLDIAKRVFHAVGLDAMGKIVLRKPLSRHALMSFIAQLPPVLIGMEACGGAHYWARRFREHGHEVKLMAPQFVKPYVKSNKNDARDAEAIGEAVTRPTMRFVPIKAVDQQDLQALHRVRDRLIGARTALVNEVHGLLHEYGIVLPKGVAKFRQAVVGILEAEKDKRTPLSQEMFWKLVDEFAVLEKQLAYYQEKLETVATTHPECRRLMTIPGIGPLTATALVAAVSDASAFKNGRQFAAWLGLVPRQHSTGGKERLLGISKRGDGYLRKLFVHGARAGVRGVREKTDRRSGWIRGLIARRGFNRTTVAVANKNARIVWALLTSHQDYQPATG

SEQ ID NO: 464985 - protein, 396 aa, unidentified
MNYSSAQIKSAQYRIFGLDVHQKTIVIAESTEKGEPRYVKTIENNEAAVRAFFQPVKDSVELVFTTYEAGGCGNGLHRLLVKMGITNTIAAPSKLPKSPGKKVKNDKVDAINLARLLRYMVLNGELKALHEVYVPEVDDEAIREKTRQRDTFKKQAKSTMNQITSMLRRHGKKYDLTKTKWTKTYRDWLTRVDFSHATINTTFREYLDHLSTLEALVAKCDREINKLVEEWNKAPLVKAFSCFRGFQQLASTCLVAEIGVFNRFETAPQIMSFLGMTCSESSSGESVTLGRITKTGNTRARTLLVEAACAASRKPKPKSAFVRTCPPDLPQEVIDHAYKAQCRLYTKYWRLVNKGKSPNKAKIAVARELIGFIWWVAVMIESKMSIQEEPKMTTAA

SEQ ID NO: 464986 - protein, 485 aa, unidentified
MAKVKLSAFDRLRLGARLNRKERRDVEQRLGATDPGLEIVNRDAAGIDVGNESHYVAVPRGRDAQPVREFGSWTAALVEMAQWLIRCGIRTVVMQSTGVYWIAVHDVLQKHGLEVNLVDARGTKNVPGRKSDVQECQWLMRLHTYGLLRACFLPAPEIHGIRTLWRLRDQHVKDAGRCIQHMQKSLIAMNVQLHNALSDISGTSGQAIIRALLAGQRDPKTLAALRDPRCMASEEEIVHSLQGVWKPDVLFELQQAVDAYDFYRQQMAKCDEQLKQYMALLPARKVETAVSSAELSPATDMSKTSRSGKPRKPKGNQPAFDLEAELERILGVNATTIDGINVMTVQTVLAEVGPDLRAWKTEAHWSSWLNLAPKRDVSGGRVIRHIREHRTNRAGNAFRMAAQTLLHSHSYLGARCRYLRAKLGGLKAVKAMARVLACLYYRLVTKGQRWVDQGIEEFNRRSEQRELAVLQHKAHKHGMQLIPTA

SEQ ID NO: 464987 - protein, 411 aa, unidentified
MEVVYESCCGLDVHAKTVVACLVTKGRKEIRTFATMTDELLQLGDWLSSAGCTHVAIESTGVYWKPVFNILEGLLTVVLVNARHIKAVPGRKTDVRDCEWLADLLRHGLLKASFIPPLEIRELRELIRYRQTVVTEHTAVANRIQKLIESANIKLGQVASEVLGLSGRLMLRALAKGEQDVTKLAELAQGKLKNKKAELRRALAGRFTQVQRWVLAEFLTRVEELEVALTRVEARIGEEVTACADPFVPAAVELLESIPGVGVRTAQTIVAEIGVDMERFPSAKHLASWTGVCPGNHESAGKRKSGQPTQGNKSVRTVLVEAAWAATRAKGTFLQAKYQRLVKRMPKQKALGAIAHRLLVISYHLLSRRVPYAELGSAPRDHQQVERQRRRLVEQLKTLGVTVTIAEAAVA

SEQ ID NO: 464988 - protein, 342 aa, unidentified
MKIIGCDFHPSFQQIAMVDTESGEHREKRLVPTEAAEFYGQLQGPVLVGMEACGNALWFERLLARLGHQLWVGDASKIRSLEVRKQKTDRRDAELLLQLLLDQRFPRIWVPSLEQRDVRQLLLHRHKLVGMRRQVKTQLQHLALNQGVQRKHKLWTVAGRKILEELPLTGWTAQRREELLSLLDDLDQRISKLDQAVMEAGKKDPVAKLLQSHPGVGPITALAYSLTLGEVGRFAHSRQVVSYLGLNPSEHSSGGRQRLGSISKQGNPMLRSLLVEAGQTAARLVPELKRAYQRLKHKKHSAVAKVMVARKLAVRLYWIWKTQQPYAATRMQGSPSHLVAES

SEQ ID NO: 464989 - protein, 410 aa, unidentified
MRIIRKRCLGLDLHKIQITAHLRVHRGSDVEPETIDVQFGTMPEELERMRDWIRWHEVTDVVMESTGVYWMHVYELLEDITRPAVVNASHVKKVPGRKTDVNDAQWLAELHAHGLLRLSFIPPKPIRELRALTRYRTKLVANRTAVKNRTIKLLEMAGIKLSSVVSNAFGKTGRAILDALSEDKIVDLYKVARGTLRKKIPQLQAALRCPLTEAQRQLLQMHLRAYDSLDAQVAEVELQLLARAKPYEAMVEQLDPIPGINPLAAITLLAETGMDMTVYRDEHHLSALAGLAPGNAISSDKRRRIGVRKGNRYLKRICVQIAWAASRKKDSFQRLRFLRLQSRIGRNKAIVAVARQILVLVFHVLSGERPYQDLGPNFYDARDKQRAVERYTKRLTALGFVVQLQPKTED

SEQ ID NO: 464990 - protein, 462 aa, unidentified
MTVPTTKGRRKRATPVPTSLPAIRSLVAGLDVGSSEHWVCGPARADGQPNVRCFGTTTDQLQELADWLADHRVESVAMESTSVYWIPIWELLEARGIEALLVNARQLHNVPGRKTDVSDCQWLQLLHSCGLLRGSFRPGEAITRLRALQRQLANLVAERTRCVQWMQKALDQMNVQVHRAVTDLTGTTGLAIVRAIVGGERDPARLAQHRDPRCRKSAAEVARYLTGTWRAEHLFNLASALRLFDALEAEIAAYDAQLLTAIESLQPPDRQAAPVPPHPNLAKEKAIRTHGEQPARTTLWRFAGVDLTRIDGIGAGAAQVVLTEVGPDLAAFPSEDQFVSWLRLCPRTPISGGKPLKKPRNGLGANRIAGVLRLAATSLQRSKTALGAAFRRIARHKGSAVAVFATARQLAKLIYRMLRYGHDYVDIGEQAYDRQFQTRRLAALTETARSLGYTLLPNAAAK

SEQ ID NO: 464991 - protein, 387 aa, unidentified
MRITYERVAGMDVHKKTVVVTRMRVTEEQRIEWETQTFGTTTPELLQLHDWLEEWACSHVALESTGDYWKPVYNLLEETFTVWVVNAQHVKRVPGRKTDATDSEWLAELLLHGLLKASFIPPKPQRALRELTRYRTRLIQERSRTVNRVQKLLEGANIKLASVVTDVQGVSARAMLAEIAAGNTDAEALADLARGRLRNKLAELEKALTGRVEAQHRFLLSQQLEHIDFLDEQVAEIEAEIERRLGMMGKPPDASTGEGAEAAPPPDEGTPTHWQAAVDLLDTIPGINRQAAQIILAEIGIDMAQFPTDGHLSRWAGVAPGNNESGGKRYSGRTTKGNRTLKSILVQCAYAAIRTKDSFFKARYQRLVARRGKKRAIMAIAHLFNDN

SEQ ID NO: 464992 - protein, 341 aa, unidentified
MKNKSFIGIDISKNVIDASIFCKGAPIKDFPHAVFNNSHKGFGEMCTWLKKNHVVLSNSLFGMEFTGSYSMELEKFLNARKYQFCMLSTHVVKHYPMGPKDKSDKIDSAKIADFLYRYDGTECVKPYKMPDKTMQRLKALTKERKFLVEQRTCFMNRRQLCTTKEAAQLYDGYIKEFSHDIENIELKMQNLLETDDSLSTTYKNLLTIPGIGFVNAMNVIVITRNFTAFETARQYASYIGVAPHFHTSGTSVKWRPRPSARCDGQAKADLSMAATVAVQYDAELQSFYNRKLGGKQDSDTKRKALNAVKFKLVLRMFAIGKQNRKWEPLDSKSSNEKLAIS

SEQ ID NO: 464993 - protein, 427 aa, unidentified
MNNSPVAGIDVSKEYSDYCILTPDNTVFSRGKIFHHPASMDKLCRQLDDVEKAFGFKPICIMESTAYYHRILYRYLTKHGHKVMLINALQSKAAADFNIRSAKTDKIDAYKLALLYGMKHLKPSVVPNSTIQELRDLCRNHCSLEEQLVVSQERLRAYVEQTLPGFEKAFSRLVSKSGLMLLSQYASKEELNAAGIEKISEIISTTSGMGQSWSETKAQMILSSVNNGQEFISSQSHSAIIKSIAITILGILDAIIENDNALELLFEQNLSLAEDRSLLMTIPGVGKQTAAVLISETGNFDSFKNYRQLTAYYGLDPKVNNSGKGSRKHLGVSKKGSPLVRKMLRMAVQNSVYATKKGKAANPVLAQFYNTKAKDKSPKTAETAVMRKLTAIIFAVMRDRKPFELRTPEEHIAIMGIERLQNKSISA

SEQ ID NO: 464994 - protein, 406 aa, unidentified
MRKLRCPLTEVLIEAPGHKRRRRLLVLNTRVEHDHLIEVLQAYGRPVVCAFEATGNYHRPIAWRLAEAGFEVRLVSSLALARTREALHNSWDKNDPKDAQVMLHMLRIQATQVYHDPLRAGINDVQELSKTHEAIARAKTEIQHRILTHYLPLYFPEIDRFRGNSRSDWFFAFLHAFPTPASITALTKEEFVTAAWDVVGRKVSKTQILMDIYETARSSTGLPLPLDAPAIRMFRMVIDEARGLIRQRNEIEAQADELLRHSQDYQLLRQIPGIGPINALTIIAEAGDLRRFAHQRQFVKFCGLDLSTQQSGQYRGQTRLSKFGNARLRRTLWIAGQVAIRQRENGFRHKFERYIARDRDNPDLRRKAMTAITAKMARVVHAVVKGGSDYRPFVEGRVPGGRTSVS

SEQ ID NO: 464995 - protein, 338 aa, unidentified
MQTYAGIDLHSSNNFIGVINEKDKILYGKRHANRLDDVLRALDPFKDSLQGVVVESTFNWYWLVDGLQEHGYSLHLANPSAIQQYEGLKYTDDQWDSFWLAHMYRLGILPEGYIYPKEHRAVRDLLRRRLLFVRHSTAHILSLQSMISRNLGFKMSNNEIKKLKPADVESLFDCSNLVFMANNSLAAIEFLKKITKGIEKKVKSQVKMRKEFEMLLTIPGIGNILGLTINLEVGDIGRFPKVGDYSSYCRCVESKRLSNGKKKGENNKKNGNRYLAWAYVEAAQFCRRFCVKAQSFYQSKEAKTKPVVAIKALSNKLSKASYYIMRDQVAFDEEKLFG

SEQ ID NO: 464996 - protein, 411 aa, unidentified
MDSAYNVAGIDVHKRMVAAVITNARESELHFECRRFGTTVSELRQLGAWLQAHAVQELAMESTAQYWKPVWLALEGQCRLHLAQARSNRAPRGRKTDFRDAQRVVSRLLSGDLILSFVPDAEQRGWRTLTRTKHQLTRDRVRLQGQLESLLEESQIKLSSLVSDLLGASGRRILRALATGETDPARLAALGDKRLRASPAELTDALSGQVSPLHRQILGLFLARLELIEAQVVQLEQVIAEALQRHAEAITRLAEVPGFGVDSAQQIIAEIGPTAAAFPSAAQLASWVGVCPGRNESAGVSSSNRSAKGNRTMRRLLDQLAHAAVRKEGTHLQLVFRRLSTRMAYNKAIWAIAHRLCRLIWKILHQGVRYVEHGLAPTPLMVKRRRQRLVTQLRSMGYQVALTPLTPTEIA

SEQ ID NO: 464997 - protein, 410 aa, unidentified
MLFVGDDWAEAHHDIEIEDEAGRVLARRRLPEGLAGITTLHELVAEHLDPAAEPDQVLIGIETERGPWVQALLAAGYVVFAINPMQVARYRERHSTSGAKSDPADAHLLAEIVRLDRAHHRPVAGDSELAEHIKVAARAHQTMIWSRVRQVNSLRSMLREYYPAALNAFGADLAGREALAVLAAAPTPDQGRRLSQARLESLLRKSGRQRNVTATAAKIRVILATEQLTTRPKVVSAYAASASALIVVLSAMATQTEVLAGQVEQGFGQHPDAEIYLSQPGLGVILGARVLAEFGDDPDRYADAKSRKNYSGMSPITKASGTKRVVLARYARNRRLGDALFLQAYSALRASPGARAFYDRQRAHGATHYQALRALANRLVGILHGCLRHQTLYDENRAWHTNNDEINLVA

SEQ ID NO: 464998 - protein, 456 aa, unidentified
MAKTKAGKRTKSKRPLVPVHRDAAGLDVGATFHVVAVPPDRDPQPVRSFKSFTGDLHALADWLKSVGVTTIAMESTGVYWVPVFEILEARGFEVLLVNARNVKNVPGRKTDVNDAQWLQQLHEHGLLRGSFRPRDGVARLRALLRHRERVVEYAASHIQHMQKALMQMNVQLHHVVSDITGTTGMKIIRAILDGVRDPKVLAKHRDDRCKASIETIRKALHGNYRGEHVFALRQALELYDFHRVKVDECDVEIEAALTELNNDRDVPATPLPAVRHASNRNEPKFELRAALYTLLGADLSQIHGFGAYTVLRLVGECGDDMRKWPTVKHFTSWLSLAPGNKISGGRVLNTRTPKSSNRAAVVLRMAAINVGKTHTALGAFYRRLAARTGKAKAVTATARKLAVLFYNALRFGMSYVDPGEDHYEEKYRQRVVHQLHRRAKQMGFTLVSENATVGVS

SEQ ID NO: 464999 - protein, 408 aa, unidentified
MKQNVIFGIDVSSKSSTVCVVMDRIKQGATFTITNDSFGYQKLYDHLNQYLITPLVVLEATGVYSLSLQAFLEDYHIKYLRLNPLKAKKLMDNNLRHNKTDKVDAYRLALIQFNAPQRLQKPQSREYHELQNASRYYEELTKAIVVNKNQLHRNLQSTFPQIERILSNPTGTIYWDIVSMFPHAKSVLNLNETQVMQKLLSLHGIGHQRAQTLTATLYRYARQAYPYDRQDGITVRAIERNISNLISLNDERTQVIDYMEKLAKKVNARALTIYLSIPGIALTTAVRLIAELGDLRRFDTSAQIDAFVGIDPGRYQSGEKDSHLGITKHGNHIARKILYHSITQMESVKAVQPCHITDYYDKKKQSSHSRGYKKIAIASMHKLIRTLFALITHNQLYDYNIATKNQRL

SEQ ID NO: 465000 - protein, 303 aa, unidentified
MANNVTETAIVGGVDTHKDLHVAAVVDQNNKVLGTQYFSATRQGYRQMLTWMASFGALKRIGVVCTGTYGSGLLRFFQDAGLEVLEVTAPDRMERCKRGKSDTIYAECAAHAAFSGIRTATPKTRNGMIESLRVLKTCRKTAVSARRVALQIIHSNIISAPDELREQLRNMTRMQLIRTLGSWRLDVSEYRNVTNAYRISLKSLARRYLELHDEIADLDVMIAAIVGELAPELIKRNAIGYESASQLLITAGDNTQLLRSEPGFAALCGVSPVPVSSGKTNRYRLNRGGVRILAKLNGYSGGT

SEQ ID NO: 465001 - protein, 440 aa, unidentified
MNQEDRSRLEDFRQFRKEVRGSREYLLVGIDVAKDKHHAFFGTATGKTVFRRLVFENNLEGFRKLLGQAEAMKVGEGLKKVVFGMEPTGNYHKPLGEHLIRCGHGVVLVSGVAAHENRKTLDGRWDTNDTRDAANVADLISQGKCLFYEFPVGALQDLRNLLSLKRRLKRMEHGYRIRIRNHLLAKYFPELDRYYEQSETTALAIVRWCLDPSEVAGLEYKRFFQRVSSARGRSSQEKRLQAIWKMAVDSVGCEAGPTVEFEAKVMVEGLKQIRESIRQIDEKIHEVCSPFPEYECLLSIPGFGRDVSAKVLGAIGDPFRFQNGRQVLKMAGFDLSAERSGKSSERVVPVISKRGKADLRYALYQAALIASVRNPDFIGYYTEKLRGREREPGIKIKMRVKLAAKLLLIAWTLMKKKEPFDPSTFRAAGQSYSTGAGRER

SEQ ID NO: 465002 - protein, 348 aa, unidentified
MKIIGCDFHPSYQQIALVDTETGELWEGRLEHKEGEARRFYQALHEQRVRVGMEAVGNSQWFEKMLAEMGHELWIGDAAQIRRLVVRPQKTDRRDAQHILNLLRDGRFPRLWVPSAEVRDVRQLLRHRQKLVELRRQVKNQLQHLALNQGVQRKRRLWSREGRAVLEQLPLEGWTARRRAELLAMLDQLEGQVGELDQAVCTEALRRPEVRLLMTHPGVGPVVGLAYVLTIGPPERFPRGKQVASYLGLIPREHSSGGRQKLGSISKQGNTFLRTLLVEAAQTAARFDEELRRDYRRLAARQHRALAKVMVARKLAVRMYWMLRENRPYPLRPVAQMQGRPSHSVVAG

SEQ ID NO: 465003 - protein, 370 aa, unidentified
MAQRAEETAVNEGKDIILVADYHAKNIEYRWFNQASGEERTGRYATTRGGILRQVEQAVGEVMPGGHVVWIMESTTGWARVKDLLGERVKFVLANVLQMPLPPKAKRRKTDKIDTGRILREYLHGDLPRSFQPSAWWREVRRVVDCRQDLVERQTAVKNWIVSLLHHETWEDRENLWSAKGQRRLRAMKLPPSDRALVEMKVGQLEQLSKHLDEVEARMQTIYDGWPEAQWVDAVRGIGMVTAVSLLAHIGPIARFATAEDLIGYAGLAPGMWQSDGTCHHGRIGGGGTDSHLRYLLIEATTWLCQIPRYRATYERVLNKRGKKIARIVVARLLLRSLYKMLTAKVRFNPSPRLSPKTTAKATATAGGSR

SEQ ID NO: 465004 - protein, 396 aa, unidentified
MPTTTRHARTPALPQSMPVPPRVLYLALDLGQRHWTLAFTVGRGQRPRVRTIPAGDLARLTTELAAARRRFGLPPESPVVSCYEAGRDGFWVHRALLAHGVTNVVVDAASIEVPRRARRAKTDRLDARKLVTMLVRHAEGEREVWHVVHVPSEADEDRRHLERERQTLVAEHTGLVNRIQGLLATQGVVLTLRGDVPAQLAAVRRWDGTPLPPELRARLEREWARVTAVRAALRTLTARRHQRVTAATPAAADVPAVHLTRRLAALGAIGETTAWLLATEMFSWRAFRNRRQVGGFVGLTATPDQSGERVRELGLTRNGSVELRARVIELAWSWLRFQPGSALSQWYRRRYGSGTARLRRIGIVALARRLLIALWRYAIGGPLPAGAHQKGDAVAA

SEQ ID NO: 465005 - protein, 346 aa, unidentified
MEYIALDVHKKYTWARVENRQGDRLYESRLQHAHGTIKNFVNRWTVGSAVAVETVGNWYWVVDEIEAGGGKPQLVNARLAKLMMGMVNKSDKLDAKGMNRLQRTGTLPTVWIPPSLVRDARELPRTRMVLSRQRTQLKNRVHATLGKYGYTVEGASDAFGKKGRQIVAELMAKLPPHTEQALERVLDQLDHVCENLKLIEEKMMEVFAPCPQATWLKTLPGVGDILAVVIWTEIGTIERFSRAEQLASYCGLVARENSSGGKIRFGAVRRDVNVYLKWAFVEAANSAVLNRERCGYDHISRLYERIKARRGHGKAKVAVARHLSEASFWMLKKGESYREPMSFTQR

SEQ ID NO: 465006 - protein, 338 aa, unidentified
MKHDAGLDVSQQTTSICIVDEEGGIVAERTVTTCPDVIAAALEPFALTRAGLETGPLSVWLWNGLMAHGVPIVCMDARHANAALRIMPAKTDRNDAVGLAQIVRTGWCKGVHVKSASSHEARALLATRSQFVQIRGVLRTFGIVFGKRVGGFAKQAEEIVSGELDASPTIRTVVEPLMKARADILAQIRALDAKVRSTARSNATVRHLMTVPGVGVVTALGFVATIDDPARFRRSSSAGAYLGLTPRIYASGETMKAGRISRRGDDFLRRSLYEAANALLTRIDRFSALKSWGLRIARRGGIKKAKVAVARKLATILHAMWTTGEEFRWSSAEKVQEA

SEQ ID NO: 465007 - protein, 318 aa, unidentified
MPDGIRWVGLGLHARESTVAVFDQATGEVLSWRVVGRPHELLAVLREISRPARMVYEAGPTGYGLARRARAEGIEVAVCAPGKTERPASDRVKTDKRDAIRLARLLAAGELTLVSVPSVEREQLRDLVRCREDIRADLMRARHRIGKFLLRREISYEGPAVPWTLKYRSWLTSIRFADQASRATLADYLHAHDVLIARRDEVEAELAKLALSAPCADTVARLRCLRGIDTLTALGLCAEIGEFARFDHPDQLASYLGIVPSEHTTGAQRRLGSITKAGSTHARRLPLEASWHYRRGPVVGPALERRQRGHSPALINIS

SEQ ID NO: 465008 - protein, 370 aa, unidentified
MNHSTITKYVGLDVHKDTIVIAVAELGRQAARVVGTVPHEWKALSKVLNKLGPRSAVHCCYEAGPTGYGVARALKAAGWSCDVIAPSLVPKKSGERIKTDRRDAIKLAQNLRAGELVAVFIPDEQTEAIRDLERAREDAKKAERVVRHQLSKFLLRNNRRYPGKTTWNDTHRAWIAQEVFAEPSQQYVVSDGLAAVEAATLRCMQLTERLREFTKGWRLEPLVKALQAMRGVEFVTAVTLAAEVGDFLRFAKATDFMGYVGLIPSEHTSGPTRRQGPITKTGNAHVRHVLVESAWHYRNKPRIGKALRERSVGVSPQVCAIAWKAQKRLHNRLHRLIGRGKCPGEAVTAVARELAGFVWAIAREEKPLAS

SEQ ID NO: 465009 - protein, 428 aa, unidentified
MAEDTTLTSQTWLVAIDIGKAFHAVLVEGGDGKRQQFRMANHVEDYDRLVVFLRGLPGPARIALEPTGDFHRTLAHRLLREGFSVVSVSSVAGARYREALFNSWDKNDPKDAHVILQLLKHGLVQHYHDPLLAGDHDLQELAKTYHQIVLARKRLADRLLNHYRPLYFPEMGRYWESTRVEWFVAFLEQFPTPAAVQALPKEAFVRAAWSVVGRKVNKQAKLEELYELAQRSIALPVAVDSVAIETFRLQLAQLRRLAELRQTLEARAHALLKDRADFQRLCSLPGVAAILALVILAEGGDLRRFPHHRQFLKYCGLDLAKCQSGQFRGREMLSKRGNARLRMAFWMAAQRAVRMNENSFRDKYERYTRHDSGNPDVRRKALTAVAAKMARVAYAVVKHDQPYHGYHEQALPSGSIPLKRAVGARATP

SEQ ID NO: 465010 - protein, 426 aa, unidentified
MKCNQNQRILQVSEAVLIVGIDVASEIHYARAFDNRGLEQAKVFHFTNDLEGFKAFTKWAEAIRLKAGKEGVIVGLEPTGHYWFNLAQYSKGHRMKIVLVNPFAVKRSKELDDNNPTKNDRKDPKTIALLVKDGRYMEPYIPEGVYAELRTAMNTRWQIVKSLNGIKNQINRWLRIYFPEFLRVFADWEGVAAQVILHEIPTPAQIIEKGVEGIVARWKQDKIRAVGKKRAQNLVEAAQSSTGISDGHMAATMELSILLEDYARKSKQYETVMELVEKLVEQIPSVDKLLKIKGLGLVTIAGFLAEVGDISRFSHPKQIQKFAGLNLKENSSGKHRGKMTISKRGRKRLRAILFRAMLPLVAKNAEFRTIHGYYTTRKNNPLKKIQSLILLCCKLIRVIYAVLTKGIGYEAEKLLCDMKKAELLAV

SEQ ID NO: 465011 - protein, 396 aa, unidentified
MPQIWAGMDIGKEHHHCVVINERGERLLSRRVLNDEAALLELIRDVLDIDQDVLWAVDVNHGGAALLIGLLLNHGQPMAYLTGLAVHRASGTYRGEGKTDAKDAFVIADQARMRRDLGLLRPGDEIAVDLRILTTRRTDLAGDRTRQINRLRAQLLEFFPALERTLDLTNKGPVILLTGYQTPAAIRRAGAKRIETWLRNRKVRSAAALAKAALEAAQTQHTALSGEALAAGMAVRLAKAVMALDEEIAELDALIEGRFREHPHADVICSLPGMGTQLGAEFIAATGGHMTAFASADRLAGYGGVAPAARDSGRISGNHHRPRRYHRGLLRVFYLSAMASLKSCPASRTYYDRKRAEGKGHKQALIALARRRVNVLWAMIRDGACYQSAPSVAPAV

SEQ ID NO: 465012 - protein, 326 aa, unidentified
MTLSHLTDNTFVGIDVGGAGLDVAWHRGEGAHYANRPDAIATLVERLRTGPEVTRIVVEPTGGYEKALVKALRQAQLPVEIIHTTRFNAYRALVGVKAKSDTSDARLLAAYAAAPDEIRGRKAGHVELPEDAIREALSELASRRDQLKHMIHAETCRLGTVRMDELRQAIMTHLEALRAEDKQVHRMMLELVRQRADLRRDQRLLKTIKGIGEKSALALLALVPELGRIDNKAAAALIGVAPFVRKSGTMTAPARIHGGRAPVRSILYMASVTASMHNPVLSPFYERLIAKGKPPKVALIAVLRRLVVFANAVLKSGQPWRGATTA

SEQ ID NO: 465013 - protein, 409 aa, unidentified
MINPIVKRCAGLDVHKMIIVATVQIEQDDGGITEETKSFGTFRKHRRQLCRWMKKHEVELVIMESTGIFWKSIYESLEKASIQTFVVNARHVKQVPGRKTDVKDSQWIATLGRLGLLRPSFIPPKDLRELRMLTRQRQKLKGMLSAETNRLHKALDDSGIRLGGVVSDINGVSAQEMIQGLIEGKAPAELVTCARGRLKSKAEELFDSLDESLGERHRFLLHMIQDHIGFIREEVRHIDDYIFKAMAPYRKQWEFLQTVPGIDKMGAAMLIVEIGVDMSRFGSKENLASWAGMCPGNNESAGKKKSGKTRKGNRAVRKVLCEISNAAIKTKSQFKGKYQGLVVRRGHKRAIIAVGHKILRVVFSLLKNGRAYIDPGIDYESIMVKKNAPRWIQALKKYGHWPEVATKAV

SEQ ID NO: 465014 - protein, 357 aa, unidentified
MIAMKYYTSTTQFNCGIDLHAHQMYVCVMDRDGKKLVHTNIRNNDFAFFLKLVAPYRHDLTVCAECMFGWYWLADACQAAGIHFVLAHALYLKAIHGGKNKNDRIDSEKIAHLLRANLIPPAYVYPADKRPLRALLRQRLLYVWNRTELLARIQSHQLAHNRPTLRQTRPNRDPWEEQLLAQEDHPLRQLALQNDLALIRHYDAQLATLEAALLKLTKKHAPRDFTLLQTVPGIGEYLGLTILYEVGDIHRFPTVKDFLSYCRLVKGTVASAGLIKGLRGAKLGNAYLRWAFGEAAIIAKRDVNVIGPLAQRLEARLGNKFKANTVLAIKLARAVYFMLRDHTVFDPERLVAALTHQ

SEQ ID NO: 465015 - protein, 365 aa, unidentified
MMETVYCGVDFHARTQTIAYCDSANGEIQLAQLDHRKDDVRRFYSQFTGQVIVGMESGGYSSWFEAMLEELGHTVWIGHATEIRRRANWRQKNDRRDAELILEIMLRGDFPRIHCHSRESVEVLRMLRYRARLIKMRTMICNNLQAIAMSCGLSERSRMLSRAGQERLKSARMTPVIKQQSEDLLTLLVPINERIGRVDRWLKQQASTDDRVKVLMTHPGVGVLTALGVVHTLEPFNRFSKQRSVVAYVGLEPMERSSAERKRYIGISKAGSRLLRFLLGEAAHVAVRFDPELKQFHERIGKRRGKAKATVAVARKLLIRCWIMLRENIDYAEFRRRGVEARLARLGHRPTMPEVVIERPASSDR

SEQ ID NO: 465016 - protein, 406 aa, unidentified
MNQNTCITIDVSQNKSHIQGFIGPNKPLSKARTMRNTKQGFQFILILKNLIESKTNETPLIVFEFTGIYHKPLEKFLISQNLKYHIVAPLKAAKARNSEIREQKTDARDCLSLSKLFYSNNLGIFYSENETYSNLRKLNRYYDTCMKHLIKIKVNFRETLAVVYPNYKKLFSSIYSDDSLTFLKEFPHPSLYTSKLEDRIIEILKNKWDHLESWTSSKVKILTPLINEVVSGCNVTEPDIIMLLSYISQIEYYLNQIEITLSQMNELAKKVPLYNLVHSLPGIQDILTCKFIAEVGDISRFSNYKQIVAYAGIDPMIRQSGDKDGLHLKMSKKGNKRLRTILHLMVSSLIKANREPNAIKDKYQKKTHQLNPLKPKVASMACANQLVRIIFYMHKTSSTYTYHECK

SEQ ID NO: 465017 - protein, 326 aa, unidentified
MQSYLGVDVSKATLDVCLLLPTQKLRSKVFANDPQGFELLVQWLQTHAPGGPASVHVCMEATGSYHEALAIFLDERGVLLSVVNPLLKKHFAELSRQRNKTDRADARGLAEFCRNQRPERWEAPSPGLRALQALVARLETLQAMRQAECNRLEVAHDSVADSIRSVLADLDAAIDQIKTQIARTVDDDPDLRRRAQLLQTIPGLGDRTIAQLLAYIGRPERFSSVKALAAYASLTPFIRQSGTSLQQRRGTHPSGHRQLKRSLYFPAMVAGRYNPLVAALWQRLKAQNKPGKVIVVACMHKLLAIAFGVLRSGKPFDANHLRPHQA

SEQ ID NO: 465018 - protein, 435 aa, unidentified
MQQVIIEVDPHKLSATIEVVDDHERRLGEGRFTTDRAGYAAMRTYVKAWPQRVWAVEGANGTGRPVAQRLLESGEDVLDVPAKLAARVRLFDTGHNRKTDAHDAHSIAMVAVRTQGLRVLHVDGELQALRMLVDRREALSRRRVQTVDRLQALLAELLPGQAKKDITTGQAKTMLATVRPRDLAGKTRRRIAAEELAELVAVEAKQKKATAELKAMVTAGGSHLMDLYGVGPVVAARVLADVGDVARFADRNRFASWNGTAPLDASSGENNRHRLSRAGNRRVNHMIHIAAVTQLRLPTDGRVYYRRKRAEGKKPMEAMRCLKRRISDAIYRQLVADAMATTPRVNAGPGGTAGRHLYPARPASTRTPALRISHFPDPQYRRYPRTRSLRTPLPGPAPQPRRRRAGAVKVERPTGRTTLTATSAGAHSKEPIPAP

SEQ ID NO: 465019 - protein, 350 aa, unidentified
MQYLGIDWGTRKAAWCALDEQGSLIEGAIAADEDGLARLVHQLGVEVHGCIEMMSGAVWVRDRLAACGWTIEVADARKVKAIAPLACKTDRVDARVLAELVRRDLVPTVWVPSLDERAIRERLRRRSHLVRLRTSAINRTFGLLTQWGLRRNLTALRKPDALDELAQHGVPAVWRQSVATLLGVIGDLDRQLDPLERELRPLARADERAVLLMTIPGVAELLGLTLASEIGDISRFPTARKLVGYSGLTPTIKQSGQSSRTGRLSKAGPNTLRWAAVEAAQQAWRPNNPWHRLYTDTKKRHGKSNPAKAAVARKILIAAWHVLSRQQPFKPAAPRRPDPASASSRCFLAA

SEQ ID NO: 465020 - protein, 352 aa, unidentified
MKTYYVGMDVHRASIVIVVLNGAGKVVMQSVIETGAERVRGLLKQLRGKVYVTFEEGTQANWLHDIVRPLVTEVVVCDPRHNKLMQSGNKSDRVDAQKLAELLRLGSLKAVYHGDNGVRMLKELVRTYDCLVSDMTRVMNRLKALYRGRAIACQGHDIYRADRRGQWLEKLRESGAKQRAGFLYEQLAALKPLRHEAKRMMVKEARRQAAYPWLLSVPKLGAVSVAQLVAVVGTPHRFRSKHQFWTYVGLAVVTRTTADHEVVEGVLRRSKRPVATRGLNRNHNHLLKRVFKNAATSACHSGPFKASYDARVAQGMAPSLARLTIARQLAATTLAIWKRGEQFSPERMKQVA

SEQ ID NO: 465021 - protein, 433 aa, unidentified
MINPISVSSPPSNLAAWVGLDWADQQHLVCLYDVGTGQTELSTLEQKPEALQSWLGQLRQRFGGQPVAVVLEQARGAVIYALLSVDFLVLYPVNPQSLASYRKAYATSGAKSDSADAVLLMEMVRNSPQRFRSWTPDDADTRSLQLLTQNRRQLVNQRTAFTNQLTGLLKSYYPQALELAGELDSLQACDFLEKWPTLEALQQARPAQIRKLYLDYGKPRPESLEQRLEQIRQARPLTTDPAAVLSGRMMVRALIELIRPLLATLERFDQQIAALFRKHPDRLLFESFPGAGAVLAPRLVAAFGTDRDRFESAQQIQQLSGIAPVTEQSGKQRWVHWRWACSKFLRQSFHEFADHSRKWCDWAKALYQRLKRTGKGHHAALRMLAFKWIRILFHCWKTRTCYDEQIYLKSLEKRNPTLWAEAQALPTRKKKAA

SEQ ID NO: 465022 - protein, 414 aa, unidentified
MNVVGIDVAKGKSVAAIIRPFGEVVVEPFSFNHDYEGLKALADQIKSIPGETKVVMEYTSKYYRPVALFLKEQGIFVCVLNALLVHNYRNDSIRKGKTDKMDSVKLANYGIEHWLTLVEFVPEEKERELLKMFNRQLDCYEKTQVAWQNNLLSLLDQTFPGIRNLFWYSGKTNGHDKWIDFAKIFWHAKCVTRSTLKGFIRKYRSWCEKAGYYFNENKAEEIYAHAKACVPCIEQSPEIQSLVTMAVDQLNAVREAIEKIHKQMEALASGLPEYDVLIDFYGIGVRLASQILAETGDVSRFYKKGALVAYAGLDAPPDQSGSYNAAHRRITKRGSPLLRSALFQAMRVLLIKKPEDNPIYDFMQKKRQEGKPYKVYVMAGASKFLRILYARVMEKRKKEMRCPEPPQSPSPSPL

SEQ ID NO: 465023 - protein, 429 aa, unidentified
MKYNKQNEKIEMITEDFLIVAIDVGSTTHYARAFDYRGIEYSKKAFSFKNTDQGFKTFKSWACAIAVQNKKKIFLVGMEPTGHYWFNLGKFVQNSGMILAHVNPAAVKKSKELDDNDPSKNDRKDPKVIAGLLKDGRYSFPYMPEGVYAKIRDISYLRDDAQKSLIRIKNRLARWLSIYFPEYKEVYGQIDAKTGMLILEEYPLPKDIVTLGVEGVIKIWKSHKARGAGQRRAEKLVNAAKRSVGRTESDVIARIELKVLLKDLKEYQQRVQVYENLAFEALLEVPNAEKLLNICGVGVVSVMRFVAEVGDISRFNNAKEIQKLAGLSIKTNSSGKHEGVGKITYRGRKRLRYGMYELAISLVSRNKAFKSIHQYFTTRQNNPLKGMQSMVAISCKVIRIFFGILVNGYEFDENKMLQDIVSLNFAEFV

SEQ ID NO: 465024 - protein, 429 aa, unidentified
MNDQAESHSADEPAFGAFVAIDWADRKHVWSMQAAGSERRQHGEILHTPEAIEVWVGELSSRFPGQPIAVAVEQSRGALVFMLSKYEHLHIYPIHPRAAAQFRAALYPSGAKDDPIDANLLLDLLVHHRVHLRRLSPDTEQTRLVQQLVEARRKLVNEKTRQSNRLTAKLKLYFPQVLTWFDEVDSELVGALLERWPTLEALQKSRQASLRSFFTQHNCRHAKLIEQRLEQIRQAVPAIRDGAVIQSAVAMVSVLVRLIATLREGIGALDRQIDRAAGAHPDSAIFRSFPGAGPVMAPRLLAAFGSQRDRYQSAAEVQQFSGIAPVLVRSGKTAWVHYRWACPKFLRQTFQEWAGHSIGFCGWARAYYEQQRKRGAGHHAAVRALAFKWIRIAFRCWKDGVPYNDSRYLQSLHQRGSPLAILCPGGLSG

SEQ ID NO: 465025 - protein, 417 aa, unidentified
MNDPQQWQQHRAFGALDWAREKHSVIVLNPTGKVIEEFEIEHSALGWKKFREKLQAYGSIPFAIETSQGAAVEQLVEAGMMVYPLNPKSAQAYRDRKAPSGVKDDWLDAWSFADALRVDGQGWKALRPEEALIKELRLLCRDEVSLIEQRTAFIQQLRDALAQYYPAALEAFDDWTHVSAWMFLQRFPTPDALAQAGKRKWQNFLHSRRLWAGQEGTRRMEIFARATEFAGSPPTVKAKSLLALSLVQMLFAIEKQLSLYRQRIEELFARHPDHDLFGSLPGAGPKIAPRLLSEIGDDRERFGGDAQNLQCLGGTAPVTKRSGKRRYCYIRWACNKHLRYAIHLFAEQSLSRCVWAERYYQHHRQKGQSHANALRRLGHRWLKILHKMWIDRNPYDAELHHRNQLNHGSWIFQLKAL

SEQ ID NO: 465026 - protein, 341 aa, unidentified
MQITTLGIDLAKSVFQLHGVDVIGTVVLQKKLRRGAVLDFLSRLEPCLIGMEACPTSHFWAREIAALGHEVRLIPPAYVKPYVKRQKNDAADAEAISEAVTRPNMRFVPVKTEDQQAVLALHRSRDLLMRQRTMILNVIRAQIAEFGTITAQGPRKVVDLVRRLSDPDDGLDLTALARSALLSLAAQLESLAEEIGKIDRQLMAWHRQNPASQRLETIPGVGIITATALAASVPDPSVFKSGRQFAAWLGLVPRQNSSGGKDRLGRVSKMGNGYLRRLLVVGGTSVTRRAPTTDSRTGAWVRSLLERKPTRLVTVAIANKTARTAWALLVKGESYRAAPAT

SEQ ID NO: 465027 - protein, 323 aa, unidentified
MKQYVGLDVSLEQTAVCIVDEQGKALWRGKCASTPEAIAAVVKARAPHVVRIGLESGLLSTWYWHELKKRGLPVICLDARHAKAALSLQMNKTDPNDALGLAQIVRTGWYREVTVKSLDSQVIRSFLSSRARLVEVRVDLINQIRGMLKPFGLVAGTGGRQPFIDRVRELVADGPLKDAVEALLTALQEVSRQIGILSRRLMGLARQDQAARRLMTAPGVGSLVALAYISVIDTPDRLSSSSSVGAYLGLTPRRYQSGEIDRSGRISKCGDPLLRTYLFEAAGILLNRVSRWSALKAWGTRLAQKVGGKKATVAGARKLAVAC

SEQ ID NO: 465028 - protein, 367 aa, unidentified
MTSVALSAGPIHLGLDTSKDAILVGILRPDEVSPDAEKIFNDEASIRRLIDRFADRGMLRVCYEAGPTGFGLYRLLASMGVACDVVAPSLVPRSPGDRVKTDRRDCRRLARLHRAGELTAIRVPTEAEEAVRDLCRARADLVTDRTRTRHRLSKFLLRHDRIWRDGDAWTVKHEQWLLGQRFDEAALRATYGHYRAMLVARDAELAAIEADLAHWYTHGPFVDAVARLGAYRGIAQLGALSIASEVGDWRRFANARAFMGFTGLVPSEYSSGQSVHRGHITKAGNAHLRTQLIESAWAYQHRPTLGVQLRARHRGATPATVARSWAAQQRLCARFRRLSARKNSRNVVTVAVARELAGFLWAEMTTD

SEQ ID NO: 465029 - protein, 357 aa, unidentified
MKYALVRVLPEVPPGGVCAGIDWAPADHAVCVAVLAGRVRDRFTAVHDRAGIAGLIARLRGSGAAEVAIERGDGVLADALLAAGLTVVVIGSRQVKNLRSRYGSSGAKDDRFDAFVLADTLRTDRARLRPLIPDSPATLALRAAVRARRDLVAHRVSACNQLRAHLAVAFPGATGLFSELDSPLSLAFLAAFPGQQAAARLDEQALAAWLATVPRRGNTAPAGVLAARLLAETGDCRARYPDPWSLAGLAGVAPVTRRSGTYISHEFRWNVNRQLRDAICDFADGSRHASPWAATVYAAARDRGKDHPHAVRITARAWVLIIWRCWQDGTSYDPAKHRALQDVLTRQAAAGTPQPHR

SEQ ID NO: 465030 - protein, 427 aa, unidentified
MPYKIAGIDVHKRMLHVVVSDVQVDGEYDFTRRVFGSLPEALRSLAAWLVEQQVEEVVMESTAQYWKPVWGTLERYWKRICQTREGALATSGTLHLALALSNRGRRGRKKDFRDAERLVKRLVAHELTLSFVPDVEQRLWRTVVRTKYQLTRNRVQLQNRLEALLEEAHIKLSSLVSDLLGASARRMLEAIAGGETNRETLAALADRGLRATQEQLQDALGVCQELNPVYRRLIKMVLDEVASIDKRIEQLNQEMANLLRPHEDQVKRLAEVPGLGVDSAQQVIAEVGATAATFPSEKHLSSWVGACPGAEESAEVNHSRRSPQGNRHMRRILNQAANAAAKHKGSIFQILYGRYVPRLGHNQTIGIIAHKLCRLVWKILHRGIRYEERGPEVSKASKQKRTRKMIRQLRRLGYRIEPSPSQSAITA

SEQ ID NO: 465031 - protein, 326 aa, unidentified
MAHKLGIDVSKVKLDAALLKVDGKYRSKVFSNNTAGFKSLLLWIETNVAAGIAGVHICMEATGAYHEDLALFLSDQGIAVSVVNPLLVKRFIEVDRVRNKTDQGDAKCLARFCELTQPELWEAPSLGVRTLQALVLRLDTLQEMRQGELNRLDVAHASVQQSMRDVISDLEHGIEAVRKQIQRAIDDDPDLKQRQSLLASIPGLGDKTIPQLLAYIGRPERFKNVKALTAYAALAPLIRQSGTSLNKHRGTHPQGHRVLRSALYFPAMVAGKYNPLIAAFWQRLKAQNKPGKVIVVACMHKLLAIAYGVLKSGKPFNPDHLKPIIA

SEQ ID NO: 465032 - protein, 391 aa, unidentified
MDDDNRVVIGMDPHKRSVTIEVMTSDEQVRGGGRFTTDVEGFSAMLAYVGAWPDRVWAIEGCEGIGRHVAQRLIAEGEPVVDVPAKLSARVRIFATGQGRKTDDTDAHSIALVGVRMNGLRAVVDDEQLELLRLLVDRRRRLGEEHTRMVCQLHQLLLELIPGGAKRDLSAAQARKLLAGVRPRDVVGKTRKQHAMELVVDLERIYQRKKAANKELIAYIKSTGTGLLDLHGIGPSGAARLLVEVGDITRFPDRGHFASWTGTAPIDASSGDRVRHRLSRGGNRQINVVLHIMATVQLRNPTEGRAYYDRKIAAGKSSNEAMRCLKRRLSDIVYRTMLNDLVTNKVTGPGGHRGASLQSSAAGSHPHTGSSDKSLPGPAKAKPKTRLPRAS

SEQ ID NO: 465033 - protein, 361 aa, unidentified
MNYIFVGCDSHDKTLVTKVAINREKAERKVFSGNHSGRRKLIDYLKGRSASLGAKVVVAYEASGNGFILCDELKAAGFECHVLAPTKIERSAKQKRNKNDDRDADHLLEILRGYYLAGNRMPEVWIPDLQNRDDREAVRHRLELGQRVTAVKTQIQMLLKRHGVEKPSGPVKSWSKGYRQWLQALAESDERQGMRTALGSLLRYLDFLEGEIREMSQAMKQLAEAPRWKPIIEALVQEKGVGLTTALKYATDIGDFTRFRRCRQGGAFYGLVPSSNESGENKDRKGHITREGSASGRQVICQSTWSRVRHDKQERAVYLRLVDKNPKKKKIALVACMRRLTVRLWHIGYAAQLKMPGATRS

SEQ ID NO: 465034 - protein, 427 aa, unidentified
MPYKIAGIDVHKRMLHVVVSDVQVDGEYDFTRRVFGSLPEALRSLAAWLVEQQVQEVVMESTAQYWKPVWGALERHWKPICQTREGALATSGTLHLAQALSNRGRRGRKKDFRDAERLVKRLVAHELTLSFVPDVAQRLWRTVVRTKYQLTRNRVQLQNRLEALLEEAHIKLSSLVSDLLGASARRMLEAIAGGETNRETLAALADRSLRATQEQLQDALGVCQDLNPVYRRLIKMVLDEVASIDKRIEQLNQEMANLLRPHEDQVKRLAEVPGLGVDSAQQVIAEVGATAATFPSEKHLSSWVGACPGDEESAEVNYSRRSPQGNRHMRRILNQAANAAVKYKGSIFEILYRRYVPRLGHNQTIGIVAHKLCRLVWKILHRGIRYEERGPEVSKASKQKRTRKMIQALRKLGYRIEPSPSQSAITA

SEQ ID NO: 465035 - protein, 343 aa, unidentified
MKITTIGLDLAKCVFQVHGVDATGQVVVRKSLRRSQMLPFFANLPRCLVGIEACGTSHYWARELIKLGHEVRLMPPAYVKPYVKRGKTDAADAEAVCEAVTRPTMRFVPVKSPEQQAALSMHRTRDLLVKQRTQLINMIRGLLAEFGVDIPKGLERALLMARQIVDGKAAEVPFEAAKVVGTLAQQALDSHVRLREIDRDLAVWLRRDDVARRLMTIPGIGLVGATALAASVTDPHQFRSGRQFAAWLGLTPLQKSSGGKERLGRITKMGDKYLRKLLIVGMTSRVRRAKQNPAVDPRLADLLARKPTRVATVAMANKTARIIWAIMARGETYLAGHRPALAA

SEQ ID NO: 465036 - protein, 343 aa, unidentified
MQRVATIGLDIAKSVFQVHGVDAAGQMVIRRQLKRRQVLVFFAKLPPCLIGIEACASSHYWARELQAVGHTVRLIPPAYVKPYVKRQKNDAADAEAICEAVTRPNMRFVPIKTIEQQGCLVLHRTRHLLVRQQTATINSIRAHLAEFGIVAPVGRRGVEHLLEVVADANDTQVPEVARACVAALGVQLQQLKAQILEFDRRILAWHRSSEASRRLNHIPGVGPLLATALVASIADPKAFRSGRDFSAWIGLVPKQNSSGGKDKLGNISKRGDRYLRSLFTAGALAVIRYAKIHGTKHRPWLVALLARRPTKVAAIALANKLARIAWALMTKGSRYRQPAALRV

SEQ ID NO: 465037 - protein, 414 aa, unidentified
MAKVFIGVDPHKLSATIEVVDHRERILATGRFDTDKAGYAMMRKHVAAWPERVWAVEGSNGAGRPLAQRLLANGEQVVDVPAKLAARARLFDTGHNRKTDAHDAHAVAVVAVRTQNLRVLCYDVELEALRMLVDRREELTRTRVQTVNRLQRLLSELTPGKAKKDITALQAKAILASVRPRDLAGKTRRRLAVEQLAELVAVDKKIKALTKELKAMVLARRSTLMDLPGVGPVVAARILADVGDVARFADRNRFAAWTGTAPLDASSGEQIRHRLSRAGNRKMNHMLHIAAATQARLDTEGRRYYRRKIAEGKTRMEAMRCLKRRISDAVYRQLLADAQAAAIAAEIEEADQTATEVGTGPGGHCGASHESSAVDLPPHIDTSDQPLPGPAQPTLQPARRPRKTTTEKSLKRAG

SEQ ID NO: 465038 - protein, 391 aa, unidentified
MICVGIDVAKDKHDCFILNSEGAVLADVFTIPNNLEGFHTLLNKLRSCSTPQDSIKVGLEATGHYSCNILGFLLDNGLATYVLNPLRTNLYRKSLSLRKTKTDRVDARTIAAMLLSDAGLKPYTDTAYHNEELKSLTRYRFDKVKERAKLKTSISRLVCILFPELEKLVPTLHMASVYALLSEFPGAKQVAATHLTRLKALLADASKGRYGRDMAVVIRDAARCSIGSRMPAKSLELQHTIRLIRELDAEIEEIEAAIQAIMDELHSPITTVPGIGSRMGAMILAEVGDFSRFDSPDKLLAYAGMSPSTYQSGQLKNCYPHMEKRGSRYLRYALYNAAKYVCHWEPAFAAYLAKKRAEGKHYNVALSHAAKKLVRLIFALEKSRQPYCPIA

SEQ ID NO: 465039 - protein, 343 aa, unidentified
MKIYALGIDLGKTVFHLVGLDASGQMVVRKRCSRTQLLAFTANLEVQLIGMEACSGAHFLGRALRAQGHEVRLMPAQYVKPYVKTNKSDYIDAEAIAEAVQRPRMRFVPIKTEEQLDLQALHRVRERWVMRRTAVVNQIRSLLLERGLTLPKGRRHLDEQLPRILEDAELNLSGSFRVLLAQLKLELEQLAGRIEQMDRVIQKTAKENEACQRLTEIPGVGPVTATALIGAIGNGSAFGKGRALSAWMGIVPGEHSSGGKQKLLGISKRGNKYLRRLFVQGARSVLQQRQKQAPGLRDWLAQLLGRTHQNVVTVALANKLVRMAWAVLCKNERYRAPVLAVTT

SEQ ID NO: 465040 - protein, 370 aa, unidentified
MKKRITFVGLDTHKNSIEVALADEGANSEVRLYGSIGGDLDSLDKMIRKLRIPGAELRFVYEAGPCGYEIYRHLRAQGLHCDVVAPSMVPRRSGDRIKNDRRDACNLARLYRAGELTAVYVPHEDDEAMRDLVRGRQDAINAQRKARQQLGGFLLRHGVRYPGKCLWSLAHGRWLAGVKMPHPAQQIMMQEYIHTVEECTQRVIRLNEQIQQLLPDWRMHPLVTALQALRGVAPVVAATVVVEIGPMGRFKNPRQLMAYLGLVPSERSSGGSVRRGAITKTGNGHARRALIEAAHSYRHPARISRTILKRQETLTEPVRQIAWKAQLRLCARFRRLIARGKSRNRVVAAVARELSGFMWAIAKQVPVPQG

SEQ ID NO: 465041 - protein, 339 aa, unidentified
MKNTKYYIGLDVHKERTSYCVRDTLGNILTEAEAATLYSELEPRLKPHLAASMIGLEASTSYYNLYQNFLRNSYRIKVANTIQLRQLIAKNDKLDAQRLSEMLRLGTFPESYIPEEKIQHLRSLIQMRHALMQEKVRCNNRIQAFLDRNGVMMPMCKAFSKKWKHALMQYMGAGNVSTELRYEYDHYVYLEKTNEQADQEIIGYTKTYWNQQYDLLRSITGFGILLPCYIIAFVHPIERFLSNRKLRRYAGVIPVSKESGDTTSKGRIPKTTSKALLRWALVQAANTIGKTNTRLGRYYRRKKNQKKNTGIAKIAVASTLVDIIFKVLTTKKPYTSAVC

SEQ ID NO: 465042 - protein, 343 aa, unidentified
MKDTVFAIDLAKSVFQLAVSHHPGRVSKQYRLTRSQLLRFMGKQPAATVLMEACGSAHFWGRELDRLGHRVRLLPVRHVAPYRTGNKTDRIDVEAMLEAGRNEKICDVPVKSIDQQGLTALHRVRSRWLACRTARINTLRGLLREFGLVMPLGARRVVPQVRAWIDDAEVGIPTPIRAVLRELCDEIGELERRMHLVEDQLETIGSHIPAVSQLRTVPGIGPLTGTAIVAFVGSPQRFPSGRHFASYLGLTPRERSSGTSRHLGRISKRGDTYLRMLLIHGARAVLCHAKRPATQDALRRWALALEKKRGHNVAAVALANRIARIAWAIWSRNQEYREVNRQA

SEQ ID NO: 465043 - protein, 384 aa, unidentified
MSVYVGIDVHRKRSQVAVVTDDGQVQVNRNVPNGVEPILKLIGDLPTGTPVAFEAAYGWGWLVELLEDYGFDPHLVHPLRCKAIASARLKNDKVDAAILAQLLRADLLPEAWIAPAEVRQLRALLRHRVALVRLGTRLRNRIHAVVADHGYDRPGACWTGSYWTGPGRQWLAELPLPDVSRLIVADSLAFVDALAPTIDRLGHEIHARAKQDPRVKVLTALPGVGEFTAMVLLAEIGDISRFRNARALASWAGLTPTVRGSDLTVRHGHISKQGSPYVRWVLGQAAHVAKRHPEFAASYHGIANRRGSKIATVAVARKLLTRAYHLLANTDANNQHAATDTADNSTCVARGPRARSQTGRVTKPRVRSLQRHEPAASGHARAFD

SEQ ID NO: 465044 - protein, 333 aa, unidentified
MMNASEMIFVGIDVSKDSLELALDDKSKTQYLTNDETGIAAMLAAIKEAQCLAGVDTTRTIGAVVLEATGGFERLAAVALCEAELPVMVVNPRQARDFAKAMGFLAKTDAIDARVLSHFARTLHQSDKREQLLMCLPDAKQMALQALITRRRQLIEMRVAEDNRWLMCQKTQRKSIDAVRKVLNKQIGNIDSEIEEQLKSHFNHKLKLLDECKGLGAVTKASLMADLPELGSLSQAQIAKLVGVAPLNCDSGRSKGRRSTWGGRADVRSALYMAVLSAVRYNPVIKVFYDRLLAKGKPKKVALVACMHKLLTILNAIMKSGKPWDNHFDPKNA

SEQ ID NO: 465045 - protein, 424 aa, unidentified
MNVTYPTCCGVDVHKSFLVATIIKTTNGFEPSYQKKRFSTFNNSILQFKNWLLKNNCYDVCMESTGKYWIPVFNLLEDDINVTIANPKWVKAVKGNKDDTKDSKWIGDLFRLGLVRGSYIPCKKIRILREYTRYRYKLVSCRSSEKNRYQNALTVCNVALDSVVSDIFGKSSTSIIDYLLEQSGTSINHEEIASKLLKRLKSKEDAVIESIEGYQMTDSQKYRMRLIRAHMDYITAEINDVDSMIENMISSDPDYENAVQLLCTIPGVKHDSAITIISEIGIDMSQFCSSKRLCCWAGLTPGSNESGGKKKSVRITRAGVYLKPALVQCAHAAVKSDKSPYYKKKYESLVKRRGKKRAIIAIARMILTAIYQMLSTGETWNPSDLYKIDMPQVLVDKQKAKAIKQAKKLLQQEGIIPLDEPIAS

SEQ ID NO: 465046 - protein, 370 aa, unidentified
MSKRIAYLGLDVHKNSITMALFIEQRKEEEFTKKVANNLSSLLKLIKKLKEEYHLRVCYEASGCGYSIYRKLIKHGIDCIVVAPSLIPTDNKKVKTDKIDAIKLAIYLRSGLLTAINVPDEQQERDRDLIRFRIFQTNELVRIKQAICAFLLRKGISYSDSTPFTQSYVNFIGTVELPYDDRLMLNRLIGHYNYQKTLVNELTDDIEKLSQTQRYKEQCSILCGFRGIQTITAMTLLTHIPDFRAFPHPSKLMSYIGLTSKEYSSGEKSIKMGITKQGSSILRKALILSAQQYNKAEKTGIHMLMKRKGLSSTIIALVQKADRRLKNKYFRLVQKGKNSNIAKTAVARELVSFIWESMIVYHQGEIKEAS

SEQ ID NO: 465047 - protein, 324 aa, unidentified
MNSHSKKEMIPPVVNPDTTFVGLDISKSRLDSFVPGGQPREDANTPEGHAALIQHLRKLRCPRVICEATGGYEKAVVAALLAAGIEVCVAQPGRVRHFALAEGLLAKTDRIDARLLARFGEKIQSRCELPADPHATRLREMLEYRRVLSEQIVAAENRIELASGYLREGLQVQIATFKSSMMQVETDIATHLSTHPDLDGKAKRLRELCGVGPVLSATLIAYLPELGRLDGKVISSLIGVAPHPKDSGQRRGRRSVAAGRGCVRHVLYMAAVSATRFNPILAAFYRRLRDEKGKPHKVAIVTVMRKMIVVLNRMIAEPQFSLAS

SEQ ID NO: 465048 - protein, 369 aa, unidentified
MQENTNVATLVDLRKRKNIGRMTIGIDLGDRRSHFCVLNEQAQVIARGFLPTTITAFRREFESLPPCLVAIEAGAHSLWANQVLKVCGHDVLVGNPRKIRLITESDRKSDRVDAESLARLARADRLLLAPIQHRTQEKQVQLSVIRARHVLVRSRTSLINCARGLVKPMGLRLPACSPEAFPKRTATTSLPELLRVALAPLLKQVETVSQAIRDYDRQIEQIAATQYPETCLLKQIKGVGTLISLTYVLTLEDPHRFSKSRDVGAFLGFLPREKQSGERAPRLGISRAGNEYLRTLLVQGAHYILGPLGPDTDLRRWGLQLAARGGGGAKKRAVTAVARKLSVLLHHFWKTGEVYEPIRKTPLAEIPAA

SEQ ID NO: 465049 - protein, 385 aa, unidentified
MQVMIEGQSHFQPFGLSYWGFADLNKGVGSMTASYDYHIGVDYHKSYSHLVVQDSNGKTLRSGRVKNDRQSLGGFLERYRDNSHAVVEATRNWMVMYDWLDDICDDVVLAHPLKVKAIADAKIKTDKIDATVLAHLLRADLVPEAWAPSERSRDLRVALRERMFYVRLRTMTKNRIVTVFDRYPEQTAQLKKLGDLFGKAGRVQLAQVNVSEIDRIQIDRGLAFIGDIDVRIKQSEATIRAMTKANANVKLLKTIPGIGEFFARLIDAEIDDIARFRTPKKLAAYAGLVPSTYSSGGKTFHGKIIKQGNKWLRWAFVEAVAPAIASDAQLRAQYEHLKIRGTNKARVAIARKLLTIAFQILRDQRAYEPRGECTPESASTISRLS

SEQ ID NO: 465050 - protein, 398 aa, unidentified
MTESSDYESVQVFIGVDVGKDTHHAVAINRSGKRLFDKALPNDENKLRSLISDLKQHGQILLVVDQPATIGALPVAVARSEGVLVGYLPGLAMRRIADLHAGEAKTDARDAAIIAEAARTLPHALRTLKLADEQIAELSMLCGFDDDLAAQTTQASNRIRGLLTQIHPALERVLGPRLDHPAVLDLLQRYPSPEKLASLGEKKLAAQLCKLAPRLGKRLAADIAQALAEQTVVVPGTNAAAVVLPRLALQLITLRKQRDEVALAVEQRVLAHPLYPVLTSMPGVGVRTAARLLTEVACRAFASVAHLAAYAGLAPVTRRSGSSIRGEHPSRRGNKALKRALFLSAFAALRDPLSRAYYTRKMSQGKRHYQALIALARRRCDVLFAMMRDGTFYTPQAS

SEQ ID NO: 465051 - protein, 391 aa, unidentified
MVCVGIDVAKDKHDCCILDSDGTIRADCITIPNNMDGFKQLLQTIRDCTKKSDKIKVGLEATGHYSYNILGFLLDNDLAVYVMNPLHTNLYRKSLSLRKTKTDRVDARTIATMLLSDVDLKSYTDTAYHNEELKSLTRYRFDKVRERAKLKQSVSRLVTILFPELEKLVPSLHIASVYALLSEYPGAKQISEIHLTKLTNLLATASKGRYGKDKAIQIRDAARTSIGSVMPAKFLELKHTIKLIRELTSEIDEIEVSIQKIMDELNPPILSIPGVGIQSAAMILAEIGDFSNFESPDKILAYAGCSPSTYQSGKLTNCYAHMEKRGSRYLRYALYNATKYVCYWNPVFAEYLAKKRAEGKHYNVALSHATKKLVRLIYALQKSGKAYLTAA

SEQ ID NO: 465052 - protein, 310 aa, unidentified
MDATVVGIDVSKDRLDVHLHPSAESFAVARNAEGLDALIARLSPLGVAAVAVEATGGFETVVAASLSAASLPVIVVNPAQVRSFAQALGKRAKTDPIDAAVIARFVGATKPAIRALPDADTRLLADLVARRRQIIQMIVAERQRERQTTVPRFKKSIARLLKALEKELNAVDADIDDAVRGSPVWCEKEDLLKSVPGVGPVVARTLLAEMPELGSLDRRQIASLAGLAPWTRQSGKWRGKSFTGGGRSSVRATLFVAAMVAAKHNLPLKAFHQRLIAAGKPKMVALIAVARKLLTILNAILRDNRPWQSA

SEQ ID NO: 465053 - protein, 336 aa, unidentified
MGEIIIIGLDLAKSVFQVHAVDAAGRVVLRRQIKRAQLLAFFAALSPCLVGMEACSGAHFWARELGKLGHDTRLMPPSYVKPYVKRGKTDAADAEAICEAVTRPNMRFVPIKTEEQQSVLMMHRARDFLVRQLTQVSNALRAHLGEFGFVVPKGVQNIERLLTLAEAGNLPANALNSVRLLAEQFRDTKVKIEDVTAEISRTSETDAVARRLKTIPGIGPITSSVLAATLPDASGFKTARDLAAWLGLTPKPHSSGGKDRLGKISKMGNRYIRRLLYLGAMGVIAARRRKPAGDDWLWQLLERKPVKLVAIALASRNARTVWALLRSGENYQTARA

SEQ ID NO: 465054 - protein, 339 aa, unidentified
MNEVTLIGIDLGKHSFHLHAQDAAGRMVFRKKLSRQQLLRTLAKVPSCRVVMEACAGSHWLARQLAGMGHEPRLISPQFVRPFVVGNKNDFGDAQAICEAACRPSMRFVSPRNEAQQTVSAMHRLRERLVRERTATVNQIHGFLLEFGISLPRGAALMSRLPTVLDHETLPPRLVGLVVRLRAQVHYLEEQLRQVVQDLKAALREDDKSRRLLEIPGIGPITASALAVELGDARQFANARQFAASIGLVPRQYSTGGKPTLLGISKRGDRNLRRLLVQCARAVMQHTASRTDALSLWVKTLSTRRHSNVVACALANKLARIAWAVLARGTHYQARALTT

SEQ ID NO: 465055 - protein, 360 aa, unidentified
MGAISHQVCIASPEGQILEEFAMPHDEEGFRHFFRRVEHHRKGGPVAVAMEGYGGHARPLDGRILSRGRALFNVNNLKLARFREIFSAPAKSDRRDAWLISTLLALKEKHPAARGVLAPVVEVPEVNRQLKRLTRRRRELVREKVRVTCRLTCDLRSVCPELLSITGSVENLWFLRFLCSRPDLASLARMRPESILKIPGVGKAYAQAIRSWQRGATFSEEVSCVSPMISSDAARLLKLKEEISLLEARMGELLPRSAEASLLSTIPGFSLISACELAGEIGSFSRFSGEASLALFLGMCPLDHQSGSYRGTRVPRQVNKRAKGAMMAASWHNSRMVPLQFRARPKPSIFSARPWVAPNE

SEQ ID NO: 465056 - protein, 428 aa, unidentified
MSNEEIIRRRQFCQISKDISGSDQYLVVGIDVAKNKHHAFMGTATGHCIFKRFVFENTIEGFSRLLETVEQLKARHGLSKVAYGLEPTGNYHKPLARHLICCGCNVVLVAGQAVKNNRQLLDGRWDKNDTKDAANVADLVSRGRCLYLDWPSDQIIDLRQLLSLRRRLKKNEHSLRMRIRNGLLALYFPELDSYYGSCESETLAIVRWCLDPDKIAMMDHGQFFKLVTRIRRGVAQKLRLNKIHQAAIDSVGCPMGPAGEFEAELLVDSLDYVRHQIHDTEDLIEQISMDYPEYSYLLTIPGFGRYISARVLSAIGDPFRFKNRRQVLKMAGLDLCANRSGKTSDSAIPVISKKGSSDLRYALYQAAHVASSRVNHFRAYFANMLRGREREKGIQTKMRVKLSAKMLVIAWTLMKRKEVFDPTHLNIA

SEQ ID NO: 465057 - protein, 404 aa, unidentified
MKGPIVSIDVSKGKSDYQAFKEMNVKYTGSRSIKHTKEGFDEIVSLVREMEKKLETEVCVVYEATGVYHRVLKKVLEDNNIKQFIINPLLSAKTRKNDSLRSPKTDKLDPKSIAKTYYSHSLHNSHKLETIYHELRELSRYYEDILVHLRKDKVAFRAQLDVVFPGYDTLYDDLYGPVALAVIEKYPHPEMLQKKKINTVSKVIQSKTCHRQAMSDTMADKAIEYSKTIYSGCDKDDIEVLILQRFIKKLKEDMAEAERTIGEMIKLVQELPDFSIIKSIPGIGDNLAARIIAELGDMTRFKKKNELVAFAGLDPRISESGQNDGDHMHITKKGNKRLRCLLYLAVTCSIRLKRDDNSIKDFYIKKKQQSNPMCSKAAKTACASKLVRIIYSMCKTGELYQYNK

SEQ ID NO: 465058 - protein, 354 aa, unidentified
MIIIGADYHPGFQQIAFVDTDTGELQERRLEHREGAEKFYRDLAAQELKVRVGMEASGHARWFERLLAELQFELWIGDAAEIRTKRVRKQKTDRQDAQLILRLLLEDRFPQVWVPSWENRDLRQLLWHRHRMVQARTRIMNQLQAVALNEGLRCKKKLWRDAGREQLESFRLAPWASRRRHDLLELLDRLTPTIAELTQAIEQEAEKCPAAQRLRTHPGVGALTALAFVLILGRADRFQCGKQIASYLGLVPSEESSGQRRRLGHITKQGNSLLRFLLVEAAQVTVRSDQEWRHRYFHLVLRRGRKIAKVAMARRLAVRLYWMWRKGWDYQQLTKFGSHAGEPGNPDGVQSSTE

SEQ ID NO: 465059 - protein, 353 aa, unidentified
MEHANRVDFSGQTIYIGIDVHKKSWTVSILLEHLEHKTFTQLPEVAPLVSYLHRHFPGASYRAVYEAGYCGFWVHDRLVENGIVCMVTNPADVPTRDKERRRKGDRSDSRKLARCLRSAQVEGIHVPTRATTEDRGLIRTRQAMVRKQTRCKNQIKSLLLFYGFPTPEESRSWSRNYIRWLEGLRFERESGNLAMRAYLTELMQLRQIIAQLNRDLLLLSRTDDYREGVHLLKSIPGISTLSAMVFLTELGELSRFASLDKLCGYVGLTPDTHGSGEKQGVGDITRRCNQMLRSLLIECSWTALRKDPSLALAYETYCKRTRRTKAVVKIARKLLNRIRFVLNTRHRYAMNVA

SEQ ID NO: 465060 - protein, 377 aa, unidentified
MKKNIRFVGLDVHAETIAVAVPEADGEARSLGVIPNRPEAVRRLVKKLGPAESLQVCYEAGPCGYVLYWQLSELGVHCEVVAPTLVPVKSGDRIKTDRRDALKLARSHRSGDLTPVWVPDAEHEALRDLVRAREAAKKDQLRARHRLQKLLLRRGLRPAEGIKAGTVRYLTWVKTLQLEPAALAATLLDYIAEVDHAHERIERLERAIDQAIEAAPEAIRAVIEGLQSLRGVARISAATIVAELGQLSRFGRAKQLMGYAGVVSSEHSSGERIRRGAITKTGNAHLRRILVEAAWAYRHRPYLGGELRRRQKNASENVKEISWKAQHRLHSRYARLMGRGKTKQQAMTAVARELAGFVWAVGVEVERQIASRPARAA

SEQ ID NO: 465061 - protein, 374 aa, unidentified
MKNIRFVGLDVHAESIAVAVAEAGGEVRSLGVIPNQESAVRRLTRRLGKKEDLRVCYEAGPTGYVVYWWLLRLGVHCDVVAPTLVPVRAGDRVKTDRRDALKLARCYRAGDLTPVWVPDAAHEALRDLVRAREAAKKDQLRIRHRLQKYLLRRGARPPEGARSWGAAHRRWLLTVRFQHPAQNTVMLEYLGEVEHVEERLRRLDQAIQDTIATAPDHLRQLIAGLAAMRGIARPAAAMIAVELGPASRFAKPRQLMGYAGLVSAEHSSGGTVRRGAITKTGNAHLRRILIEAAWAYRHRPGIGIELAKRQKGISPAIREIALKAQHRLHRKYVRLASRGKPHQQVVTAVARELLGFVWAVGVQVEHELPLEKAA

SEQ ID NO: 465062 - protein, 395 aa, unidentified
MFIVGIDVAKRSHEVCMITSDGQTVQRPFSIRNNCTGYNLMLEKIRKHTNIKSQIVFAMESTAHYWLALFTRLRKDGYHVILLNPIQTSAMRDMFIRKIKTDAKDSFIIAELIRFGRYAESNVAQDRLLALKELCRNRFYLVDMAGDLKRKLIALIDRVFPEYEAQFDTIFCKSSVAVLKKYPTPQKLSNAHLDKLTELLWNSSNGHFGEWKARELRELARNSFGVEDCDGAYSTLILLMLDQIQSLSGKADALEKEISRLFQSFDTTVTTIPGVGPIIGAVILSEVGDISRFSSADKLAAYIGVDPSVNQSGEFQAAHAHMSKRGSPYLRRCIWMASQVAVQRDPMFRAYYEKKAAEGRKYMTIIGHVTRKMTAVVFAILRDHKVYEPVLPTAA

SEQ ID NO: 465063 - protein, 380 aa, unidentified
MRHVCGLDVHKDSVFVCILNEKGVVFQEKFGVLTTELERMVGVMLEHGVTEVGMESTSVYWMPVWRVIDPYVEQKLVNPYFIRQLPGKKSDVKDAEWIATCILKGLVRGSYVPEERIQQLRQYDRRIFDLNGDIVYKLTKLDAALQRCNIRLSNYVSTTDCRSYSDVVEAIADGETSPDTLLECIHGRIVNKHGADVIRSALTGVITSVDADVIGQLREEIELARRHRDECQKKMDELCREWFPKQYANLQTIPGVKARAATAIIAELGTDMSSFEDAAHLVSWVGLRPRNDESAGRIKARGITHGNKYLRQTIIECAWGASRTRDCFYAKFSYHQTVVRRKSRMKVLVAIARKMLTAIWFILHDGVAYRDFERDVTTAA

SEQ ID NO: 465064 - protein, 426 aa, unidentified
MSKRPRRNHSLPSRSHGEVDSDRHFGRVRLLPPTLEETMQTVADRPEAPTAIRTDLGAIFVSLELSRSTWLITSLSPGGGEKMSKQVVRGGDVAGLLERFARLREKARARTGKVFPFVVIQEAGLDGFWIDRALQNEGIESHVVDPASIATSRRRRRAKTDGIDGEALVRALLAFKRGEPRVCAMVKAPTPEEEDRRRLCRERKVLIVERVRHVNRVKGLLFSQGISGYEPLRRDRRQRLDTLQTGDGRLLPDHLKAQVRRELDRLELLLKQIKAVEAERDVLLAAQRVAASAPAAMLLDIKGIGPEFAAILWSEGLFRHFDNRRQVASYAGLAPTPWQSGSVDREQGVSKAGNPRLRTTLIQLAWLWLRHQPHSALALWFEERVRRNGGRLKKTTIVALARKLLVALWKYVTAGVVIEGAVMKRT

SEQ ID NO: 465065 - protein, 400 aa, unidentified
MLSIGIDVSKGKSTVCGMKPGGEIVYTPFEVQHTREGMSELVSLLRSSGEEVRAVLESTGSYHCPVVAALLENGIFVSVVNSLRMKRFCSQSIRKVKTDQIDAMQIALYGLAYWQELQPTKLPEDTYRELQLLARQYYQMTSLLIKAKVDFNAICDQVLPGMQELMNDHAGRHKLSDFVLRYRHTTHILEMGETRFRKDYCKWAEKKGYRNCERMAALIFATAQNGIPVLPNAPSTQIVITEAIRVLHTVEASRDAILTQMQALAKTLPEYSLVREMPCIGDTLAPRLIAEIGDVRRFHSKRALIAYAGIDAPPYQSGKFCANNRHISKRGNRYLRKTGYEVMQSYVMHKPANDPIFTFIEKKRGEGKSGKLAMVAGLNKFLRVYYGKVTELYRSLPAIE

SEQ ID NO: 465066 - protein, 405 aa, unidentified
MKKNIKAADKKKQNQNSHITEPGKTLMKRVQELRHTLKESESWRGPRRTSKESAFSVGIDLGDKKSRFCFLDAQGGIVTEDALRTTQEEFKAYFSSIPKTRIAIEVGTHSPWVFELLESFGHTVYVANPRRMESIHKNRRKNDKVDARTLARLVRADPELLYPIRHRGAEVRHDLVLLRARDVLVGVRASLINSMRGLVKSVGERLPKCTVDSFHNSVANSIPERLEPALRPMLEQIELLTAKIKKYDKLVEQLAAKKYPETGVTQQVKGVGPVTSLAFLLTIENPHRFQKSRDVGPYLGLVPRQDDSGESSPQLRITKTGDIMVRRLLVTSAHYILGPFGEDSDLRRHGLKIAARGGKNAKKRSVVAVARKLGVLLHRLWLTGEVYEPLYNSARTNALATAGKA

SEQ ID NO: 465067 - protein, 320 aa, unidentified
MLSFCGIDVSKDRLDVMVLPEGQRSSVPNDVAGWAELVEQLRGCSIAAIGIEASGGYERGAIRALLAADLPVRQVNPFKLRQFARASGILAKNDPLDARMIASFVAIMPTRPVPQQAPPAERLAEMLAVRRQLTAEKVAAENASRLLEDAMLRRLSRRRIARLAADIDLLDRQLVEVARTDAALAHRYRLLTSMPGVGAVLACTLIALLPELGRLSRKQAAALVGVAPYAFESGALKGRRRIWGGRANIRQVLYMAAMSASNWNPVLKAFRDRLAAAGKLPKVVIVAVMRKMITMLNAMVRDDVVWADRHSGRHIVPTAR

SEQ ID NO: 465068 - protein, 469 aa, unidentified
MQERNAIGIDPDAQGFVCAYVKRSETKVATRGYMATDSDLKSFLKWVHSQGDVIIAIEGSNGWSKPIEKVLREAGVIFYSFKPFDTDKFRKAVLGQNKTNAKDAESVARYAMALEGQGKLDQYKRVWFPDMELQLLTRRHKSVTEQLTAEFNCLWKQLRYASPDLYLALGGKNPEVESDRKVLKNQGILTLLSSLPDVGEWRSLGDEQILEAMGGEDYKGRRTLIEQLRKVMDSFQPTSEAMALLLRTSAQHIQMLKGVLRDIEKTLEKLTAENAAVQELRQMKGIATNTAAKLIAEIVDIRRFAREDSLACYAGLGLQEHSTGQRKDMIASELYNHRLKDAFMTAAKNVVRYDPDSHVAGYYRNLVKKGMSPLEATKRAARALVRVIYRRLSALTVQEETKKSGEQKRGEGSMASGLTRGGQSHISDIPPSSPANNIERGGSRVKRGTTRKGSTTNRSQRRKKLKKIS

SEQ ID NO: 465069 - protein, 337 aa, unidentified
MSRTRLDVHVMNEAGETLEVSAWPPDRAGLDRLAGRVRILGGPVVGVIESMNGARFVHDRLELAGWSVEIADAAKVKGLAPLACKTDRIDAWVLAELSRRDFVPAIWLPSPAVRAERERARFRLHLVRHRTALKNRVHASLLAFGHPCPVSDLFGVTGRALLASFRLPEPWASDVAAALSLIDTLDEQIKGIEVDLRRLGADHPYVRLLQTVPGVGWVLAYTIAAEVGDISRFSSPKKLAGYSGLCPKVYQSGGKDHRGSLAKNGPKYLRWALIEAATGAARHPAYKDHYQNTARRLGRQRGKKVARVEVARKLSEAIWHMCTNGEAFNPAGVPKAA

SEQ ID NO: 465070 - protein, 348 aa, unidentified
MNTGSKLVVGVDVAKNVFQVYTVERETGEVINKPVKRAQFLQWFANREPCLVGMEACGGSQHWARKLKEMGHEVKLMGGKMVKAFVCGNKNDAQDAHAIYLAVQQPSVKGVAVKSEGQQAILALHRIREGLVKVRTATINALRGLLTEYGEVFGQGRKAFDEGMKGALARLAERLPAPLIEALRDQWNEVARLDERMANIERSLQAWLRQDSAAKAIAEIPGVGLLTATAAVATIGDAKAFRSGREFAAYIGLIPGQTGSGGKVKLLGMSKRGDTYLRTLLVHGARAVLHHAKTPSPWLQQISARRPVNVVIVALANKIARTIWAVLAHERKYDREYVSAIPQTGFVV

SEQ ID NO: 465071 - protein, 483 aa, unidentified
MSQKKNSQRPGAKTTPSGKGKRGRRGKGMCMQDRPVLEANAAGIDIGAREIFVAVPPDRDEHPVRVFSTFTEDLEEMAEWLVSCGVTTAAMESTGVYWIPLYDVLDRRGLKACLVDARGMKNVPGRRTDWHECQWLQFLHSVGLLRAAFRPDGEVCAVRSLMRHRGELVAMTNQHIQHMHKALTQMNVQIQHVISDITGVTGLAIVDAILDGEHDAAVLAKLRDRRIKASEEVIRKSLAGNWRAEHLFTLKQSRRSYQHYQEQIVACDEEIEKLIVAFAPRVDPAERPLPPDRKRKERGRKKKIVNPQAGQAGFDLRTESYKLFGVDLTQIPGLMAMVLTLFSELGRDMSRWPTAGQFVSWLALCPDNDISGGRVLWRGMRKVQNRAGQLFRMAAFTLHHEQSPLGDYLRRMKSRIGPEGATTATAHKIAVIFYTMVKNQVEYDASIWAQRDAERDKRFEAKLKRQAQQRGYKLVPIEEKPAA

SEQ ID NO: 465072 - protein, 433 aa, unidentified
MPTTHPYDLVIGLDRSDRKADLHLIDTRTGTVQKQTVATSPEALHDWLVQLRRDHPQARVAICLEQPAANLIVFLETYSWITLYPINPISLQKFREAFVTSRAKDDGKDAQYLAELLLSHPDKLKAWQPDDSQTRQLQQLVLHRRAVVDQRTGLTNRLKALLKQYFPQALDLCGEDLWRPLATAFLLKWPTLQSLKKARKESLKQFYYLQGSRSQTLIEQRLERIDKAVPLTDELALLQSYTLRVQLLCKELQLLLKTLQQFDQQIAKVFQQHTDRPIFEAFPGAGPVLAPRLLASMGSERERFAQPENLQSFSGVAPVTKQSGGTCSIHRRYLCPKFLKQSFHEYAKESILHSRWAAAYYGQQRNKGCGHHTAVRALAYKWQRIIWKCWQTRTIYKEAIYEAALKKNKSPLIGLLDQIELGKSPVKSRAKKS

SEQ ID NO: 465073 - protein, 461 aa, unidentified
MKNKRVEKKPRQNRQTVAGLPTLRADVAGIDLGSEQHWVCAPALDGAGREVADFGGTTAELLRLAAWLKERRVESVAMESTGVYWIAPHEVLEGQGLHVLLVDTRHLAQVPGRDKKSDPSDCEWLQRLHSCGLLKGAFRPKEEVCMLRTLVRDKANLVAELGDWIRRMQKSLDQMNVRLHRAVSDVDGVTGMAILRAIVKGERDPEKLAELRDRRCRQSREEIAEQLRGHWREDHLFSLKQALTMYEAVEERIAAYDAEILRQLGAMQQQSQPGSAVPPVKNSQKAKSIRKRGEEPKREALYRMGGVDLTSIDAIGVGTVEVLLSEYGPDLSRFETEHNFVSHLQLSPHKPTSAGKPLKKKRRHTASTRVAAALRMAATSLRHSQTALGAYYRHISRRIGGDVAVFATARKLATLLYRLLRWGHAYVDEGAEAFERRYEQNRLLALKARAKQLGYELVQAS

SEQ ID NO: 465074 - protein, 314 aa, unidentified
MADPLSIGIDVAKATLAIAHHGKVCQIANTRSALKAWLKGLPQGSRIALEATSTHHLLAADLAYAAGHTVYVVNPKDARHYRLATGGRAKTDRCDALLLARYLEREHAELRPYVPHTPQQRRLAGLLKRRAKLVQAKGRIRQSLSGLTGFGAQAKAIFAKIDELVAKIDAQSAQLLKESPPQQQAYQRLQSVVGIGPVTGTALVAALSRGEFNDSDAFVAYCGLDPRPNDSGQKTGKRKISKRGDALLRRLLYTAAMSAARTKVWQPLYERYKSRGLSQVQVLVILARKLARLAWSLYKKHTTFDAQRLLQPLT

SEQ ID NO: 465075 - protein, 345 aa, unidentified
MQTITTVGLDIAKSVFQVHGVDAQGKVIVRRQLKRRYVLAFFQKLPPCLIGIEACASSHYWSRELQALGHTVRLMPPAYVKPYLKRQKNDSADAEAICEAVTRTNMRFVPTKTVEQQSCLMLHRTRHLFIRQQTAVINAIRAHFAEFGIVAPVGRTGVEELLKIASDGNDKRLPDVARVCIAALGAQLQMLKARILEFDRLIMAWHRSNQVSKRLDELPGVGPALATALVASVADPKAFRSGRDFSAWIGLVPKQNSSGGKNKLGGISKRGDRYLRSLFVAGALAVIRYAKKRGSKNRPWLAALLARKPTKVAAIALANKIARMAWAMMAKGERYKQPAALAAVW

SEQ ID NO: 465076 - protein, 319 aa, unidentified
MAQNDLVVAGIDVAKDKVDVCIRSLSLRRTFASTAEGRRELATWLRRKKVGKTVMEASGGYEREWAKALRNASIEVRIVDPKRVRSFAQSAGRLAKNDTIDAEMIAWFAETFGEARGQAYDATREQLHQMVNARQAMKDMQSKLASQGEHAVPAAVQRIHARISKTIAVELVKIEAEITALIQATPNFAELAEIIESVPGLGRTTSAALIAAMPELGQANNKIVASLLGVAPYDDDSGRRRGERHIKGGRRRTRNIFYMACLGAATRHNPVLKAFYDRLVAKGKLKKVALTACMRKLISILNIMIERRQKWDAKRYAVS

SEQ ID NO: 465077 - protein, 340 aa, unidentified
MSFYCGIDLGARKSHLCLINENDKRLLDKKMDNDLDEIESKLYPYKLSLKIVAESTFNWEWLVYGLQNRNYNVKLAHTLGLKAISWSQKKTDKWDAFTLARLLRVNMIPQAYIYPYELRPIRDLLRECIRLVTKRATEYGAISRMLLRYNIQGYNRNMIKHFTEKDIHQLYHHPFIRSKVTMELERINLLTKQIDSTDKKILERAKEEETFYLLKTIPGIGDILAFTILYEVENISRFTNARAFCSYCRVVPGIHQSSNKTHRSPNSKQGNHYLKWVFSQAAIMAIRYYPKIRRLHDNLSAKRKKAARLVARSIISHKLAQTTYHIMRKQCVYRERLLFG

SEQ ID NO: 465078 - protein, 387 aa, unidentified
MTNPAQVFEIIPRHYDIFGGLDVAKKNMAVTFTDHEALMRSLRLPYSSAHLLHYVRKHFPDRRVAFVYEAGPTGFGLHDELVTAGYRCLVVAPSMVPTAPGDKVKTNRLDSRKLSVQLRGGELRSIHVPAPRYRELRHLVQLRDTQVGQLRATKCRIKSLLLCEGLAFPPAPESSQWSARVLSELLELPCSPAVRFELDQLIGTLHFHFNSAAAAQKQIRYFCQNDPELRQSIRLLASLPGIGVIVATHLVARLGDWREISNVRQIAAFLGIVSSEHSTGEKENRGRITRTGDSRLRNKLIQSAWTAIRKDAELRAFYLRIYHRHPKKIAARKAIVAVARKLTTRIYAVLKEQRPYVLRPENLPAPLTAEETVGPRGRLVGPQNGQP

SEQ ID NO: 465079 - protein, 498 aa, unidentified
MKKKAYQAVGVKSVQIAEVVQRLADGPLFVGLDIAKAEVLVVVRDQTGKFERPWKVRQPTEVPELVQRLKELGQGRELTVALESTGTYGDALRQSLQDAGLRVQRVSAKATSDYSEIFDNVPSQHDGKDAAIIAELASTKRSVDWPCTPPTAWEGELADQVQWLDTQQDILQLWLGRLEAFQARHWPELAGLLALNSATQLQIWRHYGGPEALAQDPAGVERLNAWGGWFLSEEKITAILNSARTTIGVRMTAEQRQMLQRIAQAAQSARQEVQQSRSALEKLSKQEETLRRMSTVIGAATACVLYLTVGNPHDYSSAAAYRKALGLNLAERSSGQYKGALKISKRGPSLARRWLYFAALRMVQQQGVREWFEAKKERDNAKGQKAVVGVMRKLALAVHVVTTQNEAFDPARLFPGRPLVRPAAVSTPATSTPATSTPAVSTGPTDQGGSLPGALPPDPRDLAHRGQARTAAPQGQTTPETSADKPQRKSTRKSQRQT

SEQ ID NO: 465080 - protein, 448 aa, unidentified
MSERTIACEAPGIRMTFDSVAVRATKGKIMKPFNEITHYAGFDWARDHHDVVIVDRQGQIVADLRLQHTLEGWQQFRDQVKPYPALAVAIETNQGAAVDQLLQMDGTVYPVNPISAKSYRERKAPSGNKTDHLDAWSLAEALRLDGQHWKALQPLDSLTQQIQLLCRDEIALIEQRTALVNQLQQALCEYYPAALQAFDDWTQAYCWDFILQFPTPEKLAAAGRRRWEKFLHTQKLWRPQTAPPRLEIFQNAGKFCGSAPVISAKSLLAVSLARLLKALQLQLDQYRQQIQALFQKHPDHDLFGSLPGAAQTLGPRLLGEVGGPPQRFEDTQTLQCIAGTAPVSFQSGQIHRVRVRYQCNKILRHTVHLWAQCCLRVSPWAEVYYRQKRAEGKSHACALRCLGQRLLKILWKMLQTRQPYDADLHARHQKQHGSWVLALIKPEVKAGE

SEQ ID NO: 465081 - protein, 442 aa, unidentified
MEQTDRSRLEDFRQFRKSIRGSKEHLLVGIDVAKDKHYAFFGTAAGETLYRRLVFENSREGFRKLLAQAEAMKVQEGLAQVVFGMEPTGNYHKPLGEHLMRCGHRVVLVSGVAAHENRKTLDGRWDTNDTRDAANVADLMSQGKCLFYEFGVGPLQDLRNLLSLKRRWKRIEHGHRVRIRNHLVAKYFPELDRYYEQSESTALGIVHWCLDPSEIAGLEYGEFAQRVSSMRRRASQERRLQTIWKMAVDSVGCRAGEAVEFEARLMVEGLKQVRERIREIDEKIQEICGQFPEYEYLLTIPGFGPDVSSKVLGALGDPFRFRSGKQVLKLAGLDLSAERSGKTSGSAVAEISKRGKGDLRYALYQAAFIASTRDVDFIRYYTDQLRGREREPGIKTKMRVKLSAKLLVIAWTLMKKKEPFRPNQLGFGSQSGQSGTGAGRAR

SEQ ID NO: 465082 - protein, 377 aa, unidentified
MKRIKFVGLDVHAETIAVAVAEQGGEVRPLGVIPNRVESIRKLVKKLGPVEQLRFCYEAGPTGYVVYWQLTALGTKCEVVAPTLVPVKSGERVKTDRRDALKLARNYRAGELTPVWVPDAAHEALRDLVRAREAAKKDQLRAKHRLGKFLLRHGRRPPTGVKPWTLNYLSWVKHEVHFEQLAQEATLLDYLHEVEHAEGRIARLDLAIEEAVKLTPPQMRAVIEALQALRGVAQVAAVTIVAELGEVSRFTGARQLMGYGGIVASEHTSGESSWRGGITKTGNAHLRRVVVEAAWAYRHRPSVGKSLQKRQEAVSEEIREIAWKAQHRLHTRYRKLMARGKEKEKVVTAIGRELLGFIWAIGVKAEAAQKKTERLAA

SEQ ID NO: 465083 - protein, 343 aa, unidentified
MMKITTIGLDLAKNVFQLHGVDASGAVVLKRQLRRADVEKFFAQLPPCLVGMEACGSAHHWARVIGRYGHEVRLMPPAYVKPYVKRNKNDGRDAEGVCEAVGRPTMRFVAVKSVEQQATLAVHSTRALLVRQRTMTANALRAALSELGIVAAQGYEGLRKLIARLEEPSEDIPEMMRAALLVLAKHWQALDADERVLEQQIAKAARCNQDARRLMEVPSVGPIIASTILAKVADAKLFRSGRDFAAWIGLTGKDHGTGGKHRPGRISKQGDRMLRALLISGASAHLRQQKARGVTDPWLRDLLARRPYKVAMVAFAAKTARIIWAMLVKGEPYRDRASAPAAA

SEQ ID NO: 465084 - protein, 474 aa, unidentified
MKSKAYLGIDVSKGYADFLLLDEDKQVLEQPFQLDDNKPGREKLGELINQWFDNGLKELFCGVESTGGYENNWYDFLRRKIFDKNVKVARLNPKGVKSIGDAALKRTITDAVSAENIAVYLISFPEKVMYSDRDFEGSQEYKEGRQFMNFKGMLIKQKVQLNNQLEKLLYQHFSEMLVYSRHGIPDWLLRLIIKYPSAEQVRRAGERMLPRIKGITLEKALALKSKAGTSDQVIQSDIRFVISETAQEILHKKERIKKLETRIIQKYKDDPQVKLLKSIKGIGVSSAVSIVLEIEDVRRFPSAKKLCAFFGVHPTFKQSGDGTWNIKMSKQGRSEIRGALYMCCLSAIRSDENFRQLYDRFRGKGMNHYQTMGVVMHKMLRIIFGVLKNKTPYDPAIDRQNVAKAEQKRKQAKENALLIEQQKVKKSERYKLNSTDAPVSRRTAKKRKKQETSQSSQMEASTGSIPARIKVLKL

SEQ ID NO: 465085 - protein, 341 aa, unidentified
MNVTTVGIDLAKNVFSVHGVGEHGKVLLRRTVSRAHLLELMAGIGPCLVGLEACSGAHHWARELGKLGHTVRIMAPRFVAPYRKSGKNDGNDAEAICEAVARPSMRFVPVKSAEQQALLTMHRVRQGLVEERTALINQLRGLLSEFGFVCPQGRYQARRAFPIVLEDPDNGLPELARSVLVELNERIGELDVRILAYERRIEALARQSEAAQRLMAVPGVGPVTATALIASVAQPQAFKNGRQFAAWLGLVPRQYSTGGKPRLGRISKRGDVYLRTLLIHGTRAVLSRVSQKTDRASAWVRALIERRGYRRAAVALAAKNARRIWVLLATGQSYTPQSAAQ

SEQ ID NO: 465086 - protein, 387 aa, unidentified
MSKSNQRVVGLDVHPDSFAGAILAGRDPAGAQVLSTSTRVELKELERWAERQTGLEDTLVLEASGNAFAVAGRLRKLGRAVVILDSHQAGKIGKVYCATDRVDAIKVARIYLSGLSAQVWQPDAKTLEQREVFSAYQGVVKESTRLQQQLKSMLNEHCVRLPKGFRLCHPTALDRLAKVRAWTPVQTMLLRQLHQGLRDARGRRSELRRHMAGEILSNPEMLRLARLCGLSLVTIYGLQAAIGDIQRFSQSNKLVAYFGLNPSVCQSGNYEGGTALKRHGRGPLRALLIQSAKKLLQVPNPLQKWGLAVAARRGRNKAAVAVARKLCVALWHVLKGHLIGTLERLDSLETKLGKLATDLGLPAIKALGYQSKDAFIQEKLALLKSYP

SEQ ID NO: 465087 - protein, 423 aa, unidentified
MENMYERVAGLDVHKATIVACVRLGSGRKVTRECRTFETTTDGLLALLAWLVECRCSHVAMEATGVYWMPVWKILSDGDFTLIVANAAHIKNVPGRKTDLNDAMWIADLLACGLIKASFVPEEAMQELRSLLRTRKQLGREQTRHVQRIQKTLVEANIKLDSVLSDIMGASGRRMIEAMIAGVRNPRRLAALASAQIKATPKQLYDALHGRLTDHHRYLLKLHLQQWDSLDATIRDLDQEVAARIARMDKEVKAGEAPFRDLIGLLCTIPGVSTLSATTVLSEIGRDMSRFPSAGHLVAWAGLCPGQNESAGKRKTARLRKGAPWLKTMLVQCAWAAKRKKDSYYKAQFFRLQSRRGPQKAICAVAASILTAIYHILKTGTEHLDLGANHFNRRSTEGQTKRLVAQLTRLGFEVHLQRTAQAA

SEQ ID NO: 465088 - protein, 356 aa, unidentified
MTIVAHAHPFVVGVDTHARNHALTVLAAATGEVVAAEQFPATSAGMARAVAWAARRTGGDLATLWVIEGVATYGARLARTAKGAGYQVVEAARMNARAHHAVGKSDPLDAHRIAAAVLPLDVDELRRPRRDEGVRAALRVLVAARDHMTAERTATVNALIALVRVVDLGIDARRPLTGKQIAEVSRWRTRDEEIGLTTARAEAVRLAKRVADLDDDIAANTTTMAELVRQSPAAVLLEKTGIGPVTAAIALTAWSHPGRVRSEAAFACLAGVNPIPASSGNTVRHRLNRGGDRRLNRALHIATITRMTHDPDTRAYVERRRAEGRTTKEIRRCLKRYLARQIYRTLNAADTGPSPA

SEQ ID NO: 465089 - protein, 349 aa, unidentified
MNEVITIGVDLAKNVFQVHGVDAEGSVIVRRQLRRGQMLPFFKKQPPCLVGMEACATSHHWAREIAALGHQVRLMPPRYVKAYVKRNKNDMADAEAICEAVTRPTMRFVEIKTADQQSVLMLHRTRHLFVRQRTTLINALRAHLAEFGIVAGVGRNGLERLLKVIEDGDDDRVPPSARDCLLALRDQLEMVKHQIFEADRRILAWHSSSEISRRLDDIPGVGPLIATALVASIPDPHAFKSGRDLAAWIGLVPRQHSTGGKERLGHISKAGNRYLRMLLVVGALSVIRRAKQTGYTRRPWLTELLQRRSTKIAAIALANKNARTAWAMMTACRRARVTASWPCAISLRW

SEQ ID NO: 465090 - protein, 400 aa, unidentified
MGPPIRVAVDVGRNSHHVGIADPQGRILEEFSIPHSQEGFAEFFTRVERHRKELELPVAVAMEGYNGHGRPLDRMIQEKGYRLYNVNNLKLARFREIFPGPAKTDSLDVHKILELFHLKDHLPMAKDVLQEVPRIPAVNQKLKRLTRRRRQLVNEKVRVLSRLQTDLQAICPELLGLPGSVDNLWFLRFLASCDDLEELAQLTPEEIRGIPGIGKKYAEVIRGWQRRAEFSPEVDYVGPMIVADARRILELLQEIAALEGVIGELCRESELARRLRSIPGFGAISAAELAGEIGTWERFSSEASLALYLGMCPLDKQSGQVHGTRPPRQVNRRAKAAMMVAVAHHIWEVPESRAYYEKKRAEGKRHNQAVRSMARHLVRVMWSMFKQGRDYEVREVSCPS

SEQ ID NO: 465091 - protein, 326 aa, unidentified
MIIIGIDVSKAKIDCLWLRDAATGKVKSKVFKNTTKGHSELLQWATKNTHEELEGIHFIMEATGIYHEVLAHELYEAGAKVSVVNPAKISHYAKSFGVRSKTDKRDSLIIARFGATQHPRFWQPEPSEIRTLKALISRYEAVCKDIQRENNRLEKAVLSPISNEIITSIETMLAQLEAEKKRLEDVINQHLNQHSNLKKDQVLLESIPGVGPIVSRLMVSVIRSREFAAAPQCAAFLGLVPVQHESGSSVRGKSRLSKTGNANIRAKLYMAAIVAIQHNPDIKQQYERLLKNGKSKMAALGAAMRKLVQICFGVLKHQTPYQPRVN

SEQ ID NO: 465092 - protein, 285 aa, unidentified
MQRRRKLLDPTTTAARLFAGVDVSKDRLDVCLRWSEPESHEREEAFFVAYEDSGIDALLSRLLQERTVLVILEATGGFERTVVGALAAAGLPVVVLNPRQVRDFARATGRLAKTDRIDAAILARFAEAVRPAPKPLPDGEIRALQAIVARRRQLLGMIAAENNRLSSAPKPVAKRIKAHLRWLEKELSRTERDLEAAIENSPALGENEALLRSVPGVGPVLARTLLAGVPELGTLTHKRLAALVGVAPLNRDSGTLRGRRSVWGGRADVRAALYMGDLVAPAATR

SEQ ID NO: 465093 - protein, 397 aa, unidentified
MYIVGIDIAKRKHEAAVIDGEGTVIIKPFSFTNNCSGYNRLLAMLTKAKLPLDEVSFAMEATGHYWLALFTRLQKEGFRVQVINPVQTNSIRSFYIRQAKTDPRDALLIAEVIRFGHFSESTLHPENIYELRELCRGRHAIVSMQADVKRKVVALLDQVFPEYETAFTNMFSDTSMAILQTCPTPKELSEMPLEELCHLIEVSSHKRFRMAKAQELQELARNSFGFAMAGDVFSTMIRLYAKHLVFLKQQVQEMDRKIAEIMDTLDTPITTITGIGPTLGAYILSEIGDISRFSSAAKLAAYAGIDPTMRQSGEYNGVRNRMSKRGSPYLRHAIWLAASSAVLHDPALKLYFQKKRDEGKPYMASVGHACRKMVSIIYAVMRDNKAYTPCIPNEISA

SEQ ID NO: 465094 - protein, 344 aa, unidentified
MSKTPIAVLGIDLGKNSCSLAGMDAAGAVVMRKRMTRDAIVAFAATLPACVIAMEACCGAHFLGRTLALHGHTIRLMSPEYIQPYVKAQKTDDRDAEAIAEAATRPTMRFVSLKSEDQLDLQILHRVRERLVNARTALINQLRAVLLERGIILPKGRINLMRRLEELMAGDPAVSARTATLLADLRAEWAGLDQRIKTYDDELAAVTREDVQARRLATIPGIGVINATALLAAIGDGSAFAKGRDLAAWLGLTPRQHSTGGKTKLLGISKRGNGYLRKQLIHGARAAMPHLAAKPNQLGGWLQAMLTRAHPNVVVVALAAKLARIAWAVLRHEKDFDRQALIAA

SEQ ID NO: 465095 - protein, 340 aa, unidentified
MTITTVGLDLAKSVFQAHGIDETGTAVLVKKLHRKQMLPFFSKLPPCLIGVEACGTAHYWARTLAAMGHEVRLIPPSYVKAYVKRGKSDALDAEAICEAVQRPTMRFVPTKTVEQQAILMAHRARSLLVRQRTMAANALRAHLAEFGLVANPGLAHLATLAEQALSDRDGLPPYARTALDTLVRQITALTGEIALLDQQIAKWHAESEASRRLAAIPGLGIITATAITATVSDPDQFTSGRQFAAWLGLTPQQHSTGGKARLGGISKQGDRYLRRLLVVGATAVMRHVKDKPTPMANWIRKLSEKKPFRVVSVALANKLARIAWVVLTRKEAYQPYAHLA

SEQ ID NO: 465096 - protein, 594 aa, unidentified
MEETGELAELAERVAALDIGKAALTACIRVPHEDKPGRRCQEVREYATTTRALLELADRLRCQGVTLVVMEATSSYWKPPFYLLEAEGFECSLLNARHVKNVPGRPKTDKCAWPGGHLGGMKCSPRSAGRGRRIQNGALESPRQVWRRARGTWDCRYEHEPQLRLLPGPSRWVVITAQRGGEMELIHERVAGLDVHRDEVAACVRTAGPRGGVQVEKARFTTTTGGLAVLARWLAERQVTLVAMEATGVYWKPVYYALEDRFELWLCNAHHVKNVPGRKTDMSDAEWLADVAAHGMVRPSFVPPPAVRELRVLTRYRQKQTSIRAGEIARLEKVLQDAGIKLTSVASKVLTQSGRAMIQALIAGQRDPRALAGLAKGKLRPKIPQLAAALDGHFGAHHAVAAARILAHLDFLDATIAELDAQIAARVAADYQSAARLLREVPGIDRAAAEVIIAETGADMSRFPSPAHLAAWAGVCPGNHESAGKRRKVATTPGNQWLRRTLIESARAAARTRDSYFGAQYRQIARRRGPNKAAVAVAHSMLDVIWHMLTTGEVFTDLGADYFTNRQDKEHQTQRLVRQLEKLGYTVQLAAATA

SEQ ID NO: 465097 - protein, 440 aa, unidentified
MRGLPEEIPDADSEKVWERVCAVDVAKESGMVCTRLPAAGGRRVSRVWQVTATTNAVSDLAADLVAAGVERVTVESTSDYWRIWFYLFEAAGLDVQLVNARDVKNVPGRPKTDKLDAVWLAKLTEKGLLRPSFVPAAPVRVLRDYTRMRVDLVRDRTRYWSRLEKLLEDALIKVSSVASTLRTVSTRDMVEALIAGQRDPATLASLAHGALRRKRNALIEALTGRFDDHHGELARILLDQIDRLDTEIAKLTTRIGQILDDIDPPSQPGGGDGDTPAPDARRRLAEIPGISTESAQLIIAEIGLDMTRFPTAAHLVSWAKLCPRTIQSGTSLTAGKTGKGNPYLKGALGMAAATVARGKGTFLSERYRRLVTRRGRGKAKVAVARSILVIIWHLLNDPTARYHDLGADFHERRINTTRKINSLVRQLEALGHTVTLQPTT

SEQ ID NO: 465098 - protein, 459 aa, unidentified
MAQEILKTLKLHAAGIDVGAQSHFVAVPPGSAPEGQTVREFDAFTCGLRATSQWLRACEVTTVVMESTGVYWVPLYELLEADGFEVLLVDARHVKNVPGRKSDVRDCQWLQQLHSVGLLRGAFRPPEHICVLRSYIRQRGMLIQHAAQHIQHMQKALTQMNLKLQHVVGDITGVTGMKIIQAILGGERNPQKLAALRDRRCKHTVDEIAKALEGNYRQEHLFALQQAVDLYVFYQRKIAECDAMLETHLKTFEPPPDRPELPSPPAGRKPQGNAPQFNLRAQLCRILGVDLTEVDSLDAYTVAKVIAEIGTNVSAWPSLKHFTSWLGLCPANKISGGKILSSRTKPCANKAATALRIAAQTLYRSQSALGAFLRRMKSRLGPQAAITATAHRLARIIYSLLKSGRCYHDIGAEAFEAQHRERVLRSLERKAKYLGYKLVAVVSKPSESREIVTAVPVGS

SEQ ID NO: 465099 - protein, 331 aa, unidentified
MTRIICGVDVASQSLEARISQQGAADSFPNNPEGIAALAAFCHTHGVELVAMEATGGYEQQAFAQLSEQGLPVAIVNPRAVRQFAQSMGSLEKTDAIDAGMIAWYAETRKSQPLCLAPRTQLELRARVTRLRQLTEVRTAQLNQQRLVTNRAVQDGFRQMLAFLAAQMEELEQAIAQLIGADPLWRELNQAFRTIKGVADRTVARLMAEMPEIGALSNKTISKLAGVAPLANDSGNHQGKRAVRGGRATVREILFIVASVVGRHEPDFIAFQQRLRAAGKPPKVVRIALAHKLLVRLNAKAREVRQRLAALQPDHMALPAGILVSHTEASR

SEQ ID NO: 465100 - protein, 342 aa, unidentified
MSSANTYIGVDLHKKTCYMTVMDKAGVVSKQTEIKNDREEIKKFFAVYPKESQVAVESTMNWIPFYEQVEKMGFEVVLSNPLMTKAVAAARIKNDKVDSKILAELLRTDFLPTAYIQPKAIRDLKELIRQRAVYVEMRTRIKNKIHSVLFKTGDKHEFTNLFGKAGRKFLSELKVAPVYRTELDRYLLTLDNLGLQIEDMEQDIEAKAKSDYDCKLLCTIPGVGPYTALMIKSEIGDIARFRSSGRLCNYAGLIPSTYASGEKIRTGRITKRGSKWLRKALVDAVTSSCRNANKISVFYKKLKKSKGTGKAKVAAARKLCSVIFAMLTDKQPFKEFVPVKER

SEQ ID NO: 465101 - protein, 421 aa, unidentified
MKNTAARKRKQVPERYLIIGVDPHKKKHAAVAITQDFTIRDRFKFDNTREGLEFLLRRIRIEMVKSDCRGVMFAIETGGHYWRNVAYYLDERGIPFRFINQYTLKRRREGKDLNRRKNDYRDSEVAAQLLCTGEFVESVIPQGVYAELRTAHNAYRRLVKERTRITNLTKGLLDSLFPEFTQVFKDPCGLTALSVLSTCSIPGVIAGMTREEFVATIEAKHQGRLMRKKLMALHYAAKSSIGIAAGAQSVSSEISFLVEKLELIRGHICAIEKTLVRLVDETEEGKYLLSIRGLNYIAVAGLLAELGCFKSYRSAKQMIKMAGSNPTESESAGKKRSRTPMSKQGRPVLRYCAWTSVIPMLRFNPDFRAWAKQRRERPVHANPLGGREIVGAALNRLLRLSFALVKNQTYYRSPQLVKMTG

SEQ ID NO: 465102 - protein, 349 aa, unidentified
MIVVGIDPYKQTHTAVALDAATGRVLAELTVKARTPGFERLVEWARALDAERTFAVEDGRHVSGHLERHLIARGETSVRVPPRMMGESRRTDRVWGKSDPVDATAVARAALRHPDLPEATLAGPEREIGLLVAHREMLVNERTDRICKLRWLLHDIDPDLAPPLRTLDRFRTLDRVRRDLEALDPSVVKELCLELVDRCREITVRANELERRIRALVKTHAPALLEIPGCGALSAAKIVAETAQVARFPTEGHFARYAGTAPIPASSGARHRQRFNRRGNRQLNAAMHRIAVTQLRIHEPARTYVAAKRAEGKTKTEAIRALKRHITRVVFKTLTSMDEPTDRLTAVAA

SEQ ID NO: 465103 - protein, 326 aa, unidentified
MQNILGIDVSKDTLDVILVTERGAFHKVINNTSMGYQNLKNWLKAKRVEKVHACLEATGQYGEAVSEYLFERGHQVSVVNPARIKRYGESKLHRNKTDKADAALIAEFCQKEKPSLWQPLSPEIKHLRALVRRLSDQKANLQQEINRLKSGEKDAWVVGDLQTHIDYLKERIKATEKEIQDLIDRKPNLKSQHRLLTSIPGIGDQTASTLLAEIGDLSTYEGARQLAAYAGLNPQGHRSGSSVHKKTRISKQGRSELRNCLYMPAIVAMGHNPVIKDLNNRMTERGSHKMEIVIASMRKLLHIAYGVLKNQIPFDPHYGAQFDFSS

SEQ ID NO: 465104 - protein, 489 aa, unidentified
MIRSVGIDLHQGRHRARCLDERAQPCDGFSFQTTPEGLAALEERVFRDGANPIIVLEPAGLPWLIVAVYLRSRHPDCQLVKAKTQKVAALRRYLRGPVKSDRLDALTLAKMPFIDPEKLDDIYLPPAKIHALQRLTRQRKRIESDVSGRKIRISAIIDGYLPGVRQAFDNAWSSPFRAFLRSRLSPFAVIRDGEDALHAYLSKASNRSKWSRAQTGEVFLACQSVATVCELSKSVGTVDEEFFTDLQDEIARELRMLETDEVESEALAQRIAELYRKLHPSDNLCTIPGVGEHTAPIFLATVGDPARFRNQSAFANWEGVVPGARQSSDAQAKGLRMTKAGPSIMRMALYQAGDISRRWDPQLAAVYHREMVYHGKNHRQAMGAVMSHLGARVLRVLKEDSPYEMRDIEGKLISKNEARRLVLSKYHVSEDIRRERRRRNRKVGKDRETATYRTNEADKAPQPVQVQAVSQNNSNRETSGGQVLTIDNY

SEQ ID NO: 465105 - protein, 339 aa, unidentified
MTITTIGLDLAKSVFQAHGIDESGATVLVKKLHRKQMLPFFSKLPPCLIAMEACGTAHHWARTLASMGHEVRLIPPSYVKAYVKRGKSDALDAEAICEAVQRPTMRFVPVKTVEQQGILMTHRARALLVRQRTMLANALRAHLAELGYVANPGIANLAKLAEQTLANETLPPYARSALEILIRQIMAITTEVAKLDQQLATWHAASEASQKLAAIPGLGVITATAIAATVADPEQFKSGRQFAAWLGLTPQQQSTGGKTKLVGISKQGDRYLRRLLVVGATAVMRHIKDKPTPMADWIRKLSEKKPFRVVSVALANKLARIAWVVLTRKEAYRPYHLAA

SEQ ID NO: 465106 - protein, 340 aa, unidentified
MRQLYVASDLHGNNNLVGIIDGEGKRIFKKKLPNDALLINDILKPFKEEIVGIVVESTYNWYWLVDALMEEGYKVHLANPAAIQQYSGLKHADDKHDAFWLAEMLRLGILPEGYIYPKEERPVRDLLRKRGHLVRLRTSLILSLENIISRNFGSKLPVNHVKGLRKDRVTPLFEGNEDLALAGRVSKETIDFLTHQIRQIEGVVEKRITLKEPYRYLLTIHGVGKILGSTIMLETGPIGRFETVGDYTSYCRKVPSQWISNGKRKGSGNRKNGNKYLSWAYAEASDFARRFHPKSRAYYNRKMQQSNPAVAHSALSHKLARAAYYIMRDQVAFRPEKLFG

SEQ ID NO: 465107 - protein, 459 aa, unidentified
MERKMKLGMDVVNFNAAGIDVGSRSHYVAIGQELENVREFGVYAEDLTALCQWLTESDVTTVAMESTGDYWQNLYVELISFGFEVVLANGKFTKNAKGKKTDVKDCRWIQKLHTLGLLSGSFLPDLTTEQLRTFCRQRGNWIDLAASATHKMQKYLKLLNFRLDVVVKDVCGLTGMKIIEDICKGNLDPQSLSEHRHYNCRKPKEEIARALHGNNRSDYLFGLQQEFEAYKFFQKKITDCDKKIEHFIKQELKQHPGREKMKTTEKPHKRMNKNAPQISNLNQIAFRYFDGVDLFAIEGLSHSTVLTIMSEIGPEGFNKFGTSKHFTSWLRLAPNNKISGGKILSNRVPKGSNRLKIALRQAANAIGNLKDTHLSDFFRRVAYRKGRHSAVSATARKLAVIIWNMVTKKIEYQPPKQYLFLDQKRKLGLVNRIKKQIDKFELKPEDLGFKNSLDISNLI

SEQ ID NO: 465108 - protein, 340 aa, unidentified
MPLYGGIDLHANNSVVVLLNAQDQVIYQKRLPNDLPTILAALAPHPGEIEGLVVESTYNWYWLVDGLMEAGYRVHLATPAAIQQYSGLKYSDDHSDARWLAHLLRLGVLPKGYIYPKAERAVRDLLRKRAHLVRQHTANVLSVQNIMVRNTGVRLSVKRIRALTKQELEALLPEVDQVLAVTSSLAVLDCLSQQIKTLEQTVHKRLKHTPSYEQLLTVDGIGTILAQTIMLESGDMGRFPTVGNYASYCRCVNSTKISNGKRKGQGNVKNGNPYLGWAYMEAAQFALRFNARAQRFYQRKLAKSNNNTILARKTVAHKLARACYYLMRDLVPFDARKAFG

SEQ ID NO: 465109 - protein, 482 aa, unidentified
MKPSQQNKPQKASCRPEQGSWQQMNRKQRREMTRKMHAEDLSLEVVHPHAAGIDIGNEAHYVAVPPDRDNKSVRRFGCTTAELKEMAAWLKQCGIRTVAMQSTGVYWIAVYDILEAAGLEVYLVNARETKNLPGHKSDVQESQWLMKLHTYGLLRNSFRPPQEVRTMRTYWRQRNDLIRSAARHIQRMQKALTQMNIQLANVLSEVSGVTGQAIIHAILAGERDPRKLAAFRDKRVKAREEEIARSLEGNWQEDLLFMLKQEQEGYEFCQKQMSECDERLQQYLRQREDRSKGAKLPEENRKERLRKNKTNKPRFDLRTELFRMTGTDLTQIDGIDVRTAATVISEAGWDMSKWRTEDHFVSWLRLCPDNRVSGDKVIGKRRLPINNRLSVAFKIAASTLRQSNTYLGAQFRRLKTRLGPPIAIKAMAAKLARLVYRMMRYGMRFVDRGAEFYEAQHRRRQINSLKRKAANFGLKIIDAPAA

SEQ ID NO: 465110 - protein, 411 aa, unidentified
MDTVVERCCGLDVHKDTVVACVRTPGRGGKRQQQTRTFGTTTASVLALRDWIVSEQVSLVGMESTGVYWRPVYYLLEDATECWLLNARHLKNVPGKKTDVQDAEWICQLVEHGLVRPSFIPPKPIRDLRNLTRYRKAQIEERTREVQRLDKVLQDAGVKLSSVASDLQGKSARSMLAALVAGERDPEVLAELARGTMRKKIPDLEQALVGRFGAHHALLVRTILAKVDFLDAAIAELSEEIERAIAPFEREVALLDTIPGVNQRAAESLVAEIGADMGRFTTAAHLASWAGMCPGNNESAGKRRSGKTRKGSKWLGAILAESAAANGRSNNTYLGAQHRRLTGRIGYAKANKAVGRSILVAAWHVLSNGVPYEDLGADWFQKRRPEAHVRRLTRQIEALGYRVSIEPTEAA

SEQ ID NO: 465111 - protein, 356 aa, unidentified
MPITVIGVDPHKRSHTAVVLDACEQIDSQVHVLADRRQVDRLLAWANPWPQRIWAIENVYGMGKLLSQQLLRRGEQVVDVPTTLSYRTRKLSGQSGRKTDAHDARSVAIAAANPARLRPAVLEDVTDTLGLLVARRWQLVSHRHQIVCRVHALLSDLCPSGVKRGMTADDAARKLRHIGPVTFIDLERRRSVIELIEEWRWIDRRIPGVEDRIRDALNVHGTTLTDIFGIGDIGAATIIAAVGDVHRFPSRGHFAAFNGTAPIDASSGDIHRHRLSRKGNRRLNAVLHIAAVSQIRWDTPGRAYYQRKLAEHKTTGEARRALKRQLSNVVYRQLIVDARAREAVRGGQTGTELASA

SEQ ID NO: 465112 - protein, 363 aa, unidentified
MEKYIGFDIDSKKTIACVVQKDKKDRFTTIKTDIGRMKSFLISQRMPGDKLHLTFEISGQAGHRYDQLAEFVDDITVSNPTKMTWIYRTSKKNDRIDARKQAVLLSIGEIPKVHIPSKEIRQWRGTIGHRRKIVSKITQVKNRIRALLKANGFTKPAQRGSWWKIANRVWMHSVASGREFTAFELWRMSLADMLDEIELLENQLKRITKYLDGYLESQAGSKLLMSIPGVGPRTAEAVLAYTDDVNRFSRGKQYCAYFGLTPRLDESGSVKRLGHISKQGPSVVRWLVVEAAWRAIKKSPALCGFHERVMSGQRGRKKIATVAVARKLLSIMRAMQMSGELFNEELVCRECGLGEVSKVKKLS

SEQ ID NO: 465113 - protein, 314 aa, unidentified
MDHNTVYGVDVSKRNLVTAGYDAQTPVVVHNRPESIAAWLAGLPRGAAVAMEATGAYHQVLAHLAHAAGLRVYVLNPQTLKHYAWAIGQRGKTDQCDARMIARYAVHEQAKLRCWVPPARAADCLAQLLERRHTVVGVRQTLAQSLAMPMLKAPRESLLANFERILRRLDILIRHELARLPGMAALYERLKGIVGIGPVVAAQLVAVFNTLNFAQADSFIAYTGLDPRPDDSGDRRGRRRLSKHGPPLLRCLLYNAGMAAANSRLLKPVYKQLRERGLQTTEAIVILARKIARIAFALYKSNHCFDAQKHLTTV

SEQ ID NO: 465114 - protein, 323 aa, unidentified
MMTEPAEIQCVLGLDVSRDTVTLCDGHSRHTQTIANNADALRTALQPYQGTATLAVCEATGGHEDTLLGVLLELAIAAHRADPVKVKAYIKSFGKRAKNDPIDARWLSRYGRDRAATLPRWQPADPTQQKLELLVARRLDLVAMRVQEQNRLKAPRSRLIADNIRDHLAELERHIEAFNAEIDTLIGESRDLALRAEQLRSVPGVGPVLAPLLLAVMPELGTLNRRQVASLAGVAPHPKDSGKASWHRSTTGGRRQIRPALFIAALAACRGDNPLAVAYKALLKAAKPKRVALTAIMRKIITIANARVRDAVRQQNETMQINA

SEQ ID NO: 465115 - protein, 346 aa, unidentified
MSLSTRTSPYQLYVGVDIAAKTLTAAWMAPGATPGRPLTVDQTPQGFATLQERLLATGHPAAAILVVMEATGSYWVGLATTLAQAGFVVSVVNAAQAHHFAKALLKRAKTDAIDAQTITQLAARLEPAPWTPPPAIYTELQQRLAQRDTLMTLRQQVRNQRHALQHLPVVIASVLERMEALIATFDAQIAAVEQEIEQVLSQDAAWATTATLLLSITGIGMLTTAWLLVTTLNFTICATAEEATAYAGLAPHPYESGTSVRGRAAIGHGGNGRLRTALYLATLSAAQHNPHIKPFYARLRAAGKPKKVARCAAARKLLHLAWAVATKGVAFDPLYQTHHACSGSST

SEQ ID NO: 465116 - protein, 263 aa, unidentified
MDITTLGIDIGKSTFHLVGLDGHGHPVLRQKLTREKLMRFIANLPPCLIGMESCPGSQHLARRFGEHGHTVKLMAAQFVKPYVKRNKSDFLDAEAISEAVTRPTMRFVPLKTLAQRDTQALHRVRQALVAQRTMLVNQIRAFLLEYGIPVAKGISRIGTALPGLLEDAENGLTDRMRALLCELREALIGLDERIKRLSSEIEREARNDPACERLMTIPGVGPLTATALIAALGDGQAFRSGRALAAFLGLVPRQYAPGGTPAL

SEQ ID NO: 465117 - protein, 425 aa, unidentified
MKSRLIKAQNQRVERVSTSTLVIGIDIAKEKHAAQAINFRGIVLTNRPIMFSNDHAGFEHLISSIRKLQNMRNLNDVVVGMESTGHYWFNLAHWLMKQGISVVLVNPMTTKRNKENRDNSPSKNDPKDALVIADAVSRGFYTPFSPKEETFRRLRVIVTNREHWVVKSGRIKNRIHRWLDIRFPEYRQAFEDIFSPRSLATLRRFPAPSDVLQLTPEQMVQTWGVYMARPGGVRGRNKATQLQTLARHSVGDATALEEDKWELRHLIEEYERICHIIEEADEIIEKLLPEIPCSDLVRSVGVSVPATAAIFAFGGDLRKLSHGNQLLRKAGLNLAERSSGKYKGHIKLTKRGNSLLRKHLYFSVFHLLSHNRAFQAVHAHNIEVKRMTKMQSMMKLIGKLARMLVAMAREGQTFSADKAQPPLAA

SEQ ID NO: 465118 - protein, 447 aa, unidentified
MIRGVKSCGEMTPNLVNQGGLHMDFKQNQKINQVTEKTLVVGIDIAKRTHYACFVDDRGRVLQKSFSVSQSGEGFEIFYHRVLEAMKENGKTELIIGIEPTGHYWLNLGYFLEERGIPLVMVNPMHVKRSKELDDNLPTKHDRKDALVIARLIKDGRFSYPRILKDMEAELRVGSTFRGKLTEELGTVKNMMIRWIDRYFPEFTQVFPSFGKMALAVLECTPFPGDFDQKQPEEILSLYREVEGLKSPQRPKAMRLIEIAAHSIGVTEGREMARIEIATLVRRYHQLEQDIESITQHLVKLVKTSVEFEWLSTVPGLGETTIVDLLSEIGSFSHYEDPRQLIKLAGLTLRESSSGLHKGQKRISKRGRRKLRAILFRVMMPMIRHNEAFRKLHEYYTNRQVNPLRKKQSIVVLCGKLLKVLHGISTKHKAFDAQRMMKDIPSLAEAM

SEQ ID NO: 465119 - protein, 309 aa, unidentified
MKQSVVYIGIDVAKAHLDVAWAGTFRRLPNERSGHAALVRWIKQSTTPVQLICEASGGYEQALLESLEKSEVKVTLVQAVRVRQYARAAGILAKTDRIDAKVLAAFGSAMQPQPTSPLSAEQKRLRQYEAQRRQLSRILVAEENRLAQLSCTELRTLSRSLISKIKTQIKTLDRGISDLIAQDQTLCVKAQKLTAISGVGVRTAALLLAQMPELGQLNRRQAAALAGLAPFNHDSGSVRGKRAIFGARPALRSGLYMAALSAARFNPILSSFYQPLRTKGKPHKLALTAVMRKLLLALNQTLKPLPCST

SEQ ID NO: 465120 - protein, 343 aa, unidentified
MTHPPQLILGIDTHKDVHVAVVLDWLGRYLAAASFGTTDAANSELVAWTQSYGQVTTAGVEGTGSYGYRLAQHLTDQGINVVEVNRPDRARRRRKGKNDPVDAQAAARAVLAGDAHAVPKDRNGTVGELRALVVARRSAIKARTQATNQLRALLVDGDDELRSRLGPLHKAHLARACAQLVPSAGLRLALGSLGCRWLALNDEITNLDAAITGMVRCTAPRLLERHSVGVQTAAQLLITAGDNPDRLHSEAAFAAMCGASPVQASSGKTIRHRLNRGGDRAANSALWTIANNRLMHDPCSRSYAAKRTAMGNSRKEILRCVKRALARELYPLILDALARPPLP

SEQ ID NO: 465121 - protein, 343 aa, unidentified
MGDAITIGVDLAKNVFQVHGVDAEGGVVFRRQLRRVQVLSFFRKQVPCLVGMEACATAHHWAREIAALGHEVRLMPPRYVKPYVKRNKNDAADAAAICEAVTRPTMRFVAIKSPEQQSVLMLHRTRELMVRQRTMLVNAIRAHMAEFGIAVRVGLPQVQALLAIIDDEEDDRLPPLARACLSGLAAQFMSLQVEIVAAEKRIHAWHRSNEVSRRLESIPGIGPLGATALAASITDPTLFKSGRELAAWIGLVPRQNSTGGKERLGRISKQGDQYLRWLLVAGAMAVIRQAKRRGTADPWLAQLIANKPTKVAAVALANKIARIAWVLMQHGGTYRKPDSAMAA

SEQ ID NO: 465122 - protein, 429 aa, unidentified
MKDSASLSQNIVAWVGLDWADQAHAVCLQVTDSAHLERFELQHTPEALQLWVAALRSRFPQGPVAIALEQSRGSLFYALMTYDFLVLYPIPPKALADYRKALYPSGSKDDPGDAQLLLEFLRKHLERFRPWVADDAPTREIALLVQHRRKLVDDRTALSNRLQALLKGYFPQALEWWGDLTAPLAWDFLSQFPSLEEVQKASRLKVLKVYRAHTRRTPEQIEQLLEQIRSARPLTTDPAVIESSALMAQAQVDQLRALAAGLERLEQKLKELFAAHPDQAIFRSFPGAGPALAPRLLAAWGTDRQRYAAAEDMECWSGAAPVTSQSGKKCWVHWRLACPKFLRQTFHEFAGQSILWSPWARAYYQQMRQRGVDHHPAVRSLAYKWIRIIYRCWKDHTLYDEARYQKALQRHGSPLATALRQLSTGEARA

SEQ ID NO: 465123 - protein, 417 aa, unidentified
MAMKIVRFNCCGMDVHKNLVVATIGITDSKTNITEYFQRSFSTLNSDLYRLKDWLKSHHCSDVCMESTGKYWIPIFNILEDEINVRLTHPKYVKAIKGKKTDKKDSKWICDLFKHDLIKFSFIPPREIRELREIARYRYKLVCMRSSERNRYQNCMTVSNIGLASVISDPFGKTASNIMKEVMKSNVIDDDKILKLVHRNCKNKDKILDSLHGYHIESDQRFKMEKSLDHMEYLDQLIDSCEVELIKRAYPLRRSFQHITQIKGISALSAILIISEIGIDMSQFESDKQLVSWAGLSPANNESAGKKKSVRISKAGQYLKPLLVQCALSAIKDKASYFGRKYSNIKKRRGHKKAIIAIARMMLVSIYHMILTGEEFQPTDHESLMSPKSNTDQSLTVEKALNFLKRSGIDISSILVN

SEQ ID NO: 465124 - protein, 320 aa, unidentified
MSGFIGIDVAQADFVVAREGVAGSRSYPNTERGYRDLIKDLSREGGNAERIVLESTGGYERKLVAALGGAGLPVVVINPRQVRDFARSTGQLAKTDQIDAHVLADFAAKIKPEIRPLPREDQQELREFLTRYEQLMQMLVAEKSRLLQAEGQSRHALRKKIKNHIKFLEREITLLDSDLDDTLKKSEMWKESDDLLQSVPGIGKGTSRILLGLVPELGTVSAGEIAKLVGLAPFNRDSGKFRGSRHIAGGRGRVRAVLYMATLAAIRCNPVVKGWYQRLLAAGKPKKVAIVACMRKILVVLNQMMKTKTRWQAHVTPATA

SEQ ID NO: 465125 - protein, 347 aa, unidentified
MRDDMYYIGLDVHKRTISYCVKDAAGHVHQEGKIGSTRRELDAWIKTLPQPRTIAMEATIFTGWIYDHLLPHAEKVKVAHPLMLRAIAAAKKKNDRIDAGKIADCLRCDFLPECYMTSTEIRDRRRTLRYRNLVLKQMVQMKNRISGLLMETGVSYNKQRLHKLGYFTELMSGNEEVDQSIRPLLKLSRETIVRSQRLDYALVSSLERDPLLAERLKRLRTIPGVGPITALTWALEIGDVSRFQSVKQAISYCGLCSAERSSADKLVRMPISKQRNKHIQQTLVEAAKLAPRYSHELALVYERERQRGNRNRATLAVARKMVAYMLAVERRKQNFVLTGEFSDTAAA

SEQ ID NO: 465126 - protein, 429 aa, unidentified
MAEEKSLELRVSVDVGYRRHSVAMGLSSGEVLEEFEIDHRIEGFQEFFSRIEKHRKEKNCVVAVAMEGYNGHARPLDSMVRERGYRLYNLNNLKFARFKEIFPGAAKSDRIDARKGLELFQLGDHLPLAKEVLQEVTGTPPENEVLKRLTRRRRRLVNERVRVVNNLQADLQAVCPGLLEITGEASNQWFLNFLLSADTLPQLARLKRSTLLKIPSVGVKSAAIIEGWQKRSHFSQEVDWVGEMIQDDARRCLELDEKIKRLEAKIAEIAKDSKIAKTLRSIPGFGAVCTSELAGEIGTIERFGSEGSLSLYLGMSTLDNSSGKYQGTKAPKHVNTRAKAAMMIGVDRHRKYVPESQRYYEKKRSEGKKHNQAIRALGRHLSRIIYKMLKEERDYEIRPEKGDTKTKVSLRSLIKTQIRRPKISVKGKK

SEQ ID NO: 465127 - protein, 421 aa, unidentified
MTQPYGNTGRDVLVAIDVAKNQNAVLIRLPDGARKKLTVINNLAGYRELSSYLKKLEVPCKIGFEATGNYHRALAYYLQQRGFDLELISSVAASRTREAMFNSWDKNDPKDAQVILHMLQTGLTQTYHDPLVHRINDIQELSKTYCQVSLRKTRVQHSIMTHYLPLYFPEASKYFHTSRAEWFTSLLMTFPNPASVLKYSREGFIKAAQTVSGRKVNKAAWLKDFYETARESIGLPVPEDSEAVRMFRLVLQEHQDLCRMRRAIEARAELYLKDNADYLRLRTIPGIGAVIALIILAEAGDLRRFSHYKKFLKYCGLNLSTQQSGGFRGMSKLSKHGNSRLRYAFWIAGTSAIRMRENTFRKKFENYIKTDPQNPDLKRKAYTAVAAKIARVAYGLIKSGRDYRCYHESSIPSGIILSEGR

SEQ ID NO: 465128 - protein, 341 aa, unidentified
MAKITTIGLDLAKNVFHAVCCDKRGKVVKKRMLKRREMLTFFATLESCLIGMESCASAHYWARQLETLGHEVKLIPAQYVKAYVRGNKNDYNDALAISEAVTRPQMRFVSVKSPEQQDVQALHRLRERCVQMRTGLCNQIRGLVGEYGLVCPRGVSTLRRHIPQWLEDAENGLSDFFRRLLSQSYRQLQTLDEDIDAYTQELKRHSQQNEACQRLQTIPGFGPIVASVFHSQVGDGKAYHRGRDVSASIGLVPRQNSSGGKDTLLGISKRGDRYLRSLLVHGARAVVSRAKGKDDPLSRWINKIQAARGMNKATVALANKMARIGWAVLVHNTMYKPAVQA

SEQ ID NO: 465129 - protein, 343 aa, unidentified
MHVIIGVDPHKASHTAVAVSDREDELAVKKVRATSRQVEQLLAWAEPFETRTWAIEGADGTGFLLAQQLIATGEVVVDVPPTLAARTRLLGTGKTNKNDPNDALSVAVTALRTRDLRRVPAVGHAEVLRLLAKRNTDIGDHRCRLASRMHSLLVQLAPGGIAKELNASDVDRFLAQVTPTTPAEQVRYDLAVELLDDIRRLDAQLKASHKRIRVAVAASATTVTDVFGVGPILAAMLIGYTGDIGRFANRDRYAAYNGTAPVEFSSGGRTVHRASLRGSRQLNHALHMVAISQLRHRHSDGRAYFERRVAEGKTKKEAIRSLKRHLSNAVYRQLVADAARTRP

SEQ ID NO: 465130 - protein, 396 aa, unidentified
MTKFNVEHASLHTAGASIETAQPTVHAAYVGLDVHKETVAIAVAEPGRQEPCYEGEIANTPKRVERKIQQLSERYGGGLLQFVYEAGPCGYGLYRQLLASGHDVQVVAPSRIPKAPGERIKTDRRDAIKLARLARSGDLTPVWVPDTEQEAMRDLTRARDDMKAQERKARQQLNAFVLRHGHHWPKGRTRWTQTHFNWLESLRFEHDWQQVVLQEYIDAVRAATRRVADITTLMERALPQWSLAPVVEALVALRGIDKLAAMVLMAELGDISRFDSPRQLMGFLGLVPSEHSSGSRRRKGAITLTGNSHARRMLVESAWSYRFPARQTGHLKRKAANAPEEARAIAWKAQKRLCGRYRDLTRSGKNTKLVCVAVARELTGFIWEIVCRVMPESQAA

SEQ ID NO: 465131 - protein, 348 aa, unidentified
MALTIVETHAITGGVDTHADVHVAAALDPIGGLLGVKEFPATAAGYGRLLGWLGGFGTVALVGIEGTGSYGAGLARHITTAGIRVVEVDRSDRQDRRRQGKSDPLDAVSAARAAQSGRARGASKGRDGAVEAIRALMVAKRSAAGDRTQAINQARALVLTGPDDLRARFTGHTAAALVAELASLRPRPGSTVGYATRIALRELGRRAEFLDGQLERLDELIGPLVAARAPGLLALCGIGPHTAALLLIAAGDHPERLRSEAAWAHLCGAAPIPASSGKTVRRRLNPGGDRQANHALWRIVFTRLGSDPATRAYAERRTAEGKSKKEIIRCLKRYIAREVYPHLRASAG

SEQ ID NO: 465132 - protein, 341 aa, unidentified
METKRYIGIDLHRNCFTACVRLENGRNYLSDWKLEDLPRFIKKLRDSDEVAVEMTGNTRFFHAAVAPHVARIVAVDPNQFQVISHSVKKTDSNDARNLALYLAKDLLPEVRMKDKAESQIASLTQTRDTLVKLRTALKNKVNNILAAHGINLAKEALSSEKALRGVLEMHFDEMVAIELQVIVEQIRGLNQGIAKLEQTIKERGQQLKGHRNLTSIKGIGSLGASILLSVIGDIHDFAEEGKLAAYFGIVPRVQNSNETERSGRITKRGSKLGRTTLVQCALIAKRYSPYLARYYDQIKSRRGGGKAIIALARKFLGIIYRTLKNDWVFADFPNFVLAEVA

SEQ ID NO: 465133 - protein, 339 aa, unidentified
MKLYGGIDLHSTNSVVVVLDEQDRVLLERRVTNDLQRVKDLLAPFREALCGVVVESTYNWYWLVDGLMAAGYRVRLANTAAIKQYEGLKYSDDAHDARWLAHLLRLSILPTGYIYPKGARAVRDLARRRMRLVQQRSLNLLAVQTTLERELGRRVSANAIKRTGSEGALLHGVEEPNVGSSLTANLAVMRCLDAQIERLEREIVSQVKLAAQFEPLKSVAGVGQILALTIMLETGEIGRFAKVGNFASYARCVQAKRISNGKKKGEGNAKCGNAYLAWAFVEAAHFAVRYYPKVKRFYERKRAKSNAIVAIKACAHKLARAAYHVMRTQQPFDIDRAFE

SEQ ID NO: 465134 - protein, 427 aa, unidentified
MNNTQNDKIAQVTNETMVIGIDIGSEKHWARAFDNRGMELSKKAFCFRNTAEGFASFEVWYENQRRAAGMKRIMVGLEPTGHYWFNLNQFLTENGVRVVLVAPQHVKHSKELDDNTQRKDDLKDPRVIAKLVTEGRYFLPYRPSGVYADLRDGFNRRCGIVESMTRAKNRLHRWFSINFPEYLHAYGSVTAKTGLMVLKKAPLPKDIVELGVEGIDKIWRDAKVRGAGKKRAMTLVALAEQSIGEKTANEAARLELWQLLEDYDHFAHQFEVIEEMLKRKIHEVPHADNLLAIPGIGYFTVMGFFAEVGSIDRFDDPKQIQKLAGLAVVENSSGKRKGLPGISKRGRDRLRWVLFQAAMSAVKNNKEFREIHLYFTTRKDNPLKKMQSLMAVAGKIIRVFYGMLRTGGAYDPERLLRDIRRPEKDAA

SEQ ID NO: 465135 - protein, 319 aa, unidentified
MAQNDLVVAGIDVAKDKVDVCIRALSLRRTFAATAEGRRELASWLRRQKVGKAVMEASGGYERDWAKALRGAKIEVRIVDPKRVRSFAQSAGRLAKNDTIDAEMIAWFAETFDEARSQAYDATREQLHQMVNARQALKGMQAKLESQGEHAQPAAVQRMHARILKTITVELVKFEAAIAAMIQATPRFTELAEIIESVPGIGRTTSAALIAAMPELGQANNKIVAALLGVAPYDDDSGRRRGERHIKGGRRRTRNVFYMACLGAATQHNPVLKAFYDRLVAKGKEKKVAPIACMRKLISILNIMIERRQKWDASRYALS

SEQ ID NO: 465136 - protein, 372 aa, unidentified
MKQNIIYVGLDVDDTQYHGSALNKTTGEVIDFKCRPTLKGLLGQLEKLGKHFQGCSFRLCYEASYIGYTLQRDVAQAGYQCDVVAPTSIPTPRGKQIKTDRIDAGQLAQFYANGLLSVVSVPDPELEHDRDLLRTRQHLLQQQTELRRHLQALLRRNGLHYKAQTQNKTHWSKHHYGWLERTVEALSGTLKVNLELLLRQLKGLTTIVVEYDQQIEALASTARYQKPVQALSCYKGIKNLFALTMITEIGDVKRFPHPRQLVSWAGMDIREYSSGGKHHRFGITKHGNRYLRTAFIEANQRGYRTARISKAIRARRAHTAPELLDIADRCLRRLNKKGNRLLLAGKHPNKVKVACAREMVGFVWESLNKAAA

SEQ ID NO: 465137 - protein, 444 aa, unidentified
MADSGMILIREVADAPVIMGISKPAGLKSPCGEVKIMNPLFVGIDVSSKNNVAYLMKPDGSKHSSFSVQNNLGGAKLLSEKIVSALHSMQLNDVVIGLEATSIYGDSLVYALREDGSLGRFQRKIHVLNPKQVRKFKEAYPDLPKNDWVDAFVIADHLRFGRIAKEVYMDDYRYQALRTLTRARFDIIQNLTREKQRFANYLFLKCSGIAQDKDIQNTSATTIALMEHFETVDDLANADLDELTAFISEAGRGRFVDPDATAKAVQAAARGSYRLPKTVNDTVNQAMSVSIASMRALKEQVKVLDKAIEQHLEIIPNTLTSIPGIGKVYSAGIIAEIGDIHRFNAQASVAKFAGLVWHRNQSGDFEAEHSQMIKSGNRYLRYYLLEAANSVRRCDSEFRRYYDLKLKEVNKYQHKRALALTARKLVRLVFRLLKDNRLYIPPEG

SEQ ID NO: 465138 - protein, 390 aa, unidentified
MQYPNDTSRCLAVLDQDTTLIAVIELSSSSWLVAGVVPGIERQPLKKLAADEFALLKLLHRWRCEAAKAGHKIARIAVAFEAGRDGFWLARWLRAQGIEAHVIHSSSVAVSREHRRAKTDRLDTEMLKRAFLGWLRGERDHCKTVAIPTLAEEDAKRPNREREGLVGEAGRLVNRMKAVFVRLGIRGFNPTLKKAAERLEALRTPEGEPIPPNTMAALRRDMERLRLLREQVRQIEAARQERLQSAPEEGTHPMVRLLASIRGIGIETADMLVQEVFSRELRDRRAAARYSGLTGSPDESGKKRREKGLARAGNPRVRRGMVQLGWRFLMFQKDSALTQWFHLRTQNAPRTRKTMIVALARKLLIAFWRFVREGIVPEGLLLKPVGRHMV

SEQ ID NO: 465139 - protein, 428 aa, unidentified
MLKINPLSTLYVGIDVSSKSNYVCALDFYKNKYINSSFANNQPGAEELAKKILECLKEHPDLNTIVAALESTSVYSIHIANFLSSCEELMHFKPYVFVLNPKCTANYKKSYIGLGKSDPIDAFVIADYARAGNIETEPWRGSQFLALKRLTRHRLHLVECMTREKTYLVSNLYLKFSELQMLEGDDQPFCDIYGATSSSVLTEYLSPEEIIDSSEEDLISFLAEKSRNRIKDISKTAELLRKAARDSYRLDKALYEPLNVSIASSFNCIETFKKEIKLIDTAIEREIRGLNPNAFIILQSIDGIGPVFAGGIVAEIGDISAFHSSDALAKYAGLMWKSNQSGDFDGEDTPMSKAGNRYLRYYLGEAANSMRKHNVEYGAYYRKKYNEVPKHQHKRALALTSRKFVRLVYGLLAKNQLYSGVSLDTSNE

SEQ ID NO: 465140 - protein, 360 aa, unidentified
MDRTKYSSVKYVGMDVHKQTTSISVVNAEGKFVMESVIETKASTVLQFIQGLRGDVHVTFEEGTWAAWLYDLLKPHVTEVVVCNPRKNALLKDGSKSDRIDARKLAELLRGNHLKAVYHGERAIRTLKELARSYLTITQDLTRVRNRLKALYRSWGIPAAGTQVYAMRHRSEWLAKINEAGVRRRAEHYYQQLDALRPLRTEVRRDLLTEGQKQKAWKLLRQIPGIGPIRAVLLIALIQTPHRFRTKRQLWTYSGLGIETDGSAQYCVVEGQLQRVKRPVMLRGLNQNHNHEVKAIFKGAALEASSLAGPFRNFYETLLAKGTRPSMARLTLARKIAAITLVIWKKEVSFDANHLKQQAA

SEQ ID NO: 465141 - protein, 451 aa, unidentified
MDPGFLEHLRLSPRAVIGSGARFLEFLLRGPHVDDATLEEEMELLHRRCCGLDVHKETVVACLRLVADGKVTTEVRTFQTTTADLLRLSEWLAANDCTHVAMEATGVYWKPVWHILDDGEFELVLANAAHVRNVPGRKTDVNDAMWLAELLAHGLIRASFVPDTQTQEMRNLLRTRKQLVREQSSHVLRVQKILEDANIKLDSVLTDLMGKSGRAMIEALIAGETNPAKLASLADRRAKASHEEFREALRGRVTKHHRFLLRLHLNQIDALDAAMATVDAQVEANLGPFRTAVELLISIPGIKNLGAHVIVSEIGIDMSRFPSHAHLISWAGICPRNDESAGKRRSNRLRKGAPWLKTTLVQCAWAAVKKKDSYLQAQFYRIKARRGPKKAIMAVAASILTAIYHMLKDGTMYKDLGRNHFDRRSTDKQKQRLVKRLAELGYAVEIKPLAA

SEQ ID NO: 465142 - protein, 341 aa, unidentified
MEKFIRTAIDLGKNYFQVHGLESEGGRSISRKVKRSKMHEFYSQIEPCRVGMEAGGSAHYWARQLTAMGHEVVLIPPAYVKPYVKRGKNDVVDAAAICEAMSRPDMRFVPIKSADQQAVLMLHKTRELLVKQRTMAVNALRGHLAEFGIVAAKGIGRVDELLALAKVDAALPHVAVAAVACMARHLEGLDLSIETVDEEIARAHRQNPISRLLDEIPGIGTLIASATAASVPDPGVFKSGRDFAAWLGLTPRQNSSGGKEKLGAITKQGNRYIRKMLVTGATSVLRVAGKRKGALADWINALRARKPERLVAGALANKLARICWAIMTTGEGFRTDTYVKA

SEQ ID NO: 465143 - protein, 315 aa, unidentified
MMNEQTYCGIDVAKRHFVIGLSTQKRTKTETNNPKGIAHTIEYLRRFSVDLIVLESTGGLELPLAKALHRTGFRVVIANPRQTNQFAMSQSLAKTDNKDAKMLAFYAQMLAMRDNVAQQLYIPPTPEQEQLEALVSRRNQLIEMRFAEKNRLEQVHSTQVFSVEQHIDYLSLRIDELDREIEQHLKHFDDTIKKFKDIKGLGTQTIAVLMSMLPELGQYTHKQIASLVGVAPHPKESGNTKWKSRCSGGRKVVRNALYMATFVCVRFEPKLKQLYERLRANGKAFKVAINACMRKLLTILNAIVRDDSQWDAHAL

SEQ ID NO: 465144 - protein, 339 aa, unidentified
MKLYSGMDLHSTNTYTAIMDENRKRVIDHRLPNQPKVILDFLEPYRDDIEGIVIESTYNWYWLVDLLQENGFRVHLANPSAIQQYRGLKHVDDRHDAFWLADLLRLGLLREGYIYPKEVRPIRDLLRKRAHLGRLRTSLLLSAQNIVLRNHAIKVASEDIKKLTTDLLTPHLQESEGLFLTGKISKELIDAFTRQIKAIETWVMKRLQPHKLFLNLLTIPGVGEILAMTILLETGCIARFPKVGNYVSYCRLVASQRISNDKVKGKGNDRNGNKYLAWAFSEAAEHARRHYPMCRAFYNRKLQQNNGKVAHCALARKLSRAAYYIQKDQVAFDETRLFC

SEQ ID NO: 465145 - protein, 399 aa, unidentified
MKSRDCCMSVSAIGLDVHYKFSSVTMRDAHGKVVRRERLEHADRQALRRHLAQWPQDATVVLEASFGWGWLSDEMKATGIDVRLSNCYKVEQMRKARGWVKTNKKDADLLSLLPREAEEWWRIWLAPPEVRDRREWMRYRSDLVGVQSQTKNRINAVFHRHGIFHDFSDLFGGKGRVFLAELCREGRHAGGQLPPGALAALRGQVRLLDQVRIQLAQVARKLRHDLEHDDLTQRLSSVPGFGRILSHVLKAEIGQIERFGGDQHRLASYCLLSPRAMDTGQQDPTKSPMGRHLGHRGNRTLKWTFIEAARAAVRHGGRFRAMFDRATAGGTKDRNRGYIKVARELVKVVTAVWKNGTTYQDAPPPRPGQSPRGRMEEFLGNTRSGTGQLCCPMVPAMQA

SEQ ID NO: 465146 - protein, 358 aa, unidentified
MQPQIKELDFTGQNIYAGIDVHKNSWKVSVYSEDLYHKTFNQPPEPEVLCRYLTRHFPKATYYSVYEAGFCGFWIHDRLQSLGVNNIVVNPADVPTTDKEKKRKTDRVDSNKLARHLRSGDLEALYVPDRASLEDRNLIRMRRTLVKELTRYKNRIKSELNFFGIPIPDQFTTKSSYWSKRFIGWLEELEHQQWTGTDSFKILIKHVKVLREHLLEVNRKMRTLSKDTHYQKRADLLRTITGIGLPTTMVILTEINDIRRFANQEKLRAYVGLTPTSHSSGDKDMHGEMINRGNKYLKSAIIESAWIAARTDPVLHMTYFHLCKRMKKNKAIVRIACKLLNRIHFVLKNEVPYINGAE

SEQ ID NO: 465147 - protein, 344 aa, unidentified
MNITRVGFDIAKQVFQVHGVDEHGKVRVRKQLARAKVLEFFVQMPPCLIGIEACASSHYWGRELTKLEHTVKLMAAQYVVPYRKCDKNDANDAEAICEAVGRPNMRFVAIKSEEQQSVLMVHRARTLVRANRTAQVNQIRGLLGEFGLVVPKGVSRLRRELPGILEDAENGLPDLAREVLAGLLKQFHDFDTRVTAYDHQIRALAEASEPARRLMQVEAIGPQTATALVASMGDPHVFESGRSYAASLGITPRQHSSGGKERLGQITRQGDRYLRTLLVHGARAYLRVVEKKTDAKSAWARRLKERRHVNIVAVALAAKHARIAWAMLAKGTEYRPVGTEEAAA

SEQ ID NO: 465148 - protein, 360 aa, unidentified
MTGTMTWAAMDVHARSTYAASMDVITGELCRQRFDTGAVEPVVGWLAGLPGPVCACYEAGPTGFGLYRAAVAAGIECQVIAPSKTPRASGDRNKSDRRDTDHLLRQLMAGALTPVAVPSATCEAARDLARAREQVRVDLMRCRHRLSKLLLRHGRVWDRSAWTKAHREWLGSQTFAHQNTELAFIDNLAACDGLTARRTALDERLSHVATDPEFWPVVSRLRAFRGIDTLSALILVLEIADFSRFQRAVQLGSWLGLVPSREQSGETDRHGAITKTGSRYARRILVEASWHYARPPRVGKTLYERQEGLPDHVLQIARRAQARLYRVHKRMREHKKPGNVITVACARELSCFLWAAATAP

SEQ ID NO: 465149 - protein, 378 aa, unidentified
MPSETTVYVAVELSVSSWLVAARSAGAEKSRLHRIQGGDTTTLLALITKLRSRASTKLGRAVDVACCFEAGRDGFWLHRLLTAHGIAAYVLEPTSILVNRRARRAKTDRLDAEGMLRVLATWLAGDRQVCSMVRVPTPEEEDAKRPHREREHLVQERVRIENRIEALLFTQGIRKRPSLRSWVRDVAELRTGDGRELPCLLRIELERLRRRLVLALELIHEVEADRAEALAATADDKMTQKIAALQRLRGIGPNFAAVLVREVLYRSFANRRQLASYVGIAPMPYQSGGMDRDRSISRAGNPRARTTLIQLAWLWLRYQPGSALATWFRERVGMLQGRTRRISIVAMARKLLIALWRYVETGVTPEGVEIRAAADATA

SEQ ID NO: 465150 - protein, 502 aa, unidentified
MLIPLGRLITLADSPRRTHPFTRHIVEANVTTRKTKPAPPEHPPDARPQAEGCYRPAVGPVPHRHAAGIDVGDSTHWVCVGATPDGSDTAREFPAHTPGLRDLVAWLRQCGVTSVALEASGAYGHVLFLTLLESGLDVLMTAPHFTRQIKGRPKTDRLDCQWIQRLHQHGMLPSVFQPDDATHTLRDYVRQRGNLVRLSAQHVQRMQKSLELMNLKLTRVLGDVTGVTGLKIIRAIVAGGRDPQALAKLRDRRCKHTAAEIATALDGRYRPEHVTELRLCLKMWDAYQEAIGELDKEIAAHLRTMKRQSESPPLARQTRVRGRKPHDPKFDVREALYLATGVDLTAIEGIDAIHALTLVSELGSDFTKWPTVKHFTSWLGLCPNWRKTGGKVQSSRTRLGKNRAAGALRLAAWGLMRSTSYLGAYLRRQRSRLGSPKAVTATAHKLARIVYALMRHGLAYVKQTQEVYAEQTRQKMEKQFHRRAKELGYEVTKLEPVPPVVT

SEQ ID NO: 465151 - protein, 361 aa, unidentified
MRPPRSRPLPELEQLPEAVAQQRRPRIQDRASARAPRKRVYMSGFIGIDVAKADLFVAREGIAGSKNYPNTDRGHRDLIKDLEGTGSAIERIVVEATGGYERRLVTALGSRGLPVVVVNPRQVRDFAKATGQLAKTDKIDAHVLAAFGSRVKPDLRPLDTEEQEELRDFLLRHEQLIQMLVAEKSRLLQAEGGSRQTLRRKIKSHIRFLEREIELLDSDLDDTLKESPLWKENDDILQSTPGVGTRTSRTLLGLMPELGSLNAGQVGKLIGAAPFNRDSGKLRGKRHISGGRSRVRAVLYMATLVATRFNPVVKAWYQRLLAAGKPKKVALVACMRKLLVVLNAMIKTKTRWQAQVSPTTA

SEQ ID NO: 465152 - protein, 355 aa, unidentified
MDSEKYIGMDVHKESISIAVINGAGKIVMESLIETKASMILQFIDGLRGDVQVTFEEGTSAAWLYDLLKPHVTKLVVCDPRKNASMREGHQSDKIDARRLAELLRLNHLHPVYHGEHGLRSLKELVRSYLTITKDLGRVMTRVKAIYRSWAIPCTGKQVYAPRHRAEWLGKITEPGVRRRAEFYYQQLDALRTVRQEVRRELLAESKKHPAWKLLCQIPSIGPIRAAALLGILQTPHRFRTKRQLWSYGGVGIEASSSADYQVMKGQLERKKKAVEIRGLNRNYNHDLKNLFKGAAIVAASKPGPFQEFYTALLTKGMRPEMARLTLARKIATIVLMVWKRGVCFDAQYLKPQTA

SEQ ID NO: 465153 - protein, 334 aa, unidentified
MDGDGEVVEEGRIQSTEAALRRWFGPRESACVAIEVGTHSPWISRLLKELGHEVIVANARHVRMIYDGDRKSDRLDAEALARLARLDPALLHGIAHRSEEAHHDLAVIRAREVLVRTRTRLINHVRGAVKSAGHRVPRSSSAAFHRTAAEAIPTGLKEALEPLLDMLEQITQEIRAYDRRIETLASERYPETGALTQVTGVGTLTALAYVLTLEDPGRFATSRAVGPYLGLCPGKDQSGDRDVQCRMTKAGNEMLRRLLIQAAHYQLGPHGPDSDLRRWGSERGARGGRIAHKKAVGGVARKLAVLLHHLWTSGEVYQPLRNSGGGDEPTAQAA

SEQ ID NO: 465154 - protein, 466 aa, unidentified
MKYTQQRKRTGKSEQRVSLFERIQPDAAGVDCGQKSHFVAVPPERGPEPVREFRTFTADLQRLAQWLAQCGVKTVAMESTGVYWIPLYEILEQRGFEVVLVNARDVHNVRGRKSDVSDCEWLQQLHSVGLLRASFRPAAAMVPLRSYLRQRAILVEELTARIQRRQKALTQMNLMLHTVVSDITGVTGLKIIHAILAGARDPERLAVHRDGRCHASHQELVAALTGNYRGEHLFSLRQNFTAYQFHLQQIAECDAAIEALLNTLAAQQPPPSAALPAPRAKTTKKHAPAFDIRTPLHVLTGGVDLSQIHSIGPQAALQLVAEIGTDMSRWPTEHHFASWTTLAPNNKISGGRLLSSRTPPSANRAAAILRRCAMSLGRTSTALGAFYRRLAVRIGKAKAITATARKLALLVYRALSGKLAYRDPGATAYLKLHRARELKSLRKRAKLLGFELVDRSSGEVLLDPVS

SEQ ID NO: 465155 - protein, 402 aa, unidentified
MNAVGIDVSKGKSMVAIIRPLGEIVAAPFGIKHSASDIKSLVNLIHSVEGESRIVMEHTGRYYEVLAHQLSKADLFVSAINPKLIKDFDNDSLRKVKSDKADAVKIARYALDKWQNLKQYSVMDELRNQLKTMNRQFGFYMKHKTAMKNNLIGILDQTYPGVNTYFDSPARSDGSQKWVDFASTYWHVDCVRKMSLNAFIDHYQNWCKRKKYNFSQSKAEEIYGKAKELVPVLSKDAITKLIIKQAVDQLNSASTTVESLRTLMNETASKLPEYPVVMAMKGVGTSLGPQLIAEIGDVSRFTHKSAITAFAGVDPGVNESGTYEQKSVPTSKRGSSDLRKTLFQVMDVLIKTHPQDDPVYQFLDKKRAQGKPYYVYMTAGANKFLRIYYGRVKEYLSSLPES

SEQ ID NO: 465156 - protein, 342 aa, unidentified
MQISTIGLDLAKTVFQVHGIDANEKVVVRKQLRRSQVLAFFKALPPCLVGMEACATAHHWARELRKLGHEVRLMPAKDVKAYVKRNKNDAADAEAICEAVRRPTMRFVTVKSAEQQGRLMQHRVRDQLVRQRTQLINALRSHMAELGIIAAQGRDGVKEVLAIVADASDNRLPMDARASLMVLAAQLQACQLLIGTLEKRIIVKHKSNDRSRRLQTIPGIGVIGATAIDATVTDPKAFRSGRDFAAWIGLVPREDSTGGKQKLGHISKQGDRYLRRILVVGAHAVLRRARQHPEKYPWLTALLARRPFKVVAVALANKMARIAWALLAKGGTYRPLQLAAAV

SEQ ID NO: 465157 - protein, 360 aa, unidentified
MAKARSLVGLDVHAAKIVAAVLDAETGELQFFSMTADIGKTAGFCACLPRPVRVAYEAGPTGYGLARELANRRVECVVAAPSKIPRASGDRVKTDRRDAELIVRLLLAGKLHAVRVPGAEEEALRDLVRAREQVRVDLMRCRHRLSKLLLRHGIRFEDGNAWTDRHRQWLQTVELEWPAAQATLLDVRGAIDALTHRRDGLERQIVAMLPSSPWCTQVSALRCLRGVDTLTAVGLCAEVGDFQRFARAEQLMSYVGLVPSENTTGQQRRLGAITKTGSGHARRLLVEAAWHYRPRPNLSKALTERQADQPPAAVAISWTAQKRLHRTWTRLEHRGKRRTIIAVAAARELAGFVWAITQIE

SEQ ID NO: 465158 - protein, 356 aa, unidentified
MSREVKYIGLDVHKEAIVIAVLNTKGHQVMESIVETKASSILQFIHGLQGELHVTGEEGTWAAWLYDLLKPHVHQVLVCNPRRNALLKEGSKNDKVDARKLADLLRTGMLRPVYHGEHGLRTLRELAHTYQTLSQDLNRVMNRLKALYRGWGIACGGTQVYAPRYREEWLTKIEHAGVRRRAELLYQQLDGLQTLRRTLRPELLAESRKHKAAKLLRQIPCIGPIRAARLLALMQTPHRFRSKRQLWTYSGLGIETHDSAQYRFVRGELQRAKKPQQIRGLNRNHNHEMKDIFKGAANRASCGMSPLRDFYVALLDKGMKPEMAKLTLARKIAAIALTLWKKEERFDAEHLKTQAA

SEQ ID NO: 465159 - protein, 410 aa, unidentified
MKHQNGVDVSIVPQLDKACGLDMHKDKIVGFISAKDGSGQELKEFTFTCELRQVKEWVQNHQVEHCLMESTGIYWMSLYAILIEAGIHVTVANPTHIKQVPKRKTDRKDAKWLCTLLLNGLVRPSFMPTAEQRILRDHCRSRLFYMRQQNKTQNRLLKILESNNIKLRSVISSIKTKSAMDMIRLLAIGVTDKEQLAGCARGQVKRKKDALIKVLDGTLAPHHLVQLQMLLQDFDHVQTQLNTLEVIITEITQEHYSLAFECLDSITGIAGRSAQIILSEAGSDMSRFSTADHLTAWCGLAPGNNESAGKRRDTSVKKGNPYLKTAIVTAAWAAVRVKDSYWRALFERLRKRMKVQKAIVAIARRMLKVVHKTLDTLTMYQEKGIAHFVDLQAKAALYHRMKQQWPSTES

SEQ ID NO: 465160 - protein, 407 aa, unidentified
MDVVHVKCAGLDVHQRSVVACVRLGSGKAVTYTVRTFGTSTPDLLALSDWLTTHGCTHVALESTGVFWKPVWAVLDGAFELVLANAMHIRNSPGRKSDVNDATWIADLLAHGLIRASFVPPALIQELRDLTRTRKQLVREIAQHTLRLQKTLETANVKLTSVLTDILGVSGRAILAALVAGETDPAQLAALANDKVRASRAQLTAALHGRVTAHHRFMLQLHLGQIDALEAAVRDVEARLGTALAPFRAAVDHLITMPGVSETVARVIVAEIGFDMTRFPTAAHLVSWAGLCPRLHESAGKRLSTRTRSSNPWLKTTLVQAAWSAARTRDSYFRAQFLRITSRRGPKKAILAVAASMLTAAYHMLQHGTDYRDLGADHFDRRDKAKLAKRLIARLHDLGLTVEVRAA

SEQ ID NO: 465161 - protein, 267 aa, unidentified
MEASYYIGIDIGKQRLDWHINDAQNTELITDQAANTPKGIHKMIAQWKRGKICIEEIIVCFEHTGPYGLLLATILEQARICYVMVSAAQVQLSLGIRRGKSDPIDARRLAEYLWRFRDRLAPSRLPSKALLELRSWLIWREKLVKMRTALTNGIKANTLTGQVADLSEINDQMQAQNDQLTRLLKQVDRTINGLLHRYNTTEGQYDLLVSIPGIGPIIAGWLLVYTEGFTRFDNARQLACFAGSAPFPKQSGQKKSPDQVASGGANG

SEQ ID NO: 465162 - protein, 344 aa, unidentified
MEKHNVVAVDIAKAVFQVAVSEEPGRVARERRLSRAEFLTFFAQTPRSTVVMEACGSAHHWRREIERLGHAVVLLPPHQVRPYVTRNKTDRADAKGILEAYRNADIRPVPVRSLPQQVLGAIHRFRSGWISARTAQVNTLRGLLRELGIVIPEGIEKVIPKVRCFVADADSGIPDSLRATVAAACDEIEALGARIRQAERDLEALAEQTPVVARLRSIPGIGLMTGTALVAFVTDIQRFPSGRHFASYLGLTPREYSSGLRQRLGRISKRGDSYLRMLLIHGARSVLCHARKAERHDRLRTWALALQKRTRHNKAAVALANKLARIAWAVWKHGKEFESMPHAA

SEQ ID NO: 465163 - protein, 367 aa, unidentified
MAKYVGLDVHSKNCVFAIQDENGRMLGEGSVPTTPEGLLDLRNRYDLPAGTRIGLETGTVAFHVSRMLARMGMDPMVIDAHEVRLKARRPGQKCDRRDALEICEGVRRGMYLTIVHVPPEPITTLRETLGRRRHFVRLQTAEINAVKRLLRASGLHDLARRHLGTGAAWERLVKALAYDPPLQAHVECHRAAWSVAGSQIASLEARLTGQGKAFSADLERLQTVLGVGPIVALTAVAVFSDVSRFPTAKHAASYAGLIPSTHQSGERDAHGRITRRGSPELRAVLCQAVHHARRPDHPLHPYFRSLCARRGYKMAVVAVAHRLCRILWAMLRHGTDFDVTRLGIETGPFEKTVTQLYRRKQAAVQPA

SEQ ID NO: 465164 - protein, 341 aa, unidentified
MKVTTIGLDIAKSVFQVHGEDCNGKVVVQKRLRRSQVVAWFSQLPRSLIGIEACGTAHYWARTLRELGHEVRLIPAAYVKPFVRRNKNDARDAAAICAALNRPDMRFVAIKSVEQQASRGLERSRDLLVKQRTQLMNCTRSLLAELGIIAAQGRRGFAELVARVNDGDAAIPPVLLTALLPLIRQIEGLHTTIAALEDRIIATARENPVMRRLAGIPGIGGLTAHAIVTAVGDGRQFGSARDFAAWCGLTPQEHASAAKRHDKGISRQGDIRLRKLLALGASTVMRNARSRTDRATAWQRGILARRPVKVAVLAQAAKNARIAWALLVSGETYRTATPTAA

SEQ ID NO: 465165 - protein, 336 aa, unidentified
MPMYQLGIDVSKNTLDLCLLREGIKGRIKTRKLKNTADAAKVVAEWLKKQSCELGEVHIIMEATGVYHEPLAYGLHFAGARISLANPHRTREFARGMNILTKNDKVDAWMLACYGSLKEPEAWTPPPESVRYLRALLRRRDALVADSTREKNRLEKSVFTDSPDAVRASIENMLQELSNEIEHLDVLIQEHIKTHPELNQDFRLLTSIKSVGYLLGLNMLAILKSHSFESAEQAAAFLGVVPVERRSGTSVKGKPKLSKIGPPEIRTKLYLAALCGLRFNPVMKQMYTKLCQGGKSKMCAIGALMRKLVHWCYGVLKTQLPFDAEYNQQSYYKTIF

SEQ ID NO: 465166 - protein, 360 aa, unidentified
MSAYVVGLDVHKTRSTFVIQTTTGAVTARGELATTRAGLEQWAHPQALPAATPVALESGTLAFFVADELARLALHPLVIDAHEVRAKAQRPRQKSDRRDAFELCDGLRRDQYRTRVHVPAPAVRRLRVLLARRRHFVRVQTAQINTVKGVLRAQGQGALGRSLRPARAWTRLQQAVAPHADLAHAVAAHAAVWDAARQQRDAVEAALAAHVPAFAPAAARLMTVPGVGPIVALTALATFGDVTRFPSAKHAASYAGLVPSTYQSGDCDRHGRITKRGSAELRAMLIEAAHHAARREHPFHRVFTALCVRRGYKAALVAVAHRLCRLLFALLRDASEFHPTRGGPARPPRRRTLLVTALSH

SEQ ID NO: 465167 - protein, 350 aa, unidentified
MPATIGCDAHKQFSVFVTIDGKGKTSPAVRVEHNRQQYIDFLHTLPPGSEIALEATGHWYWMVDEMEKAGHHPHLANPVEAKKRMGKTNKTDALDAKGLAILLHNGTLPESWIPPGELRDRRELLRTRMALRDLRSALKHRIHAAIDRYGLQAIGISDLFGVKGRVYIDAVLDRLPCDTAAMIQVQLTSLDQLEAQIEEIEDRIAVALKPSPEVKLLRTIPGIGEILAPLVWLEIGDVDRFPRAENLASYAGLVPRIIASGGRIRHGGTCRNVNQYLKWGFVEAATCSLRIKAYRGTHIERLYQRLAPGKGHGRAVVAVARHLAEASFWVLRKRQPYKDPAPRPASNDAA

SEQ ID NO: 465168 - protein, 438 aa, unidentified
MYEADGFSVSTGAMKRDLSVENEFSVYVGLDWGTEFHRACVLNSRGEILRECRIDHSGQAISDFVRGLNEMGNGKPDHVAVAIEVPRGPVVEALLEGGLVVFSINPKQLDRFRDRYTVAGAKDDSRDAYVAADSLRTDQHCFRRIVADHPDVVRLRELSRTEESLGEDFRRVVNQLYQLLLRSYPQLLQLNSTPDEPWIWALLELAPIPQRGARLTVARLKALLSKHRIRRWTAEALREAIATPPLPLAVGSADAISEHTLLLLPQLRLLYSQRKEVRDRIEALLNRMTLQGSERSECREHRDVGLLLSLPGLGYLIAASLFTEASDPLAQRDYYALRAHSGIAPVTKQSGKSRQVVMRHGCSERLRNAMYHWARCSVQHDPLSKLHYARLRKVGHKHERALRGVADRLSSILIAMLKTGQPYDAKRRQNAAASADTA

SEQ ID NO: 465169 - protein, 294 aa, unidentified
MKMYVGLDVGLEETSVCIVDSDGLTVRETKVSTEPEAIRSAVEGYADRLDRVGVEASSLGIWLYRELQPAGLPIIVVEARHMRVSLSTMRNKTDRNDARGIAQMMRLGWYRAVHVKNIDMQKMRTVLTNRKLLKRKLVDLENHALRAYGLLVGAVSRGAFEARTRELIEHSDPIFVMSIQVMLDVRRALLEGYDRLHRVLLQVVQHDPVCRRLITVRGVGPVVALSFKVGVDDPHRFSRSRTVGAHFGLTPKRHQSGTLIDFEGHISKQGDISVREALCEAAASLLLRVRKWSA

SEQ ID NO: 465170 - protein, 431 aa, unidentified
MLKINPLSTLYVGIDVSSKSNYVCALDFFKNNYINSSFANNQPGAEELALKILECLNQHPDLTMVVAALESTSVYSIHIANYLSSCEELMRFKPYVFVLNPKCTANYKKSYIGLGKSDPIDAFVIADYARAGNIESEPWRGSQFLALKRLTRHRIHLVECMTREKTYLISNLYLKFSELQMLEGDDQPFCDIYGATSSSVLMEYLSPEEILASSEENLIAFLAEKSRNRIKDISKTADLLKKAARDSYRLDKALYEPLNVSIASSFNCIETFKREIKVIDNAIEKEIKGLNPNAFIILQSIDGIGPVFAGDIIAEIGDITAFHSSDALAKYAGLTWKSNQSGDFYGEDTPMIKAGNRYLRYYLGEAANSMRKHNVEYGAYYRKKYNEVPKHQHKRALALTSRKFVRLVYGLLARNQLYSGVSLDTSIKDSN

SEQ ID NO: 465171 - protein, 372 aa, unidentified
MGEHSEVFVAFDTAKLKHAVAIAEAGREGEIRFLGEVENQPATVERLIKKLGRRYRKLQVCFEAGPTGYGLYRQIQALGYACLVVAPALIPKRSGERVKTNRRDALTLARLFRAGELTAVWVPDDVHEAVRDLVRGRMTAAEDLRRKRQQLLSFLLKHGRIFTAGDHWTRAHRRWLAAQSFVHPAQQIVFQDAVAAIEDAIERLRRLEEQLAAIVPKWSMAPMVAAYQAMRGVSFLVAVTFAAEIGDVRRFDRPRQLMSFLGLVPAEHSTGKTVRRAGLTLAGNRRARRVLVEAAWSYRHPARVSETLRARLEALPKTVRDIAWKAQVRLCGRYRRLNAAGKKLPVIIAAIAREMAAFLWAIGRQVNPAAVP

SEQ ID NO: 465172 - protein, 340 aa, unidentified
MESRESFWVGFDVGKNSFSAALDCHGKNIRAKITSLPCRDFKRTPEGVEQFFLWAKKTIPGHDIRIVMETTGCYSQHLTDWINQLHPEISVTIENARNIHAFIQSLNPPHKTDKLDAQAIARFGSERHPKPTNRPSKTILTIRELSRERTALIKARVNLENRRDTLTSPVVRKINAQALATLTTQIEKIDREIKACVVQDEELLSEVHIMTTMPGVSFISAYSILAEIGSLKQYSAKELSALSGLAPRIIDSGSSVHSSYLSRRSSGRLRQTLYLDSVPGVPKIPVLQEFHQRLIGKGKKKMTARYACMRKMLLILRSMVVHNTPFNDKFPNNQRKELDF

SEQ ID NO: 465173 - protein, 329 aa, unidentified
MNNCGIDVSNKTADVVVRKKGKSLDCRTFDNDYAGHMAIITYLKKHNVTRVGLEATGYYHLDLALELDDAKDIEVMIINPRASKNFAKAMMQRNKTDASDANMLAEFTERMDFVKWTSPVGAVLDIRACGRRLVSLSKEKTKAKNQLHAYGRTRRTPSFVIEDIQLSIQQIEDQTDKLISHALRLIKQCEFLKERYQRLTSMKGVADKTAIKLLGELGVLAMDMSAKQWVAHAGLYPRSFESGTSVKKRTYIGKVGNRYIREALYMAALSASSHDPHIRGFYLHLIEDNGLTKLQAVCAVMRKMLLAMHGMLKDNKSFDGARFYDLKHS

SEQ ID NO: 465174 - protein, 413 aa, unidentified
MEVTMVGIDLAKNVFRLHGCDANGKPVLRKQLARRQLLSFVANLPRCLVAMEACASAHYWAREIEKLGHQVRLIGPKFVKPYVKANKNDASDAEAICEAASRPTMRFVAVKSTAQQDVQAVHRVRQQLVKTRTALVNQVRGLLAEYGIVIGRGFAPLRRALPLILEDRDNGLSGVMRELLGEIGERLKFIEQRLRQYDLTIQRLFRQDERCQRVAAVEGVGPLTATALVAAVGNATDFKSGRELAAYLGLVPRHRASGGRTVLLGISKRGNRYLRTLLIHGARSALYRIERQRGARAMWAARLKLRRGSNVAAVALANKNARVLWALLHRHQSYRPAPFPGGPHSGLTSSTALRTAGPPQTMAAGAVHGAAVSAPESITLSGPPSEQQLEGGAGKLVSEQCQDRTSVEAKPVN

SEQ ID NO: 465175 - protein, 342 aa, unidentified
MTNRSQLHVEAFAGLDVSAREISVARLRSKQETPTVASFPNNASGHRALLAYLLQGTARVRVCLEASGNYSLDLALALHAHRHVEVSLVNPRRARRFAESQGERSKTDPVDARVLCEYAARMPWVVWRPPSALALRLRAITRAIESLGVMHTQEKNREHALKASQALPALVVREMQRHQRYLEHRMEQLRREARRLIAKDPKLDRRFRLMVTVPGVAETSALQILGELVVLPDSLDARQWVAFSGLDPSQFTSGTSVEQRPRISRGGSRHLRRALYMPALVALRREPHLRAFYQRLVSRGKARLQAVVAVMRKLLHAFFAMFRSNQTYDGAKLCPAGLAACA

SEQ ID NO: 465176 - protein, 355 aa, unidentified
MKRSRKYVGLDVHQATTVITVRNEAGPVAARLVVATEAAALRAVFRGMRGEIHVALEEGTQAQWLHDLLVPLVHRVVVCNRRGAPPQGNKADQSDADELSELLRCGRLRAVYHGSPDRAKLKELARTYRNLVEDSTRVMLRLKALFRARAIKTPGRAVYAADQRRTWLAQLTEPGVRFRAEMLYGELALLQELRPKAKTAMLAEAKRDPAWRVLRTIPYLGPVRVALLIATLQTPWRFRTKRQLWAYAGFAVVLRTSAEYEMDGGRAVRRRRRLVQTRGLNRNHNRVVKEVFKGAATAAAARSGALRDWYEGLLTRGMREELARVTLARKLAAITLHLWKRGERYDGTQLTVHAG

SEQ ID NO: 465177 - protein, 345 aa, unidentified
MKKGITIGMDLGDKKHQVCILDEAGKIIAEEEVAGSRAATTRFLKQYRGAVVAMETGTHSRWVSQVAEAEGLEVLVGNARKLRMIWESRQKSDPRDAVMLARIARFDRELLCPIRHRGEQVQMDLEIIRARDVLVGERSRMINHVRGVVKSTGERLAACSAESFGRKAKLPEALNEALKPMLAMIRELTDKIRGYDLMIKEAAANKYPETERLSQVGGVGPLTALAYVLTLEEPERFTKSRMVGAYLGLAPRLDQSGQTDKQLRITKHGDGYLRRILVGSAHYILGPFGPDCDLRTFGLKLMQRGGKNAKKRAVVAVARKLAVLLHALWRSGQQYEPKRRQTLAA

SEQ ID NO: 465178 - protein, 347 aa, unidentified
MRFYTQQHRFYCGIDLHAKHMFICVLDAEGKIVHHQNGDANPHHFLRAIAAFRDDLVVAVECMFTWYWLADLCSREGIPFVLGHALYMKAIHGGKAKNDKIDAHKIAALLRGGLIPQAYVYPPQMRATRDLLRRRCHFMRKRAELLAHIQNTTSQYNLAPLGRKIAYKANRAGVAEHFAQAEVRRSIELDLSLIDHYDTLLNDVELLLARTAKIHQPHNFHRLRTVPGIGKILALVILYEIHDIARFASVGDFVSYCRLVKCAKLSDGKHYGYSGKKIGNAHLKWAFGEAATLFLRANPMGQILFSRLCQKHGKAKAISILAHRLGRAVYHMLKRQQAFDLKKFCMT

SEQ ID NO: 465179 - protein, 346 aa, unidentified
MILIGCDFHPSWQQVCWLDTETGETEEHKLVHAPGEVEKFYRRFAAPARIGMESTGNCQWFVDLMTALGHEVWIGDAAKIRASEVRQQKHDRRDAALLLRLLVEGRFPRIWTPSSQQRDHRQLLIHRYKLVRIRAQVKNGLQHLALNRGVQKKGRLWSAAGQKVLRGLPLPPWASRRREDLLRLWSTLDEQIALLDQAVIAAAQQNENARLLMTQPGVGPITALAFVLTMGDVSRFPRGKQVASYLGLIPREYSSGGQQRFGSISKQGNRFMRMLLVEAAQTAVRCDPQFRQEYLHRCHSKPKGVAKVAAARKLAIRLYWMLRTHKRYPEIVHVESSSRVPLVGES

SEQ ID NO: 465180 - protein, 319 aa, unidentified
METPQVSFKQVVSRGCGLDVHKKVVVATIDGEGLKKQTREFGTVTSSLKELRDWLLENGITHVAMESTGVFWKPVYNILEPAGITVWVVNAAHVKYVPGHKTDKKDSAWLCKLLLAGLLKPSFIPAKGQRELRDLTRYRKKLIQSNASNKNRIIRILEDANIKLSSVLSSTSGAVGTKLIDKICDGEEITMQDVDEVYHKKLAATKEEIFEACQGFITEHHVYMLQIIRNEIEGTQQTIESLTQRIKEVLSPYENALELLIKVPGISSKSVEDLVAEIGLDMGVFPTEKHLASWAGMSPGNNESAGKKKRTDNPGKQTS

SEQ ID NO: 465181 - protein, 324 aa, unidentified
MTQASSQPVSSLFIGIDVAKDKLDLARSDTGELLAFSNDDRGIRQIVQLLTTAMPRCIVVESTGGLERPLIEALLDANLPVAMVNPGRVRYFAIGCGILAKTDPIDASVLMKFAQLAEPRLTQKRSENQSELDALITCRRQLCATRAQQVNCKQSTRSKSAITSIDAVLVALDKQIEKLDKKIRQLIDSDDDFKHLDRQMRSVPGVGPVLSSTLIAELPELGKTDRQQISALVGVAPFNHDSGKFRGKRSIRGGRSQVRCVLYMATLAAIRFNPVLRRFADRLTRAGKASKVVIVACMRKLVALLNVMLRDNLLWSQLEVVKNP

SEQ ID NO: 465182 - protein, 412 aa, unidentified
MDVIYKVCCGLDVHKKKLVACLKSQGKKDVIKEFGAGTKDIKELAKWLKENKCEKVAMESTASYWHPLWNVFEIEEVSAMVINAKEYKNVPGKKTDVADSEWIADLLQHGLLKESFIPSREQRELREAVRYRKSLTGERAREVNRLQKMLEGANIKIMSVLTDIQGKTCKNLIEYILESEEELTIEKAEGLLANKKIKNKLENIVLAMDGIITPFQKELMREVVSHIEDMTQRIENMDKIIERYMSEYEENLKKIEKMPGIGRRSAQIILAEIGQDMERFPTENHISSWSGLCPGNNESAGKRRSGRTRKGNKNLKSTLVQCANCAVKHKDTFYYAQYQRLSVKRGKNRAKVAVAHSMLISIYHMMKENKEYRDLGAEFYNRFNKEKKANSYIKKLKELGYDIQIEQMDKVS

SEQ ID NO: 465183 - protein, 357 aa, unidentified
MMNKVNQLDFEKQPFFIGLDVHKKSWAVTIRSNKMHLKTFSMNPSTQELFRYMNNNYPGGLYQTVYEAGYSGFWIHKQLEEHGFDSIVINPADVPTTNKEKTNKRDKVDSSKLSRELENGSLQGIYIPDEFHQQLRTLCRLRYRIMQSQTRVKNRIKGLLSYYGILVPEHCELCHWSKAFILWLQSIEFSFPAGKESLRFCIEELLSHRKRLAELIRVLRKNINQYELSQLISNLCSVPGIGFVTASTMYCELIDINRFDNLDHLASFVGLVPSTTASSDQEYDRGLTFRYNKHLRYLLVEAAWIAVRKDPVLTHKFSQLTRRMTKQNAIIRIAKKLLSRVQYVWKHQKRYVPGVIE

SEQ ID NO: 465184 - protein, 324 aa, unidentified
MRIIGCDLHARQQALAMLDTTTGEIVAMTLKHEGDNVREFYSKLPRPVRVGIEATGSMQWFVNLMEELGIECQVGHPANIRAAEPRKQKHDRRDADLILKLLVENRFPKIWLPSKEQQDLRALLRHRHQWVRIRTRIQNALQAIALANGLRRGPALWSQDGQRTIASLPLAPHAAYRRSELQAMYTKFGKEVEKLNQRVEEQACERPGARLLPSEYSSGERQRFGGLSKQGNPLLRFLWGEAAMHAVRRDPELQRFYRRKLVQKGLGKTRVAVARKLGIRLWIMLRDEIDYNEFCRRGQKQQKSSEACAGMPDTGHGAKQSPAD

SEQ ID NO: 465185 - protein, 454 aa, unidentified
MARGKRQASRQLIEDEEHQLRYERVAGIDVAKASGVVCTRLPPVREGGRRVSRIETVAAAAAGILALAARLAGDGVQMVTLESTSDYWRIWYYLLEAAGLRVQLVSASQARRLAGRPKTDEQDAQWLARLTEAGLLRPSFVPPAEIRALRDYTRMRLHLVQDRTRCWQRLEKLLEGALVKLSSVVSQLSGVSAQEMIRAMIAGQRDPRVLARMARTRMKAKHDDLVQALDGRFDDHHGELAQLLLDQIAFLDARIAALEDSIAACLDAIPASWGIDADGGPAPDPGPGAQVLPAVQRLAEIPGVSDGLARAIIAETGLDMSRFPTAGHLVNWAGLVPAADQSGSRAGKGRKGQGDTYLRCHLTQAANGAARTHTFLGERCARIGRRRGKAKAQVAVARSILIIVWHLLKNPGARYTDLGPDWYATKISTSKKIRGHIRQLQALGLDVTITPRAA

SEQ ID NO: 465186 - protein, 314 aa, unidentified
MTVKADFIGVDVSKLTLDVACHESKAYQQFGNDAAGIAALIDWLKKIQPELIVLEATGGLELPFVAELAYAKMPVAVVNPRRVRDFARSIGQLAKTDKLDAKVIAHFGAATHPEARKLPTQEEERLTALMTRRRQIIVMLTEEKNRIHSARFAMRDRIETHIAWLEKELKDLDDEINDFIQQSPLWKEKDKLLQSVPGVGHVTSATILGMLPELGSMNRQKIAALVGVAPVNKDSGKRQRKRRVFGGRANVRSVLYMAALSASKHNPKIKAFYDRLVCMGKEKKVALTACMRKLLVILNAIIRNNQPFLDKQVI

SEQ ID NO: 465187 - protein, 320 aa, unidentified
MGRQSNYAGIDVSQATLDMAEHATGQQWSFGNDDAGIAEAVAVLVNLKPALVVLEATGGIEVPVVTELVAANLPVVVVNPRQVRDFAKATGRLAKTDALDAQVIAHFAAAVQPELRPLPDTQAQEFSAIMARRRQLQDMLTMEKNRLRAARRLVRGRIKAHIGWLENELTHTNADLERSIRESPVWREKDDLLRSVPGIGPVTSCTLIAGLPELGMLGRKQIATLVGVAPLNRDSGTLRGKRTIWGGRAQVRAVLYMAALASTRHNPVIKSLYRRLCAAGKVKKVALVACMHKLLLILNSMVKHNIRWHYTTAELIGPCS

SEQ ID NO: 465188 - protein, 368 aa, unidentified
MGDGVDAPRRHLRARVEVFTHHSREASVGEVSTVGLDIAKSIFQAHGADAAGEVVFRKKLGRSRLLAFFSGLPPCVVAMEACAGAHHWGRELTRLGHTVRLIPPAYVKPFVKRQKNDAADAEAICEAAQRPNMRFTPVKDEAQQASGVVFRARDLLVRQRTQTINALRGHLAEYGLAIPRGVPHVARMLDRIEDPEEALPEAARAILRVLAESLWSLQAQIAVLDAEIGRRAKADPIARRLMTIPGVGPITATAIIALAPAPETFRAGRHFAAWVGLTPRQNSTGGKQRLGAITRMGERTLRRLLTIGASAVVKQAALRGAPAGSWLAQMLARKPRMLVTVALANKTARIVWALLARGGVYRAPLAVA

SEQ ID NO: 465189 - protein, 363 aa, unidentified
MYDSTTVTIGLDVHARSIRLAAVRADQLLEERTLPYDEEAVERVLRRWPGVRCCYEAGPTGFGLYRHLVERGIDCAVVAPGLVPRRPGDRVKTDSRDARKLARLFAGGLLEPIHVPSPEQESARDLVRAREDARLDRMRDRHRLSKFCLRHGRLLPTSSWTVVRRRWLSEQRFAFVAEQVTFDAYLHTVDLVDARIEALERAIRETAEQQPWKQLVARLRCLRGVDTLTALALVSEIGDFSRFRTAEEFMAFVGLVPSEHSSGEKRRQGSITKVGNSHVRRLLVESAWHARRRPKVGYDLSRRQRGQDAVVLERALRCQQRLYSRWQRMAGRGKPQQKIVVACARELAGFVWAIATDQPLRTT

SEQ ID NO: 465190 - protein, 343 aa, unidentified
MSSLVCGLDVHKDSVYATVMSYAGEVVERRKLSNDEVVSFLGRYPVDKVAMESSTSIVPVYRMLRGKGYNVLVSHPKKTRLIAESRIKTDRVDSWAVAELARLDALPLSYVPPDDIAALREKVRRRAFLVRMRSKLKVKIRAQLIVNGITPPVEYGLFTIKGLEWLHSLELDPVESYLPIISSLDTQIGKLSKELRMMAPQDEDVKLLTTVPGIGYYAALLTKSEIGSIDRFQDGEKLCSYAGLVPSVSSSGGHTRYGSITKEGSRWLRWIMVECVQVHLRYDTGITRAYHAIAERKGTGIAKVAAARRLLMCCYSILLNREPYHDTFHDQAKMKSSVPTLRP

SEQ ID NO: 465191 - protein, 345 aa, unidentified
MNEFYEGRQFVGMDLHRRRSVLVRMTEAGEHLETVRILNDRDVLAEVMSRAGDSPEVVLEASYGWYWAADALAELGASVHLAHPLGVKAFSYRRVKNDQRDAADLADLLRMGRLPHAWIAPPETRELRELVRHRAKLVAMRSRCKAEVHAVLAKGGVWVPMSDLFGVEGNLLLDKVTMPAPYRERIASLRRFIEAFDAEIDLFTGLAARRLTHDAGYTAIQQIPGIGAVLAAVFVAEIGDVHRFDGPAQVTCWAGLTPAHHESDTTVRRGAITKQGSRLVRWAAIESVKILPKTSRIGAIREQVASRRGNRNIGAVAAARRQLELVFYGLREHHIRALRRPPRAA

SEQ ID NO: 465192 - protein, 428 aa, unidentified
MTNRQPIPTDALLVALDIAKVRNEVLIEASNHKRRRRLSVLNTRAEHDRLIETLRAYGKPVICAFEATGNYHRPIAWRLIEAGFDVRLVSSMALARTREALHNGWDKNDPRDAQVILQMLRIGATQRYHDPLRAGINDVQELSKTHEAIAKAKTEIQHRILTHYLPLYFPEIERFRGNSRSDWFFAFLDAFSTPASIMALSKEAFIEAAWDVVGRKVSKERLLADIYETARTSIGLPLPIDAPAIRMFRMVIAEARSLIRQRNEIEDMADAMLRDSADYKALRKVPGIGPVIALTILAEGGDLRRFRHHRQFLKFCGLDLSTQQSGQHRGQTRLSKFGNARLRRTLWIAGQVAIRQRENGFRHKFERYIAKDRDNPDLRRKALTAITAKMARVVHAIIKSGSDYRPFVEGRVPGGRISFCGAVRAPKG

SEQ ID NO: 465193 - protein, 352 aa, unidentified
MYYVGLDVHKAYCMTAVLDEQGQLIDRCRLASEPVTLRQYFRKFDEPTQVAVEACYNWGYFFDILQDCTEEVVLAHPLKTRLIAEARIKTDAIDARVLAELLRAKLLPVAYAPAAATRQVKNYLRYRAGLAMLNTQVKNKLHALLDQHEFPQRSALSQVADLFGKQGLALLRTVQLPGTEQAVLESWLRVHEQLVNELRQANAWIRAQVKEDRLAQLLMTIPGIGHQFALLVRYEIDHIERFASAKRLVGYIGLAPCTWSSGGHTRHGSITKQGNKWLRWAMVEAAQKAPLTSPYFAAYYHRIKERAGFARARVATARKLVEVVYGVMKTQTEYRDPVCGPSPSKGSSRVAA

SEQ ID NO: 465194 - protein, 367 aa, unidentified
MKNTIVHHEGAASLKVAVNKIGLCGSVIKIGLDVHVRLYVAVAQYDQLLPKPARRLAPLEFVPWVEQLLRAGHTVHVVYEACGFGFGLYRELEALGVHCYVIAPRKLDEQFTRVKTDPRDATTLCQRLSRYLEGNTRELAVIRVPSEAEEQARHVSRQREQLVRHRQKLEAQGRSLLINHALPAPAHWWKNQTWSRLTKLLPAWICLRLEVHRPALLILEQQISALSVELEAAAPALVPTGVGKLTTVVMTREICSWERFSNRRAISSYTGLCPGEYSSGTKRIPGSVTKHGNPRLRAALVECAWRMVRFQPQYPPVKKRLVILAKGSRATGGQRKKAIVAVARHLAVDLWRVHTGRNTAAQLGLTI

SEQ ID NO: 465195 - protein, 346 aa, unidentified
MEQYVGLDVSLKLTAICIVDRTGKIEREGVVASDPEAIAAFVKSHAPHVARIGLETGATSTWLWTELNKMELPVICIDARHAKAALKMQINKSDRNDAVGIARIMQCGWYKEVRVKDLDSHAIKALLVSRALLVKIKRDIENQIRGLLKNLGLVIGQAKMNVFAVRAAELAEARPELAAAVEPLLKAREAVGRQIADLDRKVMRLARNDAQVRRFMTAPGVGPITALCFLATVDDPTRFKRSRSVGAYVGLTTRPYASGEIDWTGRISKCGDKMLRSYLYEAANVLLTRVVKWSTLKAWGVRLAKRSGLRKAKVAVARKLAVILHRMWIEGTEFKWSSKEVANQPA

SEQ ID NO: 465196 - protein, 352 aa, unidentified
MTVTNLARTIAGGVDTHLDVHVAAALDERGALLGVESFATTESGYKKLLGWLSDFGPVELVGVEGTGSYGAGLTRHLQAERIRVVEVDRPNRQRRRLKGKSDPQDAISAARAALSGDAAGEAKTRDGNVESMRVLRVARASARKGRTQALNQMRNLVSTAPDPIRAELRGLNVFHLLERASTYRPGTKRDIVSLTKFSLRMLARRAVTLEAEITEIDAILKPLVKETAPELVATLGIGTDAASALLVAAGDNPGRLRNEAAFAHLCGASPLDASSGKNQRHRLNRSGDRQANSALWHIVLTRMVYDPRTNEYIDRRKKEGLTKKEAVRCLKRYVAREVFSLLPHEKLGLDSP

SEQ ID NO: 465197 - protein, 385 aa, unidentified
MTTTRQVSTFIPRDYDVFAGLDVDKRSIAITFTDHGTMRKSLKLPYSASQLLNYTGKHFPGQRVAFVYEAGPTGFGLHDELTAASHRCLVVSPSMVPSAPRNKVKTNRLDSKKLSEGLRGGQLRGIHVPPPSYRELRHLVQLRDTQVAQLTATKLRIKSLLLYEGIPFPAANGKWSGRVLRQLESLPCNATVRFKLNQLIDTLQFHFQSAAKVQKQIRYFCQNDPELNQCISFLISLPGVGTITATHALARLGDWRQIKDVRQIAGFLGLVSSEHSTGDKENRGEITRIGDKRLRSKLIQCAWTAIRKDPELRAFYRRIYERHPKKVAARKAIVAVARKLTTRMYAVLKEQRPFVIRAESSIAPLTAEETTGLGERLDGAQNDQP

SEQ ID NO: 465198 - protein, 407 aa, unidentified
MISIGIDISKDKSTICALKSGSETIWKPFDLKHLQSDMQSFISKLEALTGELRIVMEATGKYHLPILYSLKSKGYFVTVVNPLKMKQFCRSMSFRKAKNDNIDSRLIAEYGLIYWHKLEEYKLDREVYQNLKYLNRSYHHYMDLRISQMNFLDTFIDQVFPGLKKILPHGSGDFSKDKLLDFLEVWWHKDVVISQDEEEFIKVYQKWAKEKRYHPNAKKAQAIYEVALEGISTQPSNSPYIKADVYESIQLVKRINQSLNCILSQMLDLAEPLEEFQEAKKFSGISDKLAVQITAEFGDLSKFRNKKCLISFVGIDAPTYESGDFKGSRRKISKRGNAILRKVGYQAMKCMMGAKNPENPVYCYMVKKEEEGKAKKVSKFAGLNKFLRIYYARVIEIKEEKASKKAA

SEQ ID NO: 465199 - protein, 403 aa, unidentified
MVVVATAAEEVADAAGEALEFVCRRFGAGAGERQHVVSWLREQEVSEVVMESTAQYWKPVWLDLEPHFGKLHLAQAHSNRAPKGRKNDFADAKRLTRRLLAGELILSFVPDAEQRAWRTITRGKQQLVRDRVRLQNQLESLLEEGRVKLSSVISDLLGLSGRRIMQAMAEGETDPDRLAELGDDRLHCSKQQLADALTGSLEPVHRELLKLYLKRLQLLDQQIGKLDQMIAAALKPHQDAVVRVAGIPGFGVDSAQQLIAEIGVDAESFPSPGEFASWAGLCPGSNVSAEENHSSRSAKGNRFVRRILTQAAQAAVKKKGSHFQSLFRKFLPRQGYNGAIWAIAHRLGRLVWKILHDGVRYIEQGQETNPKAKKRRAQKLAQALRNLGYTVLLTPIAPEPERG

SEQ ID NO: 465200 - protein, 350 aa, unidentified
MSRSSSSAEIATLGIDLGKNSFHLVGQDERGAIVLRIKLSRPQLTQRLANIPPCLIGMEACAGAHHIGRQLQALGHDVRLIPAQSVKPFLKGHKNDYRDAEAIAEAVQRPTMSFVAIKTPDQMDLLALHRVRSRLVSQRTGVTNQIRGFLLERGLTVRQGLAPLRQALPGILGSSDALSPRLIRLIADLMEDWHRLDERIAHVSAEIEALAAQDEHCQRLMSVPGVGPIISSAVVAAIGTGAGFKQGRDFGAWLGLVPKQESTGDRTILGKISKRGNKYLRTLFVQAAHIVLVRRPHGARLGLWPWIETAGRRLHRNMLVIALANKLARIAWAVLARGHGYQPRSVSHAI

SEQ ID NO: 465201 - protein, 344 aa, unidentified
MKKVLIGIDFSKEKFDVAIIVKSTSTQEHALFDNKVSGYRKMIKWINSVVEDVPCSSWLFCGETTGGYSRMMSDWLYAQGYDVWIENALVIKRTFPLKRLKNDTVDAFMIAEYALRFEDRVQLYEPMSQALTELREIFLYRHHLVRHRCSFEVRRIEKRFTQQKSANKNVISQSARHIITEINKEIAKCDEKIKEYIESDDQLSSIFAIVTSMLGIGTINAVSLMVYTNNFTKFAYNPRKIACYYGIAPFGRDSGTSVHTDPRVGFIANKMLKSLLTQAALAAVRTCPQIAKYYQRLIERGKKPMVVLNNVKNKMIAIITAMVRTGCMYQPDNICLATQSVIVK

SEQ ID NO: 465202 - protein, 387 aa, unidentified
MFYVGIDIAKNTHWASIISSDGEIVKEPFSFSNDNSGFQKFISNLESLDKTKILIGLESTAHYGENIISYLFNLNYKIGLINPIQTAHLRKSNIRKTKNDKVDTYIIIKALTLGNYSLITSRDINNLKLKGLCRSRRNLVTMRSKSKIQLVSYLDQIFPELSQFFKGNIHLNVSYQLLKEYSSPKQISSLHLTKLSNILHDNSHGRYGKQDAIRLRELAKSSVGIDNPSLSLQIKHAIFQIELYNKQIAEIESLYKSILDEMDSPILTIPGMSYNQAAVIVGSIGDINRFTHSCQLLAYAGLDPSVVQSGNFQAKSTRMSKRGSGMLRYSLVYAAHNVVLNNKTFKEYYELKRSQGKSHYCALGHVAHKLVRIIFKMLKDNVSFNLD

SEQ ID NO: 465203 - protein, 376 aa, unidentified
MSKLRFVGLDVHADTIAVAVAEPDGEVRSLGVIPNRPESIRKLMGKLGRPATLRVCYEAGPTGYVLYWQLCEMGIACDVVAPNLVPVKPTDRIKTDRRDAEKLARCHRAGDLTAVWVPDAAHEALRDLVRARLAAKRDQLRARNRLSKFLLRHGRRPPPGATPWRLRYFRWVQHVRFDLAAQQITLADYLHEVEHAAERITRLERAIDEAVAAAPARTRQVIDGLQSLRGVAKLSAVTIVAELGQVSRFASAPQLMGYAGVVSSERSSGERVRRGWITKCGNAHLRRIVVEAAWAYRFRPVISRTLAARQCTDNERVRAIAWKAQHRLHSRYCRLVARGKCRQQVVTAVARELLGFIWAIGIELERGADRDIPQAA

SEQ ID NO: 465204 - protein, 427 aa, unidentified
MGLIVPTTIHPEREDQPLPYEWFVGIDWGSPQHQVSVLDRDRRRVGERVVDHDGASLARLADWLWTLSAGQPQRVAVAIEVPRGAIVEGLLERGFHLFALNPKQLDRFRDRHSVAGAKDDRRDAFVLADSVCTDQPSFRRLQLDAPQFILLRELSRAEETLLEEFRRSANRLREQLHRFYPQMLQLCSAADEPWLWDLITLAPTPAHAMLLSEEQGQRVLKAHRLRRLKAPAVLACLQAPALPVAPGTAEAAQAHCGFLLPCLRVLAEQLQACSQQVSTLLRTMADEPGEGGSPSDVAIVQSLPGIGRKMTAWLFAEAAQPLAERDYQVIRTHGGVAPVTKQSGKRRQVVMRHGCNPRLRHALYHMARVAMQRDVHFSSVYAALRAKGQRHGQALRNIGDRLLRILMAMLRHRTGYDASRIRCKPVV

SEQ ID NO: 465205 - protein, 350 aa, unidentified
MDRYIGLDAHTSSCTVATIGQSGKRLHSQVVETNAKALIEVIRGVPKDRHLCLEEGPHSNWLYEVLSPHVQEIVVALVNESRGPKSDKLDAFGLAEQLRVGAIRTKVYKKRGSFGRLGYRVKAHALLVADSVRVQSRIKALMRSRGVAVAGGDVYSRSERDEWLLKLPQSARSLAGLLYLEYDGVEGLRQRAEREMITEARKHDVYRIIQTCPGIGEIRAAQILPVVVTPFRFANKRVFWSYCGLGIVMRSSADWVRGRDGQWVRAPVQQTRGLNRNFNRILKGVFKGAATTVIGRAQDEPLYRHYVNLLDGGTKPNLAKLTIARQIAAIILALWRSKEVYDPKRVGHAA

SEQ ID NO: 465206 - protein, 417 aa, unidentified
MRKIQTKKLKSVNSDTLLATVDIGKNAFSGYARCPDRSELKASDFTNNLAGFGRFWNTLVQRRKAHGLKQIVLGFESTGVYGEPLLHFLKDKPVRLVQVNPMHTKRVKELTGNSPNKTDQKDPKVIADIIELGHGLTVLIPQGAAAELRRLTQARERAIKRRTALFNQLHDLVFISFPEFFQVIKNIKTTSARYLLRHYARPESIVREGMASLTQTLKRISRGRMGPARAQALFDAAASSVGLREGCLGVDLEIQALLEAIEGCDRFVQRLETEMALHLKEIPYSRLLLSMKGLGPITVAGLIGEVGDFRHFDTQKEILKLAGLDLFEISSGKYKGQRRISKRGRPLLRKILYFAALNTVRKGGIMHEHYQQHLQKGMPRPKALIAIARKLLGIILALVRTQKEYAVDRQIELAKVA

SEQ ID NO: 465207 - protein, 440 aa, unidentified
MRIMYERCCGLDIHKASIAACALISEKGKPQEETRRFGTMTADLRELAGWLQQKGIRHVAMESTGVYWKPVWNILEPAGFELLLANAQEVKVVPGRKTDQKDSQWIADLHKHGLLRNSFVPPRAIRDLRDLTRTRAILTQEHTSICNRIQKVLEDANIKLGSVASDVFGVSGRAILRALMKEENDAEALADLSKGLLRKKIPQFRRALEGQVTAHHRSLLTGQWSRMEFLEREIVDLETQIAERMKPTPEETALTLPNTAEDAPAPLSPREEAIQLWMEIPGVGWTAACSMVAELGVNMDQFPSAAHVASWAALCPGNNESAGKRLSGKTRKGNVWLRRTMCEVAWAASHTKDTYFAAQFHRIASRRGNKRALMAVAHSILVTAYHMLKHKRHYQELGADFFDAINRDKVRDRLVQRLAKLGFDVTLKSKDSIASDSQKN

SEQ ID NO: 465208 - protein, 388 aa, unidentified
MRNDPVPTKNVATSSRSKSKTQRESSRRPEPGVRSTLGVAKPIRKQQKETPVEQVQQYVGIDLHRRRSVIVRRTESGETLDTVRIDNDPVTLAAELAKAGEHPEVIVEATYGWYWAADVIQECGGNVHLAHPLGNNWGNRRVKNDERDATDLVDLLRMGRLAEGWVAPPALRELRELIRYRAKLVHLRSNLKAQVHAVLAKEGVAVPMTDLFGVGGQRLLDEVKLGRAYRIRVESLRDLIELCDREIAILEKETAPFFAGDLGYHAVQAIPGVGPVLAAVFVAEIGDVSRFTSARHLTSWAGLTPTHHESDKKVRRGHITKQGSRLVRWAAVEAVSRQRGDTPIRAHHQQVGERRGAQIGRVAAARKLLILVYYGLRDGEIRCLAKAG

SEQ ID NO: 465209 - protein, 341 aa, unidentified
MHRSQITYDWIDPDTGQRQRGQLAPAHREHLRVWLEQFAGRQAAFAVEGCTGWRYVVEELQRVGIQAHLAEPADTSAARGPKRRAKTDQLDARHLRELLACGRLPESWIPPAQVLEVRTQVRCYKALADEHTAWLQRVQATLFHHGVPAQRNLLAADRRARLERGSGLSPAASQQVTVALRTLDHLDGELDRLRGELVGLARRQPGCRALDALYGIGPVTAVAIWVELGEVGRFTSSRHAVRHTGLDVTVYASDGKRTPGHLARQGPPVLCWALFEAATCAARASSPDHVYYTQVKQRLGGNRAPLSVARKLPRRCYHTLGALGEQAYAPPCHPHDLEQVA

SEQ ID NO: 465210 - protein, 388 aa, unidentified
MQTTAHQPQAPTAIRTDLGAIFVSMELSRTSWLLTSVSPGDGERMSKHAVRSGDVAGLRARFSLLKEKVRTRTGLAVSIIVIQEAGLDGFWIHRLLLCDGIESYVVDPASIATSRRRRRAKTDKIDGEALVRALLAYKRGEPRVCAMVRAPTPQEEDRRRICRERKTLTAERVEHVNRIKGLLFAQGIADYEPLLRKRRERLDELRTGDDRLLPQHLKAQVGRELDRLELVLQQMKSVEAERDASPNASDKETPTPAAMLKRLKGIGPEFANVLWSEGLFRSFANRRQVAAYAGLAPTPWQSGSVAHEQGVSKAGNPRLRTTMIQLAWLWVRHQPNSILTQWFHQRVQFNGGRVRKVLIVALARKLLIAFWKYVTAGVVLEGAETTAA

SEQ ID NO: 465211 - protein, 444 aa, unidentified
MDVVFTHCAGLDVHKKTVMACRATPDPSGQQLDGIMEVKVFSTMTAQLLELSDWLGEAGVTQVAMESTGEYWKPVYNILEGNFQILLVNAAHVKNVPGRKTDKADAQWLAKLLRYGLLQGSFIPPAGQRDLRDLTRYRMKLVRERSSEVNRVQGVLERANIKLASVATDVLGVSGRAILAALIAGEADPAMMAELAKGRLRSKIPELEQALRGLVREHHRRLLAMQLAHIDFLDEQIEALNAEIRGLLEELSQGEPPEEPAGPGAASERSPEPSATPLSFTQAIPLLDSIPGVDQKGAELLVAEWGTDMGCFGTDSRLAAWSGVAPGNNESGGKQRSGKTRKGNQVVRTGLTQMAHAAARSRGTYLSALYHRLAARRGKKRAIMAVAHSIVVSAFHMLSRNQPYQELGANYFDRHRPQQLVDRLARRLERLGYRVTLEPVPNAA

SEQ ID NO: 465212 - protein, 358 aa, unidentified
MNKLYLGVDLHKRSCWVTVLDADGHLLASRKLGTEKWELLEFFSQVEKPAAVAVEATFNWYYFLNVIEPLGLELHLVHPWKTRAIASARIKHDKLDSRVLAEWLRTGFLAEAWIAPRAVREQRQLLRYRVHTVQWATRAKNCIHARLNRNGIRTPLRSPFGPQGREFLTTVELPGTDRWEVDGQLARLDLLGQQLAALDREIRRRGRRSPVAQALERIPGIGPFIALLLVAEIGEVQRFPTAKHLASYTGLVPSLYASGEHRWGGAITKQGSTVLRWALVQAAHRAALSPQFQAFYQRQRARQGAGKATVALARKLAVIAYYRWRQALARPSGADPAEQVRECSCAGAWSEDRPLSSD

SEQ ID NO: 465213 - protein, 275 aa, unidentified
MSSLFVGCDAHKHYSQLEIQDSSARVMRRCRLDHARGALLSFFSSLPNGTPVALESVGNWYWIADEIEAGGCRPLLTNPAKAKLLMGHVNKTDKLDASGLTTLLRLGSLPSVWLPPAELRDQRELPRTRMVLCAERTRLKNRIHSLLAKYNLSPSEGTLFSQQGRTWLDSAISELPPETARCLAEQLKLLDFLSLQISDLEDRIHELIALTPTMQLLKTLPGVGDMLAIVIEREVGSIERFPSAQQFSSYCGTTPRVSCSGGKTHYGKMRSESNQ

SEQ ID NO: 465214 - protein, 331 aa, unidentified
MKKKVFIGIDVSKAKLDVSYLLEGESKAHKHFIVNNNPEGFRRLVNEVARLGFGQGEQLFCFENTGVYSIGLALFLNEQGVDFCHESALRIKRSEGIKRGKSDKLDSQEIAQYAQANQHKLRLTVMPKERLLELKMLLSYRERLQKQRNGLLVAAKETYQFFENQTTRFILEDSQEVIAQYDQKLHNVEAQIKRLIQEDEDLNRNYGMATSVIGVGLIIVAYMLVQTNNFSFYSPRGYACHAGVAPHEHSSGTDVPQRRETSKMANKKIKALLTNGANSAIMHDPQIRLYYNRKVKEGKNKFLVINAVRFKLIARVFATVKRGAPYVKMAH

SEQ ID NO: 465215 - protein, 450 aa, unidentified
MAKQKQKPIKARAMHALEQINLNAAGIDIGAEEVYVAVPPDRDGQSVRRFATFTADFNQLAEWLKACRITTVAMEATGVYWIALFEILEERGFEVYLVNARHVKNVSGRKTDVLDCQWIQQLHTYGLLRPSFRPPEQIVAIRSLVRHREGLVQYRSAHVQQMQKALTVMNLRLSNVLSDITGVSGMNILRAIVAGERNPHTLAQFRDERCAHSKTEIAKALEGHYKPEQVFLLKQSLELYDFYERQIQACDQQLQALYDPGTPPPPPHTAKRRKHQAHFDLDAALYRMTGVDLTRIAGVDAMTIQKVLSETGTDMSRWPTEKHFAAWLRLCPNNQITGGKLKHTGVEPTQNRASTALRVAAASLSRSDSALGAFYRRIRARSGGPVAVTATAHKLARIIYAMLKNRTAYQDAGAQSYELLFRERMVRHLNRQAARFGFRLEPASQHGHVS

SEQ ID NO: 465216 - protein, 327 aa, unidentified
MIKNTAPVYIGVDVAKATLQMHLLGAQFEFANTPEGRAQLCEKVRHVPQAQVVCEATGGYERAMVEDLHQAKMPVSVVNPALVRAAAQAKGQRAKSDPIDAQGLTDYGARYQPEPTLPRSKVQLELAALVQWLRQLVNAQAVVKAQAEHHSALFVVKQQTELLQHYQSQIKAVEAKLEKLQEHDRVLQQRAERLDALPGVGRRTALQLLAYLPELGSLNRREAAALSGLAPWTRDSGTLRGKRCIGGGRAEVRVALYMSALSAIRCNPILKAFYQGLIRRHKPSKVALTAVMRKLVIHMNNELKKLASLPPVEEKKKNRKSEKSVAE

SEQ ID NO: 465217 - protein, 421 aa, unidentified
MTELVPPRVIVGIDWSVKELQVCPEDPEGQVLWNRVFPHNGLGLADLTDQLTEMADGDPASIYVAIEMTNGPTVETLLERGFTVFGINPKQLDRFRDRFSPAGAKDDRRDAWVLADSLRTDQRAYRRLSVDAPEVIELREWSRMHEDLKQERVRLTNRLREQLRRYFPQMVEAVDQIWAEWFLDLVEQIPTPEAARRRRVATVAKILRSHRIRRLSAEDVLSILRQPPVYVAPGTVVAAQAHIRLLLPRVRMINRQLRECEKRLDALCRCVTGETEEGAEESGEQRDGKILRSFPGVGRIVLATLLAEAAQPLRARDLRALRTLGGIAPVTKRSGKRHLVLMRHACNRRLANALYHWARIASQSDSYWKRRYAEFRRRGHSHGRACRGIADRLLSTAMAALRTDTLYDPTRLSNYAEKMPA

SEQ ID NO: 465218 - protein, 394 aa, unidentified
MKLVGIDVGKNSHHFCVMDKETGEFNVAPSSFSNNKEGFDFLINSLKPYSKKSILIGMEDTGHYHVALLKFLLSNGYTVALINPKTTDLTRKMEGGITKNDKLDTITICDVLETPERKKQYRITKVDRFDLYEQRQLTRHHHNLKEELNVYCNRLQKSIDLVFPEFNTLFSSKYSIVYMNLLKTFGSAEAIASTDIRTIRKCFEIKGKGGRISLTPEKLKECAKNSIGISSEVETIQIKHLVSQITLIKEQIAEIDKKIEEFSITNNSPILSIPGISHFSGTSILAELGDIGNYSKPSQIIKFAGVAPYHYESSQYNAQHTGITKKGSKYLRKTLYQIILTVINNNPVFKKYYRLKISQGKGHRCAQGHCIRKLLRIIYHLLETGQSFDPALLR

SEQ ID NO: 465219 - protein, 339 aa, unidentified
MNSNPSIVSGLCVGIDVAKDKLDLARSDIQAVQVFSNDAAGIAQIVKLLLAAKPAMIVIESTGGLERLLLETLLEAELPVALVHPGRVRHFAIGLGILAKSDPIDARVLVRFGQLAAPRLAQKMEKNQRQLRDLVACRRQLIVSRTQQLNRRGTTISPAALRSINAVIATMDKQITSLEKQIQALIDADDDFKHLDGLLQSVPGVGPTLSATLACDLHELGTDDRQRICALVGVAPFNSDSGTVTGKRSIRGGRSDVRTILYMATLSALRANPLIKSMYQRLISAGKVHKVAIIACMRKLLSLLNAMVREGLTWDQLEVVQQLAHKTRASTALPEASMR

SEQ ID NO: 465220 - protein, 317 aa, unidentified
MSSGRCVGIDLSQEQLEVAVRPGGEVFQVAYDSAGVAGLIKRLGKVKPTRVVLEATGGLEVPLVAQLSVVGLPVVAVNPRQVRDFAKATGELAKTDRIDAGILAHFAEAIRPELRPLPDEASRALSELVNRRRQVIDMVVAEQNRLRRTATPAVCTRIQNHLDFLRRELEDLDTDLKTRVTQSPAWQADADLLRTVPGIGPTTAASLLAQVPELGHLSGRKISKLVGVAPLADDSGLRHGYRRIWGGRAKVRTSLYMATLVAIRYNPPIRAVYQRLVRAGKPKKVAIVACMRKLVVILNAMLRDRIPWDPALAASQT

SEQ ID NO: 465221 - protein, 348 aa, unidentified
MIIIGVDFHPEFQQIASVDSETGEFQEKRLAHPAEAEKFYRALVGQKVRMGMEASGHARWFERLVAELQFELRIGDAAEIRTKRVRKQKTDRQDAQLILRLLLEDRFPQIWVPSWENRDLRQLLWHRHRMVQARTRIMNQLQAVGLNEGLRCKKKLWRERGRQQLESFRLAPWATRRRRDLLELLDRLTPTIAELSHAIEREVEKCPAAQRLRTHPGVGSLTALAFVLIIGEVNRFRCGKQVASYLGLVPLEQSSGNRRRLGHITKQGSSMMRFLLVEAAQVTVRSLPEWRSKYLHLVLRRGRKIAKVAMARRLAVHLFWMMRKEWNYQQLKKFGSHAGEPGNRHGVQ

SEQ ID NO: 465222 - protein, 349 aa, unidentified
MVVVGADVHKRTHTFVAVDEVGRELGHRTVPAETGGHQAAMRWARDRFGTDVRWAIEDCRHLSARLERDLLGAGYSVVRVPPKMMAEQRRIARTRGKSDPIDAAAVARAALREPGLPVASHDEVSRELKLLIDRRDDLVRTRTATINRLLWRVHELDPAWAPPAKSLDLAKHQRLLAQRLAGVEGIVAELARDELVEVVELTGKINALAKRIEQRTVQVAPSLLAMPGVGALTAAKIVGEAAGVARFKSEAAFARHAGIAPIPVWSGNTAGRVRLTRSGNRQLNAAVHRIAVTQIRLDGLGKTYYLKKKAEGMSTAEALRCLKRRLARVVFNHLSTDQATTATCLAAAA

SEQ ID NO: 465223 - protein, 349 aa, unidentified
MVVVGADVHKRTHTFVAVDEVGRQVGSKTVAASTAGHQVAVRWVRERFGGEVLWAIEDCRHLSARLERDLLTSGQSVVRVPPKMMAEQRRVARTRGKSDPIDALAVARAAQREPDLPVAAHDEVSRELKLLVDRRDDLVKHRTATINRLLWRVHELDPGISPPERSLDLATHQQALAAALDRFDGIVAELARDELADIVDLTKRINGLERRITDRVRDVAPTLLAMPGCGPLTAAKIVGETAGVTRFRSEAAFARHAGIAPIPVWSGNTRGRVRLTRSGNRQLNAAIHRIAITQIRLDGLGKTYYEKKKAESMSTPEALRCLKRRLARIVFNHLITDQAAAATGLATAA

SEQ ID NO: 465224 - protein, 493 aa, unidentified
MKGQRAKRNQKNQKTSKTTSDKATPGKWDEMNRKQRREMMRQMQSGDLSLEVIHPDASGIDIGNESHYVAVPPSRDSQPVRCFGCTTAELKKMAEWLTQCGIRTVAMQSTGVYWIAVYDILEAAGMEVYLVNARETKNLPGRKTDVQESQWLMKLHTYGLLRNSFRPSQEIRILRTYWRQRHDLVRSAGRHIQRMQKALTQMNIRLANVISEISGMTGQAILKAILDGQRDPRELAAYRDHRVEASEEEIAQALEGNWQEDQLFVLRQEQAGYEFCQQQITECDQQLEKYLARLEDRTQGATLPKETRKGRLNKKKKRNPQFNLREELFRMTGTDLTQIDGIDVTVAMTVVSEVGWDMSKWKTENHFVSWLKLAPDNKISGGKVIGKGRTPTNNRATTVLRMAATTLRASDTYLGAQFRRLRTRLGPPVATKAMAAKLARLLYRMLRYGMKYVDKGAELYEAQHRKQQVIHLKRKAAQLGFQIIEVADAARSC

SEQ ID NO: 465225 - protein, 329 aa, unidentified
MTTKNIEMDLTSFTPIGIDISKLTFDACIGEQTYKYDNTKSGFKKFASKLPDNSWCVMESTSTYCYRLADFLHEYGYRVSVVNPLSVKRLAQSGMIRTKTDAMDARLIKKYAKKAQLPIYNPLSPDIIELRDLSSLLDAEIKNRTAIKNKIEAMIQRTQPSKKALKRARQTVKYHDKAIQEIEKDMDAIVKRSCSEAYEKALSVNGIGKRTATLLLAITRGFTMFESPKQLIAYIGTCPRQYESGTSVKGKSHICKMGMKNIRSTLYMCSHSAVRYNNTCKALYQRLLAKGKAKKVALMAVINKLIHQLFACISKNEFFDNNHQISLGI

SEQ ID NO: 465226 - protein, 415 aa, unidentified
MNSATDLEYAAFVGIDWADRKHDVCLQAAGSSQREFSELAHRPESIVQWVRELRARFAGRAVAVCLELSKGPLVYALQQYDFLVLYPVNPTTLSKYREAFCLSHAKDDPTDAELALEVLVTHRDKVSALYPQSAPMRTLQRLVEQRRALVDDTVRITNRLTDALKQYFAQVLEWFKDKNTIVFCDFLKRWPTLKQAQRARKTRLRAFFHEHNLRYPNIIEQRIQAIVSATALTADAGVITANRLLVEVLVEQLRAVLQAVARFEHEIAQLAPTLPDYALFSVLPGAGPVYAARLLAAFGEQRQRYSSAAAVQMYVGIAPVTERSGKKCWVHWRLQCPTFLRPTFVEWSAQSIMHSFWARAFYEQQRAKGSSHQAALRALAFKWIRILYRCWQARTPYDEAAYLSTLKRRGSPLVA

SEQ ID NO: 465227 - protein, 324 aa, unidentified
MNHLSHNRVIGIDVSCDWLDLHCLPDGHRYRVQNALAGHAVVADLAREKDAVVCFASTGGQEWQLWTFLESEGLAARQVPPAQVKAFAQSRGTRAKTDRIDAELIARFFAFRPEAGRRLPAEKLRLLRALTSKRAQLVEMRKRLLAQIRAHQKLGTAEMFEDIDTELTHQMDSLIKELEDRITRTITSDDRMSETADILCSNPGTGPAETGPVASSVLIAEMPEIGTITGEQAAARTGLAPVANDSGTLRGKRAIAGARRALRHVMFQAALVAAHHNASLKTFADRLRKAGKPHKVIITAVARKLVIIANALCKTRQKWTVQTP

SEQ ID NO: 465228 - protein, 340 aa, unidentified
MEKRYWGIDLHRNGFTCCLRLANGRNYMSQWALASLSKFIEKLRPTDEVAVEVTGNTRLFYDRVAPQVARVVVVDTNQFRVISRSVKKTDQRDAALLALYLSKGLLPEVRMKDKQRAQLASLTQTRDTLVKLRTALKNKVNNILSARGINLPKEALSSEKKLAEVLAQPFEEVVRVELRVIVDQIRSLNRSIAELEKTIGEEGSKLEGHQSLMSIKGIGKITGAILLSVIGDVNDFPNEGRLASYFGIVPRVSNSNETERSGRIHKRGTKLGRTALVQSALIAANYSPYLKRFYEQVKARRGAGKAIIALARKFLGIIYRTLKNKWVFEDFPNFVLTEES

SEQ ID NO: 465229 - protein, 408 aa, unidentified
MEIIYPKCCGLDVHKRSVAACVRLLEADGRLDQETRTFGTMTRDLLEMADWLAAAGVTHVAMEATGVYWKPIYNLLEERFTLLLVNARHVKHVPGRKTDVKDCQWLAQLLQAGLLQPSFIPARPQREFRELTRHRSQLVAEKARVANRLQQVLEDANIKLASVATDILGASGRDMLRALISGETDATKMADLARRQLRSKIPQLRPALEGKVTEHHRFLLGQLLAHVEHLEGQIEVLSRRIEELSGPFAPAREAMVSLPGNEQRAAENVLAEIGSDMSVFPSEHHLSSWAGVCPGNNESAGKRKSGKTTKGNRWLRAALVQAAWAASRKKDSYFQAQYRRLAARRGKKRAILAVAHSLLTVIYHMLKNGSTYQELGGDYFDKLNKNRLLPYFVRRIKDLGFQVTLEAA

SEQ ID NO: 465230 - protein, 352 aa, unidentified
MQIVGALDVHRRQITHKTLDLVTGDVRRGRLSPANRESVREWLECFRGYEAEFALEGTTGWRYVAEEIERAGQVAHLADPAETAAKRGSKRRAKTDRSDCDLQLKLLLARELPESWIPPAHILELRTRVRTRKTLVDQRSAWQLRLTAQLFHQGVPAGINPRTRAGREALARVELSPAGRQLVAIALRMIDVLDLEIVPLDRELRAFAARQPGCRALSERLYGVGPVTATAVLAELGDCRRFSSSDDAVRHAGLDVTVYQSDSKRAAGHLSHEGAPVLRWALYEAGQQATRQTSPDHAYFLQVRERTDHKSASLSVARKLCRRAYHILRELGEQALAPVDIDAHAEEAIHAA

SEQ ID NO: 465231 - protein, 428 aa, unidentified
MSPLLEQPFTAWVGIDWADTKHDICVQAAGDTRRESGCIAHQVAAIDEWANALHRRFGGPIAVALELAKGPIVAALQKYEFFVLFPINPATLAKYREAFQPSGAKDDPADAELALDLLVRHPERFSPLRPQSVPMRTLVSLVERRRQLAGDQNRLTNRLCDMLKQYYPQALEWFDDRGTVLFCDFLERWPTLRSVRQARTAVLETFFHAHHCRSASRISARIESIRSAAALTDDPAIIGPCRLHVLALVAQLRAVLAAIVQFDLEIAAVVHTLPDYALFEDLPGAGACLAPRLLAAFGEQRDRFRSADELQKYAGIAPVTERSGKKSWVHWRLQCPKFLRQTFVEWAAQTITRSFWAGAYYRQQRAKGSSHHIAVRALAFKWIRILYRCWQTRTPYNETVYLNALVKRGSPLLGKQGDSVKMGSCSPV

SEQ ID NO: 465232 - protein, 405 aa, unidentified
MFEIEDVGVFLGLDVGKSAHHGHGLTPAGKKVFDKPLPNSEPKLRAVFDKLTAKFGTVLVIVDQPASIGALPLTVARDAGCQVAYLPGLAMRRIADLYPGEAKTDARDAAVIADAARTMPHILRSLELTDEITAELTVLVGFDQDLAAEATRTSNRIRGLLTQFPPSLERALGPRLDHQAVTWLLERHGSPAALRKAGRRRLVELIRPKAPRMAHRLIDDVFDALDEQTVVVPGTGTLDVVIPSLAASLAAVHTQRRAMEAQINSLLEAHPLSEVLTSMPGVGVRTAAVLLVTVGDGTSFPTAAHLASYAGLAPTTKSSGTSIHGEHAPRGGNRQLKRAMFLSAFACMNADPASRAYYDKQRARGKTHTQALLRLARQRISVLFAMLRDGTFYESRTPADVALAA

SEQ ID NO: 465233 - protein, 412 aa, unidentified
MPRWVGRAIGLDVHREFCEVAICEDGRTRSAGRVSATPEGIAVLARSLLPSDRVALEVTGSCWEVARILEPRVNRVVVVSPDDTGITSARAKTDKLDARALASLLWKGELEAVWMPDERCRVLRRRLARRQQLVWSRSRAKNEIHAALQRRLQPKPPCSDLFGVKGRAWLAGLELPLEERESVDAGMRHIEFLDAEIAAVEKLIAKQALSWPEIRRLMTVPGVNLICAASFIAAVGNPNRFLTSRKLVAYLGLDPRVKQSGEGPARSGRISKRGSPSARWALVEAAWTAVLQPGPLHAFYVRTRNRRGHGKAIVATARKLAVLFWCMLTRGEDYAHQQPSLTRKKLRRLEITAGAPKYTRRAAGIWSTNDLMREAELELARQAETSYLRLVQDQLAGAPAKKAGASVTLERA

SEQ ID NO: 465234 - protein, 369 aa, unidentified
MSKIVKYVGLDVHTDSITIAIADEGRDGNVRVYGKIHNDLGQIDKVMRKLISKNGELHCVYEAGPCGYPIFRHLTNQEIDCVVVAPALIPKKTGDRIKNDRRDASSLATLHRSGDLTPVYVPDETDEALRDLVRTRKDIQIALRKVKQQINAFILRQGIGYPGKSKWSKAHLNWLTSLKMPHPAQQIALTEYLDAMENHGDRIKRLDKAIVASCQTWRLFPVVEALQALRGISLLSAVTVIAELGDLTRFDHPAQLMAYLGLVPSEHSSGPTIKRGPITKTGNTHARRTLIESAQAYRLPARKSTAIRKRQEGLPEQILDIAWNAQLRLCHRYRRLIAKGKNHNVVVTAIARELAGFIWAIACAVPIAV

SEQ ID NO: 465235 - protein, 449 aa, unidentified
MVAVMEPQEIEDEEHEQILERVAAVDVAKASGMVCTRVPHPSRAGKRRTRVWAVDAVTGAVLELADHLVAERVEKVTLESASGYWRIWFYLLEAAGLDVQLVRAADVKQAPGRPKTDKLDAVWLAKLTERGMLRPSFVPPAEIRQLRDYTRLRTDLTRERTRHYSRLEKLLEDALIKVSAVASRLDTLSVRDMVEALIAGERDPRVLAGLARGRMKAKHAALVAALTGKFDDHHAELARMLLDQIDAQTGKLTARIEERIAAIPAAQGIDADGATGPAAGHGQGAPVLPAVDRLDEVTGIGRDAAQTIIAEIGLRMSVFPTPGHLVSWAKISPQAIQSGARTRAGHTGKGNPYLKGVLGEAAAAAGKTDTFLGERYRRLVKRRGKLTALVAIARSILVIVWHLLADRATRYHDLGPGYHATRIDKNRKMRNHIRQLEALGYTVTLTQAA

SEQ ID NO: 465236 - protein, 356 aa, unidentified
MQTQVTKKIDFSGKELFIGLDVHKKSWSVTILVEGMEHRTFTQPPDPRGLFNYLQKMFPGGTYYSAYEAGFCGYSIHRELNALGIKNIVINAADIPSSQKDNLEKRDPIDSRKIARALGKGLLRAIHIFDRDMEELRSLNRTRFYLMRDFRRSKNRIKSFLQYYGEPIPAEFDNNQWTLKFIAWLKQIRMKTLSGQEAFSNLIRSYEFHREQILTLSRQIRIRIREYDSELYSLLKTISGIGPLTSSALITELGDINRFAHIDHLSSFVGLIPRVKQSGDSSYSGGITFRCNEYLRTLLIEASWQAIRQDPALMQYYHEHIINNKGQKVIIKVARKLLNRIRYVMKTRQPYVTGVA

SEQ ID NO: 465237 - protein, 404 aa, unidentified
MPAIWAGVDAGKREHHCVVIDETGATLLSRRLPNDEEPLLELISEIDELAAGGEVTWATDLNAGGSALLLALLHAHGLQVLYIPGRIVHHAAATYRGDGKTDAKDARIIADQARMRTDLQPVMSAEQISIDLRLLTSRRTDLIYDRVRAINRLRATMLEYFPALERAFDYSKSKGALMLLSGYQTAPQLRRIGQPRLAAWLKKRGVRGAAAVAAKALAAAQAQHTTMPTETTASALVAIMAEEITVIDAKLSELDQQILETSRWHEYAELLESMPGFGPILAATFIANIGGSLDAFQSPDRLASVAGLAPAPRDSGRISGNLHRPRRFNRRLLRTCYLAALSSLKNSPASRTFYDRKRAEGKSHKQALLALARRRINVIWAMLRDLTSYREPLAAPPLQAALTA

SEQ ID NO: 465238 - protein, 366 aa, unidentified
MKKISTVQVFGNEIFKEQQLTIGVDLGDRWSFYCIVDEAGKIILEQKLPTTPEAMKQTFGKIPRSLVALETGTHSPWVSRLLTELGHQVIVAHAQKVELITKSNRKDDRHDARTLARLARIDPELLGPVRHRSAKAQIHLTVIRARAELVSARTALVNAARGLVKSFGQRLPKCGTYQVNEKLAEGLSAELRDVLVPLLREVESLSERIQEYDERMEKIAKEVYPEVSLLQQVKGVGTQIALTYVLTIEDPYRFPKSRAVGCFLGLRPGRRNSGESEPQKKISKEGDRYLRTMMVQGAHYILGPFGEDSDLRRWGRKLAERGGKNAKKRAVVAVARKLAVLLHRLWVSGEVYEPLRNSQKAMRAVA

SEQ ID NO: 465239 - protein, 343 aa, unidentified
MDEISMIGLDIAKNVFHIHGVNASGAPVLRRQLRRGQVEGFFAKLPPTLVGLEACGSAHHWARLISRCGHQVRLMPPGYVTPYVKRNKNDGRDAEGICEAVGRPNMRFVAVKSVEQQATLAVHTTRRLLVQQRTAAGNALRGMLSELGIVAAQGVKGLRTLMQQLEQPSEVIPEIMRHALLLLAKQWNDLDAAERLLEQQITRAAKADSEARRLMAVPTVGPMIASTVLAKMPDPRMFRSGRDFAAWIGLTGRDHGTGGKHRIGRISKQGDRMLRTLLINGASAYLLHQKRRGVTDPWLRELLARRPYKVVMVALANKTARILWALLTKGGEYRARASVPAAA

SEQ ID NO: 465240 - protein, 389 aa, unidentified
MKMAIVMGIDQHRAQITAEWIELETGEIGRARVRPADRAGVRRFLARFAGQALEVATEATTGWRFLVEELRAAGARVHLAEPAETAALRGNKKRAKSDRADARHLRELLLAGRLPESWIPPDHILDLRARVRLRHTLIKAHSEFQQRIQAVLYHHGCPRRQQLMVSDGRDWLTGQPLPDTAREQITVSLAMIDALEVQIAPLDRELRAYARAQTGCKALIDAYYGIGELCAVTIVSELGDCRRFSNSRDAVRYGGMDVTVYQSDRHRAPGHLSRQGPPALRWALYEAAQVARHPRSPDRAYYEQAAEHLGGNRACLALARKLLKRCYHTLRELGDDALAPPAVQQHTRPRVDGTATRRPATLPASKRPAKRASACGCRSRRPSTAPTGN

SEQ ID NO: 465241 - protein, 340 aa, unidentified
MKKFFVGIDFSKLKFDAAIYNGEKNDNANYQVFDNDTNGFKDFVKWVESQTEMELTDWLICGEHTGLYSYALSLFLSENGIDIWLESGLQIKNSQGIQRGKTDKIDAFRIAEYAYRHNDKAKVFKPLSKSLDGLKDLLAYRERLVEAKKVFVISSKELKRVKRERTITDFIITESSLEIQSIELKIKNCEKKIEEIIHSEIDLCTNYKLLTSIKGIGLVNAVMVLAITANFTLFTDPRKFGCHCGVVPFKHDSGTSVKGRTKISPLANRKIKTLLTQAARTCVMHDLEMKTYYQRKRAEGKSDKIVINNVRNKLIHRMFAVVMTGNMYNPNYLNPLKQVA

SEQ ID NO: 465242 - protein, 343 aa, unidentified
MEHFAGLDVSVKETSVCIVDDTGRIVREVKVASAPEALLPVLTNSLYRFKRIGLEAGPLSQWLFSALAEAGLPVICVETRHMRAVLQAQINKTDRNDARGMAQMMRAGLYRPVHVKTLRSQKLRMLLTHRKLLQAKAIAIDNDLRGTLRNFGLKVGVVGASKFEARIRELVENLPDLAELVEPLLIVRRTLREQIGILHGRLLAIVRTDDVCRRLMTVPGVGPVVALTYRATIDVPTRFRNSKAVGAVLGLTPSKYQSGEIDRTGGISRCGDEMMRAMLYEAAHIMLMRSTKWSWLKAWAMKIAKGRGIKKAIVALARRLAVILHRIWVDGTEFRWTRETAAA

SEQ ID NO: 465243 - protein, 495 aa, unidentified
MSEFFMGCDVSKGYADFVIIGCGEEVIEPTFQVDDTAEGHAVVVEFLSTFFKKHTHGKLYVGVESTGGYENNWIGLFSRMAEIWDIKATRLNPLPVKAHHEAAMRRIGTDDISALNIASYLIAYRSKVNYEQDNSFSSLRKQWNFTELLKKQKTQLSNQLGFLIYQSHPELARYCKDGIPRWILLLLKRYPTAARLARAKASSVAKIPFISPSRAASLIEEAMDSVAASTDETDGFVIKETVQQIMTKNIAIEAQKERMEASCAIPETKLLTTIPGVGIYSAIGLIINIVSVARFANVKKLASYFGLHPVYRQSGDEVWGFHMSKKGRVEPRAILYMTVLSALNCNPLIRELYDRCVAGGMNRMEAIGVCMHKMLRIVYGMLRNGAEFEPAVDEKNRKRRLLPGSPNRHHEKKRRMQPHDKRAPISKRQSKRRKEIKQEAEPQKDTVPKNGVIPNLLNGKNNKSSKIPSTSVTMPTVIGKVIEKEMEKLGISIYT

SEQ ID NO: 465244 - protein, 285 aa, unidentified
MQRTSCKLHWVEAETGEIGRKKLARARLAEYFAQLQPVRVVMEACGSAHHWARVLCRLGHEVELLPAAQVRPFVRSNKDDAADARAIWLAAQQSDIRRVPQKSAEQQAVLALHRTRSHWISVRTATVNALRGLLYEFGVVLRGGRKAGLKALAEQRALIDEQIPPTMRSLVDGQLQTLGQIGERIDALEHEIAALNKQLPGARELDAVLGIGLLGSSALAATLGDGRAWRSGRKFSASLGLVPAHAGTGGKVRIGHLSKRGDPYLRTLLIHGARSVIEHAKSKPK

SEQ ID NO: 465245 - protein, 348 aa, unidentified
MTHFVGLDVSVKETSVCVVDAAGTVILEQKVTTEPADIITLLTSLGVSFCRIGIEAGPLSQWLVNALTAADLPVICVETRHMKALLTAQQINKTDRNDARGIAQMMRVGLFKPVHVKTLVAQEQRMLLTSRKLLQRKLLDLESDLRGTLRNFGLKIGAVSGSRYEARVRELVAGFPRLAAIAEPLLNVRRVMRQQFAVLHKMLLDTVRGDPVCRRLMTAPGVGAVVALTYRATVDQPQRFAHSRAVGAHVGLTPKRYQSGETDYDGGVSKCGDALLRTMLYEAAQVLLTHGSKWSWLKAWGMRVAQRRGMRRAIVAVARRLAVVLHRMWVDGSEFRWSKDSAAVPAVA

SEQ ID NO: 465246 - protein, 294 aa, unidentified
MANDVAGIQTLVQRVRAQAPTLIVLEATGGYERAAVAALAAAQLPLVVANPRQVRDFARATGQLAKIDRIDAGILALFAERVRPGPRALPDDAAQALDALLTRRRQVLEMLIAERNRLEHAAPTVRRGITQHIRWLERQLRDVDRDLDNTIQSSPVWRAKEDLLRSTPGVGPILSRTLIGELPELGTLPRKQIAALVGVAPLARDSGTLKHKRLVWGGRAPVRAALFMAALVGTRHNPVLRTFYRRLLAAGKPKKVALTACMRKLLTILNAMMRTNTACATSIHHHPLDTGDSC

SEQ ID NO: 465247 - protein, 391 aa, unidentified
MVCVGIDVAKDKHDCCILDSDGTIRADCITIPNNMDGFKQLLQTIRDCTKKSDKIKVGLEATGHYSYNILGFLLDNDLAVYVMNPLHTNLYRKSLSLRKTKTDRVDARTIATMLLSDADLKSYTDTAYHNEELKSLTRYRFDKVRERAKLKQSVSRLVTILFPELEKLVPSLHIASVYALLSEYPGAKQISEIHLTKLTNLLATASKGRYGKDKAIQIRDAARTSIGSVMPAKFLELKHTIKLIRELTSEIDEIEVSIQKIMDELNPPILSIPGVGIQSAAMILAEIGDFSNFESPDKILAYAGCSPSTYQSGKLTNCYAHMEKRGSRYLRYALYNATKYVCHWNPVFAEYLAKKRAEGKHYNVALSHATKKLVRLIYALQKSGKAYLVAA

SEQ ID NO: 465248 - protein, 343 aa, unidentified
MDQHIGLDVSLKDTSISVRQDGKRIWRGKCPSDPKLLAEVIRKRAPNAKRVVFETGPLSVWFYHALIAEGLPAICIDARHAKAALDMAANKTDANDADGLAHLAEVGFYREVRVKGFDSMLMRTLVTARRQLMKMRVQMSNQIRGLMKTFGLVVPKGAGSVFERNVLTLLEGEDNLARIILPMLQAWGDIRLRVAELSKQLVAMASADQRCRLLTSVPGVGTVTATAFAAAVEDPVNFANSRAVGAWIGLTPKRYQSGEVDYEGHISRRGDAKLRTLLYEAASVILNRSSETSTLRTWALALKERLGFKRAAVALARKLAVIMHTMLKTGELFDPNAGAAVPA

SEQ ID NO: 465249 - protein, 438 aa, unidentified
MRRKKNKATKKVHFESLPLIHPNAAGIDVGSKEHLVAVPPDRDPQPVRTFQAFTPDLHELAAWLKRCGIQTVALESTGIYWISLYEVLEQYGFEVRVVNARHVKNVPGRSKSDVLDCQWIRKLHSFGLLNGSFRPDQQIRKLRTYMRLEDNLVVESTQAVHHMQKALFEMNVQLSNVISDITGESGLRIIEAILAGERDPEQLADLCSTRIKASRQTVAKSLHGNWDEALLFCLKTALETYRFSQKKIQDCDQCIERQLATFEIKAPLPDSKQNLQTQLHQVCGVDLTKIPGIKEQTAKIIISELGLDMTRWNTEKQFSSFLGLCPNNLITGGKIIRRSTRKVYNRAADALRLCAQSLTHCKSALGAKYRRLRTRLGAPKAIVAMAHHLARLVYRMLRYGQDYVEKGIQQYELKFRLQRIKWLKKEAHSLNLELVAAQ

SEQ ID NO: 465250 - protein, 366 aa, unidentified
MKPLLVRPRASVSSIRACPWACEVNSNSYWSDQAGLLPRGQDRPGQLASKKQELFINLKEELVYLGVDVAKAYLDAAIGNEKRRFANECIGHRELIKWVKQLKTPVQVICESSGGYERALVQALVGAQLKVSLVQANRVRQFARAAGILAKTDRIDAKVLCAFGEVMQPGAISGSQLEQEHLRELESQRRHLTHLLVMEQNRAARVSDACVQKLNRSLINQIKKQIEQLDLLIKGHIDQSHELSAKAAKLTSISGVGARTAALLLAQLPELGELNRREIAALVGVAPFNRDSGRMRGKRAIYGGRKPVRHGLYMAALVAAHHNPILRNFYLRLRAAGKPAKLALTATMRKLLIVLNSALKTDLRYA

SEQ ID NO: 465251 - protein, 348 aa, unidentified
MNATANVIGLDIAKNVFVAVGQDAHGKVVWKRTLSRHEVLPTFANMTATAIGIEACAGSHYWARQLGTLGHEVRLIAAQHTRAYVTGNKNDTNDAAAIAEARSRASTKYVPVNTEAQQDLQMLHRARQALMQERVALLNRMRGCAMEYGAVFPEGVARFLKGYAGWLNDASNGLSGLALLSLRDFKAQLDEKEARLALYDARLTQAAREDERAVRLMEVPGIGKVTATAILAALADARHFGSGRDFAANLGLVPHEHSSGGKQRLYGITKRGDTYLRTLLIHGARSALLRAADKPDKLLRWAQKLAERRGVKVALVALANKMARIVWALLAHARSYVPVWSKGATRPA

SEQ ID NO: 465252 - protein, 313 aa, unidentified
MEKEKVYVGIDVAKANMDVAVHPSGKRWSFTNDDRGISEAVSSLRELSPTLIVMEATGGIEAPLVAALGVAGLPVVVVNPRQIRDFAKATGKLAKTDVLDAQVMAHFAATVQPKPRILPDAQSKEFAAILARRRQVIEMLTAERNRLSSAREVVRERIEAHIAWLEQELDSIDSDLRSSVRKSPVWQEKDNLLQSVPGVGPVLSATLLADLPELGTLNRRQIAALVGVAPLNRDSGTLRGKRTVWGGRAKIRPALYMSTLVAVRCNAVIKAFYQRLCNAGKEKKVALTACMRKLLTILNAMLKHRAPWNYAVA

SEQ ID NO: 465253 - protein, 402 aa, unidentified
MNAVGIDVSKGKSMVAIMRPFGEIVSAPFEIKHTASDINSLVKLINSVEGESRIVMEHTGRYYEVLAHQLSEANLFVSAINPKLIKDFDNDSLRKIKSDKADAVKIARYALDKWQNLKQYSVMDELRNQLKTMNRQFGFYMKHKTAMKNNLIGILDQTYPGVNTYFDSPARSDGSQKWVDFASTYWHVDCVRKMSLNAFIDHYQNWCKRKKYNFSQSKAEEIYGKAKELVPVLPKDAITKLIIKQAVDQLNSASTTVESLRTLMNETASKLPEYPVVMAMKGVGTSLGPQLMAEIGDVSRFTHKSAITAFAGVDPGVNESGSYEQKSVPTSKRGSSDLRKTLFQVMDVLIKTHPQDDPVYQFLDKKRAQGKPYYVYMTAGANKFLRIYYGRVKEYLSSLPES

SEQ ID NO: 465254 - protein, 354 aa, unidentified
MKRSTKHVALDVHQATTLASVREDSGRVIARSILPTEAPALVEFFRGMRGTIHVAFEEGTQAQWLHELLTPLVDRVVVCDRRGEARQGNKGDQVDADELSEQLRRGGLRPVYHGDAHRATLKELTRSYLNLVEDATRVMLRLKALFRARGLKAPGKRVYHPTGRAQWLAQLADRGARMRAAALYAELDILRTLRPPAKAAMVVEARRDPAWAVLQSIPFLGPVRGAQLLATMQTPWRFRTKRNLWAYAGLAVVTRSSADYVLVAGQPVRRRRAPLTRGLNRNHNRMLKDVFKGAATAATARPGPLQDFYHGLLARGMREELARVTLTRKLAAVTLRLWKTGERYDPTKLTIQAR

SEQ ID NO: 465255 - protein, 308 aa, unidentified
MTTIYTGLDIAKLNLQLHRAGRVHDLPNTAAGHRRLLKLLAAQPGAHVVCEATGGYERDVVAALQETKVPVSVLNPARVRHFARATGQRAKTDDIDAAVLTAYGQALQPKPTAPRTEQEQQLAELVRRRVQVLEVLVAQRQQAERLTVPALRRQAQSLVRRLERDLEQIEDQLQELRTRATSLDERVQKLEAITGVGTITALGVLAELPELGALNRRQAAALAGLAPHPRESGQWHGRRSIGGGRAPVRRALYMAALVAARSNRQLKEFYQRLRAAGKPAKVALTAVMRKLIVLMNHILKNPNFALQN

SEQ ID NO: 465256 - protein, 351 aa, unidentified
MLIIGLDYHPSIQQIASLDLETGDTGERQLNHKEGEVEQFYRGLKRQRISVRVGMEATGNTSWFERLMMELDFELWIGDPVQIRRQRVRKQKTDSRDAQLLLKLMVEDRFPRVWVPSPENRDLRQLLWHRHRLVQMRTRIMNQLQAVALNEGVRRKKALWSKEGRAQLESFLLLPWATRRRQELLELLDRLKPIIADLNIAVQEEAERRPEVRRLMTHPGVGPTTALAFVLILGTPKRFQCGKQIGSYVGLIPSEASSGGCRRLGHITKQGNTLLRFLLVEAAQATVRCEPEWRRRFTHLALRRDRRIAKVAMARKLAVRMYWMWRKGWDYPQFLKFGSHVGQLEMGNGVK

SEQ ID NO: 465257 - protein, 430 aa, unidentified
MTKLCSTPASAVLVAIDMSKNRQEVLIERPEGGRRRRMTVMATKEDYDGFVEQLAAIGRPIVVGFEATGNYHRTLAHRLLTAGFELRLISSVALARTREALHNGWDKNDSKDAQVILHMLRIGATQRYVDPLAAGINDLQELSKTHEVVSKMKTQTWHRILTHYLPLYFPEIARFAGNSRSDWFLALIERFPTPASITALGREAFSAEAWPLIGRKVSKARLINDVYETACSSVALPVPEDSAAITMFRMVIAQGRSLIHQRDEIERLAHARLAEHVDYQLLRNIPGIGPINALTILAEAGDLRRFNHHRQFLKFCGLDLATCQSGTFRGRTKLSKYGNARLRRTFWMAAQVAARQRDNSFRDKLGRYTAGHADDADRRRKAMTALTAKMARVAHAVIKTGTEYRPFLERSDARWKDPSLMCREGARATL

SEQ ID NO: 465258 - protein, 349 aa, unidentified
MTIVEDRPVITGGVDTHADLHVAAALDPLGGLLGVQEFPATATGYAQLLDWLGGFGTIAVVGVEGTGSYGAALTRHLAAAGIGVVEVDRADRQDRHRQGKSDPLDAVSAARAAQSGRACGAPKGRDGAVEAIRALMVAKRSARHERTQAINQARALIVTGPDELRARFAGHSPAALVEAIAARRPRPGNVPGYATRVALRELGRRAQFLDTQLDRLDELIGPLVAARAPGLLSLYGVGPDTAALLLIAAGDHPGRLRSESSWAHLCGVAPIPASSGKVSRHRLNRGGDRQANHALWRIVITRLSSRPGHPATRAYVTRRTKEGLSKKEIIRCLKRYVAREVYHQLRAGA

SEQ ID NO: 465259 - protein, 439 aa, unidentified
MSNESLPEPQWAAFVAIDWADREHVWKMQAESGPCESGKVEQTPEAIEIWASQLATRFNGRPIAVALEQSRGPLVFSLTKYSHLHLFPVHPSMLAHFREAMVPSGAKNDPGDTGLLLELLVQHRSRLRRLRPDTEQTRELQFLVENRRGLVDDKTYFSNRLIAQLKLYYPQVLRWFYRPASPVACDFLLRWPSLEAVQKATSRALTTFFSKHNCQDVERRIEEIRKAVCATHDQAVIRSAMFMVKATVRQIQIIHQDIAQCEERIEQLTKSHPDFAIFDSLPGAGNALIPRLIAALGTQRDRFSSAAEIQSYSGVAPVVKQSGNTRMTHCRQAYPRFLRQTFHEWALHSILKSTWARAYYERQLARGKKHHTAIRALAYKWIRILYRCWKDGLPYVETRYADAQKTRSREYAPADAAGAVVELQCKKVAGFFKVVGAKY

SEQ ID NO: 465260 - protein, 360 aa, unidentified
MDTNKPVVGIDLSKRTLEAVRVTGERIERFSGKTDDQGLRALEKWLKKGETVVMEAGSQAFRIARRLAKNIGCDMIVLNPGDVAVIYDSLKKTDKEDALKLARLAQRHPREELPTVEIPTEKQEAIRRLSTEQAHWSEMISMSKNRLHSVFVEAGIVHLTRSHLSRRENRQEAFESLPEVYQAEASRLMRDIDHMEGLVEELEEQIRDALKENLDYTSLVMSMPGVGPILALALLGYLGDGKRFSSAKQVGFFVGLVPKVQISGTMVHYGHIVHTGCKPIRRVIIQAAWALTRSNEGGDLRAFYQRLYPIKGKKKAIVAVARKMTEILYLMVRNGEFYRHSNPVNLKKKLKYYGLHSAAA

SEQ ID NO: 465261 - protein, 366 aa, unidentified
MKNYTNKTVYLGMDVHKKTYAVTAICEGQVVKKDTLKADPVVLIAYCKKYFVGARIESAYEAGFCGFHLHRCLEAEGIKNIVVDAAGMEVAVGDRVKTDKRDSLKLATQLAGGRLKGIHIPSVKRENYRAVTRLRETFALQRSRFACQLKSLLFQHGLIRADDKKKVSEKWAKVLEAMPLSEGLKYAIGGYLAMWRQMEAKIKEIDKELVAQAQQDGAVEMIYRSAPGIGAISARILANEVEDTLQFSNEKRLFSYTGLTPSEHSSGEHVRQGHITRHGKPILRKILVQAAWRAIRLDITLEEIFRRLSTKVGKKKAIIGIARRMIGRIRACFRTGELYRTTTDQNSKTGTERSASHELELANVAP

SEQ ID NO: 465262 - protein, 382 aa, unidentified
MSQTASRWNSTSWGSGLFMALELGWSKWRLAFGSAMDQKAWQMTIAARDVMALTRAIGKARQRLGLPSDCPVFSCYEAGRDGFWIHRLLLKMQIHNIVVDSSSIEVARRARRAKTDRIDAAKLLSMLQRHHAGEKKLWSIVHVPTPEQEDGRHLQRQIRTLKKEQTRQLNRIRGLLANQGVAVRANRGGLLEPLDSIRIWDGSPLPVGLRRRLEVEIARHAFIHRQLLDLELERDARIRQSQDRAAQIARHLMRLRGIAQVGAETYSREFSWRGFTNRRQVGSLIGLTPTPHQSGDSSREQGISHAGNRHMRGIAIDLAWLWLRQQPHSELTLWFNRRFAHASPRLRKIGIVALARKLTIALWRYADFAEIPKGALLKSKAI

SEQ ID NO: 465263 - protein, 427 aa, unidentified
MYRIAGIDVHKKKLAVVVTDVEMHGEYQFERCWFAANPEQLRLLSQWLAEHQVEEVVMESTALYWKPVWGALERYWQPICQKREGAGPTSGILHLAQAQSNRGPRGRKKDFRDAERLVKRLVADELKLSFVPDTEQRLWRTLTRRRYQLTRARVQLQNQLEALLEEAHLKLSSIVSDLLGVSARRMLQAIAHGETNPEALAGLGDRRLRATPAQLCDALGACTELHPVYRRLIKMMLEELKVIEEHTAELNQELATLLRPHQDAVERLAEVPGLGVDSAQQILAEVGAKAATFASDKNLCSWVGVCPGDEESAGESSSHRSPQGNRQMRRLLNQAANAAVKSKGSIFEIAYRRLVPRLGHNQTIGAVAHRLCRLIWLILHKGVRYEERGPAVSQRSRQNRTGKMIRELRMLGYRVEFLNAVPSVPIP

SEQ ID NO: 465264 - protein, 340 aa, unidentified
MRGLYAGSDLHGNNNLLGIIDEQGERIFKKRLPNDSDLIKDVLKPYKEEMVGIGVESTYNWYWLVDALMEEGYRVHWANPSAIQKYSGLKHEDDKHDAFWLAEMLRLGILPEGYIYPKEERPVRDLLRKRGHLVRVRTSLMLSLQNILSRTLGRKVSVNDLKRLGEDRVTPLLERSEDLALAGRVSKETIDFLTYQIHTIERVVQKRIALKEEYRYLLTLYGVGKILSLTIMLETGPIGRFETVGDYVSYCRKVPSQWTSNGKRKGAGNAKNGNRYLAWAYGEASEFSRRDYPEPRAYYQRKMQKTNAAVAHSALAHKLARAAYYVMRDQVPFQPEKLFG

SEQ ID NO: 465265 - protein, 347 aa, unidentified
MKFYTTFHKYYCGIDLHARILYVCILDERGNKVVHQKIKADKAELLKLISPYLEDIVIGVECMHCWYWVSDLCAEQDIDFVLGHALYMKAIHGGKAKNDKIDSYKIASLLRGGNFPLAYNYPANMRSTRDLLRRRTRLVQHGAQLKAHIVNTNSQYNYPPLELHMKNKCVRQEFQTRFDDQAVQRNVNFDLAILDAYAEELKKLEYYLESKAKKHQPNYYAQLRTIPGIGLILAMTILYEIGDINRFESVQKFASYCRLVKCKAESAGKTYGTSGNKIGNGHLKWAFSEAAVLYLRGNDKARRYLNKLQKRMSKAKALSVLAHKLGRCVYFMLKNKTVFDDERFLKS

SEQ ID NO: 465266 - protein, 416 aa, unidentified
MKIVRPICCGMDVHKNIIVATIGITNKKTRITEYIQETFSTLNPDLLNLKQWLINHKCFDACMESTGKYWIPIFNILEDEINIYLTHPKYVKAIKGKKTDKKDSKWICDLFKHDLIKFSFIPPKEIRALREISRYRYKLVGMRSSERNRYQNCMTVSNIGIGSVFSDPFGKSAQAIMKEVLESDIIEDEKILKCIHGSCKNKDKILDSIKHCNIETDQRFKMNESMTHMEELQVHINNCEIEIMKRAAPMFDRFMHITQLPGISTLSAILIISEIGVDMKQFESDKQLACWAGLAPANNESANKKKSVRISKAGQYLKPLLVQCALGAIKDREGYFGIKYSRIKKRRGHKKAIIAIARMMLVSIYHMILTGETFNPSDYESFKNPKPPIKQQVLTEESAIEFLKKSGFDVSKLTKP

SEQ ID NO: 465267 - protein, 387 aa, unidentified
MYFVGIDISKFKHDCAIVDELGDVITPSWSFQNDREGFSLLKELLDALDGEKKIGLEATGHYGQNLKMFLENNDFSFMEFNPLLINRFVRSKSLRKTKTDSIDALMIVQYLMTVEYKPYPPSFYTLEKLKSLTRFRDSLIRQRSKQLVELTNILDKVFPEFKPFFKGRFSATALYILSHYASPEKISNMNSKSYEPLRRLSRGRFSMVDFVELKTLARNTVGSTRDYLLQEMEITIDIYNQLQSKVEEIELQIHDCVLGLAPPMLTIPGIGVASAAVILSEFGDLSKFNSPSKLLSFAGMEPGYFQSGTSESTGKMVKHGSSHLRYAMMNCAQTVINNEPTFAAYYAKKRTEGKEHRVALTYVAKKLLRVIYTLQTKELSYNPDLVR

SEQ ID NO: 465268 - protein, 314 aa, unidentified
MGQENVVVGIDVSKLKLDVAVLPGGQQWTVDNSQAGCDELAARLKKLRARLVVLEATGGREALVVGILAAQGIPVSVANPRRTRDFARAAGRLAKTDAIDALVLAEFGRSISTRPTLLQGAEAQELRALVTRRRQLLSMLGEERNRLDRASGHLEQRLKAHIAWLEEELDETNEDLDKAVKSSPLWRAKDDLMQSVPGVGPVLSTSLIAYLPELGQMDRKEAGGLSGLAPMNWDSGLFRGRRHISGGRAPVRNVLYMATLSATRFNPVIKSFFERLRGAGKDFKVAMVACMRKLLTILNAIVRDQTPWRQPQTA

SEQ ID NO: 465269 - protein, 411 aa, unidentified
METVVERPAALDVHKEQVTACARTPGMRGGRREQHLAEFKTTVRGLLALRDWLKAHGVTHVAMEASGVYWKPPWAILEDEFECLLVNARHVKQVPGRKTDVSDAAWLCQLLEAGLLKASFVPPKPIRTLRNLTRYRKAQIGERQREANRLHKILEDTGIKLDCVASDILGASGRAMLDALCRGTTDPAVLAELAKGKLRQKLPALREALEGRFDAEHGIVVSAILAHIDFLDEQIDGLSDAIEEQIRPFAQAVELLCTIPGVQQRTAEVIIAEIGDDMSVFPTAGHLASWSGLCPGNDQSAGKRRSGRTRKGSRWLGIALTEAAQANTRSRDSYLSAQYRRLKPRRGHRKAIGAVRHSIIVACWHMLSTGEIYRDAGGDYFTRLDPGKQTRRLVAQLERLGYAVTLQEAAA

SEQ ID NO: 465270 - protein, 351 aa, unidentified
MRHLAQAQHVATYGVDIGKNLFHVAGLDKTGRPQLRTKFRRDTLLQFFGNVPVAVIAMEACPGSQWLARKLQTYGHTVRIVPAQFVKPYVKSNKNDSVDAEAIAEAATRPTMRFVTVKRVDQVDVQALHRARDMMVYQRTALISQMRGLLLEYGIALRGGAGAFKLDLPGVIEDAENELTPSMRQLLAMQRQHLEELESHIHHLSEEVAAQADRDDVARRLMTIPGFGALAATALLAAVGDARQFRRGRDMSAWLGLVPAQYSTGGKPTLLGMSKRGNSYVRRLLIHGARSCVIHMDRTRNRLGAWLDQLSRRAHFNKVTVALANKMARMAWVVITHRGALYQRNDPRFAL

SEQ ID NO: 465271 - protein, 334 aa, unidentified
MTTNISMLAIDLAKGSFQVCAIGPEGAVLYNRSMSRTRLASLLAEQPACIVAMEACATSHHWGRVAQLHGHEARLVPAAYVKPFVKRQKNDRADAEAIAEAALRPTMRFVAVKSAETQARAVAFRTHQCLVRQRTQLINGLRGHLAEFGLVAPKGPASLNALDDEATDLPSPVREMGAIYLDQIARLTAVIEQLADELQAASKADAQLRRLCTIPGIGPVTAGAVSAFAPDLDTFDSGRNFAAWLGLVPRQRSTGGKMRLGSVSKMGQTDIRRLLIVGAMSVIRWVVRKGGSANRWLAALVARKPRMVAAVALANKMARIIWAMTTKKEDYRMP

SEQ ID NO: 465272 - protein, 355 aa, unidentified
MNSNKYVGMDVHTATISVAVRDVAGKLIMESVIETKASTILQFVQGLRGNLYVTFEEGTWAAWLYDLLKPYVTNVVVCNPRRNALLKEGSRNDRIDARKLAELLRTNLLSPVYHGEKGLRTLKELARVYLTISKDLTRVMNRVKAIYRSWGIPCSGKSVYSPRHRKEWLSKITQTSVRRRAEFYYEQLDALVLLRKQARQELLAEGKKHQAWKLLRSIPALGPIRAAVLMAIVQTPHRFRTKRVLWKYSGFGVVTHTSADHRYVKGQLERSKKPVSVRGLDRDHNHHLKDLFKGAATQASTRKGPFLEFYEALVAKGMRPEMARLTLARKIAAITLTVWKKGVAFDAKYLKPQTD

SEQ ID NO: 465273 - protein, 341 aa, unidentified
MSDYSYFCGIDLAKNHFSLHAVDQNGKVILHKSVTRSKLLTTITNMPLMRIGVEACGGAHYWARTLNKLGHDARIMAVKYVIPYRTKGKNDLNDAVAICEAVQRPSTRFVPVKSPEQQAILSVHRMREHWVRERTALMNRMRALLSEFGLIIPVGRSSLMKLVPLMLEDAENELPHLARTVIADAYHHLGELNQRIADTEQVFDSFAKVSTNVQRVMRVRGIGPQTATAILASIGNGSQFDKSRDFSAWLGLVPKQYSTGGKPRLGQITKHGDKYLRTLLVHGARTVIANLGDKQDKLSQWCRGVLERRGMNRAIVALAAKNARIIWSLLHNQTEYENYAA

SEQ ID NO: 465274 - protein, 347 aa, unidentified
MGEVSTIGLDIAKSVFQVHGVDVAGSVVIRKRVSRAKVLEYFGGLPRCVVGIEACPSAHHWGRELQALGHLVRLIPPNYVKAYLKRSKNDANDAAAICEAVTRPSMRFVPIKTKEQQTVLMLHRTRQLLVRQRTMLSNALRGHLAELGIVSAKGRNGTAELLRIIADGRVSPAVCGILEVLARQYGAIGTEIASIDKNIMVLHRACEASRRLAEIPGIGPISATALVAEIGDWKAFGSGRSLAAWIGLVPKQYTTGGKERLGRITKQGNRYLRWLLVVGAMAVIRYSRKHGTEKRPWLGRLMERRPTKVAAVALANKIARMAWAIMVRDERYQEPKTVARGASQASN

SEQ ID NO: 465275 - protein, 444 aa, unidentified
MACSGMILIREVADAPVIMGISKPAGLKSPSGEVKTMNPLFVGIDVSSRNNVVYLMKPDGSKHSSFSVQNNLCGAKLLSEKIVSALHSMQLIDVVIGLEATSIYGDSLVYALREDGSLGRFRRKIHVLNPKQVKKFKEAYPDLPKNDFVDAFVIADHLRFGRIAKEVYMDDYRYQALRTLTRARFDVIQNLTREKQRFANYLFLKCSGMAQDKDIQNTSATTIALMEHFETVDDLANADLDELTAFIAETGRGRFANPNAVAKVIQTAARGSYRLPKTVNDTVNQAISVSIASMRALKEQVKVLDKAIEQQFEIIPNTLISIPGIGKVYSAGIIAEIGDIHRFDSQASVAKFAGLVWLKNQSGEFEAEHSQMIKSGNRYLRYYLLEAANSVRRCDSEFRRYYDLKFKEVNKYQHKRALALTARKLIRLVFRLLKDNRLYSPPEG

SEQ ID NO: 465276 - protein, 457 aa, unidentified
MKKNKKRNMHNSEFKQINFNAAGIDIGAETHYVAVPDGRDPNGQDIRHFGTFTSDLYAIADWLQQCQIDTVAMESTGVYWIPLFEILESKGFDVKLVNPRFIKNVPGRKTDVVDCQWIRQLHSYGLLKGSFRPEDQICVLRSYLRQRALLVSYASHHIQHIQKALEQMNIKLNRVIRDITGDTGMKIIRAILAGERKPKKLAQLRNSRCKNDVKTIAKALHGNWRSEHLFALQQSVELFDFYQKQIADCDFKIEQHLFNFEDRSNGEPLDKSRKATGRNKLSFDARTHLFQMTGVDLTKVDGLDSLTVLKIISEIGLDMSRWPTVKHFASWLGLSPGSKISGGKVLSSKTKKCANRAAHYLRLAAYSLHSSKSAIGAFFRRKKAHLGPAKAITATAHKLARIIYNMLKNGTEYKDVGQDYYEQRYKNRVLQNLKRRAKQFGYELNYVKEQQELIQII

SEQ ID NO: 465277 - protein, 355 aa, unidentified
MSSLKYIGMDVHKETISLAVMNSAGKLLMESIIETKASTILQFFAGLRGDLHVTLEEGTWAAWLYDLLQAHVTEIVVCNPRKNALLKDGNKSDRVDARKLADLLRGNYLKPVYHGEHGLRMLKELSRTYLTVSKDLVRVMNRLKALYRSWGIAYVGKSVYFRGQREVWLNKIKEAGVRRRAEYLYQQLDTLSPLRKEVRRELLSESRKHRATEILRDIPTIGSIRSAHLVALIQTPHRFRSKRQLWAYSGLALETRDSAQYRYVDGQLLPSRKPQQLHGLNQDHNHDLKGIFKGAAHKAVSSPGPFHEFYERLLAKGTKPSLARLTLARKIATTTLTVWKKGVRFDPEQLKSQVA

SEQ ID NO: 465278 - protein, 410 aa, unidentified
MPSPLFVGIDVSCKDNKVQLLHSDGAEITRFSVPNNHPGAKSLSEKIIGIMGKNKFDSLVIGLEATSVYGHPLVYFLRQEPSIKALNPRIHVLNPKQVANFKKAYPELPKNDWVDAWVIADNLRFGRITKEVCMDEKFDALQKLTRERYHVARNLTREKNRFLNNLFLKFSTLAQEDIFSDKFGAASTAIIEDFFSVDDIAYMDVDKLAEFLNKKSKGHFADPHELAETIRKAARSSYRLPKTVNDSVNQVLAVSLVAIKALKKQLETLDKAIETQFALIPNTLQSIKGVGPVYAAGIVAEVGDVKRFPNHAALAKFAGLAWSEHQSGQFKAENTHMIRSGNRYLKYYLLEAANKVRVHDPEFKRFYELKYAKTPKTPHKRALALTARKFVRLVYALLHSNRLYTPPKGE

SEQ ID NO: 465279 - protein, 318 aa, unidentified
MTFSPIGIDIAKAKFDAAALRNGKYKTKVFQNTPEGFRAFLAWLQAFPTPHVCLEATGRYGEGLALFLVDHGLAVSVVNPAQIHAFGQAELSRTKTDKSDAKRIARFCLSQRPLLWQPPPPAVRPLQALVRRLESLLEMRQMEKNRLDGADPTVRPSIEAVLATLDTEIAATQTRIREHIDHDPDLRQRRDLLDTIPGLGDATIPVLLAALGDVHRFENARSVAAFAGLSPKEHQSGKWKGHTRLSKTGDALLRKALYMPAIVAWRHNPLIRAFCERLKAQGKNGKLIVGAAMRKLLVLAYGVLKSGRPFDPNHGLAS

SEQ ID NO: 465280 - protein, 321 aa, unidentified
MNTTPVLGIDVSKDKLDCALGVEGKYKSKVVTNNPQGFAGLWVWLQKWHVDSPHVCMEATGVYWEACAEFLTGHGLKVSVVNPAQIKAFGGSRLVRTKTDAVDARLIADFCQRMCPGAWQPPSPGERALRALVQRLDTLQRMHTQESNRLGVAREAVRAGIADHLVWLDKEIESLIQQIRARIDEDPDLKHKRDLLDSIPGVGERTIAAILAFGADPTHFANARQCVAFAGLNPRQHQSGSSVKGKPRMSKVGHALLRKALYMPAIVTLYKTAWGKMFRDRLASAGKPPKLIIGAMMRKLLQVAFGVLKSGQPFNPALHGC

SEQ ID NO: 465281 - protein, 315 aa, unidentified
MSDVPCFVGIDVAKAQLDIALRPSGERWAVPNDASGVATLVDRLQGLHPALIVLEATGGLERLVTSALATVGLPVVVVNPRQARDCARATGQLAKTDALDARALAHFADVIRPTPRPLPDTQTQELRALLGRRQQLIGMRTAEQHRLAGTSGRLTQDIEAHIAWLNTRIATLDDDLETLLRASPLWRENDDLLQSVPGMGPVCARTLLLELPELGTLTRQQIAALVGVAPLNCDSGTLRGRRMIWGGRAHVRTVLYMGTLVATRFHPQIKAFYQRLLAAGKRKKVALTACMRKLLTMLNAMLKHRTSWQAQEVQN

SEQ ID NO: 465282 - protein, 371 aa, unidentified
MEQITRADGVVEPRAGAIVRVGVDLAKRVIQVHAVDVAGRVVCRRALARDKFIAWCARLPVGCTVAMEISSGAHHWARRLRELGLAPKLMSAQLVEPYRSQGATGKNDANDAAAICEAASRPSMRFVPVKSVEQQSMLCVHRLREGIKADRTACINRIRGLLAEFGLAYAQGPDALQRVLADVLEDACNEMNTLARLVVQRAAQQWQQLDAHLAWCDERIAQHARDNADVRAAAQLMGIGPVGASAAVATVDDFKQFKNGAQFGAWCGIVPRQRSSGGKAQLGRITRRGDSYLRTLLIQGAKSAVLTAHKRQDPISRWACALRERSGWQVAAVALANKNARILWAVMTRGERFDPNHISVKPGAPPAAATA

SEQ ID NO: 465283 - protein, 394 aa, unidentified
MKLIGIDIGKNKHFFCVMDQQTGEIISQPVSFSNDKEGFDFLVQKIKSYPKDFILIGMEDTGHYHFALLKYLLDLQYTVALINPKTTDFNRKMQGGITKNDKLDTINICDVLDTPERKKQYRITKVNSFDLYEQKQLTRHHHNLKEEENVYKNRLQKCIDIVFPEFNKLFNSKYGIVYMNILKMFGSAENIANTDIRTIRKCFEIEGRGNRISLTPERLKECARSSIGISSSAEVIQIKHLTAQIELIEEQLTEIDKKIEEFSIQNNSPILSIPGISHFSGTSILAELGDISNYSKPSQIIKFAGVAPLHYESSQFNAQHTAITKKGSKYLRKTLYQIILPVIKHNPVFYKYYQLKISQGKGHRCAQGHCVRKLLRIIYHLLKTNQQFDPQLLR

SEQ ID NO: 465284 - protein, 320 aa, unidentified
MAMTVSQSIIGVDVAKAEVVIYQTETDELKIVPNTKTKLKAWLDTLPAGSAIAIEATNIYHLQTVTLAHSMGHKVYVVDGFRINHYRKSTGGRAKTDASDARLLARYLKNEQADLRVWSPPPKIYTRLQSLLRRRAALVKTRIALNQSWAGEPLLKASSKSVSACLERHEALIEKRILDAVTEAGLLHQVKRCQAVEGIGFLTAVALTMAFQRGEFESADAYIAFLGLDLRVTDSGQMNGRRALSKKGDGEIRRLLHNAASAGIRSKAWKPLYEGYLARGLKTTQALVIIARKLARIAFSLMKNQSEYQSKAVLEASPQP

SEQ ID NO: 465285 - protein, 341 aa, unidentified
MRRQASASAGDTSIRVPKNHHLMHSKIHIAPKTTCLGIDVAKFKLDICLLHNGKRHREQFPNTLIGLRDLISWLRTRHDGPLSVLMESTGNYSLLAATMLHNAGHAVSVVNPRWIKDHARSDGRRNKTDSLDAEIIAHYGLTHDSDHWQPVSPAQSVLRALLRRLAGLEETSEAVVLKSIERLTKYIAKEIASLEAAIQAHLVENAELFSDCKRLCTIPGIGMKTARWLCAELPRHLPNSRAAAAWCGLTPRLRQSGTSVRGASSIGREGNRFLRKILYMPAIVARRFNARLKAFADSLESRGKSKMSALIAVEHKLLRHAFAILKNKSTYDLTHHPLKTS

SEQ ID NO: 465286 - protein, 343 aa, unidentified
MKLSYVGIDLAKNVFQLHGIDRHAQAVWRRRLRRGQWLKVLRETVEPGCIIGMEACSSAHHWARQLQANGYDVQLVAPQFVKPFVKSNKNDRNDAEAICEAITRPHMRFVPVKTIEQQDIQAIHRVRCTIMSQRNAKANQIRGLVAEYGIVAPQQMLSLRRAVPEWLEDAENGLSTCFRALLHDLWMDLQHLQERLAELDRQIEQIAKDNPVTRRLQQLRGVGPMVATALVATVGDGSHFRKGRQMAAAIGLTPRQHSTGDKRRLLGISKRGDAYLRTLLIHGARAVVSQSKRRDDPLSLWMTGIIERSHTNVAAVALANKTVRIAWAMLRNESDYDPALAVT

SEQ ID NO: 465287 - protein, 352 aa, unidentified
MSEEYDFVIGVDTHAATHTFAVVAGSTGAVLDHAVFPTSPAGLERAKGWLVRRCGDARTLIVIEGTGSFGAIVTERLMAAGRTVVEAARMPAGDRRGKGKSDELDAARIARAVLGLAITDLRIPRSLTGNRSRVAMRVLVVAREEMTGERTRAVNALTALVRTVDLGVDARTSLTAAQITAIAGWRTRAEDTTARICRQEAVRLAQRIRTLDGEITSNRATVTKLIAQDTPQLLELTGVGAIVAASVLVAWSHPGRVRSEAALASLAGTCPIPASSGNTVRHRLNRGGDRRLNRALTTIVIVRMRTDPATRTYVARRRAEGRTTKEIMRSLKRYVTRQLFRTLAAAHPIPVT

SEQ ID NO: 465288 - protein, 308 aa, unidentified
MFVGIDISKLTLDICILKNENDFIHFKIKNNLVDISKFISKLSTDSFVVFEATATYSYTVSSLLTEHSIPYSELNPNKLSHFLKYFSDKKTDKEDSYILAFYAFMFKDTIKTTKFNHSNKLLKCNQSAINILNKISTQLKNFLDGQRTIINLDLEKKILYILENIETNKTELENDLFDYICLTIPETLEILKNEKGIGKNLAIHLFPILDDNRDKSYKQIISYLGLSPKIFESGTSVKKRSSINKKGSNLIRRSLYMSSLSCVRFNPKFINFYNRLVLTGKPKKLALIAVCNKIIRHLKNQYFRDSYE

SEQ ID NO: 465289 - protein, 320 aa, unidentified
MNTIGLDISQKTIDATLHKTDGSTYYTKVGNNREGFQSLKDWIKANKVRKCVIGMEATGIYYESAAENLSETYTVYVINPLKIKDYGKSQFNRTKTDKADSNLIAEYTKRHADKIIPYSKPKNRYLQKLINLKQQLKDHQKQIKNRLHSSDDEMIQAIHQDLIQAYQEKINQTQTAIEAQIKEQAETDGHYRNLQTIAGIGKDTAAILYAQLTDKNFQTANQFVSYAGLSPQTEQSGTSVHKKGRLSRYGHRRLKRSLYMPALVAYRVNAFPQLILNLTNAGKPKMVIIVAIMRKLAKLAYYIVKTGKPYDSTRHKAAQA

SEQ ID NO: 465290 - protein, 399 aa, unidentified
MFYCGIDIAKYKHEASVIDINGKTLLDSIPFSNDKQGCGKILAVFEKFKIAPDDVIIGMEATGHYWLSVYAFFLELGYTVKVINPIQSEAFRKMYIRQTKNDSKDSYIIAQIMRFGEYSATSLSEENIIALRQLSRYRLALVDACGDCKRRVIALLDQVFPEYDKLFSDTFGSSSTELLLNCPTPEDMLAISTRKLTNILNKASHGKFGKEKAEELKAAAKNTFGIAFAKDAFSFQIKQLMQQVVFLENQLSELEEQISNLLHETNQYITTITGIGDVLGAIIVSEIGDINRFERPNQLVAFAGLDVTVKQSGEFSGTKNKISKRGSPYLRRAIWLAAQRAAFCDPVLSEYYQSLRARGKHHLTAVGGVARKLCNIIFVILKENRPYLPTPTKNPKNLS

SEQ ID NO: 465291 - protein, 310 aa, unidentified
MESIIVGIDVSKNRLDVAVRPRGEVFAVERNAAGLESLVARLRVLSPRVVALEATGGFEIIVAAALASGGLPVVVVNPAQIRSFAKAIGQRAKTDPIDAAVIAHFAEATKAEPRPLPDEATRLLADLVARRRQIIEMIVAERQREKRVTISHLKKSITRLLKALEKELASVDTDIDDAVRASPAWREKEDLLASVPGIGTIIARTMIAELPELGLLGGKQITALVGLAPFTRQSGQWRGRSFIGGGRSAVRAALFMGAMVAKKHNPVLKAFFDHLIAAGKPKKVALIAVARKLLIILNAIIRDNRPWQTA

SEQ ID NO: 465292 - protein, 346 aa, unidentified
MDHFAGLDVSVKQTSVCIVDDMGRMVREVKVASEPEALLPVLTNPIYRFKRIGLEAGPLSQWLFSALAEAGLPVICVETRHMRAVLQAQINKTDRNDARGMAQMMRAGLYRPVHVKTLRSQKLRMLLTHRKLLQSKAIAIDNDLRGTLRNFGLKVGVVGALKFEARIKELVENLPDLAELVEPLLIVRRTLREQIGILDGRLLAVVRTDDVCRRLMTVPGVGPVVALTYRATVDVPARFRNSKAVGAVFGLTPSRYQSGEINRPGAISRCGDEMMRAMLYEAAHIMLVRVVKWSWLKAWAMKIARHRGIKKAIVALARRLAVIMHRIWVDGTEFRWTREQATAAAT

SEQ ID NO: 465293 - protein, 360 aa, unidentified
MARQALSQLQAFVEASQGRSFFVGLDVHKDSYSVALRRFDGAIHTLVISASPQVLIDELAALGVTVAMAASESGPTGFHLARELTKAGIPNLVAAPSRIPRPVVWGAKTDRLDCIKLADYAAKGMLRPIAVPTEEQEAQRSLERRRHALADDLRRVKLRIHSHLLFLGLTEPPNLKYWSKVAVASLLKLPMHQAARYTLESFVREMHAITSELSLVEQQLETICHLKEHDEVIKCLRTVPGVGPLIAATFRLELFQPERFNRAEEVTSYLGLAPMVRQSGESKGRARLRPVGQTKLRSLLVEAAWKWRAHDSKAQAWYHKLLGKSGLPQKAITALARKLAVILWRLSLEKRDYRFEAVVA

SEQ ID NO: 465294 - protein, 414 aa, unidentified
MDIAKHHHEVLIEPPVPKRRSRLRLANSRPDFEHLADYLRGFKSSVLVGFEATGNYHRPLAYFLHRQGFELRLIPTLALARTREAMHNSWDKNDPKDAQVILHLLKTGVALTWHDPIVNGINDVQELSKTHFQVTLARVRVWHTLRNHYFALYFPEIDRFVRSDHSIWLIQLLAVFPTPASITALSEEEFRAGAWNLVGRKVSKRALLAEIYAAAKRSIGVPVALESPAMAMFRLVLEQYLTLHQLRERIAEQAALLLEGNSDSRRLMTVPGIGPANALTILAEAGDLRRFRHHRQFLNFCGLNLSTLQSGKSRGQSHISKYGNARLRTALWLAAQTAVRMRENSFRRKFDNYVRSNPLDADLRRKAYIAVAAKLARVIFGLIKHQVDYRPFFEHQFQVEEPSRASAVGAVSTP

SEQ ID NO: 465295 - protein, 387 aa, unidentified
MPQPNDLSRSLVALDHNSTIIAVVELSQSSWLVGGGLPGIERQPRKKLEPSPERLLALLHRWRDEAIKAGRNITRIALAFEAGRDGFWLARWLAARGVEAHVIHPSSVAVSREHRRAKTDRLDTELLKRGFLGWLRGERGHCSMVRVPTLAEEDAKRPNRERECLVKERTRLVNRMKGALARLGIRNFRPTLRNAAEHLAGLYTPEGSPLPPNVAAELERDIARLGLVIGQIKQIEEARRQRLEEQPESRPHAMVRLLVRVVGIGTETADMLVNEVLSRPMRDRRAVARYAGLTGAPDESGTKRREQGLAKAGNARVRRGMIPLAWRFLRFQKDSALARWYQARTADRRAGTRKTMIVALARKLLIALWRFVTTGERLEGVVLRPAA

SEQ ID NO: 465296 - protein, 422 aa, unidentified
MLEETEDREVIIERVAALDIGKAEVMCCVRVPAEGGRGRRAQEVAAYPTMTGSLLRLADRLAALGVARVVMEATSDYWKPVFYLLEAAGLETWLVNAKDVKHLPGRPKTDKLDCIWLCKVAERQMIRPSFVPPPQIRRLRDVTRYRADLVGARTAEKQRAEKLLEDACIKLSVVASNIFGVSGRAMMAALIAGQRDPTVLAQLARGRMRVKIGALEEAFTGHFTDHHAFLLAKMLARVDAIDTDIAALDAKIEELIAPFAAVVDQLDEVDGVGRTAAACVIAEIGTDMTRFATPGHLASWAKYAPGVKESAGKKKGKSTTGHGNRYLARVLGEAAIGAARTDSFLGERYRRIARRRGKNKANVAVGRSLLVIFWHLLSDPQARYHDLGPDFYDTHISNSRTMRSHVRQLQALGYKVTHEPAA

SEQ ID NO: 465297 - protein, 338 aa, unidentified
MKITTIGLDIAKSVFHLYAANKMGRYVKKKQLKRKQVLPYLARLEPCLIAMEACGGANYWAREIETLGHKVKLIAPQYVKPYVKGNKNDYNDAEAIAEAAQRPTMRFVPIKSVEQQDVQNLHRQRERIKKARTALVNQVRGLLAEYGIVINKGVAAVRKGLPDILEDAGNDLTTLSRELFADLLEELRVLDERFKQSEKQIEISNRGNEVCQRLDEILGVGPITASAAYAAAGDGKDFVNGRHFSAWIGLVPGQHSTGGKSTLLGISKRGNAYLRTLFIHGARAVLRHSANKTDRFSLWAQALLERRGHNKACVAVANKMARMAWVIMAKGETYRAAT

SEQ ID NO: 465298 - protein, 333 aa, unidentified
MKNEPIKEFVGIDVSKLTLDVHLYVKNLHCVFSNDSKGHRLMFSWIRKQCIKNEELRFCFEHTGIYSLELAMFLKKNSQVIYIVSGLAIKRSMGLKRGKSDKTDAKEIAKYLFQNHYAIKPTELASDAIQELQMHLSFRSNLVKKLASFKMHRKEFGKINESKGYDQIEQVTAEIMDALKKGIKVIEKQIQEIIYTDEALKNTFENISSIKGVGPILAATMIVITRNFTSFETSRKLACYAGIVPFEHSSGTSYRGKNRISSLGNRDLKSLLTMAAISSITYNPELKIYYQRRISEGKSKMSTINIVRNKLVSRIFACANRNSKYVEIYKFAA

SEQ ID NO: 465299 - protein, 348 aa, unidentified
MKILALDLGKYKTVACEYEAESGQHRFHTILTTPAALQSLVWRVQPDQVALEICNLAGWICDLLRGLGVMVRVANTSDDAWRWRKVRRKNDRGDALKIAQLAAVNQLREVYIPSLTIRQWRALIAFRQQLVRRRSQIKNHIRDLLVSEGQLLPRGAKCWTQLGRAHLEALAQPLLAVEPQELWRGQLEVELRQLQGLQEEIEKVEEKLHALASADARVARLRTVPGVGPRLAEAIVALVDRPERFHDAAQVSAYIGMVPKELDSGETRRRGPITKHGSRLVRSLLVEVAWAALRYNGWARATYERISGGKKSRRKIAIVAVGRRLLVRCWAMLRDGTCWQAPMLSNSA

SEQ ID NO: 465300 - protein, 311 aa, unidentified
MTILTSQTVVGIDIAKAEIVVYRADLETIESVKNDRAALKRWLKTLPAQSAIAVEATNIYHLETVDLAHAMGHQVYVVDAYRVSHYRRGVGQRAKNDPCDARVLARYLTNEQSKLRLWNPPPKAYTVLKSLLHRRATLIQNHTGLMLSWADEPLLKKERTAQQKAFERSDKVIQKLLRKVSKEAGIDDNIDRCKAIEGVGELTATGLATTYMRGDFANSDAFIAFLGMDLTVDDSGKKNGPRFLSKKGDPEIRRLAYNAAMAACRSTKWKPFYESYLARGFSKTQALVALARKLCRVAFTLMKNQGEYRSV

SEQ ID NO: 465301 - protein, 429 aa, unidentified
MNISTSIAEADSKYVWSVGIDWADEKHDISQRCWADDRYQTFQIGADPVSVRTWLEELKELAGPQGRIVVGFEQNRGSLFEMLREQKDWLDLCPLNPLTLSRYRQSFYTSGAKDDPLDSQLIEELLRKHLDRLRLYEPPEPVLRQLDLLCQLRRKAVDSAVGLENQLRSHLKVYYPLVLELHEDLSSTLTLHFLKRWPTLQSLKRAKAQTLRSFYYQHHSRSQSLIEERLQKIARAEAVTEDGTLIDPLVLSVQGLVNQLLAHKASEAAFDKAVQKLALKHPDYEIFNSLPGAGPQMTPRLMVAFGSNRSALTDPSQMQKKSGIAPVLDRSSQSQRIHRRWCRPKFLCQTFHEFAAYSIPHCTWAKAYYEQLMARGKSHHTAVRALAFKWIRIIFRLWQDHTTYDEERYLRDLQKRHSPLSQKIQPQPL

SEQ ID NO: 465302 - protein, 400 aa, unidentified
MDHQLYLGIDVGKTEHHATAITAVGTVVHDKTLPQSEPKIRALLQTLRAEQGAVLVVVDQPKTIGALVIAVAQDLGIDVAYLPGLTMRRVADLHEGQAKTDARDAFIIADTARTLPRTLRGITVAEENIAEPAMLCGFDDDLAAQLTQVRNRLRRFLTQIHPALERILGPRLGHTAVVTLLTRYPSPTRLRSAGRGHVRTLLKKHAPRLAERLTEEIFTALAEQTVTVSGTTAAEKIIGRLAQQLAQLCSQRVEIEAEVLAVVDAHPLTQVLTSMPGVGVRTAARILTEVVGKNFKDAAHLASYAGIAPVTRRSGSSIRGESPSRRGNKTLKRALFLSAFASINASPASRAYYDRKRAQGKRHNQAIIALARRRTDVLYAMLRDGTFYTEPTPPAVALAA

SEQ ID NO: 465303 - protein, 367 aa, unidentified
MKKVSTVSAKQGKNFSQPTRTIGLDLGDRNSWYCVVDGGGQIQLEQRVGTSAKALQEVFGAMPRSRVVLESGTHSPWISRLLSELGHEVIVAHARKVRLIGESRKKDDRLDAQTLARLARIDPGLLCPVKHRSAQAQADLTLIRARAGLVRSRTALVNTARSLAKSYGQRLHGCNVRNMNPEKAEGLSPELQRALEPLLLAIEELSGRISEYNDRIEALAQQSYPQVALLKQIKGVGTLIALTFLLTLEDPHRFRKSRDVGCYLGLQPGRRNSGQSEPQMHISKEGDPYLRTLLVQGAQHILGPFGVDCDLRRWGLKLAERGGKRGKKRAIIATARKLAVLLHHLWVSGEVYDPLHNSSRTIVPAAA

SEQ ID NO: 465304 - protein, 352 aa, unidentified
MSCYYVGLDVHKASICIAALNADGKLVIESVVETSASTILDFLKGLRGQVEVTFEEGTHAAWLYDVLKKTKARVIVCDPRKNRLLQDGNKSDRVDARKLALLLRAGLLSPVYHGEHGTRDLKELVRSYEYLVEDSTRVMNRLKALYRSRSIPCAGTDVYKPLQRKIWLEKLLEAGVQARAARLYSELDHLTILRREARQAMLVESRRHAASKVLRQVPTLGTVRIAQLIAAVATPHRFRSKRQFWSYCGLAVRTRSSADHHFIGGDVRRTAKTMTRGLTQDYNRTLKYVFKSAALTATRCEPFKSCYAELLARGLRPELARVTVARKIAAITLAVWKKGETFDADKLIKHAA

SEQ ID NO: 465305 - protein, 962 aa, unidentified
MLVFRDWNSGLDGARNPADRMNVLDRNIGSVETKVEAGVPEGTAPGSAPRGVRRLVLPLRRAWQFSVRQSFSSLTRRIIFLNVTGLLALVIGILYLSQFRAGLIDARVQSLLVQGEIIAGAIAASATADSDAITIDPERLLELAPGESYDPTEESLSGLDFPVNPERVAPVLRRLVSPTNTRARIYDRDGGLILDSRNLYDVLRFDLPPPMAEKPGIFERAFVGLRTWFNRGDLPLYRELGPQNGKGYEEVDHALNGFKSSMVRINDRGEVIVSVALPVQRFLAVRGALMLSTQGADIDNMVTAERLGNFKVFLVTLSVMLVLSFLLAGTIAGPVRRLAGSAEMVRRRTGSRVEIPDFTNRRDEIGDLSGALRDMTDALYSRIEAIESFAADVAHELKNPLTSMRSAVETLPLAKSDASRARLLAVIEHDVKRLDRLISDISDASRLDAELQRRETGAVDLKRLLTTVVTIANEVRHDDGVTVSLKFEGNPAAFVIPGHDSRLGQVVDNLIDNARSFSPPGGNVRITCRRAKQDIEIMVDDDGPGVRSEALEKIFQRFYTDRPHQGFGQNSGLGLSISKQIVEAHRGSIRAEKNDFSPVNGMVRRRDSGSIESGARRHSMKLHVLGIDLGKTVFHLVGLDSTGRVVIRKRCSRKQLLAFTANLQVQLIGMESCSGSHFLGRALREQGHEVRLMPAQYVKPYVQTNKSDYLDAEAIAEAVQRPRMRFVPIKTEDQLDLQALHRVRERWVMRRTAVVNQIRSLLLERGLTLPTGRRYVEEALPRILEDAALPLSGSFRLLLAQLKLELEQLAARIEQLDGVILERAKEDEGCHRLTAIPGVGPVTATALIAAVGNGSAFRKGRDLAAWIGMVPRECSSGGKQKLLGISKRGNAYLRRLFVQGARAVMQQRHRQAPGLSCWLAQLLARRHQNVVIVALANKLVRMAWAVLCKNEPYRAPVLAVST

SEQ ID NO: 465306 - protein, 384 aa, unidentified
MAEQIFKYSVGCDISKDTFNVCILEVSQEQSKVKASHKFKNETKGFKEFDAWVKKHKRHDVPTGFYMEATGVYYENLAWYLFEQEYNVFVLLPYKTKHYLKSIGIKSKNDKIDAQGLAHMGAEQKHNPWRPHSKSIYILRALTRQHESVTKLKTSLQNQLHANEYSAVRNAIVKKQLNATIKLLEKQLTELAGEISKLIDADEKLNEKYCHIESIRGISKLSWATIIAETSGFETFENQRQLVSYAGYDVVENQSGKHVGKTKISKKGNSRIRRILYMPSLVSVRLKEPALFNLYQRVHERTGIKMKGYVAVQKKLLVLIYHIWKNDKAFQSDYSKTFGEEKSKLLFPFGFGETIKESSPDKRATQDEHSYELSSKVLFPLAQI

SEQ ID NO: 465307 - protein, 423 aa, unidentified
MASATTALFTAYIGIDWADRKHDFCLQAACFTAVEFGVIEHKPEAIEKWAQSLHERFGGPIAICLETTKGPLVYALQRYEFLVLFPVHAATLAGYRRAFVPSGAKDDPSDAHAALDLLRRHPERLQPLKPQSPAMRMLASLVEERRQLINSITRTSNRLLSTLKLYYPQALDWFEHRNTKMFCDFLDRWPTLAHVRRARVTTLESFFHEHNCRRPHVVTARIESIRSARPLTEDQAVIRPAQMVVETLVAQLRVLIKASERYDEEIDAISRTLPDYWLFAFFPGAGQIQAPRLAVAFGEDRDRFASASEMQRYAGIAPVVERSGNRCWVHWRIACSTFLRQTFVEWAGSTISRSSWAGAFYWQQRKKGCSHGVAVRALAFKWIRILYKAWKTRKPYDETIYLDALKKHTSPLVVSTAETVNTA

SEQ ID NO: 465308 - protein, 370 aa, unidentified
MSVRRILAKTINTDLEYEAIGIDLAKNCVSVALLTTDGEVVCIDRLDYSELEKSAQALSSTTFAMEPCTEMNYLVQKLEAWGHRCLVIGGKNVQNYVENHFSGQKTDLNDAQALAFLAQDTQLRTIKAKDVEQQKYASLTTLREQYIKQYRQTIVSLKGICQAWGLNISKGISGKARLKDLIENHAAFPEELKESLVDMVTHAQTAQKALNKITKTLEELAKSDKVCQLIQTIPGLGSICSCRLRATVGDIKRFKSPKDFPAYYGLVPRSIATGHNERKGKITHRGDRTMRSLMVQAAGSLVNMTTKGKLKSKQLTKWILKKQKEKMPWGKLVCAVAAKLLRIVRAVLISNKPYNSKIAGVAKCSLPKGS

SEQ ID NO: 465309 - protein, 423 aa, unidentified
MRQEAQKQQEFGAYIGLDWADQKHVISLRSADSKQVEQCELAQKPEALAAWVSGLQQRFPGQRVAVALEQSRGALVYALMGYDFLVLYPINPKSLAKYREAFYPSGAKDDPTDGDLLRELVAMHRDRLRAWVPDDELTRTITLLNEYRRDLVGRQTALTNQLTGLLKLYYPQALGWMGGLATVQACDFLQRWPTLAKVQQATLLKLRKFYTAHGCRKAELIEQRLQEIKVAQPLTRDGAVITASVSMVQATINQLRPLLESIALMEKQIAELFSQHEDHDLFSSFPGAGPALAPRLMGAMGADRGRFEAASEVQQLSGIAPVTERSGKSCWVHWRWACPKFVRQSFHEFAGQSIRQSAWARAFYDQQRQRGKGHHAAVRSLAYRWIRIIYRCWKMRVPYCEETYCRALERRQSPLARVLAAQT

SEQ ID NO: 465310 - protein, 340 aa, unidentified
MKSFMRIGVDIAKNSFQVHALEGEDGRATVRKLSRSGLVKFLAEVEPCLVGMEACGSAHYWARRFRAMGHEVRLAPPIYVKPYVKRGKNDAADAAAICEAISRPSMRFVAIKSEEQQATLMAHKTRELMIKQRTMGVNALRGHLAEFGVIGAKGIGRVEQLVEKAGAANLPAMVQATLEVLVGQLRSLDAAIEQLEHAILSSHRRDPVSRLAAEVPGVGALAASAILASAPDPQLFKSGRDFAAWLGVTPKQNSTGGKEKLGSITKQGNRYIRRLLVLGALSVLRAAPKRKGALCDWLAALKARKPAKVAAVALANKLARIVWAIITTGEAFRGSIYAKA

SEQ ID NO: 465311 - protein, 332 aa, unidentified
MAGKVTETAVVGGVDTHKDLHVAAVVDQNNKVLGTQFFSTTRQGYRQVLAWMTSFGALKRIGVECTGTYGSGLLRYLQNAGLEVLEVTAPDRMERRKRGKSDTIDAECAAHAAFSGIRTVTPKTRNGMIESLRVLKTCRKTAISARRVALQIIHSNIISAPDELREQLRNMTRMQLIRTLGSWRPDASEYRNVTNVYRISLKSLARRYLELHDEIASQLLITAGDNPQRLRSESESGFAALCGVSPVPVSSGKTNRYRLNRGGDRAANSALHIIAIGRLRTDDKTKEYVARRVAEGHTKMEAIRCLKRYISREVYTLLRNQNRQINSIPITA

SEQ ID NO: 465312 - protein, 368 aa, unidentified
MTERTTTSPTAVTSTTIGIDIGDRTSHICVLDGAGDVIETGTVATTPGAFAKRFERVDATRIAIEVGGQSAWIDETLSALGHDVIVANARRLRMIYENESKSDEVDAEQLARVARVDVMLLHPIQHRQRSTRTDLAKARSRDMLIATRTSLINHVRGMLKSFGTKLGSRGAAYFHGWVRDQIPDEFHCALDPIVDTLEEIAVQIAALDKELERLANEVYPETMLLRQVNRVGVHTALRFVLTVEDPDRIKCSRNTGAYFGLRPRRHQSGARDPEMRITKAGDRDVRRLLVQCAQQMLGPFGTDSDLRRWGLDLAGRGGKSAKKKAVIAVARKLAVLLHVLWKTGQVYVPLKNANAKDTAQAAKAQVPA

SEQ ID NO: 465313 - protein, 416 aa, unidentified
MMRETRFERHRKRTRYSRNSCVTSRRSLLLWEAFVDWADAHHDVMVSDDAGRKVGGRRVTHTPEGLTELNAFLLSITGPERKEELACIIETTHGLLIASLLEAGYAVYPVNPKTVEHRRGAAGAKTDKIDAYLLAKHGRSEFADLRRLEPDSPIIAELKALARDQDSLIHSQTRLVNQLTAWRVTYYPVALHLFTKLQQPTTLAFLQRYPTPHVAQAASVEQVAQVLKQAGHPTPDKSAANIVETLHHPHLTADDVTTRTKSRLMLVLVRHLQPLLEEIAVYEKQITRLFLTHEDNEVFSSLPRAGKRLAPRRLSEIGDDRQRYADAASVQALAGTSPVPYESGNYSKPRRRLACMKPLRNALSQFAWQSTHTEAWAAEDSQRKRTEGKSHRVAVRALAHLWVRIVRHVGAYEIPA

SEQ ID NO: 465314 - protein, 431 aa, unidentified
MELYVGLDASMDETSICVVDRDGKIIKECKATTDPTAIHSALKAYTDHLQRVGLEAQAFSPWLSKELSAMGLPVIVVEAVHMQKSLSAQRNKTDRNDARGAHMMRVGWFRQVHVKDDDNQRLCVLLSGRQLLKRKLVDIENELRGSLKAFGIKIGAVGRNKFEARALELVEAAEPLLRDVISGMLAVRKAVWAEYKRLHNALVRVVRQDAVCRRFTTIPGVGPVTALAFKTTIDDPHRFTRSRTVGAHFGLAPERFQSGTIDYDGRITRCGDPEVRTNLYEAASGLMVRCKKWSALKAWGMSIAKRRGHKRAIVAVARKLAIVMHRMWLDGTEFRWTNADGLQADDQPGSKWEHRICRDQSHRRQFNRIRYGGKAPVVVSRAGVKGRYLAGPAYWKPRECLAHSDSSLASMEPASGRARRNAWTTTERMMF

SEQ ID NO: 465315 - protein, 341 aa, unidentified
MKLHVVGIDLGKTVFHLVGMDSTGKVVVRKRCSRRQLLAFTANLQVQLIGMESCSGSHFLGRALREQGHEVRLIPAQYVKPYVQTNKSDYIDAEAIAEAVQRPRMRFVPIKSEEQLDLQALHRVRERWVMRRTAVVNQIRSLLLERGFTLPKGRSHVEEALPRILEDAELPLSGSFRLLLAQLKLELEQLSARIDQLDAVILKRAKEDDACQRLTAIPGVGPVTATALIAAVGNGSAFQRGRDLAAWIGMVPSEHSSGGKQTLLGISKRGNSYLRRLFVQGARSVLQQRHRQAPGLSSWLAQLLARKHQNVVVVALANKVVRMAWAVLYKNESYRAPVLAT

SEQ ID NO: 465316 - protein, 418 aa, unidentified
MREEVSVVELLVARCAGLDVAKDEVVACVRVPDGRGGRAQEVRTFPTFTSGLEALAGWLAAEGVTQVVMEATGQYWKPVWQVLEERGFELLLVNARHVKILPGRKTDVADAAWLAELLEHGLLRGSFVPPAAIRELRDLTRYRKRLIQAHSAEVQRVQKTLEDAGIKLDSVAADVLGVSGRAMLAALIAGERDPQVLAELARGRLRNKLPQLRQALRGRFRDHHALLVRLALAHLEHLEASIAELDTHIDRVLAPFAQARDRLDTITGVGKRAAETIIAEIGTDMSVFPTAGHLASWAGRCPGNNRTGGKRRSGKTTKGNRWLGEVLIECAWAAARSRDSYLSAQFWRLARRIGKKKAAMAVGHSILVIAWHLLSDDCDYADLGGDYSVRRDADRARQRAVAQLQALGYQVTLQPLAA

SEQ ID NO: 465317 - protein, 422 aa, unidentified
MNNPSSQESGSWLENRGFGGLDWASQKHSVVVVGPQGKVVEDFEIEHSALGWKKFRERIKPYGSIPFAIETSQGAAVEQLLEAGMQVYPLNPKSAQAYRQRKAPSGVKDDRLDAWSFADALRLDGQNWKPLRPEDPLIKELRLLCRDEVGLIEQRTAFINQLRHALAEYYPTALEAFEDWGATSAWMFLQRFPTPQLLEKAGKRQWEKFLHSRHLWRTESGPRRMELFAKATEFCGSEPTANAKSMLSLSLVEMLFAVEKQLGLYRKRIEELFQSHPDHDLFGSLPGAGPKLAPRLLAEIGDDRERFEGDAQNLQCFAGTAPVTKRSGRHWECHQRWACDKYLRHAVHLFSEQSLTRCAWAEIYYKAHRAKDHSHARSLRCLGQRWLKIIHKMWINRTPYNPEFHHRNQVKHGSWVFRFQET

SEQ ID NO: 465318 - protein, 368 aa, unidentified
MFEHTFIGLDVHAVNVVGHALNPATGEISGHTMASDPALVLEWVRRFEPPVKVVYESGPTGFVLARYLRAAGINCVVAASSKLLRAPGDRIKTDRRDARVLAEMLAVGSVTEVRIPDPDEEALRDLSRLRSGTAKDLAHARQHVNAILLRHGIRYPKDSRWTKEHSLWLHRQRFDEPALQFTYQADVEQAELLAGHLKRVDKQIAATAAACRYGPVIDALMCLRGIQITTGFGLAVEIGDWTRFTGSSIGSYLGLVPSEESSGQSRHQGPITKAGNTYARKLLIEAAWQHRRPYARPGERLLRQLDLVAPATRIRALEGNHRLHNKWEHFDERRKMSVKANTAIARELAGWCWSLAAPLQQGERMNAA

SEQ ID NO: 465319 - protein, 385 aa, unidentified
MRNVGLDLGARHIAWCEVVDGRVTRRGSVRRLDELEPMLGTATAPARVAFEASREAWHVHDVMVGWEKEPVLLDTTRIRRIGVGQHGRKNDSIDAEAIAMAMDAGRVPVAHVLSPERRILRAKLSVRGELVEMRARQVTLLRGLARAAGVRISSSSTDSFLQKLQEAPLNEATRALMAPLVATLAVAQKQLAQVDAQIAQVAKADPIIRLCATAPGVAVIVAATFVSVIDEAKRFRNAHAVSAYLGLVPGESTTGGKQRLGSITKHGNAHARTMLVQSAWLILRTGDSDDPLARWATDLAKTRGKKIAAVALARKLAGVLWAMWRDGTVYDPGFQARESAKGIHKDAQSQQLRAQAMARVAKKIQRRERTPSRASRAKTSRVAAM

SEQ ID NO: 465320 - protein, 407 aa, unidentified
MDITPIYPRVIGLDVHQAKISACAIAEQADGTVTVEHREFGAFQRDRRALAEWAKAFAPSVVVMESTGIYWKSPYAALERVGIVAWVVKARHVKTVPGRKTDIADAQWLAILARAGLLRGSFIPPAEIRHLRLIARQRQKLSGMLSAEKNRLHKVLADAGIRLNVLVSDLHGQAGRAMVKALIEGQPVHAILNCSGRLQASRAELFEALQPEHLTAAHRFVLTEIMAHSEELEARMSRFEQALLNGLAPWQTLLVLLQTLPGVDRIGAAMLLVEIGTDMAVFGSAERLASWVGICPGNHESAGKRKSGKTRKGNAWVRRLLCEFAQAAARSRCALKDKCTALTIRKGHKKSIVALAHKLLRIIYAMLKNHTPYQDRAIDYEAMTVQRNAPRWIKMLVKHGFITPVTA

SEQ ID NO: 465321 - protein, 331 aa, unidentified
MFPVGIDVSKNTLDLCMLYDGIKGRIKTRNIQNNRHSVENILRWLRLQHCGPEDVHVVMEATGVYHERLATELHDAGFRVSLANPHRSREFARGMGIMTKTVNVDAYMLACYAFLKKPHCWEPPAPEIRYLGALLRRRDVLLGDALREENRLEKYLSTDTPADIISSCRRMAQLLREEVSNIERQIKAHIKASPALRRDYTLLTSIKSVGPQLGMHMLVVLRSHNFVSAEQAAAFLGVVPIEKRSGTSVRSRLRMSKIGPPQLRAKLYMSALCGKIYNKRMRNIYDEMCLRGKPKMVAIGALMRKLVHWCYGVLKTGTVFNDEDLKPVLST

SEQ ID NO: 465322 - protein, 443 aa, unidentified
MSDLAVLDPRAAFVDVGSEKMHVSIAGGQPAVFGTVTSQLHSLRDYLAEHQVRSVAMEATGVYWLPLYGVLEAAGMEVVMVDGRQTRNLPGRKTDMKDCQWGATLHAHGLLRAGFVPPADIRRLQDYLRLRGDHIAAAAGHIQHMQKALERMNIKLHEVISSLTWASGLAVIRAIVAGERDPQVLLGLCDIRIRNVKAERVVESLRGDWAEEHLFALAQAIQCWDHYQGLIAACDHQIEVVLRQMPDANTPPSAASTQTGKSRTRPGVNAPDIADLRGILARICGAKDLTTLPAHSEYSVLQLIGEIGTDLTKWRTEKHFTSWLGLAPGSAQSGKRKVPVKRRRNRAGRLFCVMARSLARSKYVALGGFYRRMAMRRGGLVANKALARKLATLFWRVMVKGLDFVETGVAQYEAKVLETKRRILHRLARQLGQQIVPSPADAV

SEQ ID NO: 465323 - protein, 341 aa, unidentified
MEGDVKYCGIDLHGNNHWVVILDEQDRVLYSRRHANDLSRLLPVLAVHRSELSAIVVESTFNWYWLVDGLQEAGYRVLLANTAAIKQYEGLKHRGDESDARQLAHLLRLGLLAEGYIMPKEMRAVRDLARKRMQLVQQRTSQILSIESSLSRHCGWKLSSNRIKCLRQGDLDEMKLDALPLRGIQANVAVLRALQGQIESLEQVLGEYCRDEPGYPLLRTVSGIGTVLATVILLETGCVERFPDAGHYASYCRCVGSAYLSNGKKKGEGNTKNGNRYLAWAFVEAANFAVRHCEPARRFYQRKKAKRNSIVAIKAVAHKLARACYHMLKLQQPFCVERCFA

SEQ ID NO: 465324 - protein, 372 aa, unidentified
MTSIIYVGMDVHTTNYTLCCYSMEDDRFFAEVQVEPDAKNILKYLARIEKQQSRDCRIVCGYEAGCLGYSLYHQLHAHGIDCVILAPTTMMTKPGKRIKTDRRDARLISKCLAFHTYSPVYIPTEMDDAVKEYIRMRDDANSALARVKQQIIAFCIRHGKIHDGKSYWTNKHLEWLSSLDLGNKILSEVLQEYLIRYYQLREQMDMYDMRINELAQAEPYRQKVEKLGCFRGIAAHTALSFCVEVGDFRRFATAQQFASYLGLVPGECSSGDKQQYTGITKAGNSHLRKLLVETAQVFSRSATKSGKSVALKERQAKCDSLTVAYADKANARLKKKYFKIAMRSKANIAKTAVAREMACFIWGMMTDNISCA

SEQ ID NO: 465325 - protein, 348 aa, unidentified
MEHICRIGMDTSKHFFQLHGVNAAEEPVMRKKLRRKDMVAFFEKLAPTVVAIEACGGSHHWARLLSSFGHQVKLIAPQLVKPYVKRGKNDAADAEALCEAMSRPTMRFVPVKTVEQQAAVMLVGVRDRLIRNRTQLANSIRGYASEYGLTAAKGMAHLDPLIERIQADESLPVLARELFAAQAKEYQQLQAQIDEVDVKLKAWHHADECGRRLAQIPGVGPIGAALLMMKTPAPEMFRSGRQFAAWIGLTPKDHSTGGKVRLGVITRAGDEALRSVLVVGATALLRFVANGKSKSALSPWLGQLLKRKPAKLVAVALANKLARIAWKLMVTGQSYVRKSTPTTVAGAA

SEQ ID NO: 465326 - protein, 350 aa, unidentified
MKKICIGIDVSKETLDVTVIHIESYESVEKLGYSKFDNRPSGFRSMTAWVRKVIKSRGQMDEALFCMETTGSYDLPLCHWLHKNGLNVWRESALQIHCSKGFQRGKSDKEDSEVIAQYAARHQSRYTAFVPDAEAIADLKELICYRDSLVERRKECKVRLANKKETLVNRNSKAWKCIERLSKAEIKRLDKVIGECDEEIRNLMKEDEEMEKNYQHLTSIVGIGLINGAALIAYTGNFKKITTPNKMSCYCGCFTFYEDSGTSVHRKSPYRNACCKMLKGYLRMAAKSAMLANTELRKYSERLREKGKPYAVILNNVANKLLHIMFSLVKHDYDYEYNHEIVRRMEREIA

SEQ ID NO: 465327 - protein, 354 aa, unidentified
MNCKTKYVGLDVHQAMTVASVREEGGRIIARSILPTEESALVEFFQGMRGAVHVTFEEGTQAQWLHDLLVRLVDRVLVCDRRGKSRQGNKGDQADADELSELLRRGGLRAVYHGSPHRSTLRELTRTYQNVVEDSTRVMLRLKAMFRARGIKTPGRRVYHPKDRQEWLARLADDGARFRAQTLYAQLDVLRELRPEAKAAMVAEARRDPAWAVLGSIPFLGPVRVALILAIMRTPWRFRTKRNLWAYCGLAVVTHSSSDYELVDSRVVRRRRAPMTRGLNRNYNRELKDVFKGAATASTGRPGPLRDFYEGMVARGMREELARVTLTRKLTALTLRLWKQGERYDPAKLTKQAR

SEQ ID NO: 465328 - protein, 343 aa, unidentified
MKLSRVGIDLAKNVYQLHGVDRSGKTILKRRLKRHQWLKVLLDKTDPGCVIGMEACGSAHHWGRQLQSRGYTVKLIPPQFVKPYVKSNKTDARDAEAICEAMSRPNMRFVTVKTVEQQDMQATHRVREALKCRRTAKGNQIRGLVAEYGLVAPKQLSSLRAAIPCWLEDAENGLTHYFRCLLQGLWDDLLMLDDRLCEMDKTIKRLAKDNEDCVRLQQLRGIGPMTSTAIVATVGDARQYHKSRQMAAAIGITPRQHSSGDQHRLLGISKRGDVYLRTLMIHGARSVVANAKHKDDPLSRWVTEIAKRRHPNVAAVALANKNARMAWAMLRHKTDYHPDFAIG

SEQ ID NO: 465329 - protein, 337 aa, unidentified
MRDDMYYIGLDVHKRTISYCVKDAAGHVHQEGKIGSTRRELDAWIKALPQPRTIAMEATIFTGWIYDHLLPHAEKVKVAHPLMLRAIAAAKKKNDRIDAGKIADCLRCDFLPECYMTSTAIRDRRRALRYRNLVLKQMVQMKNRISGLLMETGVSYNKQRLHKLGYFTELMSGNEEVDESIRPLLKLSRETIVRSQRLDYALVSSLERDPLLAERLKRLRTIPGVGPITALTWALEIGDVSRFQSVKQAISYCGLCSAERSSADKLVRMPISKQRNKHIQQTLVEAAKLAPRYSHELALVYERERQRGNRNRATLAVARKMVAYMLAVEAQKTGLRA

SEQ ID NO: 465330 - protein, 366 aa, unidentified
MDKSSTVTMSGNEILKQRKLTIGMDLGDRSTRYCVLDEAGDVILERSVPTTKKGMDQVFATMPRSRVALETGVHSPWVSRQLTQLGHEVIVAHARNVRLIGESSRKDDRLDARTLARLARIDPQLLSPVRHRSAEAQVHLTVIRARAALVGARTALVNAARGLAKSYGERLRKCGTQQVRPDLAAGLSVELRAALEPLLEEIESLTQRIAAYDRQIEQIAKKEYPEVSLLQQVKGVGTLIALTYVLTLEDPHRFRRSRDVGCYLGLRPGRRNSGSSQPQLHISKEGDRYLRTLMVQGAHYILGPFGEDSDLRRWGLRLAERGGKNAKKRAIVAVARKLAVLLHKLWVNGEVYEPLRNHPTAVDAVA

SEQ ID NO: 465331 - protein, 424 aa, unidentified
MKVTYQTCCGVDVHKSFLVATIIKTTGGIEPSYQKKRFSTFNNSILDFKSWLLENECHDVCMESTGKYWVPVFNLLEDQINVTIANPKWVKAVKGNKDDTKDSKWIGDLFRLGLVKGSYIPCKSIRILREYTRYRYKLVSCRSSEKNRYQNALTVCNVALDSVVSDIFGKSSSSIIDYLLEQSGTTINHEEIASKLLKSLKSKEDAVIESIEGYQMTDSQKYRMRLIRAHMDYITAEINDVDKQIESLISSVPDYVKAIQLLTTIPGVKRDSTITIISEIGIDMSQFCNSKRLCCWAGLTPGNNESAGKKKSVRITRAGVYLKPALVQCAHAAVKSDKSPYYKTKYESLVKRRGKKRAIIAIARMILTAIYQMLSTGEVWNPSDLYKIDMPAPLVEKQKAKAIKQAKKLLQKEGLLPPDEPLAS

SEQ ID NO: 465332 - protein, 425 aa, unidentified
MNVDSTAEPRFAAYVAIDWGDSKHVWSLQPADSDRRERGAIEHSPEAVAAWAAMLSARFGGQPVALALEQSRGALVFMLGKYEQLHVYPIHPRAAAQFRAALVPSGAKDDPGDAELLLDLLVHHRARLRRLQPDTERTRLVQHLVEGRRKLVNERTRQTNRLTAQLKLYFPQMLDWFDVVGAPLVGAVLKRWPTLEALQKARPDTVRSFFTAHNCRSQELIEQRLEQIRQAVPAVRDRALIEAAQAMTKVLVELIATLREGIASFDRQIAQAVAAHPDFAIFESFPGAGPALAPRLLAAFGSQRDRYRSAADLQTFSGIAPVTQRSGKSQWVHVRWACPRFLRQTFHEWAAHSVGFCDWARAYYQQQRDRGNDHHAAVRALAFRWIRVAFRCWKDAVPYDDARYLQSLRRRGSPLIAALAKLELP

SEQ ID NO: 465333 - protein, 401 aa, unidentified
MIDTGDIYVFAGLDVGKGEHHAAAVAPAGKKAFDRRLPNTEPKLRELFAKLQAKHGTALAVVDQSASIGALPLAVARDMSRPVAYLPGLTTRQIADLYPGDAKTDARDPFIIADAARAMPHTLRAIDGEDETIAELEMIVGFDDDLAGEATRVANRLHGLLAQIHPSLERVLGPRPQHPAVLALLERFGSPAQIRETGRRRLVTLLRPKAPRMAERLVEEIFAALDEQTVTVPGTEAAALIVPSLAGSLAAVLDQRKLLAGRIEELLEDHPLSKVLTSMPGVGVRTGTRILTEVGDRSTFPTAGHLAAYAGLAPATRSSGSSIRGEQPSRRGNKQLKRAFFLSAFAALGDPASWAYYDKKIAHGKHHTQALLCLARRRADVLFAMFRDGTFYEPQPSAAVT

SEQ ID NO: 465334 - protein, 495 aa, unidentified
MKAKACKVKGKHRNSSKRGTKIAARGGAEGMEIVNPHAGGIDCGAQEHYVAVPPQSVEPGEPVVRCFSAFTEGLDALVEWLKACGVTTVAIESTGVYWIALCQKLEAAGIEVFLVNARHVRHVPGRKTDVKDCQWLQRLHSFGLLSASFRPEDAICRLRSLQRHRLNLISTAGAEIQHMQKALQQMNLHLHHVVSDITGVSGLRILDAILAGQRDASQLAKLRDHRVYKSTLAQMEAALVGDYRPEHLFVLGQSLQAYRFYQARTQDCDAEIERLLQQLAERFESSSVLAAELSQPEVLNDAAPSQNPRPVKRKVKRKPQANEPKINLADYLRRICGVDLTQVIGLNVLSVLLIVSEIGVDMSKWRSAKAFCAWLGLCPRNKISGRKVLDTRTCKVINRVATTLRLAAQAVGRTDTALGIFYRRKKAHLGPPKATTATARKLACLVYHLLKYKEQYREPDPATYQLKVQKTILAKIQKQAAALGYKLLPNALVPA

SEQ ID NO: 465335 - protein, 412 aa, unidentified
MRRVIGIDTHRTFGEVVIWEDGRLRHAGRVDMTRTALEGFGKSLLVTDEVVIEATGNCMAVSRVLSPFVKRVIIANPLQVKAIAHAHVKTDKVDAGTLASLYAAGYLPEIWTPDAATERMRRLVARRYQVVRHRTRIKNEVHSILYAYLVPHCPHADLFSGVGRAWLSRQPFPDDERIAIERHLSELDRLGEDLTVLDTAIADSALADPAINRLITITGINVTVAAGLVAAIGDIRRFASPQKLVSYVGLNPRVRQSGLGAAHHGRISKVGRSHARAMLVEAAWAAAKTPGPLHAFFVRIRAKRGHQIAAVALARKLTVLCWHLLTKDVDYLWARPALVANKVRSMELQAGRPQKKGNRRGPAYAYNVKQLRDQEMDVARRAEAAYEHFVGRWSPRPPKGTVRGRLKPAGLG

SEQ ID NO: 465336 - protein, 435 aa, unidentified
MRRSETALRGDVYMNFCPVAGIDVSKRFSDMCVLSPDNKIFAQGKIYHDETSINRANALLQEAEQLFSSKPVIVMESTSHYHLILFQFFSDRGYDVIVVNPLQSNSMKDFSIRKRKTDRVDAFKLAMMYRTKTLRPSQIPQTAMRALRQLCRERVEFLNDITRYKNRLTALLDQSFPGYDRVFSDVGGITSCAVLVHFPTPAILLTVEEAELVEVIAAASKSGYGFAKKKAELLISAAQKAQILGVHSCADETLIVCAIQMLRTLSESILQIDKAIENLLAQTKEIRNNVSLLQSIPGIGNHSAALLLGEIGDFTLFKKPKQLAAYFGLDPSERQSGTFRGTKNKLSKRGSPYARAALHMGVVNSICKHGKKPAPNPVLLSYYEKKCKNKPAKVVQAASMHKLVFIIFAVLRDQKPFELKTPEQHVMEQGFVKAA

SEQ ID NO: 465337 - protein, 466 aa, unidentified
MKKAGKSSKTGRRAVPMALQAIRPMVAGIDVGSREHWVCGPARADGEPNVRVFGTTTAQLKELVDWLAEQGTKSVAMESTSVYWIPLFELLESRGIEAVLVNARQLHNVPGRKTDFHDCQWIQLLHSCGLLRGSFRPSDAIVAMRAIHRQWANLVEERTRCVQWMQKALDQMNVQVHRAVTDITGTTGMAIVRAIVAGERDPVRLSMLRHHRCQKSVEDIARYLTGTWREEHLFNLTSALQLYDAIENLVASHEARLLDAVAALQPEERKDAKVPVHPNPAKEKSLQSHGDQEARTALWRFAGFDLTRIDGIRIGAARIILTEVGLDLSPFPSEHHFVSWLRLCPRRPISGGKPLSKKCNALGANRIAGALRMAASSLKRSKTALGAAYRRIARHKGASVAVFSIARRLGQLVYRMMRYGQDYIDVGEQVYDRQFQARRLAGLKEAARAMGYSLTAQPAQAQAPTG

SEQ ID NO: 465338 - protein, 340 aa, unidentified
MPGPRARIRKAGRSGVLNPSRKEHVNSTREIFVGIDVSKARLDIHVLPSGDTWDTKNQTDAITTLVSRLRSLQPTLIVLEATGGLERRVLAALLTANLPAVAMNPRQVRDFAKGMGYLAKTDAIDARVLALFAEKARPEVRSLPDAQTQELEALLVRRRQVVDMLTAEKNRLTSAPPSKRVIRAIRKTISCLESQLEDFDKNIDDAIRESPAWRGKDEVLKSVPGVGRVLSRTLLGHVPELGTITKKRIGTLIGVAPLNCDSGKFRGQRHCWGGRTEVRNVLYMATLSAIRRNPVIKAFYDRISSGKLRKVAIVACMHKLLTILNAMVRSNSRWSPALPA

SEQ ID NO: 465339 - protein, 369 aa, unidentified
MAKRSMFVGMDVHKDSIDISLAEEGRTGEVRHYGVIPGDLEAVAKVVRALRAPSRRLRFVYEAGPCGFGIHRYLTTEGEDCVVVNPSSMPKRSGDRIKTDRRDGASLARLHRAGELTAIYIPTADDEALRDLVRAREDAVGLATQAKHRLKAFLLRQGRRYPGRAGWTQPYRRWLADLSFPRTPQHIALQEYRNTIDETERRVARITIQLRELVPGWRWAPVVDALQALRGVSFVTAVGLVVEVGDIRRFTHPRELTAFLGLVPSEHSSGPSVRRGGITKAGNPHARRLLAEAAWAYQGVPRLGRQMLYRQEALPKAVCDIAWKAQLRLTGRFRRLVARGKAKPKVATAIARELTGFIWAIAREVPPPA

SEQ ID NO: 465340 - protein, 412 aa, unidentified
MLDVMFKQCAGLDVHKKSVTACVLIPGKKGKVRRGVKTFGTTTKSLQGLKSWLLEMGVTHAAMESTGVYWKPVYNILQGEIEVWVVNAQHIKQVPGRKTDVKDAEWIATLMRMGLLNNSFIPGEEQRDLRDLTRYRTRLTNERSAAVNRVQKVLEDANIKLSSVVTDIKGVSARRMLEAIIAGTQDSTEMAEMAKGRLRSKIPELVEALTGRVRAHHRFMLQELLQHVDELNRRLQQLNERIDQLTAPQALLIARLDAIPGVGEHTAEVLLAEIGDTVEQFPTDKHLASWACLCPGNNISADKRRTGKTRKGQKWLRTALAESAWAASRTKDTYLSAQFHRLRARRGAKRAAVAVAHSILTIVYHLIKNPNATFKELGGDYFVKRSKGDQKRRALKTLTTLGYVVELMPVAG

SEQ ID NO: 465341 - protein, 374 aa, unidentified
MKILALDLGKFKSVACEYDSETGRHSFVTIPTNPKALHDLMVDREPDRIVIEICSIAGWVSDLVHTLEIELQVASTNDERWHWRKVKTKNDRRDALKLAQLSARDELELVHVPQIEVRQWRALIAYRHHLVQRRTKIKNHIRDLLLREGQLLPRYRSAWTQAGLGALAAQAKPLSEVSTAELWRGELAAELAQFKAVQEQLTEVVAKLDALGAANHNVRLLQTISGVGPRLAEAVVTMFDDPHRFRRAGEVSSYIGMVPKQFDSGETERSGHITRHGNRLVRSLLVEVSWCALRHNAWARETYQRISGGKKSRKKIAVVAVGRKLLVRCWAMLRDQTEWRESELPAIATGSSEQPKEIVIAEVRTRGKRLRRAA

SEQ ID NO: 465342 - protein, 326 aa, unidentified
MNQASPASLGIDVAKATFDAALLTNGRLHQRSFAMTAPGFDALHAWMRKQGVEQVHACLEATGEYGAALALSLYEAGHMVSIVNPARIAAYAKSRLARTKTDKADAALIAHFCRTQQPLPWTPPPAEVRELQARVRRVEMLQEMAQQELNRLHSGLHSPAVRASLEATLAFVRQEIAQMQRLVQAQVEQSADLQHKQRLLCSIPGIGRWTAARVLAESEQVRTSVSARQLAAYAGLTPRERTSGTSVRRQPRLAKTGNSRLRRALYLPAIVAMRHNPAVRAFTERLRARGKRPMVIVGAAMRKLLHLIYGVLKSGKPFDPALAMAA

SEQ ID NO: 465343 - protein, 375 aa, unidentified
MTHSSTLYVGMDVHKDSIAVADVAQDHHAEVVSLGNRGTRPCDIDHLIRRLPSTSPHLVLVYEAGPCGDWLSRDLTQQGPVCWVVAPSLIPTKPGDRVTTNRRDAIKLARLMRSGDLTPVYVPTVEDEAIRDLCRARADAIRALKTAKFRLNAFLLRQDIRDTGRATWGPAHRRWLSEVVCPTPAQQMVFQEYVRAVTEHTERLQRLEQALHEPVNTWRLQPVVEALQGLRGVQCTVAVTLVAELGDLTRFANPRQLMRDLGLIPSESSSGDRRRQGGLTKAGNTHARRALIEGAWAYRSPAKVSRHLQWRLETLPETASGDQLEGPSAAVHTLAAADRPREKPPPSGGRHRPGTECVYMGYGPGGTPDSRDRDR

SEQ ID NO: 465344 - protein, 310 aa, unidentified
MDAIYVGIDVSKDRLDVHMRPSGEAFAVPRDGKGLEDLVARLVACPPTLIGVEATGGFETVVAATLTGAQLPLVVINPAQIRHFAQAVGQRAKSDPIDAAVIARFVEAVKPALRSVPDEQARLLAELVARRRQIIEMIVAERQREKRVENVRIRKSIARHIKVLEKELPAIDNDIDTLVRGSPAWRDKEDLLITFPGVGNTLARTFLAEVPELGALNRRQIASLAGLAPFVRQSGRWKGRSKIGGGRTALRAALYMAALSAIRCHAQLKLFYRHLVSAGKPKMVALIAVARKLITILNAMIRDRKPWQPA

SEQ ID NO: 465345 - protein, 353 aa, unidentified
MWGGIDTHKDSLAVGVIDEVGRPLAVREVANTTAGFVSLERLFAEHHVIRVGIEGSGNYGRAVAAHLVIAATTEVVEVPPALTFRERGGAPGTGKTDPSDAAAIARITAREPRLPPVRLTIGAAADLRALLDYRQQLIDERIRIANRVHVELGGLRPGDQSQLPSLIGRRRVATARRMLRADTCTRAELTRRRLDRLTKLDLEIAALKARIGQLVTASGTRLTSLFGVGPLVAARIMAEVVDVRRYRSPDAFAAANGTAPIPASSGRTVRHRLNRGGNRQLNKSLQIIAVTQLRGDTEGRRYYDRKRAAGKTRREAQRCLKRRLSDVVFHLLREDLNALEAPRPGQTGAPAAA

SEQ ID NO: 465346 - protein, 359 aa, unidentified
MNKVLKQVLGVDVDQRNLVITLGRLTHCLSVELYAHEIFPNNHDGFKSLLKWTQSKIDQTISFQVVMEATGVYHQKFAYFLDDRNICLSIVLPNKMSNYMRTLEIKTITDKTSSQAICRFGLERKLDAWVRPKEIFRKLQQLTRERSQIIDERTVAKNQLHAENAEIEPNKGTIRRLKARIKLFDKHIAEIENEIDDYLKKDNQLNKRIRRITTPPGVGKITAVIALAETNGFELIRNRRQLASYAGFDVKEKLSGTSVKGKSRISKKGNKYLRKAMYFPAMTAINYNQSYGDLYDRIVDRTGIKMKGMVAVQRKLLELIYTLDKNEIDFDPEYENSVSVKKTTHAIQTGSKAVLVEQI

SEQ ID NO: 465347 - protein, 415 aa, unidentified
MAFKIFRKNCCGLDVHKTWIYACMGITDTNGRTEYKQARFSSFTKGLQKLADWLAKYDCNDVCMESTGKFWIPVFNILEKTCWVTLAYPKYTKPQKGNKTDHKDAKWICDLYMCDMVNPSFIPPPDIRQLRDLMRYRSKLTNIMTSEKNRALNCLTVSNLKLDDVFSDVFGKAASAIISRILENPAMKITDVSGFRTKHMKATNEEIFAAVDGEMCAEQAEKLRIIRSHMDSLELCKLNLESLILSVAEKYLPQLGLVMTAPGIQSFAAIGIISEIGVDMSVFPTSKHLCSWAGLTPQNNESAGKKKTTRISRAGAYIKPLLVQCALSAIRAKQFPEVRNRYLALKKRRGHKKAIIAVARMLLTAIYNMLKKNEPYNSELYRKGDRPPAHREVSVEEAVFILQRQGYLVSAPPTP

SEQ ID NO: 465348 - protein, 499 aa, unidentified
MPSTNVAAAPILGAMKRKSIFRNESQKLDAAFIEAGLPERVLLVPLDFAKVTHYACFCDGRGTYIRKAFTVKNNQEGIDYLVDQIERTRVARSIKSKRHVIIGGEDSASYTRNFMDRLFELGYLTVRLDSKEVHRQAESVDSSTDKTAVRAIAKTMLNRDARQVGGSDPYAQLRGLTRQRRRIVHLSTAVKNRIHTHADCLFPGFLSKDSAVAAFSMASLELMANKFSAATLARKSEKTLTRTLSRQGVRSAPEVAAKLKEQARNAICADDASVQLSSQLIESELRLFQTLQSSLSQLDRESARILLQLPEAFAVSIKGIGITLASSIFAETGSLSQIQRCDQINAYAGIAPRVKQTGGPESPARIGGKRRNFNRILKDYTLQAGNHLYLHGPEELLHDAARRKLAGKAVDTAMARRFLRITRALAKSHCIYLPSHLREGQTGTNAEAQTRAQYIVKTWSDFLLKWKRLGLHEEAFAPETPLGDWRIIVQEIYEIDLPI

SEQ ID NO: 465349 - protein, 339 aa, unidentified
MELYAGIDLHSNNSVVVVLDEKDRVVYQKRLPNSLDKIVQALAGCGSPIKGVAVESTFNWYWLVDGLQQAGHVVHLVNTAAVKQYDGLKHSGDFEDARHLAHLLRLGILPTGYIYPREERAVRDLLRKRAQMVRTRTTQILSMQNLLARNLGASASGNQLKNWDDQAIDDLNVLPEQKLALKANLAVMACADQEVQALEREILKRAKLRQDYQHLLTVSGIGKVLALTIVLEIGDVKRFAAAGNFASYARMVNSRRESNGKTKGTGNTKCGNKHLAWAFIEAAHFAVRYDESIKRFYQRKCAKTGLAVVAIKAVAHKLARACFHVMHDGESFDVKRAFG

SEQ ID NO: 465350 - protein, 404 aa, unidentified
MNAVGIDVSKGKSTVAVLRPYGEVVVSPFDVAHTGSDLRALADLIKKLPGETKVVMEATGNYFESIARYLHEQNIFVSVVNPVLISDFGGNTLRKPKTDKKDSVKIASYALTYWLDLKEYTPQEDLRKSLKLLNRQYQQSIKLKTMMNNNLISLLDLTFPGINKLFTSPSRESDGHEKWVDFVLEFSHCDMISKLTIKAFAKKYKKWSDKNSYHFTESSCEKIYAFAKDCVSSVSSDKAIVFSVVQAAKMLISATENCHAIQSEMNRVASKLPEYDTVMNMYGVGKAVGPQLMAEIGDPRRFHSRKAITAYFGYDSENNDSGQKTTRSNPMTKKGSGALRRTLFIIMQVLLQTKPQDNPVYDFLIKKKSEGKHYYSYINAAANKFLRIYYARIKEVLNVSEQMT

SEQ ID NO: 465351 - protein, 403 aa, unidentified
MAESNVGIYGGVDTHKDDHVAAVIDRAGRLVGTASFPATGRGYRALVTWMAQFGSIVKVGVEGTGAYGAGLARHLAKVEIDVVEVNRPNRQMRRRRGKNDTVDAEAAARAALNTDATAIPKSHDGIVESIRVLRIAFCSACDARVRVSLQIRDVICTAPDELREALEPLNNNDRAALVARFRPGSLTDPVQATKASLRSLGRRYEELTIELDQLRGDLDELTRHANPALRRAKGVGPDVAALLLIAAGDNPHRLRSDAAFAALCGANPIEASSGRTVRHRLNRGGNRQANHALWRIALTRLATDPNTKAYATRRRAEGKTTRDIIRCLKRYIAREVYHLLTHPPAVTDPGELRTARLGAGLSLTDAARALDTIPIRISELERNIRRNDQLEHRYRTWLNLPAA

SEQ ID NO: 465352 - protein, 342 aa, unidentified
MDHFAGLDVSVKETSVCIVNDTGRIVREVKVASEPEALLAVLKNPAYHFERIGLEAGPLSQWLFSALAEAELPVVCVETRHMQAVLKAQINKTDRNDARGIAQMIRVGLYRPVHVKTLRSQKLRMLLTHRKLLQSKAIAIENDLRGTLRNFGLKVGMVGKVRFEARIQELVENLPDLAELVEPLLIVRRALREQIVILHRRLLAIVRDDEVCRRLMTTPGVGPVVALTYRATVDVPARFRKSKSVGAVFGLTCSKYQSGEIDRSGSISRCGDEMMRVMLYEAAQSMLRSKKWSWLKAWAMQIARRRGMKKAIVALARRLAVIMHRIWVDGTEFRWTRETAAA

SEQ ID NO: 465353 - protein, 343 aa, unidentified
MREVITIGVDLAKNVFQVHGVDADGGVIFRRQLRRGQMLPFFNKQPACLVGMEACATSHHWGREIEALGHRVRLMPPSYVKPYVKRNKNDMADAEAICEAVRRPTMRFVEIKTPEQQSVLMLHRTRHLFVRQRTTLINALRAHLAEFGIVAGVGRNGLARLLTVIENGEDDRVPPTARECLLALRDQLEMVKGQILDADRRILVWHRSSEVSQRLDDIPGIGPLIATALVASVPDPHAFKSGRDLAAWIGLVPRQNSTGGKDRLGHISKAGNRYLRMQLVVGALSVIRRAQQVGYTRRPWLTKLLQRRSTKVAAIALANKNARTAWAMMAHGTYYQEPVSQAA

SEQ ID NO: 465354 - protein, 449 aa, unidentified
MGKGSDLTRGDRRRNRRIEALRAVVSADRAVLAIDLGEDKQVAALMDHDRRILGRRTVNGKVHALSGLLQWAAAQSARYGFAGVVVGCEPTGHRWRALMGLADTAGMGFVCVQPLRVHLAREADDYTRDKTDHKDAVLIGKLIIGLDGYLPERADADWARLRHLGQRRFRLVGEITCSGRQMLDLLSCCWPAVLDCAAKPLVTTTWLACLSVTLHRCQGEPARLRRLGRARFAALARAQLSRFGAKNLSHRVVDRFFEALADRSGVPAQRPGALERARFLLDDWCSAHAHLSDVEQRMVGVLDAMGLTELVTTIPGISAVGAAAILAETGDLSRFASARSVVKHAGLNPAENTSATFRGITRISHRGRPALRTAAWRAVWGARRHNPVLAAKFVHLSSREHSRLSPAQAHLACAAALLRWLHAIVTKREPFNADVAAGRVTHNRLSLAA

SEQ ID NO: 465355 - protein, 388 aa, unidentified
MNYVGIDISKYKHDCVILTEFGDVINEGFTFTNTAEGFGRFQTEIEQCGKDNVHIGFEATGNYGINLKLFLDKIGYDYMEVNPLLIKKYIQSNSLRRTTTDRLCAKAIAGYLIEKQYRPNHSSFYSKFALKQLTRLRSSLVTGRSRYLIQITNVLDCIFPEFKPLFGNKFSVTALYILANYPSPDAIANMNSRSYDTLRRVSRGKFSMDKFVKLKSLAKNTVGAFDECYRIELETLIDLYSQIDSKIDQLETEITNIIEILNPPTLSIKGIGAISAAVIVSEFGDFLRFENPDKMLSFAGLEPGYFQSGLTEHNGRMVKRGSSPLRCVLMNCSRSITLHNEVFAAYFRKKMDEGKPYNVAINHVAKKLIRLIFALETKGEMFNADKLR

SEQ ID NO: 465356 - protein, 376 aa, unidentified
MTAMGPVLFTGLDVHNDSIAVSLAPSDSTEVRRYGIIGGEHDDVLKLANKLEAAHPGMLLKFCYEAGPRGFALCRCLRSHGLDCILVCPSKVPRKPGERVKTDRRDADDLARLYRAGELTGIYVPQPEDEAMRDLIRARYQVGKAQHRARQQLKMYLLRHNLRYGGGTSWTSAHLRYLAKIKMPFPVQQIVFQEMLEVITEATARLERYGQEIERAVPGWRWEPAVRALMSLRGMALLHAATLVAELGDFNRFEHPGQLMGYLGLVPSEHTTGNDRQQGGITKMGNGPARRALVEAAWQYRTPARLSPHLKKRQEGLPKAITDIAWEAQRRLHHRYTHLTRVGKKKSQVAVTAVARELAGFVWAIARQVKPHAAKP

SEQ ID NO: 465357 - protein, 345 aa, unidentified
MSYYAGIDVSLEQSSVCVLDGEGKIIREAKVASEPEALIAWFGSLGLAMTRIGLEAGPLSQWLFAAMKQAGLPVELLETRHVRNAFKTMPVKTDRKDARGIAELMRMGWFRPVHCKSISAQETRAILTTRTLIEAKLRDVEMSLRGVLRGFGLKVGKTTPTNFAERIKQLVSEHSNLQVIADALLAVREVLLREFRSFEKRVRTMARHDERARLLMTTTGVGAVISLTYAAAIDDPARFKNSKQVGAHYGITPKRYQSGEIDYTGRISKIGDKSVRTALYQAAHIILTRPVKASALKSWAMQLAKRIGMAKAKVALARKLAVIMHRMLVEGKPFDHKLPNQVAAA

SEQ ID NO: 465358 - protein, 344 aa, unidentified
MGDKNHKAVVIGADGREVERREVANTEAGVAAFLGGFAGATLAVETGTHCRWVAALAAKLGVKALVANARRVRAIWQSSRKNDWRDAEMLAKIARTEPSLLSPVRLRTADDQRLMRLAKARDALVRCRTRVVNQVRGFCKAEGARLPTCAAERFAKLKGELPAEIADVACHLFETLEHLNGKIRAYDGILREAVMRLRKEDAEAVMQVGGAGPVTAAVFLAAVGDAREFRKPRDAGAFLGLTPRQAQSGDADPQMRITKEGNAMARRMLVTAANRILSRNGADSDIRRHGMRIAERGGKNAKRRAKVAVARRLAVTMLALIRKKEAYRPLSDVAAADAAECAAT

SEQ ID NO: 465359 - protein, 343 aa, unidentified
MQVIIGVDPHKASHTAVAIDTDEHQLDHKKVRAARTQVEHLLAWAAPFPARTWAIEGADGMGYLLAQQLVASGEHVVNVPATLASRTRLLGTGHTNKSDPNDALSVAVTALRTSGLRQVRPVGHSEVLRLLAKRNTDIGDHRCRVVSRLHALLLEIDPGGIAKEINASDVERFLAEVHPASPAAQVRYDLAVELLTDIRRLDEQLKASHKRIKVAVAASGTSLTDVFGIGPIIAAMLIGYTGDIARFENPDRYAAYNGTAPIEFSSGGRTVHRLSTRGNRQLNHALHMAAICQLRHPGSEGRVYVDRHVAAGKTKKEAIRVLKCKISNTVYRHLAADAANRRG

SEQ ID NO: 465360 - protein, 377 aa, unidentified
MRKGTVFVGMDVHAETIAVAVAESRDGAARSLGTIANRPEAVRRLLGKLGDPAKLKVCYEAGPTGYALYWQLTRLGVHCDVIAPSLVPTKAGERIKTDRRDAERLARSYRSGDLTPVWVPDARHEALRDLVRAREAAKEDQLRAKHRLGKYLLRNGQRATEGCRAWTAAWWQWVRALELPHADQNTTLVDYVMEVDHQAQRIERLESAIDRAIEEAPAELRAIVDALQALRGVAKVTAVTLATEFGCFSRFERAAQVMSYTGMVPSEHSSGPRTRRSGITKTGNSHLRRVLVEAAWHYRHRPRICQRQHALQQTLAPKVAAIAWRAQERLHRRYWALSQKSKPTGKIVTAIARELVGFVWAIGTETEQQLQKRQRAA

SEQ ID NO: 465361 - protein, 333 aa, unidentified
MEETGECGEQELNHSDGEAERFYRDLKQRGISVRVGMEATGYSRWFERLLAELGFELWIGDPAEIKAKRVKKKKTDREDARLMRKLLLEDRFPRIWVPDPENRDLRQLLWHRHRLVQMRTRIMNQLQALAMNEGYRWKKKLWSEQGRAQLEKLSLAPWASRRRQELLELLDRMNPTIEELTAAVEREARKRPDVMRLMTHPGVGPLTALAFVLIIGTWERFPRGKQIGNYVGMIPSEDSSAGKQRLGHISKQGNSLLRFLLVEAAQAAARCNPDWRRRYFHLAMRRHKSIAKVAMGRRLAVRLYWMWRNGCEYSPKLEFGSYAGQLGTGHGVK

SEQ ID NO: 465362 - protein, 374 aa, unidentified
MAGIDLHGNNLVIGVIDQDGKRVAHRKLECDLEAVVNFLKPFKARLQSAAVESTFNWYWLVDGLRERGYPIDLANPAQIEQYSGIKHADDKHDAFHLAELQRLNILPKAHIYDVALRPVRDLLRRRTNLVQQRTALYLSFKSLYARTTGQTLPLNQLKGLEPKDGQALYEHPANQLIAQVQLEHIEALDRSIRRIERAVLERAREIPLYQKLLTLPGIGKILGLTITMEVGDIGRFKTDGDFASYCRVVDSRRLSNGRQKGQNNPKCGNKYLSWAFVEGANFAKRYDPNCRRWYDRKQARTSTVLATKALACKLAKAAWHVMASQTDYDARRMFPELTLKQSELRGAAASHRKGLGNGATGLIGSGGSPPVNPR

SEQ ID NO: 465363 - protein, 407 aa, unidentified
MNAVGIDVSKGKSMVAALRPMGEVAFLPREFLHTEVGLEQMAYAILALGEDTRVIMEATGRYHEPVAAALHEYGIYVCVLNPLFIKQSGGGSIRKVKTDKADAIKIAKYGLDNWVDLREYTPMDTLRQQLKLCSRQYDLYMKTVISLQNNLISLTDKTFPGVNELFSSPERADGHQKWVDFVITFWHCDCICRVSEKAFTERYQKWCKRKGYHFSVEKALEVYAGSCGHFTTLPKNDNTKLLIISAAQQLLAGKMTLAALRAEMTRLARQLPEYDTVRAMYGVGDKTAPALMAEIGDVRRFPRRSSIVGFAGIDPGVDESGKHSAKSVPTTKRGSPHLRKTLYQIVCTYLKKSPADEPVYQFLDKKRSEGKPYFVYMTAAQNKFLRIYYARVKECLEAFDAQTTEQK

SEQ ID NO: 465364 - protein, 348 aa, unidentified
MDATTVAVDLAKNVFEVVMANRDGRIVARHRLTRARFRACLETLPPTRLVMEACATAHHWGRVAQQHGHEVVLLPAAYVRPYVRRNKTDRTDAEALLEALRSGQLPPVPVKRVEQQALVALHRVRAQWMATRTARINALRGLLGEYGVVLPARTTAALTAAPTILADAALPIHLRQVLTELHEEIRALEAHLRAVDQHLRGLAAADAMVQRLRTIPGVGLLTATALVGSVGNIHAFRRGRQFASWLGLTPSEYSSGARRQLGGITKRGDRYLRCLLTHGARAVLVAARREPHDRPSTRLPQWARDVQQRRGHNKATIAVANKLGRLVWAVWTKDQDFRATPPRIATAA

SEQ ID NO: 465365 - protein, 415 aa, unidentified
MHTFEQLTHFAGFDWAKDHHDAVILDRQGVTVESITFAHTAQGWAQWREMIKAYPALGVAIETNQGAAVDQLLRSQVTVYPMHPKAAERYRERHVPTGSKTDRVDGWCFADALRVDGQHWRPLAPEDPLTEELRLLCRDEVELITQRTALVNQLQQALSEYYPAALEAFDDWTAPFTWDFVVAFPTPEELVKAGQRKWEKFLHSHKLWRPQTAERRLEIFGRADQFCGSAAVTRAKSRLAASTAKVLQSLQKQLEEYRRAIEQLFAQHPDHDLFGSLPGAGDKLAPRLLSELGTHRPEYPDAQSLQCVAGTAPISYVSGQVRRAEIRWHCNRHLRHAVHLWSDCSRKYCAWAQSYYQGQREKGKSHACALRCLGQRWLKILWKMWQSGQPYDEALHTLNQQKHGSWILQLKPNAT

SEQ ID NO: 465366 - protein, 463 aa, unidentified
MTLPPLAFAGLQTGNRGTRRRAPVSDRPGVSLAAAGPSLPLPLQGAELSLALPEALFFTGIDWAAATHAVCVMDAAGKITAEFTIEHSAAGIATLIRRLARYGDPADMPVGIERPNGQLVDLLLEAGHPVVPVSPNAIKTWREGEVLSGAKSDAGDAAVIAEYLRLRQHRLRVAARCSDQTKALRTVVRTRDDLVEMRVASTNQLSALLEAHWPGAKAIFADVESPISLAFLTRYPTPDAARHLGEKRIAAFCAAQGYSGKRPAAVLLARLRSAPAGTAGPALTRALRDAVLALVAVLTAQNAAIKSLSRSAAAHLSEHPDGTVFTSLPRSGQINAAQMLAEWGDCRQAYGGPDSVAALAGCTPVTKESGKHRAVHFRWACNKRFRKAMTTFADNSRHASPWAAKIYNDARANGKDHPHAVRILARAWIRVIWPCWLNAVPYDPARHGAAAALTTQATGQIAA

SEQ ID NO: 465367 - protein, 385 aa, unidentified
MKNAIHYVGLDVHKETIAVALCDEAGRATSLGTIPNQPDAIARLMRKLSSRATLSVCYEAGACGYVLCRQLKVLGIECIVVAPTLIPVKAGDRVKTDRRDAVKLARYLRAGELTAVWVPDEAHEALRDLVRLREAAKADQKRARNQLGKFLLRHGWQAPDGVKAWGAAHRAWMQSIWMEQPAQRVVLHENLAELDHQNERIARLDVALHAQIETLPAEMKQMIGALQCMYGVAELSALTVVAETGDLGRFRKAPQLFSYAGMVPSEHSSGGPGNERRGAITKAGNGHLRRIVTESAWHYRRPPKVSAELRRRRAGQDAVVIELANKAHRRLHDTYRRLVARGKPTPRANVAVGRELLGFMWAIAQRVQTQVQAQAQNTNPLSSRA

SEQ ID NO: 465368 - protein, 621 aa, unidentified
MSTAAAQTEVPAPILPLDSPPDDAHPVDVQVISPYGVGIDTHSKFIQVCVMYQHPQPGGNVTVRQREKEFSTHWHDLIAAKLWVLGILGPKADPDTLRYCIESTGTYHLPVLKAFGGIPSVVNPLLAGASHRKTDVLDARTLAHHSITGLWKASFIPTQQAQILRVLWARRREMTRRATRAANQLNNIVLRFGFTFGADVSMRSIQAENILSDLIDGAPVSVPGAPPDGLPPEVRPVISALLKDLRSDLNEAHHATVASENFIKSRDWPIAPPDTPDPPTPIHHVSRFTPHVSRFPHHESRITHHAPLAPRTSPLSPRTIPGTDLLALLRTVPGVGENTALTWLSEITDPRRFQNAKQVAAFAGCDPSLKISAGKVTSYVRRQGNLRLHQALLYAASGLLRRTDDPLGNWGRSIAGRHKKGGHKKACGAIARRLACGLWEVHRRGQPWSYDQYTLAQKIVCPLTPLGTLLPRKAVLVLRSAGIRNSHQLAAAYNDGKLAAIQGFGDTSIRAVKQWVLRTSKPIRPNAPNPNPNPNPQSLSEAVPSGTGKPKTYVLSPSLAFKKERRRKVSNDQDTQTSTGHPASRQGKDAFHRVPGIPARVTTRRAAGPAARARATARSTQ

SEQ ID NO: 465369 - protein, 356 aa, unidentified
MSTRIPSPSPTLPEIISIGSFGTRQCDINKFLKKLLAHSRNIVFAYEAGPCGYWLYRYLTKKGHTCLVVAPSLIPKRPGDRVKTDRRDAIMLARTLRAGDLTTVYVPNVVDEAIRDLSRAREDAKKDLKSAKHRLKSFLLRHDIRFEGKAGWGLKYLRWLGNVACETPAQQIVFQEYVRAITERHERVERLEAELRDQVDGWRLKPVVIAIQALRGIQFITAATLIAELGDITRFDNPKQLMGFLGLTPSEYSSGRKRKLGGITKAGNSHARRVLVEGAWSYRFPARVSRHLQYRLERVPQEVQDISWKAQVRLCKRYHRMIAGGKNKNKVVVAIAREMAAFVWSIAMRTPLEDVN

SEQ ID NO: 465370 - protein, 340 aa, unidentified
MGEVTTIGLDLAKHVFQVHGIDAQGTTVLRKRLRRGQVLAFFSRLPRCVVGLEACATAHYWARELGALGHEVRLMPAQYVKAYIKRNKHDAADAEAICEAVGRPTMRFVPVKTAEQQATQLLHRGREQLVRQRTMLVNALRAHLAEFGMVAAQGLRNVGELIAIVRDDGDTRLPDVARQVLQVLSAQLEHIEAAIAALERQLLAWHKTNPVSQRLASIPGIGPIIATAIATTVADANVFRSGREFAAWLGLVPRQNSTGGKTRLGGITKRGNRYLRRLLINGASANLLRSKATKADPWVIGLRRRRPPLVVAVALANKTARIAWAVMLRQNEYQPRAVAA

SEQ ID NO: 465371 - protein, 408 aa, unidentified
MDLTPMHKRVIALDVHQAKITACAVVEHDDGRLEVTKRDFGAFKRDRRALAQWALEIAPEVVVMESTGVYWKSPFAALEAVGIIAWVVNARHVKAVPGRKTDMADAQWLATLARAGLLRASFIPPVQMRQLRLVARQRQKLVGMCSAEKNRLHKVLVDAGIRINVLVADIHGASARAMVKALIAGKPMHEVLDCKGRLRASRDDLFEALSTEQFSVVHRFVAEEIMQHIEQIEQRIARLDQYLLEGLRPWQPQLRLLQTLPGIDEQGAAMLLVEIGADMSVFGSAERLASWVGICPGNNESAGKRKTGRIRKGNAWVRRLLCEFAQAAARTRCALKAKFDALAIRKGRKKSVVALAHKMLRTVYAMLTNGTHYQDKEVDYEALNVQRNAPRWIKMLRKHGFIATPATA

SEQ ID NO: 465372 - protein, 412 aa, unidentified
MYYVGIDIAKRTHVAAVMNEDNTLKMKPFSFNNDQSGFKKLLIHLQVLSCNLSDIMIGMEATGLLFENLYRHLQNLDYNVILLNPYQTAKFREMDTMKRVKNDNIDSVMIAALLKSGRFSEGYVSQEQLQSLRELYRHRNTIENQLKAIKRQTSAILTVVFPELETVIRDPFNVTGLVLLEKYPTAKHFHHASVERILKTFRGIKGNNFNRAKAQALLDASKRSIYSGIASDARALNIRMNITQMRLLQTQLEEILLAMQSLFAGTQVKQEDQEVMEELIDNLRTIPGVADKTILALLAECGNLDRFYAPKALIGFLGLYPTLSQSGDSTRNGRLAKRGASLAKKAIYLASIAAIRHNNEMRTIYMNYRSKGRAKKEAIIIVARKLLTIMYIIYTRNVPYDPQRVFVAKPNQ

SEQ ID NO: 465373 - protein, 369 aa, unidentified
MEKDTTYVALDDSKRKIVAGMLRPGDAQPELREIANDPRQIRRLFERLKREGPVAACYEAGVSGYDLYRQITALGVACAVMAPALTPRRPGQRIKTDRRDAAKLVRLFRAGELTAIHVPAEAEEAVRDLVRCRDDIRRDVLRWRHRVLKLLARHGRAYLAGKNWSQAHWRWVREQRFDLPPLQRAFEATLFALEQALARQAELDKEIEALAATAPYREPVGGLRCFRGIDTLSAMILLAEVVDFQRFRRPRELMAYLGLVPSEYSSGETQRRGALTKAGNSHARRVLVEAAWHYRHRPTIGRALASRSQGQPDEIVSHAWRAQQRLHRRYRHLVGHGKPTPVAVAAIARELVGFIWAALTRHESRRQAA

SEQ ID NO: 465374 - protein, 427 aa, unidentified
MNYTQNRKIMQVTEATLVLGVDIGNQWHYARAFDWREIELTRKVFRFSNDLDGYVAFEEWVQNVSEKSAKMAILIGCEPTGYYWFTFAKYVKERGMKLAFVNPYHVKQSKEMDDNSPRKTDQKDPKTIAKLVTEGRYSFPHIPEGIYAELREAISVRDQIVKALNATSSRIQRWLKIYFPEYLEVYKVFDSVSGLAVLKKVPLPKDVVELGVDGIVTLWREKKLRAVGKKRALTLVAAAKRSIGLAGGNCARLDLQLLLEDYSEKKEQLDRITAALQEETLKVPNVEKLLAVKGVGIITVAGFLAEVGDIGRFTSPKQIQKLAGLEPKENSSGKHKGRSSISKRGRRKLRRLLFQVVLPLIRSNEDFREVYTCYTTRKDNLLKGMQAMIAVSCKVIRIFYALLTRGMDYNSTRFRADITRPEPAKAA

SEQ ID NO: 465375 - protein, 354 aa, unidentified
MSQKLSAAVAVIGIDIGKNSFHIVGHDQRGAIVLRQKWSRGQVETRLANLPPCLIGMEACVGAHHLSRKLQMFGHDARLMPAKYVRPYSKGQKNDFRDAEAIAEAVQRPTMKFVATKSAEQLDLQALHRVRERLIGQRTGIINQIRAFLLERGVAVRQGPRFLRAALPGILATRTDVLSPRMLRIIENLAGDWRRLDERIDGLSGEIEALARRDQACTRLMTVPGIGPIISSAMVAAIGTGEAFSKGRDFGAWLGLVPKQISTGDRTILGSISRRGNRYLRVLFVQAAWIVLVRLKQWERYGLKSWIEAAKKRLHHNVLAVALANKLARIAWAVLNKGRAFECVKTDAMASRPA

SEQ ID NO: 465376 - protein, 389 aa, unidentified
MKIYVGIDIAKLNHFAAAISSDGEIILEPFKFTNDADGFQLLVSKLESFDKNSIIIGLESTAHYGDNLVRYLVAEFYQVCVLNPIKTCQMRKNNIRKTKTDKVDTFVIAKTLMMQDDLRFVSFYDLDMMDLKALGRFRQKTIKQRTRLKIQLTTYVDQVFPEMQYFFKSGLHQHAVYALLKEAPSPKEIASMHMTHLANLLKVNSHGHFTKEQAKELRVLAQKSVGANDSSISIQITQTIQQIELLDSQLEKVEAEMTDIMRFNDSVIMTIPGIGYINGGMILGEIGDIHRFSNPNKLLAFAGLDPSVYQSGNFQAKTTRMSKRGSRVLRYALVNAAWNVVRNNATFKAYYDAKRAEGRSHYNALGHCAGKLVRVIWKMLTDEVEFNLE

SEQ ID NO: 465377 - protein, 386 aa, unidentified
MFFVGIDVASKKHDIAITSHYGEIITEPFTIDNDLNGFKKLRNEIFSHTESVDDVCIGIEETGIYSKNISNYLALNNFIVYLINPVLTSNSRKSQSVRLTKTDKIDSLAICRFIEFNLKRLNPYTPTLYIFEELKALSRARLDIQKRLIKSKTEWTRLLDITFPEFRKIYDQHSKWVYKLFSEYSSPTDISHMHSKTLLSIIKIKGDRISAAEHIKYIAKNTIGHQNSTYKFLIKNMLDDIFHYSKQMESLEKEITKIIDEHFSNILTVPGVGHIGEIGDINRFKSPSALVAYSGLDPIIYESGKFQAKNVSISKRGSRYLRTGFFTATKISIINPNIENNKFRDKYMKKIAQGKHHNSAICHATKNMINTIFSLLYTGNNFDFNL

SEQ ID NO: 465378 - protein, 466 aa, unidentified
MQNNYILYVGMDASKGKADAAILKVSDRRSVKPKFLRKKLSFKFVKSEVTSFLETVRSYSDDNCTSICFALEVTGIYSTNVYNFIKDSLNDDESIKFLNTDFVNQWRNAHNIAKSDPLDAQTISTIIGTDSDVQYVNDNVFENKNGYQDLKALVHRHYQIRKIYSQEINRLIAQCDCLFPELQYVFEPKSAAFIAVLSSYPTTHDIINASRLEVFNVVYEATKHRCSMDKIDKLFDLCHDTLVPDNISSYGRSIILDLVENIKNIKGQLKMIERYIRDVASLNPAYKLLLSITGCGPITAATVIAETGDIKRFKNADCFVSYSGTSPRNKRSGTSVETMGKISKKGSRYLRHAIYMIAEFARRHNPVLKHQFERIKNGNKKRHKLANIAVANKIARYIYSIMKNESSFVILHEHIMRLPEETRNTFFNSISLDFPENTRKQIYQYSDINGEIHKFVYTKSEETMII

SEQ ID NO: 465379 - protein, 359 aa, unidentified
MKKIFIGVDLHKHQITVCFLSADGKERIVVYFFSDFGIKKFVEELIILKNYGYELELAVETTGNSEYFHNQIKSYVDKILILNTLKINPLMKSYKKTDKNDCRNIAFFLSKDMLEGYSVNIPSEEAKALRRILKSRYILMRARTGIKNQIHGILLSNGEETKKRFLTSKKGRNNLRAMNYPEQMILNMLIENINKLDAQIEETESMIENEIKKRKRENEIITSIPGIGEIISASIIAGIDTIERFPDAKSLCAYVGLVPYVNNSGEEVRHGKITKTGPGYMRTALVQAVLAMLRSKEMKNHPLILNYYKMKESKCSGKAIIATARKIISIVWTLLKRNETFDVNFFNKSKDINKEQVGA

SEQ ID NO: 465380 - protein, 373 aa, unidentified
MSDYSAFVGLDVHKDTIAVAVADAGRTGEVRFWGEIANTPDAVASMLRKLGGRHPLMHFVYEAGPCGYGLHRQIMATQHHCEVVSPAHTPRKPGDRIKTDRRDAIILARLSRAGELTSVWVPDTIHEAMRDLIRLRQAMVKDLRAARQRTKSFLLRHGRVFKGTSWKRSHKIWLGNQSFAHPAQQIAFQSYLNAVNQAQARRDEVDVQLHHFTADWSMAPVVEALQALRGVAFITAVTVVCEVGDIRRFAKPRQLMAFLGLVPGERSSGETRRQGGITKAGNVLARSVLIEAAWSYRTPAKIGAQMMLRQEGIPQAAKDIGWKAQVRLCGRYRRLMARGKKSALAVTAVARELVGFIWAIAHITEPTSAEGVA

SEQ ID NO: 465381 - protein, 359 aa, unidentified
MKPYVLKTKYACGVDLHSRQMYVCIMDKDGNIFKHTNIKGNNLDFFLKLIEPYKSDLTVAVESTFNWYFLKDFCDLHNIEFVIGHALYMKHIHGGKAKNDRIDSRKIADLLRGNYLPPSYCYPAHLRSARDLMRRRNHMVRERAALLSHISIVGHQFNMDIKDTHKRKEVRKELLKMFKFDKNTHSNIKADLEAIEAFDKIIKRLDLEIRQHALTEARHSFQILKTIQGSGDTISLSILYEIDDINRFKTVKDLTSYARLVKCKSESAGKSYGYSGTKIGNPHLKWAFGELALYSAIHCPEIKIFFNKYLLNKYSKSKAYSVLAHKLGRAVYFMLKKGTAFDPYKFCLEFAQEYRRNPV

SEQ ID NO: 465382 - protein, 338 aa, unidentified
MAIVTLGIDLAKNVFALHGVGPTGKPELVRPEIRRSRLLELVASLPPCLIGMETCSGAHHWAREFEKLGHTVRLMAPKFVAPYRMAGKRGKNDANDAAAICEAVTRPNMRFVPIKTIDQQAELFVHRARQGYIEERTALINRLRGLLSELGIALPLKASLMRRDIHSVLEDLPGWCNVVVGDMLVHLADLDERIATFDRHLAKIAKQNDRARLLMKLAGVGPTTASAIVASIGNGHDFKNSRQFCAWLGLTPGQHSSGGKARLGSITKAGDAYLRTLLVMGARSLLMKAANHTDSVSRWAIKLKERRGFGRAVVAIAAKNARMCWAALRLGESFRLPT

SEQ ID NO: 465383 - protein, 311 aa, unidentified
MGGVNAAIDVGKHQLDVALGSDGELFSEPNQPRAITRLAKRLAQVGCERVLIEGGSYQNVLVAALRAAGLPVVIINPRRVREFAKSIGQLAKTDHIDARVLARYGERIEPPVRELPDEQSQALRGLWVRREQLIEMLVMEENRLEHAPKALHRSLRAHIDYLRKQIKQSDSDLDREVRDSALWDQYELLSSVPGVGPVLSVALLSDLPELGRLNRSEIAALAGVAPFNCDSGTLRGQRKIQGGRKRLRRVLYSATVAAVRCNPVLRPFYQRLRAAGKPAKVALVAVMHKLLLILNAMLKTKTAWRPPCLVA

SEQ ID NO: 465384 - protein, 420 aa, unidentified
MNQESGKPFTAYIGIDWASTKHDICLQVAGTEARTFERITHKPEAIEAWAQALYQRLGGPIAVALELSEGPIVSALEKYDFLVLFPIDPKRLAKYREAFTPSGAKDDPTDAEFALDYLMRHPEKLKALKPQSIAMRKLRYLVEARERLKGDQSRCVNRLVQALKHYYPQVLDWFNEHNTVVFCDFLRQWPTLEKAKRARRTRLERFFADHNVRFAHVIEDRIQAIKAATPLTRDEAVIDAHRLQVEILIEQLTLTIQALKRFDQEIAAIAEQLPDYALFSPLSGAGKVIGPRLLAAFGEDRDRYHAAAQLQKSSGIAPITKRSGNTTWVHWRWQCPKFLRQTFVEYAAQTINKSAWAGAYYRQQRAKGASHNAAVRALAYKWIRILYRCWYDRTPYDESKYLEALRRSGSPLLKHLAEPA

SEQ ID NO: 465385 - protein, 409 aa, unidentified
MRIIGLDIHRAFAEAVAWDEGELKRLGRVDMRRHLLEAFAKKLSKEDVVVIEATGNASSVAAVIAPHVKKVVIANPKQVRIIAHAKIKTDTIDASVLAQLYASGFLPEVWIPDEATQALRRQVTRRNQIVRQRSRLKNIIQSILHSHLIPSCPHADLCGASGRAWLFHQVLPEDERLAVERHLREFDRLGDDLKVIERDLARSALGDEGVKRLMTIPGVDMVVALAIVAAIGDVGRFEQSQKLVSYLGLNPSVRQSGPGPAYHGRITKQGRGHARGMLVEAAWAAARAPGPLHAFFLRVRARRGQHVAAVATARKLAVLIWHLLSKGESYVWARPALHARKLRDLELKAGYKAARGQRGAAHAYNIKSHRDQERRWVEQAETAYARFVSGWNPRGPKRVRTGAATEVRR

SEQ ID NO: 465386 - protein, 433 aa, unidentified
MIKINYMSTLFVGIDVSSKSNVVYAMDFDENKYIDSSFSNNQPGADELAEMIAACMKKHKSLNTIIIALESTSVYSIHIANFLSSCELLMPYKPYVYCLNPKMTANYRKTYVGMDKTDHMDAFLISDFARVGRTKKCEPWRGSQFLALKRLTRHRLHLAECITREKTYMVSNLYLKFSELQLLDDDSQPFSNIFGATSSAVLTEFLSLQEIIDSPEEELLQFLAEKSRNRIADISKTSELLKKAARDSYRLDKCMYEPLNVSLASSFNCIQTYQKEIKLIDQAIEKCINGMNPNAFLILKSIPGIGPVWAAGILSEIGDITAFHSSDALAKYAGLTWLKNDSGDFVSEDNRVSKAGNTYLRYYLGEAANSVRRNVPEYAEFYSRKYAEATKHQHKRALALTSRKFVRLVFGLLVKNQLYTGEKLDNESNTESN

SEQ ID NO: 465387 - protein, 346 aa, unidentified
MAEAITETIGCDLGDKKAEIFIWRADGTSDRPAPVKMTGAGVRKFFSRPKAHVVIEVGTHSRWVSELLKDLGHQVTVANPRRLKIISESNSKTDRTDAELLARLGKADVELLSPVQHRGRQAQADLAVAKSRDVLVACRSKLVNHARSLVKVSGERLPSCTAESFHRKTRGLIPEQLKPALEPIYRGLEKITEEIKLHDEALEGIAKKYPDVEILSQPDGVGLLTALVYLLTIEDKSRFKKSRMAGAFIGLRPRKDQSGDTDKQLGITKGGDAFLRRLLVSCANYILGPFGKDSDLRRWGLELAKRGGNNARKRAKVAVARKLAVLMHRLWVTGEEYVPLNYAKAA

SEQ ID NO: 465388 - protein, 359 aa, unidentified
MQTQINKLDFTGQNIYVGFDVHLKSWKVTIMTEHNTHKTFSQPPQPKVLYQYLKKNFPGGTYHSAYEAGFCGYWIHNNLKSLGINSIVVNPADIPTTDKEKVQKEDSRDSRKIARTLRSGDLKAIFVPSTKTLEDRCLMRTRATLVKDLARNKNRTTSFLYFHGIELPEAFKSNQTRWSKRFITWLDNIEIPEPSGKNSLNAIISASKNLRLSVLEVTRLINELSKTESYHEKVMLLRSIPGIGLLTAMTLLTELETINRFESMDTLCGFIGLVPSTNSSGDNDIVGDITRRGHIVLRSAIIESAWVAARLDPALSKSYNDYCKRMSPNKAIIRIAKKLLSRIRYVLKNKKPYVCSIVK

SEQ ID NO: 465389 - protein, 390 aa, unidentified
MIYVGIDIAKLNHFASAISSDGEVLIEPFKFTNDGDGFQMLVSKLDSLDAEPDSIIIGLESTAHYGDNLVRYLVAENFQVCVLNPIKTSTMRKNNIRKTKTDKVDTYIIAKTLMMQDSYRFITFYDLDLMDLKAMGRFYQKTIKQRTRLKIQLTAYVDEVFPELQYFFKSGLHQKSVYALLKEAPTPEAIASMHMTHLASLLVKTSHGHFTKEQAKELRVLARKSVGASDSALSIQITHTIAQIELLDSQLNKIEEEMTEIMKFNDSVIMTIPGIGYINGGMILGEIGDIHRFSSPGKLLAFAGLDPSVYQSGNFQARKTKMSKRGSKVLRYALINAAHNVVKNNATFKAYYDAKMAEGRTHYNALGHCAGKLVRVIWKMMTDDLEFNLD

SEQ ID NO: 465390 - protein, 334 aa, unidentified
MNTETEFIGMDIHDGYSQVAVMDPDGTVLDSRRLSDADVENFACEHTGAKVAIEASSVYRHIYDTLDEYVDVTLVNPKKTRVIAEAKVKTDKIDAEMLAHLLRANLVAESYVPPADIRRRRDLVRERKRLIDDRTRYKNRIRSTLKQSGNAMRRSPFSNEGRELLAALDLDPIDRKRIESSLRMIDELSDEIATYDAEIRKIARDDKQVQLLETITGVGSISAVTVTAEIGEIERFGSAEKLVSYAGLDPTVQQSGQRETRGPISKEGSSVLRWMLVQCANNVVRHRNEYFVEFFDRLNRRKNQYIARVATARKVLVSIYHMLTRGEEFAPAGG

SEQ ID NO: 465391 - protein, 422 aa, unidentified
MEFNCPVVGIDVAKEKSCYCLLSPSGSVYRKPFEASNDGKGLSHVLAIIKKMEETFGSWPTLVIESTGHYSARLVHFFTRNALQVILINPIQSHSIKNSGIRKTKTDKLDAEELARLPFILNLRPYEPKTPEMANLQTLCRTLHHLSEQKVATLNQLVSLLDQVWVGFTEIFPNVSSKTSVEFLTNYPSPAALLAAGQDDVIRLIMTNSRRGPAYAENKYALIRQKAQESQVFGIQSAALFICITVYVSNLKHMTEQMERLQNEIEALSVQIPDVDLLKSIPGLGANLAPVIAAEIGGINRFNKAKQLVAYCGVDPCVRQSGKFTGSHNKVTKRGSPYLRRALYIAATVAIRKSANGTPVNSVLHDYYQEKIKNKAKKQALGAVMNKLLHIIFSVLRNKKPFVLITAEEQRARFKQKLSLAA

SEQ ID NO: 465392 - protein, 346 aa, unidentified
MKQYIGLDVSLKETFIVVREGGKRIWRGKCPSDPEIIAQTIAKRAPSAQRVVFETGPLSVWFYHALTEKGVPAICIDARHAKAALDMAPNKTDQNDADGLAQIAEVGFYREVRVKSFDSMLVRTLIAVRDQMIKMTTKMSNQIRGLMKTFGLVVPKSSGKVFEGHVRELLASNPGLEAIILPLLEAWRAMRARVAELSKQLIASARASQQCQLLTTVPGVGAVTASSFVAAIEDPTNFAKSRSVGAWIGLTTRRYQSGEVDYDGHISKRGDNHLRAMLYEAAMVILTRTHADSALRNWGLKLREKIGFKRAAVAVARKLAVIMHIMLKTGELFNPSIEPASLEDAA

SEQ ID NO: 465393 - protein, 320 aa, unidentified
MSNISPICFVGIDVSKDSLEIAVRPSGEHWSIKHDPEQFPALVEKLTKLAPSRIVLEATGGLETLVATHLASAGLPVCVINPRQARDFAKATGQLAKTDGVDAHLLAHFGEALQPPLRDLPSAEAQLFEALLTRRRQLVQMRTAEKNRLAFTNHPRKIIKDLEAHIAWLDKRISQSDDELKSALQASPVWRTNDQLLRSVPGIGQVVSRTLLAELPELGRVSDKQITALVGLAPYPNDSGGRHGKRHIRGGRSSVRSALYMATLSAIRSNYRIRAFYERLLAAGKEKKVALTACMRKLLVILNAIVKQQQAWRTYTLLNA

SEQ ID NO: 465394 - protein, 323 aa, unidentified
MSEPILGVDIAKKKYDLALLFVNGKLKHKVFKNNQEGFGELSLWLKRQEVDHVHVCMEASSTYGDELATHLYDQGHIVSIVNPARIKGLAQSELLRTKNDKVDAGLIARFCKAMHPEPWTPVSPGIKRLQALVRRIDALISIRTQEMNRIDVSHESVRSSIRDHIAYLHQEIGNLKKQIATYITNDPNLKMKRDLLKSIPGIGEATIAAILAELHMFEKCDRVQKIVAFIGLAPREMISGSSIKGKPRICKTGNSRMRKVLYMPALVSIQYNPVIRVMYERLKKNGKNGKVIVCAIMRKLVHIIFGILKSGQPFDPNFKPNYT

SEQ ID NO: 465395 - protein, 348 aa, unidentified
MLIIGCDFHPSWQQIAWLETETGETGESKLVNGDGEAERYYRALTEPAVVGVEACGNSQWFVEMLQKQGHEVWVGDAAQIRASYVRKQKTDRRDAAHILRLLAEGRFPRLWVPSAEQRNVRQLLIHRHKLVEIRTRVKNGLQHLALNRGLQKKRKLWSAAGQQALRELPLEGWAARRRQDLLALLGSLDAQIGELDRAAEEVCQRDKMALLLRTHPGVGPITALAFVVTMGDVARFRRGKQVASYLGLIPRERSSGGRQRLGGISKQGNRFLRFLLVEAVHNVVRQDEGFRQQYRQRCHRMEKSVAQVAAARQLAVRLYWMLRTQTPYPEIVRIESCPPVALVVRHSG

SEQ ID NO: 465396 - protein, 366 aa, unidentified
MGKQDNSFKVVHPNAAGIDVGSRSHMVAVDQSKENVREFGIYTKDHEELITYLYAQGIMTIAMESTGSYWQTLFSALQAAGFEVLLVPGNQTKNVKGRKTDVLDCMWIQKLHSLGLLSGSLLLSDSFQQLRTYYYHRSHLVEQSARYSSKMQKSLRLMNIRLDVAINDITGQSGMAVIEAILSGVRDPERLSALVSIRVKRPRQEITDALHGWWRDELLFELQACLEFYKLYEHKIKECDLVIEQLLIKFAPKMDITEVEQKQLKANKKRRDKHAPSFNLSHLAFNYFHTDLFAINGISYNTVLCLLTNMGHDLYKFPTAKSFACWLGLVPNNKISGGRIISNRTASGKNYIAKALRHAANSIGNQ

SEQ ID NO: 465397 - protein, 312 aa, unidentified
MKKVFIGIDIAKDTIDISVLPSGESWTVGTTPTELQETVDRLAALKPTNIVMEATGGYETRLAASLATAGLPVAVVNPRQVRDFARALGILAKTDAIDAHVLALFSEKVQPECRPLPTDDEHALKELIIRRHQLVDMRTAESNRRQQIVSKQVYESITTLIESINHELDVIEREIDNRIKASPVWRAKDKLLQSVPGIGKTTASMLIVALPELGYLNRRQIASLVGLAPMNRDSGTFRGRRMITGGRALIRAGLYMPILSAVRYNPKIKTFYNRLIAAGKLEKVAITACMRKLLTMLNAIVRENEPWHPIPA

SEQ ID NO: 465398 - protein, 486 aa, unidentified
MKKDITYVALDDSKNSIVAGLLRPQAAEPELRQFPNEPKQLRRFFTRLQREGPVSSCYEAGPAGYELYRQLTALGVPCQVMAPALTPRKPGDRIKTNRRDAAKLVRAFRAGDLTPIRVPDEAQEAIRDLLRCREDVKEDLLRWRHRLLKFLARHGRGSREGRHWTQRHWAWLRGQRFADPVLGRTCQEYRFTVEQLLTRRADLEREIATIAQQAPYRTPVGWLRCFRGIDTLSALALLIEVGDFQRFPHPRQLMAYIGLVPSEASTGDRERRGSITKAGNTHVRRVLVEAAWHYRHPPRLGTALARRSQGQPPAVLAQAWHAQRRLHRRVPPPRRAREAAARRGGGHRPRTRRVPVGGPDPDRGARPGGIAAGPRGAMRAYPEATEARRTMQARLESPRRFYATRGLRPGGLAPLDGGSSRRSTVMRPPVSTGVTRAYQSDSSSKPPHRRPAPGPQDPLDARPRPLEHAAPHLRARRVLQRAGSKP

SEQ ID NO: 465399 - protein, 335 aa, unidentified
MKHYAGLDLSMESTQVCIVDENGRKLVSEKVESSPEAIAMMLERYGPLERAVIETGRMSPAICLGLRELGVPVVCIDARQAHQSLKAMKANKTDPHDAAGLAQLARTGFYKEVHVKSPAAHGVRSVITARSHLVEARVRLDNTIRGLCATFGYRPGAGQGRAFLERIMQAAHIPGLGDAIASLLSVRAELVEQIKEMDRRLRVIASQSQACEILMTIPGVGVQTSAAFAAAVDEAGRFRQSRNAGAYFGLVPRRHQSGEVDWTGRITKQGDGTVRKLLYEAANSILTRSRETFALKTWAMKIAKRRGLKKARVALARRLAVIMHAMLRDGTLFQA

SEQ ID NO: 465400 - protein, 336 aa, unidentified
MFKFKAFVGIDISKKTFDAALIFQEPGAFIHRCFAQTTEGFTAFLKWLNDQQVTMQDTLICMEHTGLYTNGITRFLAEAKAHLWVEMAIKIKLSMGLQRGTDDKASSVTIAEYAMRFSDKAKLWKPEDTELSSLRHLIGQRDRIVNSLRQLRVPVEEMKSCGSARQGKELERLQLPAINGLKKAKKKIEKAISDFIAAEEKISKNITLMCSIKGVGLQTAVSIYTYTRGFTMFENAKQLACYCGVVPFGKTSGTSVRYRPGVSHYGNRKLKSLLHLCAMSALRWDKEIKAYYERKVKEGKNKMSVINAIRNKLLLRIFAVLRDQRPYVENYQLAGV

SEQ ID NO: 465401 - protein, 406 aa, unidentified
MTSCSYFAGIDWASQSHVLCVIDAAGGVALRLEIAHSREGIEHLIRQLKSFAGNGGLAIAIERPSGVLVDALVEAGLRVVPIHPNVLKASRPRYRSAGKSDPGDAYMLADLLRTDGHRFRALEPQNDKIRALRALVRTRDDLVAERVALANQLRSLLESFWPGAAEIFFDIDSPIALAFVARYPTPQSTTHLGEKRLAGFLAQHGYCGRRPAGALLERLRSAATGCTGELEAEAKGELARSLASILERLVAELAKLTARIEHTVASLPDGQIIMSFPRSGRVCAAQILAELGSVRERFPTEAQLAAEAGVAPVTYQSGKQRSVTFRWACNHRLRRAITCFADQSRHANTWAADVYHRARSRGCDHPHAIRVLARAWVRVLWRAWFTKTPYQPHLHHTAAAFAATTG

SEQ ID NO: 465402 - protein, 394 aa, unidentified
MIYAGVDIAKTDHVIGAVDERGAEACRPMPFKNTEAGLERAVAWLEGLAESPSDVVVGMEATGHYWMACYSFLVARGYSVAVINPMQVKAVRKLKGLDKVKNDRVDAGLIAEALRISQYDETRLATDEVASLRSLSRYLQSLRGMVAELKTQCICLMDAHFPEYAGVFSDMFGAGSRAVLSKSPLPFELARRRADSLARDIAEASRRPGKSAGIAAEIKAAAKSSIGVRLGQEAASFQVKSLIRQIEFADSECAGVEARLRSLLDEVEPLVLTIPGVSYVTGAQIVSEIGDVSRFRNAPALVSYAGLNSSVSQSGQFDSGGGPITKHGSPYLRRALWLAANRARQHDPGLRAFYDRKRAEGKPHRVAVTAVARKLCHIVFAVMRDQVPYDPGRE

SEQ ID NO: 465403 - protein, 331 aa, unidentified
MDNVTTVGIDLAKNVFSLHGVDASGAVVLRKTVSRARLMETVAQQPACLIGLEACSGAHEWARRFQALGHTVKLMAPRFVAPYRKNGKNDGNDAEAICEAVSRPSMRFVPIKTLEQQAVLCLHRVRQGFVEERTATINRLRGLLAEFGLVLPQKAAEVRRRATECLEQLPPHAACAVRDLREHLRALDERVKEYERSIEAHARDHDGAKLAQQRLGIGPMTASAIVASVGDVREFKNGRQFAAWLGLVPRQHSTGGKQRLGHITGRGDPYLRTLLVMGARSVLQRASSQSDPLSRWALAVRVRRGYHRACIAVAAKNARVVWAMLNQHARA

SEQ ID NO: 465404 - protein, 326 aa, unidentified
MEHELHYIGIDTAKEKLDVDVLRPDGRHRTKKFANTTKGHDELVSWLKGHKIDHAHICIEATGTYMEPVAECLYDAGYIVSVINPALGKAFAQSEGLRNKTDTVDARMLAEFCRQKRPAAWEAPHPLERALRALVVRHQALTDMHTQELNRTETAREVQRPSIDAHLLWLEAELKRLEKQIIDLTDDHPDMKHRRKLLESIPGIGEKTSAVLLAYIGLKDRFAHARQFAAFAGLTPRRYESGSSVRGASRMSKAGHVSLRRALYMPAMVATSKTEWGRAFRDRLAANGKKGKVILGAMMRKLAQVAYGVLKSGVPFDASRHNPVAA

SEQ ID NO: 465405 - protein, 336 aa, unidentified
MRYVGLDVGWSESSIHVLDGKGKKIYSRRVRGPWQKVLKVLEEIEKPFSICYEASTGYGWLYDRLIKMAERVQVGHPGHLRLIFRSKRKCDKLDAEKLAKLIFLDEVPQVHVPAAEIRSWRAMIEHRTGLINDRSGVKTQMRALLRSHGLRAPRSLWTRKGTAWLQALEFEVGIDAIRRDTFLERLQSLSVLITRVEKELAKVSMAHPGVQLLMSIPGIGIRTAEATMAYIADPHRFHNIKAIGSYLGLTPSMNSSGGKERLGHITKEGPGTVRKMLVEASWQAVRHSPTVKARFERIVNGQPGRRKIALVAVAHYLARTMLAMLKSGETWREQIA

SEQ ID NO: 465406 - protein, 371 aa, unidentified
MDHTRFVGLDIHKERISVAVAESGRSGAVEYLGEISNDAVAIDKLCERLARPGKPLAFSYEAGPCGYGVYRQLKSLGHRCDVVAPSLVPKRSGDRVKTNRRDATMLARLHRAGELTPVWVPDADHEAMRDLIRLRGAVRQVVTRARQHLQGFLLRHGRKHGRGTAWKMAYRRWLSTLSFEHPAQQIAFQDYVDAVMDGERRLKRVEEQIFGLLPDWNLRPVVDALQAMRGIALINAVVLVTEVGDFTRFPNPRQLMAYFGLVPGERSSGETIRRSGITKTGNSYARRALVEGAWAYRMRARIGRHKVDRIEALPKIVRDIGWKAQVRLCTRYRRLRARGKTANVVNVAIAREMVGFIWSIACAVQSAPQAV

SEQ ID NO: 465407 - protein, 370 aa, unidentified
MLDTTTFVGLDVHARSIKAVSLDVMTGEVRCATFGYDAGAVAEWVRSVDPKARCVYESGVTGFDLQKRLSGLGVDCVVGAVSKMIKPSADRRRKNDRNDAEFLARMLSVGNVVEVWVPDDECEAARDLTRALEDARDDLSRSKQRLSKFLLRHGLVFDERTPTGRRKGNWTRAHWSWIESIRFAEGADNDVLAYYVDAVRRAAEEKARLEGLVEAEARKPRWRKRVDSLRCLKGVDTASAADLVFEAGEFSRFRNARSFAAWVGLTPSEHSSGESDRRGAITKAGNKHLRKTLVEAAWHYLTCSGRPKDLAKGQAPDRGARRHAAKGVRRLVERREALLARGVHSNKANVATARELACWVWAVGLMAEEA

SEQ ID NO: 465408 - protein, 407 aa, unidentified
MEVIIERACGMDIHKDSITACIMTPEGKMIQSFSTKTVFLLQLIDWIKEHGCTHVAMESTGVFWKPIVNILEAENIEFLVVNAQHIKAVPGRKTDVKDAEWIAKLLRHGLLKASFIPNRTQRELRELVRYRRSMIEERARQHNRIQKVLEGANIKLGSVVSDVMGVSSLDMLRAIAEGENDPEKLAGFARRSMKKKKAELELALRGYIQPHQRLMIKTILTHIDFLTVQIELLNQEVACRLSTHQEDIERLDSIPGIATRMAEQILAEIGTDVKQQFPSAAHLCSWAGLVPGHNESAGKRKSSTMKKGNKYLKSALIEAAHSVRGSKTYLGALYRRTATRKGKKRAGISVAHAILRIAYYLLTRKEMYVDLGEDYFDKQKEQSIIRYSVRRLESLGYNVTITELGAS

SEQ ID NO: 465409 - protein, 320 aa, unidentified
MQTPAVVLNIGVDVAKAEIVVACSEGSFPVRQVANQRPALLAFLKGLPAGSRIGVESTGSYHELFAGLAHQLGFLVFLLNPKDTHHYAKAVGLRGKTDRVDAELIARMIAHEHTKLHVWIPPTPQQRELDRLIKRRATLISLREALEMSLHELDGFGADLKALRTRFNQLIARLDLRVKALVDASPERKQNLTRLCTITGVGPVIGTALVNTLERVPLKSADTFVAFTGLDPRPDDSGQHRGKRRLSKRGPGELRRLLYLAALSGIKTKTWRPLYEHYRAKGLSSTATLVILARRIARTAWSIYTHKTEFDPGRLTKSLT

SEQ ID NO: 465410 - protein, 382 aa, unidentified
MAALSIADVPANVTVGVDTHKHSHVARAKDGLGRHLGQLEIETDPRGYSRLLAWAQEFGPVVTFGIEGTSSYGAGLTRFLRAQGQAVIEVLRPVRRDRRFGSKSDPIDADAAAGAVLSGKATAVPKACDAGVEMIRALKIAKQTAIKARTQAVNAVKGLIVIAPDPIREQLRNLKTPALVRTCSAYRVDGASDPTSAIKLSLRSMCRRYVVLDQEVRSLEKELDDLTIRLVPQLRKLFGVGQDVAASLVLAAGNSGDRLRSEASFSMLCGISPIPASSGMVQRHRLNRGGDRQANAALHQIVVVRLRYDEATRAYFSKRKADGKSKKEIFRCLKRYVAREVYRTLVDPREEAVRSVASAPSNCPLTSIGGSKMVGHGRGRGI

SEQ ID NO: 465411 - protein, 299 aa, unidentified
MNVQGKTVLKPLTFSNNKAGFELLDLSLRQLNQDCLIALEDTGHYAFNLLNFLHEQGYKVYTYNPLLIKKFAKSLSLRKTKTDKKDAHGIALKLLSDPNREQFQHNNRQVELKILTRHIHRLKKKQSDWKVQYTRCLDIIFPELDKIVGKHSEYTYQLLTRYPNPQKRIEAGFDKLIEIKRLTASKIQDILSVAPRSIGTTSPAREFEIIENIKHYKRLIDKAEKCVNDLMAELNSVITTVTGIGNRLGAVILAEIQNIHAFDNPAQLQAFAGLDSSIYQSGQIDLAGRMIKRGSPHLR

SEQ ID NO: 465412 - protein, 339 aa, unidentified
MELCCGMDLHSSNTVIGMIDEKRKHVIDRKLPNDPELIRSFLKPYKSDLKGIVVESTYNWYWLADLLQEEGYRVHLSHPVANEQYNGLKHSNDKHEAFWLAELLSLGILKEGYIYPRQVRSVRDVLRKRAHLVRVRTALIVSLQHMISRNCAVKVKTGDIKRLTADVISPCLEKEEALLLAGKTSKEVIDCLTRQIDKIEGWALKRLRREEVFNRLVTLPGVGDILGMTILLETGPISRFRAVGNYASYCRKVSSQWTSNDKVKGRGNIRNGNRYLAWSFSEAAAHARQTNQACRRFYDRKLRQTNTKVAHNALAHKLTRAAYYIIRDHVSYQEEKMFS

SEQ ID NO: 465413 - protein, 363 aa, unidentified
MSESTTVTVGLDVHARSIRLAAIRADELLEERTLPYDEEAVALVLRRWPSVRCCYEAGPTGFGLYRHLREGGIECQVVAPGLVPQRPGDRVKTDPRDARKLARLLAGGLLAPIHVPSPEQEAARDLVRAREDARLDRMRDRHRLSKFCLRHGRRLPTSSWTVARRRWLSEQRFAFAAQQQTFATYVHALDLVDARIGALERAIADTADEQPWRALVARLRCLRGVDTLTALALAAEIGDFGRFRSAEEFMAFVGLVPSEHSSGERRRQGSITKVGNSHVRRLLVESAWHARRRPTVGYRLARRQRGQEAVVVERAWRCQQRLHARWLRMAARGKPPQKIVVACARELAGFVWAIATEQPLRSA

SEQ ID NO: 465414 - protein, 342 aa, unidentified
MRFTFILGIDISKDWFDACLMNRQFEIVGEQRVVNRSDQIMEFISNLLDQYDIIDINSIFMCVEHTGLYNQNLVRCWLTKGGDLAIIPANKISGNLAGPQGWVEKTDTLDARRIAEYGIRFSDKLLHYRVKSHTLELLQRLQRQRSRLLSAINTLRVPVSESEDFDIISIVEKIKQNQAGSLAALEADLENIDKLMEQTIAEDPYLNRVYHLITSVPGIGPITAFEVIIATEGFTKFRPNQAKKFARYAGVIPLRHISGTSVRKKPRNTKIANRRLKPLLTMGATSLIRGKNAMGQYYQKKILEGKHHLTVINAIRNKLILRIFAVVRNGTTYKVDFEYVRN

SEQ ID NO: 465415 - protein, 342 aa, unidentified
MSLVMGMDQHRAQISAEWIDTITGEISRARVAPADRAAVRAFLAPFKHEALEVALEATTGWRFVVEELQRVGAEVHLAEPAETSALKGKKKRAKTDWADARHLRELLLIGRLPESWIAPAHLLDLRARVRTRHLLSHQRCEWQQRMQAVLYHHGFPQQRNLLTLERRDWIAGLTMPAAAREQLTISLHMIDAIDLQLVPFDHDLSAYARKQAGCRAMIDQIYGIGVLTGVTILAELGDTRRFQNSRDVVRYSGLDITVYQSDEHRAPGHLSRQGPPALRWALYEAAQVARAGARSPDRQYYLQAKERIGGNRACIAIARKLLKRAYHLLRELGDQALEPIAS

SEQ ID NO: 465416 - protein, 353 aa, unidentified
MITLGVDAHKQVHVAVALDDAGHELGRWRGPNSQRGWEQMARWAVELGGPRRWGIEGAWNYGRGLAQHLVASGETVYEVNPRWTALGRRSARTRGKSDSLDAHAVALLVWREGETLPRVAAEDETAILDLLVTEREGALAEATRLRNQIHYLLLQLDPEYRTHLPNLQTQAGLAALESYTPPQASGLAQERAAAVRRLAQRLRLALDQAEELAEQIRTRAGRSFSPLTRLCGVNLLTAGALAGILGPGRRFASDAQLAAYAGVAPLEASSAGVVRHRLNRGGNRRLNAILYRIALTQARYSPEARAYLDRRVAEGKTRREALRALKRFLVRAIWRLWQECVVQAEAAPAAAVA

SEQ ID NO: 465417 - protein, 392 aa, unidentified
MVVSVGIDVAKDKHDCFIQSSEGEVLADVFTISNNMDGFNILLEKIRTCTSPQDKIKVGLEATGHYSYNLLGFLLDNGLATYVLNPLRTNLYRKSLSLRKTKTDRVDARTIAAMLLSDAGLKPYTDTAYHNEELKSLTRYRFDKVKERAKLKSSVSRLVCILFPELEKLVPMLHMASVYALLEEFPGAKQIAGAHLTRLRSLLANASKGRYKRDMAVSIRDAARNSIGSKMPAKSLELQHTIRLIRELDAEIDEIEAEIETMMEEIHSPITTIPGIGCRMGAMILAEAGDFSRFDSPDKLLAYAGMSPSTYQSGQLKNCYPHMEKRGSRYLRYALFNATKYVCLWDPTFAAYLAKKRAEGKHYNVAISHAAKKLVRLIFAMEKSRQPYRSVT

SEQ ID NO: 465418 - protein, 268 aa, unidentified
MNYSHFVGLDVGKKTFDASLMSADEKELSHKSFDNTPTGIQSLLDWIAGYHLSLSKLLFCAENMGSYVTELSVSSVSMGFSLALVCPLTIKKSIGLQRGKNDRIDAKRIANYAVLHYRKLELYKLPDKDLVRLRGWIIIRDNLVKQKVSSIKLLETFSWMAKLADVTESISFLEEQLKSIKERILEVEEDMEQLIAASTSLYTNYLLLRSIKGIGIINAIVLLCVTDNFQRFDNPRKFACYCGVAPFEHTSGISIREKRRLLHWLTKK

SEQ ID NO: 465419 - protein, 410 aa, unidentified
MTVITIAQNTPVLVAIDIAKARHEVLIAVPGKKRRRRLTVLNELADFTRLIAALKNYGHPVRAAFEATGNYHRALAYHLATAGFEVKLVSSVALARTREALHNSWDKNDPKDAQVILHMMEIGNEQFYHDPLVRGTNDIQELSKTHDIVSKSKTELWHRILTHYLPLYFPEADRFHRSSRSDWFFAFLERYPSPHFISAMSKDAFIADAWDVVGRKVAKERLLADIYETSKVSVGLPVGLDSDAISMFRLVLGEGRSLIAQRNQIEDRAVALLKDLPDYQLLTSIPGIGPINALTILAEAGDLRRFGHHRQFLKFCGMDLATIQSGTFRGQTKLSKYGNARLRRTLWMAGQVAILQRANSFRDKFERYIAKDRQNTHLRRKAYTAIAAKMARTVHGIIKNGEPYRPFFEG

SEQ ID NO: 465420 - protein, 350 aa, unidentified
MRYYTGNHPFYCGIDLHSRTMHVCILDHEGNAVVDQGIACNPKAFLKLIAPYRQGLVVGVESIFCWYWLADLCQEEKIAFVLGHAFYMKLIHGGKGKNDRIDAGKIARLLRCGSFPLAYAYPKGMRETRDLLRRRMYLVRHRSGLLTHIHIVHSQYNLPAPDKQLHWHSNQAGVAERFASASVRQNVSVDLRLINHLSQVIVELEEYLIRTARVEDRQTYERLQTIPGVGRVLALVLLYETHDWSRFSSVGQFLSYARLVRCLHESAGKTHLKWAFAEAACLMLSVSERARRWKQRYQQKRGAGKAMSVLAAKLGRAVYHMLRKQEAFAEERFWNSGRRAGNQPALAAKA

SEQ ID NO: 465421 - protein, 326 aa, unidentified
MQVYRVTSDGVVSNKAVKRADFLNEFRNTPPALIGMEACGGSQHWAHELQNLGHTVRLMPPKLVKPYVTGLKNDKNDARGIYTALVMGVREVPVKSAAIRDLALLQTMRTKRQREKVAKINHIRGILTEYGLVMGKSVNAFLAKAGSLIVELKERADVSPYIVSELTALFHEVKEAMAKIKELETSIESIAKTLKQYELFRSAPGVGPITAATMLVLLCNPEAFKNGREFAAYIGLAPKSTGSGGKNVVTHIPKKYECNNEVRALLVQCAHAICRGKHKSDWVSSILARKPKKVAIIAVANKLARQLWIMAKKGEKFERRFILAAV

SEQ ID NO: 465422 - protein, 387 aa, unidentified
MPQVNDLSRSLAAFDPISTLVVVVEMSKMSWLVSGVVPGVERQPLKKLEPDATALLRLIERWRIEAVRAGRPIRRIALGYEAGRDGFWLARWLIAHGIEAHVIHSASVAVSRERKRAKTDRLDAAMLMRVFLGWLRGERGHCGMVAIPTMEEEDARRPSRERESLVNERSRIVNRMKSALARLGIRGFKPHLRRAPERLACLRTAEGTGLPANIIEELRRDMARLALVREQISSIEKTRAERLERAPDTGPHAMVRLLSRVIGIGIETADMLVREILSRKLRDRRAVARYAGLTGSPDESGLKSREKGLAKAGNARVRRGLIQLAWRFLMFQKDSALARWYRTRTEGPSGARKTTMIVALARKLLIALWRLVTTGEVPDGVELRPAA

SEQ ID NO: 465423 - protein, 392 aa, unidentified
MVVSVGIDVSKDKHDCFILSSESEVLADVFTIPNNAEGFDTLLQTIRRCSRPEDKIKVGLEATGHYSYNILGFLLDNDLPVYVMNPLHTNLYRKSLSLRKTKTDRVDAKTIATMLLSDVDLKSYTDTAYHNEELKSLTRYRFDKVQERAKLKQSVSRLVTILFPELEQLVSSIHGTSIYALLSEYPGAKQISEAHLTRLANILVKTSRGHYRKDKATHIRDAARTSIGSVMPAKSLELKHTIKLIQELTSEINEIEDAIRKIMDELKPPILSIPGMGFHSAAMILAEVGDFSNFNSPDKVLAYAGCSPSTYQSGKLTNCYAHMEKRGSRYLRYALYTATKYVCYWNPVFTEYLTKKQAEGKHYNVALSHATKKLVRLIYALQKSGKAYLAVT

SEQ ID NO: 465424 - protein, 338 aa, unidentified
MKKFIGIDLHSNNSVVVVSDEADRVMFRKRMANDLKLIEAALAPHRDETVGVVVESTYNWYWLVDGLMDAGYRVHLANASAIKKYEGLKYSGDVADAAYLAHLLRLGLLAEGYIYPREERGARDLARKRLQLVRYRTAQILSIEGILMRQTGARMNSESVKGLTPEQVEEFGFAPDVALAVEANRAVSQTLGQQIEALEKRLRERVSLRGEFKLLKTAPGIGETLATTIMLETGTIARFAQVGNFSSYCRCVDSLRESNGKKKGEGNAKNGNKYLAWAFVEAANFAVRYCPQAKSFYERKKRRTNRIVATKALAHKLARACYHMLRDHKPFDVNRCFA

SEQ ID NO: 465425 - protein, 353 aa, unidentified
MSKDITLTVDYHDRVCVIRWFDHGTGRDQVFTEVPTTKEALTRMVDQARRAAGPAGHVTWIQESTTGWARVQELHGDRVQFRLANVLQMPLPPKARRRKTDKIDTARLQREHLNGSLPLAYQPPAQWRQLRRLVAYRESLVKRRTAVRNWINRYLAHETWFDRTGRWSLTGQKRLRALLKRLPKTDALVIAQKLDELTRLEEQLEVALKELASAYGNSPEAQRLDAIKGIDIVTAISIVARIGPVERFRDADRLIAFAGLAPGISESDQTRRNGRIGGGGTDWHLRNYLIEATVWARKLTRYARTYDRIYKRRGKKVGQLVVARMLVRSIFKILRDGVEFAPAVASPGGAVTG

SEQ ID NO: 465426 - protein, 411 aa, unidentified
MEVMFERVAGIDIGKATLTVCVRTPGDRGRRRRSETRTFKTTTGSLLVMRDWLLECGVTIAALESTSTYWKGTFYCLEDHMQVWLLNAAHMHAVPGRKTDVKDAEWIAQLLEHGLLNPSFVPPPDIRQLRMLTRHRVQLMGDRTRETVRLELMLEDASIKLSTVASSLTTVSARRMLAAMINGQTDPVKIADLALGKMRVKIPDLAQALTGNFTEHHATMAKAILRRLDLVEQAIKESDEVIAAACAPWQHEIELLQTIPGVGEKVAQVIVAETGADMSRFPSAGHLAAWAGVAPAVNESAGRSWTAGTRHGNKWLCAILIEAAGSVSRMHGRNYLAEQHQRLASRRGVKRAQVAVAHSILVAAYYMLSRDEPYRDLGADWYLRRNNEAHTRRFVRQLEKLGHTVHLDPTA

SEQ ID NO: 465427 - protein, 409 aa, unidentified
MATATIMEVVVGQQLWAGFDAGKSEHHCVVIDADGQRLVSQRVANDEAVLLELIDTVTAASDGGEVTWAIDLNHGGAALLIALLIAREQRLLYIPGRTVYHASGGYRGDGKTDAKDAAVIADQARMRRDLQPLRPGDEITVDLRILTARRTDLVADRTRAINRLRAQLLEYFPALERAFDYSHSKAALILLTGYQTPDGLRRAGGARLEAWLRKRKARNASAVAATAIEAANAQHTTIPGQQIAAAMVARLAKEVMALDTEIGDTETMIEDRFRRHRHAEIILSMPGFGIQLGAEFLAATGGDMTAFDSVDRLAGVSGLAPVPRDSGRISGNLKRPRRYDRRLLRACYLSAQIAIRTDPASRTYYDRKRTEGKTHTQAVISLARRRLNVLWAMLRDHAVYQPATTAAAA

SEQ ID NO: 465428 - protein, 410 aa, unidentified
MKIAGIDVHKKVLMVVVVDARAPEAKPARRRFATMPSELERLLIWLREQGVEEAVMESTAQYWRSVWLELEPHMRLHLAQAFSNRAPRGRKHDFKDAERLVRRKIANELILSFVPNGEQRIWRTMTRMKLQLTRDRVRLQNQMECLLEEMRIKLSIVVSDLLGASGQRILWALSQGETDPRKLAHLGDGRLRCTEEQLVDALRGTVQPMHREMLALQLQRLQLINEQTAQLDRMIAQAMKPHQDAVMRLAEVPGLGVDSAQQIIAEVGAQASTFPSAAELTSWVGTCPGKEESAEQNHSSRSAKGNKYLRRVLNQAAHAAVAKKGSHFQVVFRRLLPRLGYQSAIWAVAHRLCRVVWKILHEGVRFIEQGREPDPRAKKQRAQMLARALRKLGYQVIITPLNQVTATNGI

SEQ ID NO: 465429 - protein, 354 aa, unidentified
MEKYSMIVGLDLGDKRSHFCALDCEGKVLARGRVRTSEEGIRSHFGEAGRCLIAIEVGSHAWWLEKLLLDLGHEVVVANTRKVRAIWQNDKKSDKTDAELLARLVRTDRGLLCPVKMRGRQAQTDLMMLKMHNSLVCARTGLINAVRGTMKSFGVVLPSCSADAFAKKVRGTIPEEHKGSVLPILDNIGTVTQTIREYEKKLEAMVQDGYPQARMLQEVTGVGLLTSLGFVLTIDDPARFKDNRDVGAYLGLTPRRDQSGGSDPQLGVTKAGNGFMRRLLVGAAQYIMCHENAESELRQWAWKLAGGPDCTDRKRKKRAVVALARKLAVVMLSLWKSGSCYEPFPERAAQQGTS

SEQ ID NO: 465430 - protein, 429 aa, unidentified
MSEIEFVKQEPQFAAFLAIDWADKKHVWCLQGAGSEKRESGALKHSPEAVDAWVGELCQRFGNRPIAVAVEQSRGALVFMLSKYEALHLFPVPSTMAASMRQALYPSGAKDDPRDADLLLDILRQHRDKLRRLVPDTEVTRRVQNLVEERRKLVDEKTEQSNRLTSHLKIYFPQMLDWFEHLDTGLVCALLLRWPTLEELQKVPPAQLRTFFRKHHCRDQELIERRILAIRQAIPAIRDRAVIEAKSTVVKVIVRLIRSLLEGIADLDEKIEEAAAAHPDFFIFDSLPGAGAALAPRLLAAFGSQRERYGSAGEVQTYSGIAPVMEKSGRKKWVHSRIVCPKFLRQSFHEWAGHSIAHSVWARSYYQQLRSRGKEHHAAVRALAFKWIRIVFRCWKDRVAYDENKYLAVLARRGSPLVAVNVVIVRKAV

SEQ ID NO: 465431 - protein, 339 aa, unidentified
MKNIRYFIGLDVHKKSTTYAVRDKIGNIVTDGETATVYSELSDRLEPYFKSSLIGLESCTSYYTLYQNFLKNKHNIKVANTIQLRQLITKNDNLDAKRLSEMLRLGTFPCSYIPDENIQHLRSLLQVRHSLMEEKNRCNNRIQALLDRNGIVMPDQEAFGKKWRQQLMQYIGSGEVRLELRYEYDHFIYLEKQSEQLGQEISGYTMKHWKSDYMLIQSITGFGPVLSCYVIAHILPISRFPSNRKLRRYAGVVPAFHESGEKKSKGHIPKTSSRKQLRWALIQAANAAGKTNTKLGRYYRKKKKQKNNAGIAHVAVASSMIDIIYKVLTTKKPYNPRVC

SEQ ID NO: 465432 - protein, 416 aa, unidentified
MKEYIALDVHKRYSLGEREEAETGRAVQQRVEHRPGAIRQYLQGCEAGTEVAVEATGNWYWVVSEIEEAKLVPRLVHPRKAKLMMGMINKTDKLDVHGFNRLQRNRTLPTVWIAPAELRDLRELTRTRMVLSRQRARLKNRLHATLAKYGLEVEGFSDAFGAAARKRLEELVGKLPPQTAWVSGLLLEELDQVQEHLERHERRLAELLKVSPEMRRLKTLPGVGLILSAVIALEVGPVGRFASAPRLASYCGTVPRVSSSGGKTRYGRLRDDVNRYLKWAFMEAANVVALNRRRWRDRDAAGAEGVGRHASRLYERIRQRKGHAKAVGAVARHLSEASWHVLDREQDYREPHNAETRPQAQRGPQQAIVGGPGDEAGSGAGEPDKKESDKKKSNKEKSENAVKAGRVKQGVSAVSS

SEQ ID NO: 465433 - protein, 360 aa, unidentified
MNKDKYVGLDTDQATIIGRVEDAKGNFVMESAIETSASSIRQFFKGLEGTIHVGFEEGNQAAWLYDVIGPLVAEVIVCDPRRNKLIQSGNKADRIDAAKITRLLRLGELHPVYHGERSTRGLKELVHGYESLVTDTTRTKNRLKAVFRSQAIRCRGQLVYSKQERKQWLGKLDTVALGERASLLYEQFDGLKKLRDKAHTAMTTEARRHPAYKRLKKVCGLGDVRTAQIIAVVGSPHRFRTKRQFWPYCGLAVVTRTSSEYEIVDGQRRRKRNKQAQTRGLNQNYNRTLKAVFKGAAATAIERPPFKQYRQRLIDKGIRPELALLTVARKIAAITLTIWKKGEEFDPERVNQAVPSTGSE

SEQ ID NO: 465434 - protein, 303 aa, unidentified
MCQTEIDISVNDKEESTIKINRVGVDLAKNVFQLHGADHKGKTTWKRRLSRGKWLAVLCDTVEPGTEIGMEACAGAHHWARQLMQRGYPVKIIPPQFVKPFIKSNKNDANDAQAICEAMGRPNMHPVRVKTVEQQDLQALHRIREEIKSHRIAKANQIRGLVTEYGLVAPQQLSALRRAIPEWLEDADNGLTFLFRQLLQGLWGDLYTLDQRMAELDKQIAVIAQEDPTARRLQQLRGVGPLIATALVATVGDGKQYRKGRDMAAALGLTPRQHSSGGKDTDPQNRFISGGLRPPKTDSRNGV

SEQ ID NO: 465435 - protein, 346 aa, unidentified
MNTAAIASIGIDLGKTIFHLVALDCHAGVIVRKKFSRSQLLAYTANLPWSLIGMEACSGAHFLAAKLRDQGHEVRVIPAQFVKPYRKSNKNDFIDAEAIAEAVTRHNMRFVPIKTDDQLDLQALHRVRDRLVHRRTALINQIRGFLLERGLVFPKRPANLRRQMPLLLEDAEANLTPRLRRLMADLWQEWKQLQADIAALDEEMERISGSDAACQRLREIPGVGPVVATAIVAAIGNGAAFSKGREFAAWLGLVPKQYSTGGRTRLLGISKRGNAYLRRMFIHGARAVLFRVKYDTGTLGQWTKQLELRAARNVVVVALANKLARIAWAVLSSGEHYRMHSAIAAA

SEQ ID NO: 465436 - protein, 425 aa, unidentified
MLAVGIDWSEEFHLVALGRPAEGVFEVRRVEHSPRAVAALVERIAALEPDPAEVRVVIEARHGLLVERLLDAGYVVVPVNPDLIARRRGPARKKDDAEDARIACLLALDRFERLRPLIPHGELAGELRAIARDDERATKDERRLLNRLRQDLLSVFPAALAIAGEDLGAPVFLRALERWPSAEALRALSREELVAFARSCRHGWPERFAERAAAALTADHFQPRPYLARAKADTIRLTASQLLAIGTQRRAWERRMGELLLGSPPRGRDRKPRPDEAGERFPGGEIYLSFPGLGDRLAARVAGEIGDHPSQFESPNAFQCYGGKAPVTRRSGKSELVVSCRLAYNRHLGDAVQQWAFCSLRRSAWAREFYDQKRAQGKGHHAALRALGNRWLEVLWHCLQRSVLYDEATHVANRKRALEPLAHAA

SEQ ID NO: 465437 - protein, 341 aa, unidentified
MYYIGLDVHKKTISYCVKDASGQIYRQGTCGATRNELDRWVKTLPQPWVVAMEATIFTGWIYDHLLPHAVQVKVAHPVMLRAIALAKKKNDRIDAGKIADCLRCDFLPECHMASTEIRDRRRTLRYRHLLVRQMVQVKNRISGLLLETGVSHNKQRLHTQGYFEEVVFNHPEVSASIRPLLRLSREAILQCRKTEYALRKSLQRDPLLAERLQRLKTVPGVGPILALTWALEIGDVSRFRSVKQAISYCGLCGAEKSSADKVMRTPLSKQRNKHLQRVLVEAAKLAPRDSPELALLQERERQKGNANRATLAVARKMVSYLLAVDRQNRAFVAFEKHGAVA

SEQ ID NO: 465438 - protein, 369 aa, unidentified
MTDLTLFVGLDVHKKTIAVAIVEAAAGAAVRFYGAIVNTPDSLRTLCRKLTRDGQQLHFAYEAGPCGYGVQRLLTRLGHRCDVVAPALIPRKVGDKVKTDRRDAMMLAQTLRAGQLTEVWVPDEAHEAMRDLVRLRMQAMRDLRKSRQQLLSFLLRHGRNSPYRHWTKLHRRWLGELVFAHPAQHLALEEMLQRIERAEALCDRLKAAILELVPQWSLAPVVQAIQSLRGVSLLVAAVIVAEVGCFGRFARPRLLMAYLGLNPSEHSSGATIRRGAITKTGNTLARTILVEAAWTYRFPARITQIIRDRLAGLPEPIRAIAWKAQVRLSARYRRLVAAGKPTPKVVVAIARELAGFIWAIARLVEPKFA

SEQ ID NO: 465439 - protein, 385 aa, unidentified
MGSQAFIARDYDVFAGLDVDKKSISVTFTDHQGLLKSMRMPYSVDHLVNHVRKHYGDKKVAFAYEAGPTGYGLYDGLVAQQYPCLIASPSMIPKAPGQRLKTNRLDSLGLAENLRGGQLKSIHVPTTLYRELRHLTQLRDALVSEVVAMKQRIKSLLLMEGLEFPPAPPGSQWSFLVKAKLRKLPCSSVVRFKLDQLLDNLEFGEKQVLKVTREIRRFCQNDPELSQCIDYLKSLPGIGWIVASQMLARIGDWRQIKNIRELPAFLGLVPTESSTGERTTRGSITHSGDPRLRSKLIQASWSAIRQDGELLKFFRTVAKKHPRHLGPRVAIVAVAHKLCMRAAVVLMKQRPYEIREKVQSAPLTQEETVPQGTTRRRRVPGEKIS

SEQ ID NO: 465440 - protein, 314 aa, unidentified
MKALRTHVAGVDVHKDLLAITIMIGSGDEDPKVEHLECSTMTDDLRACGIVLKEKGVTDVAMESTGVYWKPVFNVWDPLGLNVIVGNATHMKNVPGRKTDMNDSHWIAQLHRFGLIRPSFVPDGTYQRLRLLSRHRTNLVEDLARVKNRVEKVLQDGNVKWSSIVSDTFGVAGVKILDLISEGFTNAQTLAASVTTKIKRKEEAEKALTNCLTEEHIYVIRELMEQYRFMQARLLAVENELTERMLPYAHLLAELDKIPGIDKILAMGIIAEATADMSSFADERKFAAWAGVASGNNESAGKKKDRSAATATRI

SEQ ID NO: 465441 - protein, 341 aa, unidentified
MNIITVGIDLAKNVFAVHGVNDSGKPELVKPKVSRADLLPLIAQLPPCLIGMEACSGAHHWARLFRQHGHTVKLMAPKFVAPYRMTGKRGKNDAADAAAICEAVTRPSMLFVPVKEEHQQIILCLHRTRQGFVEERTAAYNRLRGLIAEFGIVLPQKVTCLRREIGAHLEDLPGYANLCAGDLLAHADELDKRIDEYDRAIAKAAREDARSKRLMKLPGIGPVTASALLASMGSGHDFDSGRQVAAWIGLVPGQYSSGGKARLGRITKAGDSYLRSLLVMGARAVLNSIGDKQDRFSRWARSLEERRGYWRAVIAIAAKNARLAWAVLKYGEDFKLEPGKD

SEQ ID NO: 465442 - protein, 479 aa, unidentified
MHPRVTNICAITRDVHRFTFEPTGALEITNEYSGLAVTPAHLYCFRRSQAGMSHTLNLAQWSVVMEHQDQLPFAAYVGIDWADKKHDLCIEIPAEGTQEFDVIPHRINLIDQWVRSLYARVKGPIAVAIELTRGPLISALQKYDFIVIYPVNPSSLAKYRLAFTPSRAKDDPTDAALAVDMLRRHPERFEPLCPQSADMRALVTLVEQRRQLVGEKVRLTNRLRAALKEYYPNALEWFDHVDTIVFCDFIARWPTLVQAKRARVNTLTRFFHEHNMRYPKVLEARITAIKEAVPLTEDHAIIVPYRMKAQAIVEQLKLLLGSIKAFEVEIDSVATRHADYELFRALPGAGPLLAPRLLVAFGEDRDRFGSAAEVQMYSGIAPVTERSGKKEWVHWRLQCPRFLRQTFVEWTAQTINKSYWAGEFYQQQREKGCTYQAAVRALAFKWIRIVYRCWQTGIPYDEAKYLKALERRGSPLLAK

SEQ ID NO: 465443 - protein, 423 aa, unidentified
MPISIRPKCHGDVASRLREYGTWEIAIEVKKNGRLIELATRMSRSFAPSCEFGSMHAHINVYMSTGTPSIAVRREKNARFQSESSSSNTRSSPCFNPSQLTSELEKPVLRIAGGLFECEVIEEREVLQEAELSGQADSENDLGGSSETMYFIGLDVHKKSISYCVKDAAGRVYQEGRIGSSRRELDVWIRTMPQPRMIAMEATIFTGWIYDHLLPHAEKVKVAHPLLLRAIAAAKRKNDKIDAGKIADCLRCDFLPECHMASTEIRDRRRTLRYRSLVVKQMVQMKNRVSGLLMETGVNYNKQRLHKVGYFKELMTTNQDVHESIRPLLKLSREMISRSHKLDYALISSLERDPLLKERLRRLRTVPGVGPITAVTWALEIGDFTRFTSNKQAISYCGLCGDEKSSADKIMRMPSGTSISSAC

SEQ ID NO: 465444 - protein, 344 aa, unidentified
MNKLRKYVGVDIASETFCAAIGQSNEGSWEIKVKATSFKNHYDSFSQFLNWLKDHGVEKRSSILCMEATGVYGEALAYTLVGNGYQVVVEAPLKVKKSFYPTGHKNDRVDSQQIAEYAYRFSDRIQLWQPKTVVIEQLKVLLTLREQLVTQKTSHHNANRALKRKVVRTPLAEQVHEAAIEQLEKHIQEVDQEIKRLIDEDPSSKELYRLFNSIPGIGPTLTPFLIVMVETAPEPYNPKTLAAYIGICPYEDSSGSSRHKQDTSRHFGPSAIRRLLHLAAMSVRQHCPLFERYFQRKVAEGKPKQLVLNNIANKLLRIVCAIARTRTPYIPGFRSVHPSLLSMN

SEQ ID NO: 465445 - protein, 296 aa, unidentified
MDKIIRIGIDTSKHVFQLHGVNAAERPVLRKKIRRKEMIDFFTTCPPTVIAIEACGGSHHLARLLTSLGHEVKMIAPQLVKPYVKRSKNDAADAEALCEAMSRPTMRFVPVKTVDEQAALMVVGVRGRLIRNRTQLANAIRGYAVEFGISAAKGLAHIPLLLERIQADETVPELARELFAGQAKEYAQLEEKIADMDAKLKAWQRTDERSKRLNRIPGVGPIGAALLIMKIPAPELFRSGRQFAAWIGLTPKDHSTGGKLRLGCITRAGDEALRAVLVVGATTVIQHARRSGKASP

SEQ ID NO: 465446 - protein, 339 aa, unidentified
MNIQALGVDLGKHGCHIAGQDTKGNLVERKQLTNKKFALYLAKLPPCNIYMEACGGAHYWARTAISHGHTCKLIPAKFVKPFVKSNKNDWIDAEAICEAGQRPSMRFANVRSEEQQALAALLKLRDGLVVERTACSNRGHAFLLEFGIPVKRGRGFMNTLSGIAADLDYNIPMTLRFVLNEICEQYRSIQEQVQRMENQLKQLVDTSEAGKRLLSIPGVGVITAGYVLAWIGNGKQFRSGREFAAWAGLVPRQYSTGGKNTLLGISKRGNNGLRKLLIHGARSAIQWKLEGGHSWSSWMKELLTRKPKAVAIVAMANKLARIIWAVLVGEQSYKVKVAV

SEQ ID NO: 465447 - protein, 428 aa, unidentified
MDFMDISRIKVFRQFKKEIRGSEQYLIVGIDIGKVKHHAFLGTANGHTVQKGLIVKNNLSGFSYLMGRVQFHMDRDGFEDVVFGLEPTSVYHKPLAEFLIEQSHLVVYATNEAINKNRSLLDGRWDKNDTKCSANVADLLSQGKCQYYDLPDIKLRDLRNLLLLRKRLRKQLHSAKMRIRNNLVAQYFPEFDKLWKKCEEENLAIVRWCLAPAKIAAMKFEDFCCLVTTRNRGDRQKQRLFEIWDTASFSIGCFAGNGLELEAKVLVDTVKLIQTQIVEVNGAIEAICLQFEEYQYLLSIPGFGPYVSAVVLAAIGNAHRFENASQLMRLAGFDLNAKRSGKKSATAVPGISKKGKADLRYAVYQAALIASSLTTHFAGYYHSLLEGRQREKGIRTKMRVKLAAKLLVIAWTLMKKKEAFNPDYIISH

SEQ ID NO: 465448 - protein, 344 aa, unidentified
MKTNHIGIDLHKRTQTWVALSEDGQSKLFTRTFPVTPEGVRAGIHLAKSIGSEKLVVAVEPVCGWVWVVALLREAGLEVHISNPRKVKAIADSLQKTDENDAHVLARLCRTGLMYESVEVPPEMQKLRSLVRERSFFIRTRAGMKCRLEGVVTRSGRHVIKGSLSTKQGTEAIIASDEQEWKRSLESIADMSIYIKELDTEVARHAKAPIPTLLMSIPGVGPVTAVSIWAEVGDFSRFSSPEKLCAFAGIVPTERSSGGVQRLGHITRAGSTILRYILVEAAMRVRNTEKSTVLYEFYKTVKEKRGAMRARVALARKILSISWYMVKKGEQYQPRFPAPKPKAL

SEQ ID NO: 465449 - protein, 417 aa, unidentified
MEYPPETLPAVPPGGVTCGIDWANDDHAVCVVDMAGKVVQRFIAEHTGNGLAGLVRRLRRAGAGEVAIERPDGTVVETLLEAGFTVVVISPNQLKNLRGRYGSAGNKDDRFDSFVLADTLRTDRARLRPLLPDSPATVTLRQTCRARKDLVRHRVAVCNQLRAHLKIAFPGAVGLFAVLDSPVSLAFLARFDCQDRADWLSPRRLAAWLEGQGYCGRKDPAELHARLAGAPRGATGDDGAAKAHITRALLAVLASLVQQIKTLNAQIAEQLALHADAHIFTSLPRSGTVRAARLLAEIGDCRARFPTPESLICLAGVAPSTRKSGKTTYVDFRWAADKQLRDAVCDFAGDSRHASPWAAQLYNDAIARGKDHPHATRILARAWLYVIWHCWQNRTAYDPARHKALQRILAQEKPAAA

SEQ ID NO: 465450 - protein, 368 aa, unidentified
MEEFISSFVGLDVHKDSIAIAVAEDGREAPRFVGTVGHEIKQLLKALHSVGKPESQLVVYEAGPCGYGLVRQLRSRGYGCEVVAASKLSRRPGDRIKTDRRDALTLARLARSGDLVRVAVPDERDEAIRDLSRAREDALRARLKARQQLKALLLRHGRRYTGRSSWNPTHERFLSTISFSQPAQDIAFAEYRLAVREGHDRVERLTEALRTQTEQWRMKGLVAALSSLRGIDFIAAVTLVAEIGDFRRFSHPTELMGFLGLVPSEYSTGDTQRQGDITKTGNSHARRVLVEAAWNYRFQARLSRLMHIRQERQPKAIRDIAWRAQLRLCHRFRRLRSRKLHQNKICVAIARELAGFIWAIAQQVPVAA

SEQ ID NO: 465451 - protein, 346 aa, unidentified
MTNSGIDLGRRMSQICILKQDGEFIERRVRTERDRFAAAFKAHPGARILIEAGTESEWVARCLEELGHQVIVADPNYAPMYGQRHRRVKTDRRDARALAEACRLGAYRPAHRTSEAQRHVRWQIAVRETLVRTRARSIVLIGSLLRQAGLHLPGGGAETFLNRLNGLSLPEPLQQAIAPLLPVLERLNQQVATTDRTLEELARNDPQVRRLDTAPGIGPVTAATFVAILDRADRFVGPHQLEAYLGLVPREYSSGERQVRGRMTKGGNTRLRCLLIEAAWSIVNYPKPETAALRQWTLRIAGRRGMPRAVVALARRLAGVLFAMMRDETVYDSSRLTSRSRPARVA

SEQ ID NO: 465452 - protein, 428 aa, unidentified
MEEKELEKPIRAWIGMDWADEKHDVSLYEVGTGKQETMIVRQSPEALQEWLGQLRTKYDDGYVAVVLEQGRGGLLNALMGCEFLVLYIINPKSLSSFREAFYGSGATSDPVDAELMRDMVRQNPGRFRAWRPDDVMTRSLRLLTEGRRNLVNQSTALTNQLTALLKGYYPQALAWVGRLDTAWACDFLGQWSTLQSLQASSRRQILRFYEKHPRASLNLSEQLKQIQNARALTQDEAVLESSALMVQALVSQLRPLLASIAEFDRKIAMIFRKHPDRPIFESFPGAGAALAPRLTAAFGTDRDRFQAAKDMQELAGIAPVTEKSGKKKFVHWRYACPKFMRQTFQEFADHSRRWCKWAKMEYELLRKRGKSHNAAVRALAYKWIRILFRCWKDKKPYQDEIYTKALLLHGSPLSSLLAECVEKPVNGL

SEQ ID NO: 465453 - protein, 344 aa, unidentified
MEITTIGLDLAKSVFQVHGVDATGEVVVRKSLRRSQMLPFFAKLPPCLVGIEACGTSHHWARELLKLGHEVRLMPPAYVKPYVKRGKTDAADAEAVCEAVARPTMRFVPVKSLEQQAALSMHRTRDLLVKQRTQLVNMIRGLLAEFGIDIPKGLERALLMARRIVDGEAPDVPMEAARIVSTLSQQALDIHIRLREIDRDLLVWQRGNDVARRLMTIPGIGPVGATALAASITDPHQFRSGRQFAAWLGLTPLQKSSGGKARLGRITKMGDKYLRKLLIVGMTSLVRRAKYNPKTVDPRLADLLARKPVRVATVAMANKAARIVWAVMARGETYRAGHRPALAA

SEQ ID NO: 465454 - protein, 459 aa, unidentified
MSKLSKPNVGLEEARPFAGMRQMDAHAAGVDIGAHEIMVCVDRGDGTQIVRSFGSYTIDLQAIGKWLGEQGTTTVAMESTGVYWIPLFEELERQGFHCHLISSRSLRRVPGRKSDVVDCQWIQTLHSYGLLESSFRPESDLVALRTLLRHRAQLIQHRAPHLLHMQKALLQMNIQLSQALSDVSGVTGQAIIRAIVAGERNPHQLAGLRNYRCKKDEEEIAKALTGTWRTEHLFILGQSLEFYDFYTKQIEACDAEIERTYSLVRLDWEKASFNELTTLPEGKRNSHSKNGPKDVNVRKHLKRICGVDIMAVHGVSASLAQTIVIEVGTDMSKFPNEKHFCSWLGLAPKNEISGGKMLKTKTLKTKNRAGQAFRMAAGSVMRAECAFGAFYRRQKSRLGPAQAAVATAHLIARVVYRMLKYKVEYEPLSVAAYDQHYREQQLKYLQKKAAKFGFQLAPV

SEQ ID NO: 465455 - protein, 345 aa, unidentified
MKKIAIGIDFAKEKFDVTVKNVTNGTSCYAQYPNTPGGGRSMVHLVKKFAKGITSEDWLFCGEDTGYYSQTIARYLTEKGFFIWLQNPYAIKHSEGDIRRGKDDKADSAAIADYAHRYEDKAHKYELPSKAAEELHMLLTRRDALVRAKRVIQSGTKEIPKRDKQGETITLIKASTKRLIKDIDDEIDILEQQMAKVVEQEEALQKNYKILRSFIGIGIVNAMCFIAYTDNFKKFELNARKIATYWGVAPFGEDSGTSVHKTPRVSHFCNHWLKAILSNAANNAIVWNPTIKSYYERLVKAGKCEGIRRNNVKNKIIQIITAMIRKGEKFDSEFKFTGQNAAITC

SEQ ID NO: 465456 - protein, 402 aa, unidentified
MNAVGIDVSKGKSMVAIMRPFGEIVSAPFEIKHTASDIHSLVELINSVEGESRIVMEHTGRYYEVLAHQLSEANLFVSAINPKLIKDFDNDSLRKVKSDKADAVKIARYALDKWQNLKQYNVMDELRNQLKTMNRQFGFYMKHKTAMKNNLIGILDQTYPGVNTYFDSPARSDGSQKWVDFASTYWHVDCVRKMSLNAFIDHYQNWCKRKKYNFSQSKAEEIYGKAKELVPVLPKDAITKLMIKQAVDQLNSASTTVESLRTLMNETASKLPEYPVVMAMKGVGTSLGSQLMAEIGDVSRFTHKSAITAFAGVDPGVNESGSYEQKSVPTSKRGSSDLRKTLFQVMDVLIKTHPQDDPVYQFIDKKRAQGKPYYVYMTAGANKFLRIYYGRVKEYLSSLPES

SEQ ID NO: 465457 - protein, 484 aa, unidentified
MIGSFACEPVRSDAPCSTRAQERSPAGSEASVQKSERTTSREDPVSGRLRTEAKADATRNSSRTFKLNSRMHLESLFANFGAIDWAKYNHHAVIVDRTGQIVAEFSFPHTLKGWQQWRQQAARYVPLAVAIETSQGTVIDQLLQTPDCTVYPLNPKAARAYRNRKAPSGAKSDHLDAWSFADALRLDGSAWRPLSKQDPLLEQLHLLCRDELALIEERTALVNQLIAALHEYYPTALAAFEDWTLPAAWAFVEAFATPQLLASSGKRRWEKFLHTHKLARPQTYEKRLELFAKATEFHASDALTQAKSRLAVTRTKQLRVLQTQLEDYRRQIENLFGQHPDHDLFGSLPGAGPKIASRLLAELGDNRQRFESSQALQCYGGTAPVSYQSGPVHKVRVRTQCNKVLRHTVYLWADLSRRTCPWANIYYQSLRKRGQSHACALRCLGQRWLKILWKMWQTRTRYDASLHQQNQIQHGSWVLKLTNP

SEQ ID NO: 465458 - protein, 334 aa, unidentified
MENIALIGIDLGKNSFHIHCQDHRGKAVYRKKFTRPKLIEFLATCPATTIAMEACGGSHFMARKLEELGHFPKLISPQFVRPFVKSNKNDFVDAEAICEAASRPSMRFVQPRTESQQAMRALHRVRESLVQDKVKTTNQMHAFLLEFGISVPRGAAVISRLSTLLEDRSLPLYLSQLLLKLQQHYHYLVEQIKDLESQLKRKLDEDEVGQRLLSIPCVGTLTASTISTEIGDGKQYASSRDFAAATGLVPRQYSTGGRTTLLGISKRGNKKIRTLLVQCARVFIQKLEHQSGKLADWVRELLCRKSNFVVTCALANKLARIAWALTARQQTYEA

SEQ ID NO: 465459 - protein, 381 aa, unidentified
MATETVQSTLPKPITEVLYLAFELSQKQWKLGFTMGIGQPPRIRNITARDLNALHWEIRQARQRFHLPENTCVVSCYEAGRDGFWLHRYLQQQGIANLIVDSASIEVNRRMKRAKTDCLDVTKLLTMLMRYHLGERKVWRTVTVPDEECEDRRHFHRELADLKVERTRHINRIKGLLSGQGVCALIQPDFLDFLSTVRLWNGNSISKGLRSRLEREYQRIQLVNQQIDELEAYRRETLRTLQQPHIQQVRQLMRLQGVGINSAWLFVMEFFSWRAFHNRREIGALAGLTSTPYQSGGTNQEQGISKAGNRHIRAMIIEIAWGWLRFQPDSQLSRWYQQRFGQGSSRLRRIGIVALARKLLIELWRYLETGIPPDGAVLQPQ

SEQ ID NO: 465460 - protein, 363 aa, unidentified
MKNYIFVGCDSHEKTLVNKIAHNDGPLETKRFSARRAGRQKLIENLRERSRQAGGAQVVVAYEASSHGFILCDELRAAGFLCHVLAPTKIERSIKQKRNKNDDRDAERLLDIVRGHYLAATKMPAVWVADLQTRDDREPVRARQDLSEKQTTVKTQVQMLLKRQGIEKPEGVGTSWTKRYRLWLEALSGEGPAIQSGMRQTLKTLLRQLQFLEHEIEQMDQAMRELANTPRRKPIVDELMKEKGVGLATAMKYVTDIGDFKRFNRGRQIGAFFGLVPSTAESGENNDRKGHITREGSPSARKVLCQATWSRVQHDKQERDVYRRLVARNPKKKKIALVACMRRLAVRLWHIGFQAQLKMEAAG

SEQ ID NO: 465461 - protein, 359 aa, unidentified
MNSVKYVGMDVDQATLVVVIEDSKGKFLMEAFVPCSSGDIREFFKTIKGTIHVAFEEGAQAAWLYDLIQPLVAKVVVCDPRQNKLIQSGKKSDRIDAGKLAKLLRLGELHEVYHGERTTRGLKELVRAYECLVEDTARTKNRLKGAFRGRGIRCRGKNVYHQAERKEWMGKVDIAAMGLRVMGLYEQLDFLSKLREEAKKAMLAEARKHSANKLLITVAGLGPVRSAQIIATVGTPHRFRTKRQFWPYCGLGVVSEASGEYEIVENKPRRRKKPAQTRGLNKNFNRRLKAVFKGAAKSAIVREPFKQYHQRLVDNKIREELALLTVARKIAAITLAVWKKGEKFDSDRVNQAAQGTGNE

SEQ ID NO: 465462 - protein, 364 aa, unidentified
MYDSTTTVTVGLDVHARSMRLAAVRADELLEERTLPYDEEAVERVLRRWPGVRCCYEAGPTGFGLYRHLTQRGIDCVVVAPGLVPQRPGVRVKTDSRDARKLARLLAGGLLQGIHVPSRELEAARDLVRAREDARLDRMRDRHRLSKFCLRHGRTLPTSSWTVVRRKWLGEQRFEFAAQQQTFDAYVHTVDLVDARIEQLERAIRETAEQEPWRELVARLRCLRGIDTLTALALVSEIGDFSRFRSAEEFMAFVGLVPSEHSSGEQRRLGSITKVGNSHVRRLLVESAWHARRRPKVGYELARRQRGQDALDVERAWRCQQRLYQRWQRMAGRGKPQQKIVVACARELAGFVWAIATEQPLRTI

SEQ ID NO: 465463 - protein, 411 aa, unidentified
MELVHPRCAGLDVAKDEVVACVRTPDGHGGRDQEVRTFPTFTSGLEALADWLAAEAVTEVVMEATGQYWKPIWYVLEERGVALMLVNARHVKILPGRKTDVCDAAWLAELLEHGLLRGSFVPPAAIRQLRDLTRYRKRLIQTHSAECQRIQKTLEDAGIKLDSVATDVLGVSGRAMLAALVGGERDPEVLAELARGRLRTKLPQLRQALRGRFSDHHALLVGLALAHLEHLEGAIAALDTEVDQVISPFARARDQLDTITGVGKRAAETIIAEIGVDMAVFPTAGHLASWAGRCPGNNSTGGKRRSGRPTKGNRWLGEVLTECAWAAARSRDTYLAAQYWRLARRIGKKKAAMAVGHSILVIAWHLLANDCDYQDLGGDFFVRRDTDRARQRAVAQLQALGYRVTLEPLAA

SEQ ID NO: 465464 - protein, 430 aa, unidentified
MGLIMPTAMHPERDNQPMPYEWFVGIDWGSQRHQVCVLDRDRRRVGERAIDHDGASLAQLAAWLWTVSAGQPQRVAVAIEVPRGAMVEGLLERGFHVFALHPKQLDRFRDRHSVAGAKDDRRDAFVLADAVRTDQPSFRRLQLDAPQLLRLRELSRAEETLLEDFRRSANRLQDQLHRLYPQMLQLCSAADASWLWDLIDLAPTPAHAALLSEEHVQRVLKAHRVRRVTAQEVLACLQAPALPVAPGAAEAAQAHCGFLLPCLRVLAEQLQACSQQVSALLHTLAEEPGDGEGPSDVAIVLSLPGVGRKMTAWLFAEAAQPLAERDSQVLRTHGGVAPVTKQSGKRRVVVMRRGCNPRLRHALYHMARVAMQRDAHFRRVYAALRAKGQRHGQALRNVGDRLLRILMAMLHNRTCYDASRIRREPVVQRG

SEQ ID NO: 465465 - protein, 451 aa, unidentified
MTKSKRRHPERDFTPTHPNAAAIDIGSRMHVAAVPPDRDPEPVRAFGTCTGDLQQLADWFERCGVRTVAMESTGVYWIPAYELLEQRGFEVVLVNARDAKHVPGRKTDVSDAQWLRRLHEYGLLRASFRPKGELAALRAYLRQRERLLDYSASHIQHMQKALMQMNVQLHHVVTDMTGETGMRIIRAVVAGERDPAVLATHRDRRCHASEAEIAAALAGNWREEHVFALGQALELYDAYHAKVAECDLRIEIVLRRLRDASAKPAGPLPPARHRDKTANAPVFDARAALHAVLGVDLTQIHGLGPSLALKLIGECGTDLSAWPNAKHFTSWLCLAPANKISGGKVLSTRTRRSGSRAAALLRLAAVTVGRTQTALGAFYRRLSARVGKAKAVTATARKIAALFYNTLRHGIAYADPGASYYEDRYRARVLANLRRRAKSLGYMLNEMPAPA

SEQ ID NO: 465466 - protein, 406 aa, unidentified
MKLQNHVFVGVDTHKNQHTACILSCVHQKIASIQTSNNPVKFDKFIQDIKSVKSPDKSLIFGLEDTQGLGHSLSQWLLDQGYTVKEVNPALTKRERHHSTDPDKSDEIDAEAIANVLLADFNELPDAFYDANFKAIKHLNNQRQTMVKEKTKIKNRLHNLIHQQYSEYQKFFSNPFCKTGLSFFEEFPHPSDLKYYAEDRLNKFLKNQVKSIRNDKAAKILSHVNKDKKKAADAKARSTIIKRLIKQLKLLSESLNKINQKLKSAVEKSQYQLTTMPGIGFKMAAIFISSIKNIDRFDSASKLARYAGLAPVEHSSGTSKRLNHKKYGCRDLNHAFYMLAFQQIGNNKNPASYSYYQKKLKEGKSKKIALICLQRRLVDIIYAMMRDRSAYKLPQNIGYEVLDKAG

SEQ ID NO: 465467 - protein, 345 aa, unidentified
MSIVGGLDIHRRQLTFDYLDTVTGQVARGQVAPADREHLRAWLARFTGRDGVAFAIEGCTGWRYVAAELAAAGAGVHLAEPAGTALARGRKRHAKTDKTDSRHLRGLLAEGRLPECWIPPEQVLEARALLESCHDLRREHTAWLQRIHSVFFHHGAPAMGEGILSSIGGPAAARTTAAAHLSPAGQQQVTIALAMMTCLEDQMHGLRHQLLDTARHLKGPRVLAAQIYGVGLLTALALTCWPGGAGRFSSARKAVRFAGLDITVSSSDRKGPPGRLSRQGPPVLRWALYEAGKAHARASAPDHAYYAQVKDRKTGKRAALSEARKIIRRACRILNDLGGDAFAAV

SEQ ID NO: 465468 - protein, 354 aa, unidentified
MSQTLNAAIAVIGIDIGKNSFHIVGHDERGAIVLRQKWSRGQVEARFANMPPCLIGMEACVGAHHLSRKLNSLGHDARLMPAKYVRPYSKGQKNDFRDAEAIAEAVQRPTMKWVATKTADQLDLQALHRVRERLVSQRTGITNQIRAFLLERGIAVRQGQRFLRAELPRILATPPDVLSPRMVRVIEGLAGDWRRLDERIEDLSGEIEAIARQEPGCERLMSVPGIGPIISSAMVAAIGTGDAFSKGRDFAAWLGLVPKQMSTGDRTILGKISKRGNRYLRVLFVQAAWVVLIKPMSWERHGLKPWIEAAKKRLHRNVLAIALANKLARIAWSVLARGRSFEARTITNVAAQAA

SEQ ID NO: 465469 - protein, 372 aa, unidentified
MRDYSAYVGLDVHKDTIAVAVAIPNGGEPIYRGEIAHTTKALSKLLQRLTSAYVGKIAFCYEAGPTGYGVYRWLIKKGFHCEVVAPSLIPRKPGDRIKTDRRDAIGLARLFRVGDQTAVWVPDQEQEAMRDLSRVREDMKGMETQAKHRLNSFLLRHSRRFSGKSRNTPAYFSWLEGLKFEIPTSQIVFQEYVNAVLTAQARVAGIEKEMELALPNWSLAPVVEALRALRGVDLVAAMTVMAELGDITRFTSPRQLMAFLGLVPSEDSSGLKQRRGGITKTGNGHVRRVLVESAWSYRYPARLTRHLRKKAESASPEVKIIAWKAQKRMCGRYRHLLHLGKCQQQVVTAIARELIGFIWAIAKEMQPKIITT

SEQ ID NO: 465470 - protein, 412 aa, unidentified
MSAFDWADTKHDICLQEAGSEQREFACIAHQVECIDEWAQSLRERFGGPIAIALELAKGPIVYALQKYDFLVLFPINPLTLAKYREAFKPSRAKDDPSDAELALDLLVRHPERFAPLQPQSVGMRTLISLTERRRELINDKTRVTNRLTHTLKQYYPQALQWFEQHDTVMFCDFLARWPTVLQAKRAHQASLKAFHHAHNAHRPKLIAERLAAIKAAVPLTQDPGVVVPCRLHALVLVEQLRLALQAIEQFDRHIAELAPTLSDYRLFAGLPGAGPHLAPRLLVAFGEDRERFQRAEEVQKYSGIAPVTERSGKKSWVHWRWQCPTFLRQTFIEWAGQTINKSFWAGAYYYQQRAKGSTYQAAVRALAFKWIRILYRCWKSQTPYDETKYLKALKKRRSSLLNNLVPDPLNA

SEQ ID NO: 465471 - protein, 343 aa, unidentified
MDHFAGLDVSVKETSLCIVDDAGRIVREVKVASEPEVLLAVLTNPACHFKRIGLEAGPLSQWLFNALAEVGLPVICVETRHMRAALKAQINKTDRNDARGIAQMMRAGLYRPVHVKTLRSQKLRMLLTHRKLLQSKAIAIENDLRATLRNFGLKVGVVGTVKFEARIKGLVDNTPDLVVLVEPLLIVRRVLREQIGILHRRLLAIVRNDAVCRRLMTVPGVGPVVALTYRATVDVPSRFRNSKAVGAVFGLTPSKHQSGESNRTGGISRCGDEMMRMMLYEAAHIMLVRSAKWSWLKAWAMKIARRRGLKKAIVALARRLAVIMHRIWIDGTEFRWTREVAAA

SEQ ID NO: 465472 - protein, 353 aa, unidentified
MSHLPEEREVILGVDTHLDVHVAVLVDVVGRIVATTSVPTTALGYEQLIEWARGFGRFTRAGIEGTGTYGAALARRMHEHGVKVLEINRPDRSRRRLRGKSDPTDAENAARAVLAGEANAIPKAQSGIVEAMRAVSMARRSAVKAKTQAINQLRALLVTAPESIRAKLWKGRPEQCVARCAQLQSLGDTPLLQALTNTLRLLASRWMNLAKELHQHDAAIVDLTKRAGRRLLGRFGVGPQTAATLLVTAGDNPNRLRSEAALAALCGASPLEASSGKTTRHRLNRGGDRTANNALWTISMVRMRSDPRTRAYVARRTAEGLSTKEIQRCLKRYIVRELYPLILADLADFVRKT

SEQ ID NO: 465473 - protein, 359 aa, unidentified
MIVIGIDPHMKSHTAVAVDAASGRTLAEKTVSADAQGHEQLLLWARGLGPERCFALEDCRHLTGRLERHLLPRGERLVRVPPKLMARARSSARSYGKSDPIDAAAVARAALREPDLPEAVLAGPEQEVRLLADHRDDLVGERGRIQKRLRWHLHDLELGLELPPRVLGRYVWLERVEAALRGLPPSTRRRLALEQVRRCRELTVEVRVLEREIDALMRALAPELLALPGCSALLGAQLVGQVAGASRFRSEAAFAMHSGTAPLPVSSGKSTRHRLNRTGNRRLNAAIHMIAITQARMHPPAVAFMERKKAEGMSPREARRCLKRYIARTVYKTMLRSERARAGEVVQAEFGAEELAVAV

SEQ ID NO: 465474 - protein, 345 aa, unidentified
MTQCNVIAIDLAKDIFQVCIMTPNGKITFNKAMSRAKLKEWLTKQKLSLVAMESCGGAHYWARFAKSLGHKVMPIPPKQVKPFRTGQKTDANDAIAIAVASRAANIKPARVLTVEEQGLQSVGKMRDLLDKQKLQLSNQVRGLLLEFGIIINKSIKSFKARIPEILEDAENQLSMPMRKSLFQMWALYSRLEDDFQVMNKGLIQLTGQDDDCKRFMKLEGVGPITSMRLKIQLGSGEHFKSSRQVSACIGLTPKQHSSGGKVQLGSVGKSSCDKPLRSCLFLGARAVVSKLKNRPAKTEKERWLKALIERRGANCASMALANKNARTAYALLKNNTDYNPVLIAA

SEQ ID NO: 465475 - protein, 326 aa, unidentified
MTNADELIFVGIDVSKGTLEIALDDSAKTRTLGNDEAGLKTLVAELSAIKPRVAVVLLEATGGLERAAATALCVNGFAVMVVNPRQAHDFAKALGYLAKTDSTDARALSHFARTLYHSERRERLLHRLPTPEQELLLAMVTRRSQLVGMRVAESNRLSGAHPSQRKSIQAMLKQLDRQIGQIDDDADRHLKHHFKDKLELLKGLKGVGPGTQTMLMAALPELGRLGQREIAKLVGVAPLNCDSGKFKGKRTTWGGRANVRAALYMAALSAVRYDPCLKAFYERLLQAGKPKKVALTACMHKLLTIINAVIRSGKPWQAGYAQAGHV

SEQ ID NO: 465476 - protein, 422 aa, unidentified
MLEQAQDREQIIERVAALDIGKASLTCCVRVPDSQRPGRRLQEVGTYSTMTRSLQQMADRLMDLGVTRVVMEATSDYWKPPFYLLEAHGFETWLVNARDVRHLPGRPKTDRLDAVWLCKVAERQMLRPSFVPPPRIRRLRDLTRYRSALVSDRSAEKNRVEKLLEDAQIKVSVVASDIFGVSGRQMMAALINGERDPRVLANLARGALRTKLPTLQEAFTGRFSDHHAYLLSRMLARIDALSAEIADLDARIEAEIAPFARAVARLDEIPGVGVSAARVIIAEIGVDMTRFPTPGQLASWARFAPGVSESAGKTKGTGATGHGNRYLAHVLGEAAVGASKTPTFLGERYRRIARRRGARRAVVATGRSLLTIVWHLLSDDSTTYNDLGPDFYDAHHNRDRKRNQHIRELQALGYKVTLEPAA

SEQ ID NO: 465477 - protein, 432 aa, unidentified
MKNSLNEKIKAITAKTLVVGIDIGKETHWAKITDHRGVLLRKKAIRVDNNIKGYENLLENIAKMEQKYEAEKIIIGFESSSHYWRALARWLKSIKEAPVIVGVNPYHTYQARAMDDNSPTQNDEKDALTIAHLIRDGRYYEVVFQEGEYAELRILNEERYQLVKKQTRAKNTLIAVLDEYFPELASVWSDVTCKTSREIMVEAAFPGEILKKPKADLIKIIKEASNGTQGKKLAEKLIEASKTSIGVRAGERAAKLKLQRLICELDFYEERLEENMGDIESAMKETEIDEILQSMPGVGPVISAGFTAEIGDTAQFDDWKQVRRLAGLNLVENSSGQHKSKTKISKCGRPHLRHIIYLMGEKCMMHNAEIRGYYRYLRERAKNQLTHNQALIAAGLKVMRILFYMAKNKEKYDSSKGLGEVRKHHIESLKSA

SEQ ID NO: 465478 - protein, 392 aa, unidentified
MIYVGIDIAKDKHDCFITNSDGEVLFKSFTISNNRDGFETLFQKIQSVSDDLTKVKVGLEATGHYSYNLLGYLLDKGLPTYVINPLHTNLYRKSLSLRKTKTDKVDARTIASMIMSDVNLKSYSDTSYHNEELKSLTRYRFDKVKERAKLKTSVSRLICILFPELEKLVPTLHMASVYALLSEFPSAHAVASAHLTRLINLLSQSSKNRYGKDTAVMFREAARNSIGSNMPTKSLELKHTIKLIQKLTSEIDEIEAAIKQIMDEEIQSPILTIPGISYRMGAMIIAEIGDFCRFDSADKILAYAGMSPSTYQSGQLDNCYSHMEKRGSRYLRYALYNATKYVCHWDKSFGEYLAKKRSEGKHYNVAISHAAKKLVRLIFAMEKSRKAYLPTA

SEQ ID NO: 465479 - protein, 348 aa, unidentified
MDHFIGLDGHKTSCTLVVLNERGKLKRKAVLPTEEKALLEFVQTIPGRRHLCLEEGNQSQWFYEIFSAHVHDLAVVQGRRSPGNKDDTRDALKLAERFRIGDLGQRIWKVAEPLATLKDLVRSYEMINKDLVRVKNRIQHLFRSRGVAYTKERCPFCSSRSSCQKPGFHQILERLRQQQEHLEPLKAEAQKAMVSEANRHPITRILKSAPGMGPVRCAQLLAIVITPYRFRTCRQFWCYCGLAVVQRSSSDWIRQPNGSFRFGPVRRSRGLNHNFNHMAKAIFKGAAMTVLSSMPNEPLRQDYQRLLDKGTKPNLARLTLARKIAALVLAMWKNQEVYDPATYRLPRK

SEQ ID NO: 465480 - protein, 340 aa, unidentified
MQTEKKCFIGIDVSKSWIDLSMMMVTGGIKHDMITHKFDNNLEGFKLLTQWLKSNDVPFNDNTLVVIENTGVYHRLIWQYCSDKGLSLHIGNAARIKWSLGITRGKDDTADSQRLCSYCYRHADELKATPVLDPVILQLKDLMRARTRLMTQINSNRVYLKELKLSNSKEVQKAIEKAHKAALDGLKKSLVLINEQINKIVREHKAINKNYRLLISVPGIGHVTSAYIICCTANFASQISGKQLACYAGVVPFEYSSGSSIKGKNKVHKMANKDLKKLLHMGARSIANHHPEFRNYYERKLKEGKHELAIINAIRNKIVLRAVAVIKKQTKYVDNYKKAA

SEQ ID NO: 465481 - protein, 454 aa, unidentified
MKKQDSYDYYVGIDCAQNKHDFAMKNNQDKFLIKRGHFSNTLQGYEKFLNTVLSKCLNKDKILFGMEVTGIYGTNLYERLKSDGYHVVMISPDSVKNYRDYKRLNKTDKIDSGCIAELLLNGDAQIVHVAKNGYTDLKAYIRRRNALKVTCTQETNRFLAKVCLYFPDLLKVFPSGRATLKAIFSIYPTPYSIIEADFDELVSVLQKASKNKFGVDKANELIHAARNSIVVRKSISDGELYNIHSLIDSIDSLESEIRNLEKIIDSKAEEFPAYHVLLTLTGCGKITAATIVAEIGDISRFHKASQIVSLAGLYGDNSKSGSSVNKRGKISKKGSRYLRHAIYMVAEFARRNNPIFKAYFTRKKNGDRTKHTLAVNAVANKLCKVIYSLMKNQSTYIIQYRDLVKLSESTQNEFFQNAETDFSAKTRRKKYLYEDEYGELHEFVFKSIKTALIE

SEQ ID NO: 465482 - protein, 387 aa, unidentified
MIYVGIDIAKQKHFAAAMTADGEVLIQPFGFTNDSVGFSLLISKLESLNSDDLLIGLESTSHYGENLICYLYNLSYKIAVINPIQTATLRKSNIRKTKTDKVDTILIIKSMILNNQRIFTQADIDSIRLKSLCRFREKTKKAKTRLKIQLVSYVDIIFPELQYFFKSGIHINTSYELLKKHSNPNDIAALHLTYLGNLLKKASHGRFGKEEATALKGLAKSSVGTGDAYLSIQITQTISQIELLEKQINELDESIKAIMIEMDSVILTIPGIGFLNGAMILGEIGDISRFTNPSKLLAYAGLDPTVNQSGKFNAKTTRMSKRGSKLLRYALINAAWNVSLNNKTFNDYFMLKKSQGNNHYAALGHVAHKLVRVIFKILKDNIAFNLD

SEQ ID NO: 465483 - protein, 361 aa, unidentified
MRSVLSIDVANGKSEVLLITEIGEVLIEPYEIKHCLNEFIKLKEKINSFNLDDLTIFMESTSTYHLPVQRFFTNNHFKVQVINPILGKNNTRNLRKTKTDIEDCYNLADLFFKNTVKIHTKDMNTIYSNMIELSRQEKHLTESIVRSKNRFKQIIANTFPEYIKCFTSSDIYGNTSLNFIKEFPHADIIKAKRIDALANNIYKSTKGHLPYSRCLAKAKKIKILANNSYPGIDINSCEIKNLINIIDIIFYNSTKLNEVKQDIINLAKQTPYFEIIFSIYGVGETSTAQIIAELGDINRFENIKQLNAFCGLDPTIVQSGKSINYNGPISKRGNRNARKILFITCCSIIRTSVLHNVILIF

SEQ ID NO: 465484 - protein, 344 aa, unidentified
MWIIGCDYHPSFQQIAFVNQVTGEYDERRLEHKGGEAERFYRSLAGQQVRVGMEATGGMRWFERLLGELGIELWIGDPVKVRAAAARKPKTDKEDARLLLRLLLEKRFPRIWIPTVEQRDARQLVLHRHRLVQTRTRAKNQLQAIARSEGLHAKCRVWSQAGQRELMALPLSPWGTVRRQDWQELLVELNQRIDPLDRALEQEAEQRPEVRLLMTHPGVGPVTAMAFVLTVCDPWRFQTSKQVAAYLGLVPQENSSGKNKQRLGHITKQGNSLLRGLLTEAAHAAAKHDPEWRRKYVRLAMKKNRSIATVAVARCLAVRLWWMWKLGLDYGQMQESRSHAEQPA

SEQ ID NO: 465485 - protein, 341 aa, unidentified
MKSTTIAVDVAKEVLEVAVSVQPGQVSQQRRLSRFAFMKFCADQPPATILLEACGSAHYWGRRLDTLGHRVVLLPPHATRPYVFRNKTDRTDTRGLLEAFRNEDIHPVPLKSVAQQALTALHRLRSTWLATRTARINTVRGLLREFGCTIPIGAHHVLARTSHLLADADSGVPDALRPALAAACTEIRDIENRIRVVEDQLQALADQTPAVARLRSVPGIGLITATALVAFVGDVQRFRSGRHFASYLGLTPREHSSGLVRRLGSISKRGDVYLRMLLVHGARAVLWAASKRRTPDRLRAWALHLQHLRGHNKAAVALANKLARIVWAVWKHNVDFREMAA

SEQ ID NO: 465486 - protein, 357 aa, unidentified
MRFYTKQHPFYCGIDLHARTLYVCILDQAGETLLHRHRQATPEALLKAIAPYRDQIVMAAECMFTWSWLADCCAEHGLPFVLGHALYMKAIHGGKAKNDKSDAHKIAVLLRGGMLPQAYVYPAKMRATRDLLRRRMHLVRKRGELLAHVQNTNSQYNLPAIGKKIAYKANRDGVAERCADPAVQKSMAIDLALIGYYDALLCDLELAIVKAAKHHDANTWYLLRTVPGIGKILSLVLLYEIPDIERFPRVQDFASECRLVKCAKASAGKRSGTSGTKIGNAHLQWAFSEAAVLFLRDNPAAQKLLARLEKKHSKGKALTILAHKLARAVYYMLKRQTAFDMNTFLHGEGRGVGERGA

SEQ ID NO: 465487 - protein, 326 aa, unidentified
MNVIGVDVSKDKLDCLWLRDSVTGKVKAKVFNNQSDQHKALVEWSVKNLGCEVAEILFVMEATSIYHEALAYFLHEAGARVAVVNPARIRDYAKALGSHTKNDKQDSRVIAHYGATQQPALWQPELPAVRELKALLARLDAVEKDSQREENRLEKATFSQASVDVIDSIGNMIAILAAEKKRLEQLIDDHINSDPTLKKDAALLKSIPGVGNVLSRYMAMTYHSRDFKSAAQMAAYLGVVPVEYESGSSVRGRPRLSKSGSGVIRAKLYMPAVVATQYNKQARELYQRLLKNGKTKMAALGAVMRKLVHVCFGVLKHQQAYSPQVA

SEQ ID NO: 465488 - protein, 434 aa, unidentified
MAVIPLHINFLEVLHMDNINPIHPRMTRTYCGVDSHKDSHTIAFLNCFHEKLGEIEIGSAPSEFPKFIKRAKKYLQPDTTFEFAFEDTTAYGRAFVKYLVEKGYSVKHADASKVATERGQVLHKTDSYDAECCARVLINQFDKLPDANPQDKFWVITNLVTRRNSIVKINVMVKNSLHSAIVDSYPHYKKFFSRIITDSALAFYEAFPSPHHLENMTVEQLTVFLHAASKGRLSSTKSETILKHVQRDKVRKSEFQDVQDFNVRSLVRQVKNNLDELAFIDVEIEKILTHFDYPLTTIKGINSLTAAKIIAEIGDIRRFKNAKALAKYSGVSPVTYSSGMTSLQMANARGNRKLNEIFFKLALSNVTPVGINNALLNPIFYTYYQKKISEGKTKNQAIKAVQRRLVNIIFSVMKHNRPYENPAIAHLPKDTASA

SEQ ID NO: 465489 - protein, 453 aa, unidentified
MPKTSSSMPENLTRMNPGASAIDIGSTMHMAAVNPDCADMPIRSFGTFTHDLHDLAAWFRSCGVTSVAMESTGVYWIPAFEIFEQHGFEVILVNARYAKNVPGRKTDVSDAAWLHQLHSYGLLRGSFRSNAQVATLRAYLRQRERLVEYAAAHIQHMQKALMEMNLQLHHVVSDITGVTGMKIIRAIVSGERDPDVMASLRDVRCHSSVETIRASLIGNDRDEHVFGLFQSLELYDFYQAKMLECDCKLEASIASMTVDPDAPLPPLPKVRTKTKQTNAPSFDVRAALYGLTRTDLTQIHGLGSSLALKLIGECGTDLRAWPSAKHFTSWLCLAPGNKISGGKVLSSRTRRSSSRAAALLRLAATTIGRSDTALGAFYRRLAGRIGKQKAVTATARKIAVLFYNALRFGMVYRDPGAAAYDERHRGRVIANLQRRARSMGYELAPMTAGDCVS

SEQ ID NO: 465490 - protein, 356 aa, unidentified
MKYFKDITLFVTNKAVFCGIDIHLKSWNLCFFCDGQIVEKTSIIGDFKNLSSHVSRLYSTAKSVHFVYEAGFSGFYLHRKLQEAGYECIITPPNRVPSILDKVKTDKRDAEKLARYLAGGLLKSVFVPPASVESERRLLRLRHSNQKKMTRIKNQIKSMLNLYGIFWPKEEGNKWTKGYLAWLKNLDIKETENRFILDQYLLEYQFHRNQIAVLTQKVKELSKKPSYHDNYQRLTSCKGIGLITAMTFLLELYDIVRFPSAGQFCSYLGLTPSQYSSGPHVRMGHITREGNAHVRRALVESSWTVIRHDPVLRAKYDRIRYRGTNGKKAIVAVSRSLAVRLRRCLLDQVPYQIGVC

SEQ ID NO: 465491 - protein, 407 aa, unidentified
MVSVGIDVSKEKSMVCMLRPYGEVVLSPYEINHTETEMAGLISRIGLLDGEVRVVMEATGAYHFPILQCLKEAGLFVSVINPLVMKKYASAALRKGKTDKLDSVRIANYGLDNWFKLADYQPPEEVYEELRQLGRHYSHYVTMRIQCKLNLDNLLQRTMPGIKTLLRGKRSEEPTKDKLSDFAEEYWHYDNIKSKSESQFVASYAKWAKKKGYHQSESKAKKIYAMALGGIPTLSSNRPSTKMLMLEAVKVLREVNRTLETILTQMQALSKALPEYNVVRSMNGVGDVLAPRLIAEIGDIRRFHSGSSLIAYAGIDSPPYESGSFIGTKRKISKRGSSLLRKTGYEVMKCVKSIKPKDDNAVYLFMLKKEAEGKPKNVAKIAALNKFLRIYYARVKEVYLQSAKSTA

SEQ ID NO: 465492 - protein, 391 aa, unidentified
MIYVGIDVAKDKHDCFISNSDGEVLFKAFTIPNNLDGFNNLYQKIESVMEDMSKVKVGLEATGHYNYNLLGYLIDKGLPTYVINPLHTNLYRKSLSLRKTKTDKVDARTIASMLMSDVNLKSYSDTSYHNEELKSLTRYRFDKVQERAKLKTSVSRLICILFPELEKLVPTLHISSVYAMLSEFPGAKHVANAHLTRLSNLLSEASKGHYDKETAITFREAARASIGSNMPAKSLELKHTIKLIQELTSEIDEIENEIKIIMDEINSPILSIPGINYRMGAMIIAEIGDFSRFDSPDKILAYAGFSPSTYQSGQLDGAYSHMEKRGSRYLRYALYNAAKYVCHWDSTLAEYLAKKRAEGKHYNVAISHAVKKLVRVIYHLEQTNQQYSKTA

SEQ ID NO: 465493 - protein, 355 aa, unidentified
MDSVKYIGMDVHKEAISIAVLNSSGKLVMECVIETKASTILQFLQGLRGSLHVTFEEGTSAAWLYDLLKPQVTKIVVCNPRRNALLKEGSKSDRIDARKLAELLRSNLLRPVYHGEHGVRTLKELARSYLTISKDLGRVMSRLKAIYRSWGIPCAGKQVYAPRYRSEWLGKIQEAGVRRRAEFYYQQLDALRPLRQQVRQELLAEAKKHSAWKLLRGIPSIGPIRAALIIAILQTPHRFRTKRQLWTYSGFGIETHSSADHRCVNGELERAKKQISIRGLNRNHHHDLKNLFKSAATIAAVKAGPFQEFYDALVAKGIKPEMARLTLAGKIAAITLVVWKKGVRFDAEHLKPQTA

SEQ ID NO: 465494 - protein, 370 aa, unidentified
MLDTTTFVGLDVHARSIKAVSLDVMTGEVRCATFGYDAGAVAEWVRSVDPRARCVYESGVTGFDLQKRLSGLGVDCVVGAVSKMIKPSADRRRKNDRNDAEFLARMLSVGNVVEVWVPDDECEAARDLTRALEDARDDLSRSKQRLSKFLLRHGLAFDERTPTGRRKGNWTRAHWSWIESIRFAEGADNDVLAYYVDAVRRAAEEKARLEGLVEAEARKPRWRRRVDSLRCLKGVDTATAADLVFEAGEFSRFGNARSFAAWVGLTPSEHSSGESDRRGAITKAGNKHLRKALVEAAWHYLTCSGRPKGLARGQAPDRGARRHAAKGVRRLVERREALLARGVHGNKANVATARELACWVWAVGLMAEEA

SEQ ID NO: 465495 - protein, 339 aa, unidentified
MTQYKRIAIDTSKAVFTLHGIDAADRPTLRIDLRRAGLIAFFRKLLPTEIVMEACGAAYHWARELSALGHNVRLIPPQYVKPFVKRGKNDRNDAAAICEAGGRPEMRFVPVKSLERQAQSMVLKVRQTLTDQRTALANAVRGHAAEFGLVVGKGLGNVAPLLSAIERETAIPAMAKEMFVLLGQRIDELNDRIKQLDVKLAAAHKTNEISKRLATIPGVGPIIALTLVTEIDPEAFQSGRHLAAWAGLTPKEHSTGGKPRPGRISRAGNERLRALLVVGATSVINVAVRFGGQRTTEWLRALLARKPRKLAAVALANKMARIAWAIMVSGESYRRPAAA

SEQ ID NO: 465496 - protein, 393 aa, unidentified
MMLAREEAARPADSGINGHIFVSVEMSRSKWVIGLHTPLADKIGAHTVACGDVDAILELVRREDAKLERTGYDGSTVVVCYEAGYEGFWLYRRLGALGIRVVVIDPASLLVDRRAKRAKTDRIDARSMVRALMAFTRGEQQVLSEVRVPTVEQEDTRRVLRERQRLVQERTAHTNRIKGLLKTQGIMDFDRRAADAVARLDKIVTGDGHLLGVCLKREIVRELERLKLVMEQTSQVEAERDAVVEEGRQRKGAAAEQKRDTTMIAVLNRLRGIGTNDATLLVREAFWRDFRNRRELGGWSGLAPSPWASGSVSRDQGITKAGPPMLRAHMIQITWRWLCWQPDSDLSKWFQKRTEGATGRMRRTMVVALARKLLIALWRYATTGVVPNGAIVT

SEQ ID NO: 465497 - protein, 403 aa, unidentified
MDFYVGIDVSKFKHTVAIIDQNGEIRKKSFNISNSREGFDSLLNELGLLGLKEQIKIGMEATGHYMNCLVRCLVSNGYQVQIYNPSLISKFRDSESVNLAKTDNLDALLIAKYVATHPFTSSPQISYLIGEIRKISRAKYFLFGDKTACYNHLLRYLDEVFPEFVGFFKKKEDGSKASKGRNLFESPTVRWLLSNYSSASKMAKMRVETGEALRRMSKGAISFNRFNQLRELAKNSIGYSTKIDEQIIRNLIDQVKIIDEEIDNLNEMLEPLMKELNSPILSIQGIGMNLAAMIIGEIGDISRFDNPEKLIKYAGLDVKIYQSGTINHRGHIRKRGSPILRYALALSVQKLRIHSPVFSEYYYSKLHQGKATNVAIIATTRKLIRVIWKMMITNQVFDNFKRD

SEQ ID NO: 465498 - protein, 330 aa, unidentified
MLSQTQVPCHAFWLGVDVSKDTLTVYASKDGTIQTIANQDRQIQTLLRHHPGAALVLEATGGYELAVVTAALKRGYTLYRVNPRWVRAFMECRGVFAKTDAIDAKALAEYARMHMADLRPFVAPSADNRTLAQLTRRRSELIAIRTQERNRLQAPDHGCLRQSINTVLNCLEKQIAAIEEQISSLVTKSAELTNKVDVLTSVKSVGQTTAANLLAALPELGQISGKQITALAGLAPQPRDSGKKKGYRRTGGGRKEARCALYMAALVAARHNPPFKVFYDRLLKNGKKPLQALIAVARKLLVVLNAKLRDAALATSNVASAPTPAPAISS

SEQ ID NO: 465499 - protein, 433 aa, unidentified
MDEVRDEPLHRERVCGIDIGKAGMSATIRVPSDRDPSRRAAETREFGTTRREVLALADWLRCWQVPAVVMEATGDYWKPVFYRLEAEGLECVLADARQVRNLPGRPKRDPSDSRWLAACFERGAVSSCFVAAPEFRLIREHTRYRRDLTGERTREKQRAEKLLESAAVKISSVLTDVHGVTGRDIMGRLIAGERDPRTLAELARGTARKKIPQLREALEGAEFFTPEHGALLGVMLARIDRIDADIAALTAVIERLLAPYEEQLQQAESMPGWGRRAAQDVIAETGVDMTRFATPGHLASWAGRTPLDRQSGKRAGPARRKHGNRYIGAVTGETSVAAGKTQTREGARYRRLSRKRGKAKANVALGNTQMRVLHVLLSNPGTRYTDLGPDYYDHDRNTARQVSHHVGKLGALGYEVTLCRRPEPDGTGGTQAA

SEQ ID NO: 465500 - protein, 441 aa, unidentified
MAMRKREDDEVYPNAAGIDVGASSHWVAVPRTADDQPVREFGTMTGDLHAMADWLLACGVDTVALESTGVYWIPVYEVLEQRGLTVWLVDARKMKYVPGRKSDVQDCQWLQKLMSLGLLRAAWRPAGEVCVVRAVVRQRELLLTEQGSWVQRIQKALLQMNLQLTEVLTDVMGTTGQAIIRAIVAGERDPKVLARFRHSLVKASTEDIIRALSGNWREEHLFVLAQALAMFDSLAERILECDAKTEALLVPLGRHDVQLAGPDKKRQKNAPRFDARTALARWAGVDLTRINGLSVATVMTILSEIGPDLSRFASVKHFCSWLRLCPATNRSGGKTLSSGTRPSANRARQALKMAAMSLSRSDLALGAFYRRLCSRMDKPRANTAVAHKLARMVYFMLTRGEAFVDQGQQRYEEQQRQRSIAALRRRASALGFQLQPNAPTP

SEQ ID NO: 465501 - protein, 333 aa, unidentified
MVEGTEGSHHKEGSKKMSKDSTVCAGIDTGKYKLDVAIDASADRLQVDNSCEGYRSLSAWLRQREVERIGIEASGGYEQAVVSFLRADGFVVIVFQPVQVRAYAKFVLQHAKNDNIDAALIARCTAAATDIHEPPDTRLAPLAQRLTMIEQLTQDVAQLKTRREACRDQRIREFWKQEIDRLKRLLQAELKQLVAAIGEHRDLSTRLDLIASVDGVGLRTAVAILVRMPEIGRVTREQAAAIAGLAPYDDESGQRRGLRHIKGGRQRLRQSLYAATLPAVFYWNAQLKALYKRLITAGKTHKLVLVACARKLLIFVNTVVARGTPWTSAPATT

SEQ ID NO: 465502 - protein, 357 aa, unidentified
MNTLTGRSPSRLYIGVDIGKDRLDLAATDFRLSVENNCAGWNKILANTRKLKRHVHFVCEPIGHYGGAFIRFLHARNKVVSLIPGIRARSFARATGQLAKGDRLDAEILAELGRRLKPPPTRKPKKTESELRAVMRCRFQLLRCCATEERYAVTIRYPKIRRILEPVIQAMKAQGRALDDLSLKVVSRDDVLFKKFHAFCNVSGVGEVTARTVLSELPEIGSLNRRKIASLAGLAPYSKDSGSTAAPRHIQGGRRKVRPALFMAALAASQRNPVLAPFYKRLRARGKLHRVALTAVMRRLLVYLNSLARKIDQDAMAPKPPPTATAKTKRNWIRAALSKRAHVKGRRICRRVHNAVT

SEQ ID NO: 465503 - protein, 405 aa, unidentified
MSNDVFVGLDWAVHTHAVCIIDTAGAVLDRFEVAHDRDGLAELMRRLTRRGDRLRIAIERPSGLIVDALVEAGHQVFPIHPNAVKASRPRYRSHGAKSDASDAYLLADLLRTDGHRWRALAQQSDDIRALRALVRSRDDLVDARVAAANQVTATLQTFWPGALAIFADIASPIALAFLQRYPSPRSARRVGEAQLHDFCKRQHYSGRRSPAELLQRLRGAAAGLVGASTEQAMAQVVLCHVAVLKSLVGRIAVLTKRIEQFMSELPDGLLLMSFPRSGEICAAQILAELGDVRERFPSADQLAAEAGAVPVTYQSGKTRSVAFRWACNHRLRQAITCLADNSRHANAWAKSLYQAARARGCDHTHAIRILARAWLRVIWRAWTDRKPYHPSLHGNAVALASRHGG

SEQ ID NO: 465504 - protein, 428 aa, unidentified
MAYRIAAIDVHKKMLAVVVADVAGEGEYEFERRKFGATPDQLHLLAQWLVEQEVEEVVMESTAQYWKPVWGALERYWKPARQKRDGATKMSGTLHLCQAKSNRGPRGRKNDFADGERMIKRLVSQELVLSFVPSPEQRLWRTVTRRKYQLTCDKVRFRNQLESLLEQAHIKLSSFVSDLLGVSARRMLKALAEGETDPAALAALADHRLRATPEQLRDALGACTELHEVYRRLLKMELEELRLMEEQIEQLDREALGLLQEHQDVVQRVAEVPGFGVDSALQMIAEVGPEAAAFRSEKALASWVGVCPGEEESAGESQSTRSPKGNCHMRRLLNQAAHAAVKVKGSIFEVTFQRLRAAGLKYQEAIWATAHRLCRLLWLILHKGVRYEERGPAVSAKSKRTRTARMIRELRKLGYRIEGGPLPAGSTA

SEQ ID NO: 465505 - protein, 374 aa, unidentified
MTTTRSHVGSVSEAMLYVAFELSAKRWKLAMTAGFGVEPWIRTVPAGDLPAVRRTLEQARGRFGLARETLVVSCYEAGRDGFWIHRALLAMGVQNRIVDSASIEVSRRARRAKTDRLDALKLVRMLVRVCAGERDVWREVHVPPEAAEAARQVSRERSALVEDQTRLTNQMRSWLTTWGAALPQRRTGAWWTTVCTGTGTALPSELQRRLARAAERLALVQTQIDTLDREQAATGAAAASTDALKRLIALKGVGMTGAAVLIAEGLVWRQFRNRREIGGLLGFAPTPFQSGETRHEQGISRAGNRRLQAVSIQLAWQWVRWQPESPLTRWFQHFAVTPRLRRIGIVALARKLVIALWRYSTTGAPPIGATLKTA

SEQ ID NO: 465506 - protein, 388 aa, unidentified
MRQVCGLDIHKDSVFVCILNENGVVFQEKCGVLTTDLEQMLEIMQRHDVSEVCMESTSVYWMPVWRVLEPYFELKLVNPFFIKQLPGKKSDMKDAEWIATCLHKDLIKGSYVPEDRIQQLRQYDRRIFDLDKDIVYKLTKLDAALQRCNIRISNYLSNTSTKGYKDVVDMIAEGTTDPEVLVKAIHGRTINRVGRNVVLGALTGVITEADVDMIRQLRDEVALAEKHKDECQSKMDTLCRQWFPDEYALLQTIPGVKARSATAILAELGNDVSAFPDAAHLTSWCGLKPRNDESAGKIKSRKITHGNKYLRKTLIECSWAARRTQGSFYSRFSYHQTIVRRKNSMKVQVAVARKMLSAIWFILHDHVPYKDYTPPTPEETSSDIDTTE

SEQ ID NO: 465507 - protein, 391 aa, unidentified
MFYIGVDIAKNNHEASIIDSDGKLVSESFSFSNSIRGLEKFQKFISSFSIDSNNCIIGMEATGHYWLSLYSFLIDLGFSCIVINPIQSDAFRKMYIRQTKNDSVDSFVIAQILRFGEFSVSHFSDEDTFALRNLSRFRFALVDEASDWKRKLVCILDQVFPEYSSLFSNIYGVASKELLSKYPLPEDMISIPADELAKMLSKCSKGRFGIDKAKEIQEKASNSFGVKFALKSFSFQIKQIIAQISFLEDQIADIEDEISSMINSLCPVITSITGIGDVLGAAIFSEIGDISRFERANQLVAYAGLDVAVKQSGNFNATDTKISKRGSPYLRRAIWLAASVAAFKDPALSVYYQKLRQRGKAHGTAIGAVARKLTNIIFAVLRDNKTYIPNI

SEQ ID NO: 465508 - protein, 355 aa, unidentified
MDSIKYIGLDVHKEAIAIAVLNGVGKLVMESIIETKASTILQFIHGLRGDLYLTFEEGNWAAWLYDVLKPHVTKVVVCNPRKNALLKEGSKSDKIDARKLAELLRGGYLRPVYHGENGLRTLKELARSYLTLSKDLSRVMNRIKALYRSWGIPCAGGSVYSPRQRTGWLAKITEAGVRRRAEFFYQQLDALRTLRQAVRRDLLAEGRKHGATKLLRQIPSIGPIRGALLIALIQTPHRFRTKRQLWNYSGLGIETHGSAEYRYVEGQLQRRKKPQQLRGLNRDHNHDMKDLFKSTATWASSHPGPFADFYAALLGKGMKPEMARLTLARKIAAITLRVWKRGERFDVKHLKPQTA

SEQ ID NO: 465509 - protein, 413 aa, unidentified
MEQGLITAVGVDVSKGKSMVAVRRPGGQIVMPPIQINHTTEELARLAERLQGLGGDIRIIMEHTGMYWRPIAHSLKEAGFFVSVVNAILIHNFSDNSLRKVKTDKADALKIANYGLTFWTELRDFSDEDETRQMLKMQCRLYERTQKISVELRNGLISLLDQTFPGINEILPAHYCTKRGHYKWVDVSKRFWHKDCVKKLSESAFTNTYQKWCKKEGYRFSRIEAEKIYRAAQNTVATFPQNESTKTLIVQAVDCLNAVYESMAVLRTEMKRLASLLPEYEVVMAMQGAGDVTGPKLMAEIGDVRRFTNKNALVAFAGVDAPPFQSGSFEAKSRHVSKRGSPHLRRTLFQVMSVVLQRSSTDNPIYSFMDKKRAEGKHFYVYTVAGAAKFLRVYYARVKEYLLALETKQETAA

SEQ ID NO: 465510 - protein, 373 aa, unidentified
MNVILYIGLDVHNDSIAISIAPSDFTEVRRYGVIGGTHEDVHRLVKKLQSAHPEATLRFCYEAGPRGYPLCRFLRGLGLECIIVCPSRVPRRPGDRVKTNRRDADQLARLYRAGEIGGIHLPQPEDEAVRDLLRSRDQVLRAQRRARQQLKMFLLRHNIRYAGTTSWTAKHLRYLGTIKMPFSPQQFAFQELLGAISEAGARLERFDAQVEREVAGWRWEPVVRALMSLRGVRLLNAAILVAELGDLARFTRPAQLMSYLGLVPSEDSTGDERHQGGITKMGNSHARRALVEAAHQYRVGARISRQLQARQEGLPKGVTDVAWEAQRRLHHRYKQLSGPGRKKAPVVITALARELSGFVWAIARQVPPHPPRH

SEQ ID NO: 465511 - protein, 343 aa, unidentified
MEYSAIDLHLRHSQIRIVEADGSVVLDRRIPTSQEGFASVFGGRPRMRILLETGTESEWVAQCLEAHGHEVIVADPNYALMYGARQRRVKTDQRDVAALAEACRLGIYRPAHRVSAEQRQRRRELRVREQLVRVRTQAINLLRAQLRQEGYRLPSGSAEAVGKRYAQLVVPAALHQALAPLLDLLAHLAPALKQAGEAARAQAAADPIVQRLMTAPGIGPITALTYRATVDDIHRFTDAGSASAFFGLVPQENSSGERQRRGRITKAGPPVARSLLIQAAWVVWRQQTGGGALHAWVTRLADRRGKRVAVVALARRLSRILYAMWRDGTEYRLASVPAQTSDV

SEQ ID NO: 465512 - protein, 451 aa, unidentified
MAKLLRVVYERVVGLDVHKKTVVATRMRVTEADRWEWETGTFGTMTTDLLRMHDWLAEWGCTHVAMESTGDYWKPIYNILEGDFEVLLVNAQHVKHVPGRKTDVSDSEWLAELLMHGLLKPSFIPPRPQRALRELTRYRGRLVQERTRVVNRVQKLLEGANIKLASVVRSIMSVSAREMLEEIVAGQTDPQLMAELARGRMRAKIPELEKALTSLVDSHHRFLLTKQLVHIDFLDEQIADIGTEIAQRIERMSQSVERGNGTSAGDGDGLGAEETLSDAEETPLTWVEAVELLCTIPGVGQRTAEVMLAEMGLDMSQFPTDKHLTSWAGLAPGNHQSGGKRYSGRIRKGNRSLCTAMVQAAWAVTRTKDTFLKARYHRLAARRGKKRAIVAVARSMLASAWHILTYRQPYQELGGDYFDQRKKEAKISYLTRQLEKLTDGVVRIELQAALA

SEQ ID NO: 465513 - protein, 344 aa, unidentified
MAATDPMYHLYVGVDIAADTFMAAWLPPGGAPTAPLPYEQSPAGYGCFQRRLMTTGVAPAETLVVVEATGNYWVALAVALHEAGYQVSVVNPLRAHHFAKAQLRRAKTDALDARDLARLAHALHPAPWTPPPLVYHEVRQRLAARDALLDMRQQARNQRHALLQWPVVVAGVRRHLDELISDLDQRIASLEKEIAGALEGSVWATSLACLTSAPGIGLITAAWLLVGTLNFTLCAGPTALAAYAGLVPMPHESGRSIRGRPSIGHGGNARLRTALYMATLSAAQHNPAIKVFYDRLRAAGKPLKVARCAAARKLLHQAWALGSKLQHFDPDQQQQHAALSAQAA

SEQ ID NO: 465514 - protein, 457 aa, unidentified
MAKRSRSALEQQLPTALQAVNLHAAGIDVGSEEHWVAVPADADPLPVRPFPAHTAGLIALAAWLAACGVTTVALESTGVYWIPLFELLESRGFEVILVDPGTMPRNGRPKTDVHDCQWIQRLHTLGLLSAAFRPDDPVVVLRSYLRLRLTLLADAARYVQHMQKALTQMNVKLQHVVSDLTGKTGLDIIQAILDGVRDPLALAKLRDCRCKEDEATIAQALHGNWREEHLFALAQAVAAYHFCHRQIRDCDGRIEAGLRALPASRPTAPLPERTKARRRNRNRPGFDPRPLLHRASGVDLTRIEGIDETTALNVLGEIGLDMSRWATVKHFTSWLGLCPHHKISGGRVLSRRTRPTANRAAAALRLAAASLHRSQSALGAFFRRLKSRKGTPKAITATAHKLARYIYTMLKHGEEYVTRSLESYEQEHRERQVRVLSRRARELGYALVTATGESESR

SEQ ID NO: 465515 - protein, 328 aa, unidentified
MFYLGIDVAKAKLDCCLLLDPESTKRKSKVVANTKAGFATLLQWLSGKGVSFPQLHAVMEGTGVYHEQAALALADAGVTVSIVNPAQIRDFGRGLAVRTKTDGVDSFVLARYGALLKPAAWQPPAPESRVLRALLARREAIAQDLQRELNRQEKANETETPALIRQSIDGSIAFLRKQLVELQENIDHHIDRHPNLRRDMDLLTSIPAVGPQTASNLLAIVHLHRFDSAEQLAAYLGLVPVERQSGSSLLGRARLSKVGPPRIRAVLYMAAIVATKYNPHVKAVYDRLVAKGKAKKAALGAAMRKLVHLCFGVLNTRICYQADYVKNG

SEQ ID NO: 465516 - protein, 405 aa, unidentified
MELERATWILGIDVGKESLSCALLLKDETFRCRFDVEASLSGFQMILEKVKTETKGDGAVVFALEPTGHYWMVLGQFFEDHNQSYVLVHPLVVARSREVKQLTRGKTDALDARLIAELACRGAVTRTQIPEDDWATIRFFAREYMDREKEIAREKNRMMSYLETALPGFLEVFPRPLGMNSRACLRVLANFREVLQGDIVQFESQVRKHITGKRLMTSRVRRLFDMLQRGDALGLRAGRKTLFWRIINGLDRLELYEKQQDMASNALISLYEQCEFKPYLDSVWGTSPLTNSLVLGFMGDPTSYDTPASLIKMAGCDPVPNESGKFKGKATISHRGRNLLRKAGDRISFLLEKRNTVFQNFIHHLTVRPKNKLTKRQARIACINKYFRIIWVLCNHRVLFNPALA

SEQ ID NO: 465517 - protein, 328 aa, unidentified
MRLNVGIDVSKETLDLCLLLNQAKSGSKFKCLKNRKVDYLAINDWILKLSKCQPNDIVITMESTGVYHEAIALYLYTMGFQIFISNPGKAKKFSQALGLIHKTDKSDAYMLARYGAAQNEQINLWKPDDANTRNIKALTRRLSALEKDRLRENNRLEASEISDAHDRVLLSITRIIRIIEDEIQEIENEIDTIISACPTMKKNHDLLMSVIGIGKVMSRELVYLFSAKNFSTAKQAAAYVGLIPKLNESGSFKGRTTLSKIGPSRIRSKIFLAAVSAGTHNPGIKAQKNRLLAAGKTKMQALGAAMRKLIQICFGVIKNQTKYKSELA

SEQ ID NO: 465518 - protein, 401 aa, unidentified
MEGPIVSIDVSNGNSHYMCFIKNNKRFGKVKKIDHDIEGFKRLLEDIQKLEAETNEKVCAVFEATGVYTKPLERFLSKNSIKTYMINPLESARKRKEEIHNKKTDKLDPISISKVYYDKEKMMELKKKDETYNWLRKKNRLYEDQLNHLRKYKVTFQNQLSICFPGYLDLFKDGYSDIPMIILKKYPHPDLLKNKKAETVARYLEKNTCHNHKVSLEYALKIIEFAKKTYPGCEKDDVEVEIFKILLDKVIETQRECEKTLNEMITVASTLEEYRYISSIDGIGPNLAARIIAEIGDIEEFKSREALVAYAGLDPHIYQSGDQDGKHLKISKKGNKYLRCLLFLAVGCSIRGAKDNPVNRFYQKKKQQSNPLNSKAAKTACTAKLLKIIYGICKNKTRYER

SEQ ID NO: 465519 - protein, 338 aa, unidentified
MKTHVGVDLHQRFCYLTAVNASGKVFKQGQVVNEGAALRAWLRQLPGPRQVVVEASGFWPAFARGVAPEFERLVMVHPQRVKAIASAKLKNDRVDSETLAHLSRCDLLPEAWMADEATQQLRLLVRLRITLGRQRARAKNQLQAVLHQEGFKKPVTDVFGKRGRAWLKGLELSAAGRLVVDTWLREVDHLDVELAAQTRELERMARADARARFLQTVPGIGAYAAMVIVAELGDVDRFGNKRGLASYAGLTPVVRESAGKRKRGGITHQGSNTLRWIMLQVAQVAARYSPGARSYYAGLRARKPAQVARIALARKLLTVVWSLLHHGVCFDEGLFIRN

SEQ ID NO: 465520 - protein, 467 aa, unidentified
MAARKQKQKRMSAQVVEDEDYQLRYEVVAGIDVAKESAVVCVRMPPAAGRKHRTSHLQAVPAMVPAIGELAAELKAAGVQMVSMEATSDYWRVWFAVLEEAGLAVQLVSSSQARNLPGRPKTDKEDARWIARLTEMGMLRSSFVPPPEIRALRVYTRHIWDLTADRTRYWQRLEKLLEDALCKLTSVVSRLAGHQTARAVIEAMIAGERDPRALAALGQGRMRNDRLPALAEALSGMRFGPQHAHAAASLLRAIDLLEAELRDLQERVTAHLAAIPASWGVDADGVTGPEAGRAGDAAVLAAADRLDEIPGLGREAAAALIAEIGLDMSRFPTPQALVSWAGLTPTARQSGPVKGRGKKGRGNTYAKRIAVLAAYAAANTDTFLGERFRRLAVRPGGGGRKKAGCAVGRSILVIVWHLLNDPAARYRDLGPDWHATHTDRSRKARNARRQLEALGYDVIITLREDAA

SEQ ID NO: 465521 - protein, 354 aa, unidentified
MPATAQTAIAVVGIDIGKNSFHIVGLDDRGAIVLRQKWSRNQIEARFANMPPCLIGMEACVGAHHLSRKLNALGHDARLMPARYVRPYSKGQKNDFRDAEAIAEAVQRPTMKFVATKTADQLDLQALHRVRERLVSQRTGIINQIRAFLLERGIAVRQGQRFLRVELPRILATPPEVLSPRMVELIEGLAGDWRRLDERIESLSGEIADLASRDAGCERLMSVPGIGPLISSAMVAAIGTGDGFSKGRDFAAWLGLVPRQISTGDRTILGKISKRGNRYLRVLFVQAAWVVLIKPNSWERHGLKSWIEAAKKRLHRNVLAIALANKLARIAWSVLAHGRAFEASKLAAAVTQLA

SEQ ID NO: 465522 - protein, 346 aa, unidentified
MKKIFIGIDFSKEKFDATLIKAEGLKECAPSMHEVFDNKTSGFRRLVRWVKAQSEGLPIDTWLFCGENTGAYSIGLSNYLYASGYDMCLECAYKIKHSAGILRAKNDKTDSMVIAEYAMRNYDKIRLHKPQSSSLTCLREVFLYRHSLVRQKVALTVRRDEKRLTQEKSDARAFMSFTSKHLITEINKAIYKCDQKIKETIAADDELREIFDIITSMPGIGVQNATCLMVYTDNFQKFDMDSRKIACYYGIAPFGRQSGTSVNSRPKVSPFANRMIKSLLSQAALAAIKSDINIHNYYQRLIERGKHPLLIHNNIKNKMLHALVAMVRDRIKYNPDYVYQINKSAA

SEQ ID NO: 465523 - protein, 310 aa, unidentified
MNERCSVGIDVSSAWLDVAAGQEIWRVANDDDGIAELVARLLELEPARVVLEPSGGYEMRLLRALSASELPAAPVNPRQIRDFARSLGRLAKTDRIDALVLMQFGEAIQPPIRLLAGGDGARLKALEARRRQLVEMTTAEKNRLRTAPEDIAAAIREHIKWLGQQREALDSEISELLSAIPEWCEKSELLQTVPGVGPVVTANFLANLPELGTLNRRQIAALVGVAPFNRDSGSYRGKRTVWGGRSQVRTALYLAALVASRHNPVIRDFYERLRAAGKPKKLALVACMRKLLTVLNSMLRNRKPWSLQPA

SEQ ID NO: 465524 - protein, 327 aa, unidentified
MSKHSMICAGIDTGKRRLDVALDGSSERLQVANTAEGHEELFAWARRHRVKRIGIEASGGYEQPVVCRLRQGGFVVVVFQPGQVRGYAKFHLQRAKNDKIDAALIAACTAATRKIHAPPDPRLAALAELQTQIDQIASQIACFKNYRESCRDPQLRQLWEDEIRRFRGHFKQRLKELVAAIRRHADLAKRLALIVSVNGIALRTATAIVVRMPEIGRLSRGEAAALVGVAPYDDDSGTYVGIRHIAGGRERLRGALYAAALPAAFRWNPALVALYRRLIAAGKPHKVALIACARKLIIYVNTVVERGTPWTPQGAARQADPAPTASG

SEQ ID NO: 465525 - protein, 407 aa, unidentified
MEILHPRCAGLDVHKDTVVAAVRCVSEPKHQEVRSFGTTTTELLALSEWLTSHGCTHVAMEATGVYWKPVWHVLEGDFELVLANAQHIRNVPGRKTDVADATWIADLLAHGLIRSSFVPPAPIQELRDLTRTRKQIVREVSQHTLRIQKVLEDANLKVGSVLSNVLGKSGRAMLESIIAGETDPGRLADLAQGTARKKWTELVEALRGRITAHHRAMLKLHLDIIDALNKALGEVDASVGKALAPIQDSAGLLKTIPGISDIAAHVIVAEIGVDMSRFPTAAHLVSWAGLCPRSDESAGKRHSTRVRKGAPWLKTTLVSAAWAGVRVKNSYLRSQFLRIKARRGAKKAILAVAASMLTACFHMLRDGVEYRDLGSEHFDRHDKTKTITRLVRRLQNLGCDVEIKHAA

SEQ ID NO: 465526 - protein, 438 aa, unidentified
MKKIRTHAAGIDIGAKKVYVSIEDLPVKSFDTFTQDLEALGVYLVAHGIETVAMEATGVYWVILYDILVSQGLDVWLVDGAGTKQVPGRKTDVKDCQWIQQLHSYGLLNKCFVPDIRIQELRAYQRLREDHIRSGAMHIGHMQKALILMNIRLKEVISQIHGTSGMRIVRAILSGERNAEKLALLCDQRILKTKKEWVIRSLKGHYSEAALFELGQAVACYDFYGEQIAMCDIKLEEVLKKMDLDGTPKPRSKGARKAIRHNRPDIENMGGHLLGIFEGKDATVLPGITDYNWMQLLSEVGTDLGKWKSEKHFTSWLGLAPKQHNSGKMKRNYKPKGAPRAGLIFKQAAVGLLNSKHIALGAFGRKIRAKKGGLVAIKAVARKLAELYWKLFVKGLEYVENGIQKYQEKMLLNKQRAVTRMVQELGLGITPLKIQSAD

SEQ ID NO: 465527 - protein, 329 aa, unidentified
MQTILHNCCGLDVHKDSIVACILKTSDFSCDSNNEENTKSEIRVFETFPNSLKELKSWLESEDCHHVAMESTGVYWFPVYEVLESAFDGNIELLVVNARHMHNVPGKKSDIKDAEWIAILLRGGLLAASFIPPVEVRELRQLARYRKNIVEDIGTQKNRIEKTLQMAGIKLSTFLTDVFGVSGRNLISVLIKKGYISQADVEIETKRISREKKDAIKRVINNKLTTHQREFLKMQLTFLDEMLSHLETIENSIAELSAQFQDDIDRLDTIPGIATTAATAIIAEIGTDMSKFPTAERFCSWAGVTPGSSMSAGKKKALASHKVTHTSKA

SEQ ID NO: 465528 - protein, 328 aa, unidentified
MILGILGIDLAKLSFDVTLRSGAGTEHHATFPNTPAGFTQLAAWLAEHNVTTVHACMEATGAYWEALATWLYAHSHTVSVVNPARIKGYALATMQRNKTDKLDSALIAAFCAKHQPAAWTPPRPEQQELRALVRHRDDLLQTQLQQQNRRRDTTNARVRASLESLLAAINAQLEAVNEQIQAQIAACAQLQAQLALLTSIVGIGAVTAAKILAELRDLETYASAKAAAADVGLTPSHYESGTSVRRRPRMSKIGKADLRAALYLPALTAMRWCPALRTFAERLAARGKPRKVIIGAVMRKLVHICYGVLKHQTPYDPAKVSLTATPST

SEQ ID NO: 465529 - protein, 403 aa, unidentified
MNSVGIDISKGRSTIAVMRPFGEVVISPFEVRHTGSELSKLAKQLKSLDGETRVVMEATGNYHASVAKLLHNAGLYVSVINAKLVHGYGNNELRRVKTDRKDAVKLANYGLDRWLTLPRYIPEEDTRLLLKNCYRQYRQYSKVQTVLKNNLISLLDTVFPNANRLFSSPIRGDGSEKWVDFVAEFWHCRCVSEKSERAFTSKYLRWCRKHGYNFREAKAHTIYAEASGHIGVMPKSETTKLLVEQAVAQLRATSTALAALKHEMQSLASQLPEYPVVMDMFGVGPTLGPQLIAEIGDVRRFYSKKALVAYAGLDAPPNDSGDVTGRHKSMSKIGASSLRRTLFLVMSVYLQTAPLDEPVYQFMDRKRAEGKPYRVYMMASANKFLRIYYATVKAYLESLEHTA

SEQ ID NO: 465530 - protein, 343 aa, unidentified
MDEISMIGLDIAKNVFHIHSVGASGAPVLRRELRRGRVEEFFAKLPPTLVGLEACGSAHHWARVIGRYGHQVRLMHPGYVKPYVKRNKNDGRDAEAICEAVGRPNMRFVAVKTVEQQATLAVQNTRDLLVRQRTAAGNALRGMLSELGIVAAQGTKGLRTLMQQLEQPSETIPELMRNALLLLARQWQALDAAERALEQQITRAAKADGEARRLMAVPTVGPIIASTVLAKVPDPGMFRSGRDFAAWIGLTGRDRGTGGKHRIGRISKQGDRVLRTLLINGASAYLLHQKRRGVTDPWLRDLLARRPYKVVMVALANKTARIIWAMLAKGEEYRARASVPAAA

SEQ ID NO: 465531 - protein, 352 aa, unidentified
MAAVMIGVDPHKASHTAVVISGAEEPLGELRVRASTAQAERLLAWAAAWPERTWAIEGAGGLGHLLAQQLLPAGERVLDVQPKLGARVRLLDTGNVNKNDPDDARSVAVAALRSPGVREARPDDHAAVLKVWSKRRRDLASSRTQVVCRLHAVLCELVPGGDPKKIIADRAARLLGSITPPDAVAAARRELAAALVEDLRRIDGQLRETRKKLDTAVRASGTSLTGLFGVGPVTAATIIGEVRDVSRFTNRDRFAAYNGTAPIEVSSGQRKVHRLSRRGNRRVNHAIHMAAVTQIRQKHSEGRAYYDKKLAEGKTRKEALRSLKRQISDAVFTRLRADARRATAQVRDPGGQ

SEQ ID NO: 465532 - protein, 391 aa, unidentified
MEARVVNNLSPAAAHDGAVRCLLAIELSKKSWVVAVNRPLLDKINLYKLKPCDWKGLLQLIERIRKRVSEELKKPVEVISCYEAGYDGFWLHRLLEAHGVHNHVIDPASLQVDRRARRAKTDGIDVGKLLRSLMAYLRGEPKVWSVVRVPTVIEEDNRRLHRERSRLINERIQHVNRIKGLLAIHGIYDYEPMHPERIQRLERLRTADRHTLPLHLKAEILRELQRLELVLGMIQTIETERDAIASAKSKSQQTTSAKKIKHLVKLKSIGPEFATVLVGEVFYRTFNNRKQIGSYVGLTPSPFQSGSTSRDQGISKAGNTKARTTMIELAWLWLRNQPDSLLSIWFRERVASRKGRIKRIAIVAMARKLLIALWRYLETGVVPEGAVLKSK

SEQ ID NO: 465533 - protein, 315 aa, unidentified
MERSPVAPTFVGIVVAKNRLDVHLRPAGETFALGRDGSGLAALVERLVALTPALVVLEATGGFEVTVAGTLAAAGLPLVVVNPRQIRDFARATGRLAKTDRLDAEAIARFAEAVQPAPRPVPSAAAQALGELVARRRQLVEMITSEGQRRRQTRDPRLGRRLEAHVSWLQRELATLETDLDDAVRGTPAWRATEDLLASVPGIGKTSARTLIAELPELGSLDRRKIAALVGVAPINRDSGCFRGRRMVMGGRASVRTALSMPTLTAIRHNPALQAFYQRLIGRGRPAKVAITACMRKLLVVLNAILRDQTPWQSA

SEQ ID NO: 465534 - protein, 343 aa, unidentified
MGEVSTIGLDIAKSVFQIHGVDAGGAVVIRKRISRAKLLEFFATLPTCLVGIEACPSAHYWSRRLQGLGHTVRLMPPSYVKAYVKRSKNDANDAAAICEAVTRPSMRFVATKSEQQQSGLMLHRSRQLLVCQRTMLSNAIRGHMAELGIISAKGRNGTAELLKIIADEQDDRIPAAARFSLNVLARQYAAIREETVAIERRIHAWHRSSEESRRLEEIPGVGPIVATALMAEVGDWKTFSSGRSLAAWIGLVPRQHSTGGKERLGRISKQGNRHLRWLLVAGAMAVIRYARQHGTKRPWLARLMDRRPLKVAAVALANKIARMAWAMMVRGERFKEPKLLPAA

SEQ ID NO: 465535 - protein, 329 aa, unidentified
MGYFLGFDVAKTKMDVALINEQGTEQWTDIIPNEATAIAGLLLTTAGSHPGHELQCVVESTGCYHHPLLEAGTAVGVDVRVYNPIITRQQIKATVRGKKTDRTDALMIARLGLRGEGRLYTPEPYTTTKYYVRGQQRLSAISTSLKLYEAHLTSVLEVELTEAAQDILTAIQEQLKAARAQFIRDTVASTPSGLMRRLQTIPGIGPYIAASIIGEIQTMARFPRAKHVIAYAGLDPKIRQSGKSLNSTGRLTKRGSSYLRRSLFIAANIARQHDPNFKALYDKKRAEGKTYTVAVCVVARRLLVITRAVWLREQDYDVNLWNGNLDKPK

SEQ ID NO: 465536 - protein, 316 aa, unidentified
MQSILNLGADVDSRTVMVACSAGSFKPHRIANERNAIQAWLRTVPRGSRLAMESTGSYHELLADLAHQAGLQVFIVNARDLRRYGQGIRRRGKTDRIDAEVIARYIAREHQELHAYVPPTDAQRLLARLIGRRAKLVQAKDSIRQSLRSLPALQSEACRLIGHIDRVIASLDLLMQRTVQQIPAAREAAGHIATIPGIGVLTSTFLGHRFTRLPYATSDAVVAATGLDPRPEDSGQKEGRRRLSKRGPAEARRLLFNCARSAAQRKPWRPYYDAQLAKGLSKTAATVVLARKMLRVAFAVYKHHQPFNPLLIGGGT

SEQ ID NO: 465537 - protein, 402 aa, unidentified
MSQVKEQVIIGVDPHKLSATIEVVDAHEKLLGSGRFSTDQAGYAAMRRYAKTWPDRVWAVEGANGAGRPLAQRLLEAGEHVVDVPAKLAARVRLFDTGHNRKTDALDAHSIAVVAVRTPTLRVLQVDGELEALRILTDRREALTRRRVQTVGRLQALLAELLPGQAKPDITTGQAKKMLASVRPRDIAGKTRRRIAAEELTELVAVEAKMKKATAELKAMVLARGSTLMDLHGVGPVVAARILADVGDVARFADRNRFASWTGTAPLDASSGEQNRHRLSRAGNRRMNHMIHIAAVTQLRLDTDGRAYYRRKRAAGKKPMEAMRCLKRRISDAVYRQLLADAERLGASPGGHCGATQESSAVDLPPHIDTSDQPLPGPANPTLQPAPRRRKNQAAHALIATS

SEQ ID NO: 465538 - protein, 399 aa, unidentified
MECRDAPAERPRPAPGQALSRSLVTLDQNSTIIAVVEMSQSSWLVGGVVPGIERQPCKKLEPSPERLLAVLHRWRDEAVRAGGNVTRIALAFEAGRDGFWLARWLAARGVEAHVIHPSSVAVSREHRRAKTDRLDTELLKRGFLGWLRGERGHCSMVRVPTLAEKDAKRHNRERECLVKERTRLVNRMKGALARLGIRNFRPTLRNAAEHLAGLYTPEGSPLPPNVAAELARDIARLGLVIGQIKQIEEARRRRLEEQPESSPHAMVRLLARVVGIGTETADMLVNEVLSRPLRDRRAVARYAGLTGAPDESGAKRREQGLAKAGNARVRRGMIPLAWRFLRFQKNSALARWYQARTADRRAGTRKTMIVALARKLLIALWRFVTTGETLEGVVLRPAG

SEQ ID NO: 465539 - protein, 465 aa, unidentified
MTIHSVGIDFHQGQHRVRCLDDRAQPCDSFGFQTTPEGLATLEEHIFKDGSNPIVVFEPAGIPWLTVAAYLRSRYPDCRLVKAKMQKVAALRRYLRGPVKSDRIDALTLAKMPFIDPEQLEEVYLPSAEIHALQRLTRQRKRLESDIAGRKVRIEMIIDGYLPGVRKAFASPWSTQVRAFLRARLNPFAVVLDGEKALSTFLSKAASRDKGSRAESHQIFQACQAVADICKVAEPATTINKEFFVELQDEIARELRLMETEEAESESLEGRVSEIYHKLHPSNNLCTIPGVGEHTAPIFLATIGDPARFRNQSAFANWTGVVPRSRQSSNMEAKGLRMTKAGPSIMRMALFQSGNIGRRWDPQMAAIYYRQMVSHGKNHKQALGAVMSHLGARVLKVLLEDRPYELRDIDGKSVTRDYAKRLILTKYHVSEDIRRERRRRNSKIGKIGETATNRINEAAEAPQPV

SEQ ID NO: 465540 - protein, 351 aa, unidentified
MMIIGVDYHPSFQTIAFLMEETGECGEQELNHTDGQAEKFYRDLKQRGISVRVGMEATGYSRWFERLLAELGFEVWMGDPAEIKAKRVKKRKTDREDARLLLKLMLENNFPQVWVPGPENRDLRQLLWHRHRLVQMRTRIMNQLQALAMNEGYRWKKKLFSEQGRAQLEKLALAPWGSRRRQELLELLDRMNPTIEELTAAVEQEARKRPEALRLMTHPGVGPLTALAYVLIIGTPTRFQRGKQIGTYVGMIPCEESSARKQRLGHISKQGNSLLRFLLVEAAQAATRSHPDWRRRYMHLAMRRHKSIAKVAMGRRLAIRLYWMWRNGCEYSQSLEFGSYAGQLGTGHGAK

SEQ ID NO: 465541 - protein, 346 aa, unidentified
MAHSTAQLVIGVDTHADRHVAVALDTLGRHLATASFAASDTGNARLLAWACQHGQPVAAGVEGTGSFGYRLARYLLAHGVAVREVNRPDRARRRRVGTNDPLDAEHAARAVLAGDASAIPKNRDGVVGELRCLVVARRSAVKARTQATNQLRALLVGCDDTIRTRLRPLRKQHLARGCIRLRAAGPAQLALRSLGRRWLALDAEIRELDREITGLVTRVAPRLLDRHSVGVHTAAQLLITAGDNPDRLASEAAFAALCGTSPVEASSGKTTRLRLNRGGDRQANTALWTIANTRLIHEPRTRAYGAKRTAQGKTGKEILRCLKRYIARELYPLVLDALTASPTPAA

SEQ ID NO: 465542 - protein, 393 aa, unidentified
MYLVGIDIGKLKHSFCLLEKETGEILVEPVFFKNNRDGFNALLSSFKHLPQKDILIGMEDTGHYNLALLKFLLDRNYQVALINPVATNLTRKMQGGISKNDKLDTLTICDVLASSQRVKSYRISKYSSFDLYEQKLLTREHHNLKEEENQLLNRLQKCIDVVFPEFNSLFKSKYGIVYMNVLKEFGSADAIAHADIRTLRKCFDTGRGKQIVLTAEELKEAARNSIGFPSASEATQIKHLVARIELIKEQIAEIDKKIEEFSIQNNSPILSIPGISHFSGTSILAELGDIHNYSKPSQIIKFAGVAPLTYESSQFTAQHTAITKKGCKYLRKTLYQIITPVIQYNPVFKKFYLLKIAQGKGHRCAQGHCVRKLMRVIYHLLNTGAQFDPALLR

SEQ ID NO: 465543 - protein, 343 aa, unidentified
MKLIRIGVDLAKDVFQVHGVDRHEKAVWRRKLRRNEWLKVLVATAEPGCQIGMEACGGAHHWARKLQGLGFRVKLIAPQFVKPYVKGDKNDANDAEAICEAMSRPSMRFVTVKSAEQQDIQAVHRIRVGLVEQRTAKANQIRGLAAEYGLVAPKELGQLRIALPCWLEDAQNGLSDRFRQLLSGVWEDLRALDERVGELDREITVIAKSDPLAKRLQQLRGVGPVIATALVGALGNGEQFARGRQMAAALGLTPRQHSSGGKERLLGISKRGDAYLRTLLIHGARSVIRTAKGKEDRLSRWVIALAARSHPNVAAAALANKTARMAWAMMRKGTDYQPDLVTD

SEQ ID NO: 465544 - protein, 309 aa, unidentified
MKEELVYLGVDIAKSYLDGAIGGEKRRFSNDTIGHRELIKWVKQLSAAVQVICESSGGYERGLVRALVDARVKISLVQANRVRQFARAAGILAKTDCIDAQVLCEFGKVMRPPMVTAATLEQEHLRELESQRRHLTHLLVMEQNRGARVSDVCVRRLNRSLINQIKKQIEQLDLLIKNHIERSKELSAKAAKLTAISGVGARTAALLLAQMPELGELNRRQVAALVGVAPFNRDSGKMRGKRAIYGGRRRVRHGLYMAALVAARHNPILRNFYQRLRAAGKPAKLALTATMRKLLIVLNSALKPDLIYA

SEQ ID NO: 465545 - protein, 389 aa, unidentified
MKIFVGIDIAKLNHFAAAISSDGEILIEPFKFTNDADGFQLLVSKLESFDKNSIIIGLESTAHYGDNLVRYLVAEFYQVCVLNPIKTCQMRKNNVRKTKTDKVDTFVIAKTLMMQDDLRFITFFDLDMMDLKALGRFRQKTIKQRTRLKIQLTTYVDQVFPEIQYFFKSGLHQNAVYALLKEAPSPKEIASMHMTHLANLLKVNSHGHFTKEQAKELRVLAQKSVDANDSAISIQITQTIQQIELLDSQLDKIEAEMTDIMKFNDSVIMTIPGIGYINGGMILGEIGDIHRFSNPNKLLAFAGLDPSVYQSGNFQAKTTRMSKRGSRVLRYALVNAAWNVVRNNATFKAYYDAKRAEGRSHYNALGHCAGKLVRVIWKMLTDEVEFNLE

SEQ ID NO: 465546 - protein, 408 aa, unidentified
MNPLFVGIDVSSKNNVAYLMKPDGSKHSSFSVQNNLGGAKLLSERIVSALGSMQLERVVIGLEATSIYGDSLVYALREDGRLGRFQRKIHVLNPKQVRKFKEAYSDLPKNDWVDAFVIADHLRFGRINREVYMDDYRYKALQTLTRARFDVIQNLTREKQRFANYLFLKCSGIAQEKDIQNTSATTIALMEHFETVDDLANSDLDELTAFIPETGRGKFADPDATAKAVRAAAKGSYRLPKTVNDTVNQAMAVSIASMRALKGQVKVLDKAIEQQFEIIPNTLTSIPGIGKVYSAGIIAEIGDIHRFDSQASVAKYAGLVWNRSQSGDFEAEHSRMIKSGNRYLRYYLLEAANSVRRCDSEFRRYYDLKFKEVNKYQHKRALALTARKLVRLVFRLLKDNRLYIPPEG

SEQ ID NO: 465547 - protein, 397 aa, unidentified
MYIVGIDIAKRKHEAAVIDGEGAVIIKPFSFTNNCSGYNRLLAMLTKAKLPLDEVSFAMEATGHYWLALFTRLQKEGFRVQVINPVQTNSIRNFYIRQAKTDPRDALLIAEVIRFGHFSESTLHPENIYELRELCRGRHAIVSMQADVKRKVVALLDQVFPEYETAFTNMFGDTSMAILQTCPTPKELSEMPLEELCHLIEVSSHKRFRMAKAQELQELARSSFGFAMAGDVFSTMIRLYAKHLDFLKQQVREMDRKIAEIMDSLDTPITTITGIGPTLGAYILSEIGDISRFSSAAKLAAYAGIDPTMRQSGEYNGVRNRMSKRGSPYLRHAIWLAASSAVLHDPALKLYFQKKRDEGKPYMASVGHACRKMVSIIYAVMRDNKPYTPCIPNEISA

SEQ ID NO: 465548 - protein, 352 aa, unidentified
MEKSNKLDFGGQHIYVGMDVHKKSWSVSIHTEQFEHKTFTQPPEVEKLTYYLERTFPGATYHTVYEAGFSGFWLHDKLRAKGIDCMVVNPADVPTKDKERAGKRDRVDCRKLARGLRNGEINGIYVPPRVKVEDRTLVRTRQSMVRKQTRCKNQITSILFFYGIVIPEEGRWSRRFINWIESIRMERASGDFALKAHLEELKHLRQIIANLNKAILSLSRDEEYRADVLLLKSVPGISTLTAMILLTELADFSRFSSLDKLASYAGLVPDIRSSGETEYSTGITFRRNAALRALLIESSWIAVRKDPALTMAFNKLSTRMKKTKAVVHIARKLLNRIRFVLKNRQEYVPAIV

SEQ ID NO: 465549 - protein, 335 aa, unidentified
MQIKQFIGIDVSKETLDLSVVINGNAVSHYCVLNNTREIKSVVNKIMKTFGGSYEETIFCMEHTGLYNLPLVKWLQANGCKIWLESGVHIKKTLGLVRGKSDKVDSFRIAMFAYTNKHHLKLWVPPRKIVERLGALLSQRQRMMKARKQLATANREQKLFIDKEIMHSLNVYTNRAVSVIDKQVKSIEKEILSLIKEDERLKQMYDIITSVNGIGLIIAVHILVTTNEFISINDPKKYACYCGVVPFEHTSGSSIRGKNRVSHMANKTIKTLLHLAAVSVIRMPGELQDYYIRKVSEGKNKMCALNAIRNKLILRVFACVNQNRLYEKEYCYKFV

SEQ ID NO: 465550 - protein, 351 aa, unidentified
MRILAIDLGKEKSVACDYLREDGTYEFVTVPTSPDRFRELLSSHPPDRIVIEICPIAGWVCDLVRRAGIEIHVAKTTEQAWRWKNVKRKTDRDDALKLAQLSSLNQIKLVHVPELPIRQWRSLITYRHGVVARRTQVKNRIKAILMEQAESPSYGTHYAWTKTHQDILRKLARPIGDCHPEELWRGELSLELDQLTSFDQQIDKLDQRLEVLGNANPQVRLLRTIPGVGPRLAETIVAVIDGAGRFTKGKQVACYAGLTPRQFQSGQSDRLGNISHAGSGLLRGLLVEVSWMGLRYNSWLRELFERVCRGSKARRKLAIVAVARHLLICCWAMLRDGKTWQGKPLLDILKN

SEQ ID NO: 465551 - protein, 340 aa, unidentified
MSLYGGIDLHANNSVIVLINEQDEVLYQKRLPNDLTTILGQLAPYHTEMKGLVVESTYNWYWLVDGLMAADYRVHLANPAAIQQYNGLKYTDDHSDARWLAHLLRLGVLPEGYIYPKAERAVRDLLRKRAHLVRQHTANVLSVQNIMARNTGGRFSVKRIQELTKQELTTLLTEETQVLAVTSSLVVLDCLQQQIKTLEKTVHKRLQHTPSYEQLLTVQGIGTILAQTIALETGAISRFPTVGNYASYCRCVDSTKISNGKRKGTGNVKNGHPYLAWAYMEAAQFAMRFQPAAQRFYQRKLAKSRNNTVLARKAVAHKLARACYYIMRDLVSYEVTKAFG

SEQ ID NO: 465552 - protein, 355 aa, unidentified
MTSSKYIGMDVHKESISIAVRNAAGKMVMESVIETKANMILEFVDGLRGDVHVTFEEGTWSAWLYDLLKPHVSKLVVCDPRRNALLKEGNQNDRVDARKLAELLQNNQLRPVYHGNHGLRALKELVRSYLTITKDLSRVMTRVKAIYRSWGIPCSGTQVYSARHRAEWLEKIHEPGVRRRAEHYYQQLDALRSLRLEVRKDLLTESKKHQVWKRLRQIPPLGPIRAAVLLGIVQTAHRFRTKRQLWTYGGLGIEVHSSADHQVVKGQLQRKKKPIEIRGLNKNCNHHLKNLFKGAAAAASTHPGPFQEFYAALVAKGMRPEMARLTLARKIATIALIVWKKGVCFDAHHLKPQTA

SEQ ID NO: 465553 - protein, 412 aa, unidentified
MEVFCGIDWAEDHHDIALMDRDGKLLARRRISDDAAGLAQLLGLLAEHGDSAEDPVPVAIETPRGLLVACLRATGRAVYPINPMAVARYRDRHSVAGRKSDHGDAVVLANILRTDLHAHRPLPADTELAQAIAVLARAQQDAVWARTQAHNKLRSHLREYYPGFLAAFADARGGITRPEARVILAAAPDPAAAAKLTAAQLRALLRKAGRSRGVDAGATRLHGALRAPQMRQLPLVEQAMGRQALALLGQLDPACTAAADLEQAVIESFNQHPDAGIITSFPGLGPLTGARVLAETGDDRSRFADAKGLKAYAGAAPITRASGKTRAVVHRRIKNNRLAAAGYSWAFSAISASPGARHHYDKRRNDGDRHAAAQRNLFGRLLGCLHHCLATGQHYNEDTAFPSPACRQQDAA

SEQ ID NO: 465554 - protein, 400 aa, unidentified
MSGIKGRFDSFVGIDVSKDKFDACGITGEEAKLFQFSAAMDRKGFEKLKGHLAVVSASSVLIGMESTASYHVNLFSYLVSEGYSVIIINPLLVSNYVKMQLRKTKTDKKDAVVIALFLLANGNALIQRVTPSLISDLRDLSRQRESLVDEMTALKINIKRLLNITFPELEHMTLVFTKAMLKLLQQYPSALALRSADLVQLSEMLIADSYGHKREAFAAELMKAACSSVGTHSAAKEIILKQQVTLLLHLEENLQEITGILIEMSRKLMEEDINILTSIKGIGDKSAVNFLIEMGGDIHQYDGSGKIIAMAGLDPAVYQSGKHEGKGRITKRGNRHLRRIIWMMATRVIHYSDIFKAYYLKRRKEGLPYKMAVLATAHKLIRVIYAMLTQRTTFCPQVNS

SEQ ID NO: 465555 - protein, 353 aa, unidentified
MGIVVALDVHRKQITYKALDRDTGELRRGRIAPAARVDVRAWLAQYAGCEAEFALEGTTGWRFVVEEIERAGHTAHLADPAETAAKRGRKRRAKTDNADCDLQLRLLLAGELPESWIPPVHILELRTRVRMRKTLIDQRTAWQQRIQAQLFHQGIPAGLRLRTQVGRDALAQAELSPAGRELVTLGLRMIDALDLELAPLDRELRGFARRQRGCRTLIAGLYGVGPVSATAILAELGDARRFASSDDAVRHSGLDVTVYQSDSKRSPGRLSHEGPELLRWALFEAAVSAARAGSPDHAYYLRVADRLDHTRACLSVARKLCRRAYHILRELGDEALAPVDCDPHAEEAIAAAA

SEQ ID NO: 465556 - protein, 344 aa, unidentified
MITIGIDPHKSSLTAVAIDASGHPIGQRRFAVNSGTFRQLTSWAEAWPQRRYAVEGANGLGRGIAQQLAAAGEQVHDVPATLSMRARLLTTGGGRKSDSADALSVAHVALYRHDLKVVTPEDQTTILRLLSERRDDLAHERARILNRLHALLRELVAGGAATGLSADKAAALLRTVRPATATQALRRDLARDLLADLRRIDQRLKDNEAQTRDALAATGSTLTNIHGVGVVLAAKILGHVDDVTRFRTADHFASYTGTAPLDASSGDQVRHRLNTGGNRQLNAALHTIAVCQARDPGPGRVYYQRKLAEGKTPAEARRALKRRLSNVIYRRIRKDQQRAAENVA

SEQ ID NO: 465557 - protein, 342 aa, unidentified
MVQAVTVGLDIAKNVFHAYGVDAQGEKAFSRKLRRAKVEAFFAKLEPCLIGIEACATAHHWARTFENMGHQVRLMPPVYVKPYVKTQKNDEADAEAICEAVTRPNMRFAEIKTIEQQSVLVLHRTRALLIKHRTRMANTIRAHLAEFGITEGIGREGLYRLIDMIVVGEDDRITGVTRRAMMCLVEQYRLLQDQILDLDRQVLAWHRSSEASKRLATIPGIGPLAASALVASVGDASSFKNGRSFAAFIGLVPRQSSSGGKERLGKISKHGDHYLRWLLVVGGLAVIRYAQRHGTRRPWLVKLLQRRTAKIAAVAMANKMARIAWVLMTRGGEYREPVAQAV

SEQ ID NO: 465558 - protein, 418 aa, unidentified
MKSIKAEKIKTINEKMLVVALDIGKKVHYGYFRTPKNQDVKPFPFYNSGRSFNKFWEKLCRFKEKHMLDEVVIGFESTGPYAEPIANYLRKKPVKLVQVNPMHTKRIKELTGNSPNKTDKKDPRVIADVISLGHSLTVVVPESAAAQLRRLTHARERAMQRRTAMNNQLQDLVFIIFPELGDIIKPSTKTGMYLIENYLAPERIVSIGNETLCNIVRKISRGKFGIERAEKLYNAAKESVGITEGKESILLETSHLVSNIETENRYIKSLEEQMIVYLDQIPYSHSILSVKGIGNITVAGLIGEVGDFKKFKTISEVMKLAGLDLFEVSSGMHKGKHRISKRGRALMRKLLFFAAINAVKSHGIMHARYQKMLNNGTPKIKALIAVSRKLLRIIFAIARDNAQYEENYNRKHDYKLAA

SEQ ID NO: 465559 - protein, 354 aa, unidentified
MENESHEGVVHMQVSTIGLDIAKNVFQVHGADASGKTVITRQLRRGQVSGYFEKLPPCLVGMEACATAHHWARELTKLGHTVRLMPASYVKAYVKRSKHDAADAAAICEAVTRPSMRFVPVKTIDQQGALMLHRCRDLLIRQRTQLINALRAHLAELGMIAAKGKEGVKDLVATITDAVKATILPEPMKQALQALVKQLAALKQQIGELERSIHAQHRASDRSRRLEAIPGIGVLGATAIAATITDPSAFKSGRACAAWIGLVPRQNSTGGKERLGGISKQGDRYLRRLLVMGATAVIRHARTHPDKHPWVTKLLAKKPYKVVAVALANKMARIAWAILAKGETYRAPALAATA

SEQ ID NO: 465560 - protein, 344 aa, unidentified
MGEVSTIGLDIAKSVFQVHGVDADGAVVIRKRISRAKVLEFFAAVSPCLVGIEACPSAHHWSRKLQALGHTVRLMPPTYVKAYLKRSKNDANDAAAICEAVTRPSMRFVATKSEQQQSGLMLHRGRQLLVRQRTMLSNAIRGHMAELGIISAKGRNGTVELLEIITNADDDRVPTVARLSLDALARQYANTTAEIRAFEKHIHAWHRSCEESRRLEGIPGVGPIVATALVAEVGDWKAFSSGRNLAAWIGLVPKQHSTGGKERLGGISKQGNRYLRWLLIAGAMAVIRYARQHGTKRLWLARIMERRPIKVAAVALANKIARMAWAMMVHGERFKEPRLLSQAA

SEQ ID NO: 465561 - protein, 338 aa, unidentified
MNSKLLAVDLAKNVFQVCALGKHNKVIFNKKLTRSKFHIFMAQQPKSPVYMEACYSAHYWGRTMNQMGHKAHLIPAQMVKPFVRGNKNDNNDALAIAEAGQRPNIRFVPVKSVHQQEILAMHRVRQRLIKSRTQLTNQARGLLSDFGIVFPKGFTHFKKAIITLQEDEFLSLQFRQMMLHTLNEFNQITARMEVIEDDLNRYIKDSHECQIIQSIPGIGPINASALIASIGKGQAFANPKEFAVWLGLTPRQYNSGDTVKTGGITKRGDKYLRTLLVQGAHTVTFWAKKRDDQLSLWVKRIVIRIGKKKAVVAIAHRLARLIWILLQRNQKFIPQYLN

SEQ ID NO: 465562 - protein, 389 aa, unidentified
MLLDHLSDGPTAIRTQFGAIFVSLELSRSTWLVTSLSPGQGEKMSRHSVEADDVAELMKLFADLRRKAEVRTGLSYPIITIQEAGLDGFWLHRILQREGIESHVVDPASIATPRRRRRAKTDRLDGETLLRALLAYKRGEPRVCAMVVAPSPEEEDRRRLCRERRTLIDERIAHVNRIKGLLFAQGISGYAPLRRDRRARLEALRTGDGRALPSYLKTQISRELDRLELLLDQIKAVEAEQDALLAAAGKGAGEQAAPDPVTMLLALKGMGANFTAVLWSEAFYRQFSNRRQLAAYAGLAPTPWRSGSIEQEQGVSKAGNPRLRSTMIQLAWLWLRHQGQSALARWFKAHSQRGRKTAIVALARKLLVALWKYVTAGVVIEGAVMKSAA

SEQ ID NO: 465563 - protein, 400 aa, unidentified
MNAVGIDVSKGKSTVAVIQPFGVVIAEPFDVFHTDSSLKELVRFIKSLSGETKVVMEYTGTYYEPVANALHNAGIFVSVVNPLLIDDYDTNRVRKVKTDKLDALKIASYALDKWIKLRKYEPAETVRKTLQIMNRQCIKLNKILVMQKNSLIALLDCCFPNANTLFTSPHRVSDGHEKWVDFVMKFPHVDSVAKLPLSVFKTKYQSWCKKEHYNYSESKAEQIHAYARTIVSTLPMTDAVRKMVSEAAKHLNSTLEALGTLHSEMDTLATQLPEYETVMNLYGVGKVFCSQLIAEIGDVTKLKSNKSLTALAGIDPPPNQSGKDDPKSRRISKRGSPALRRTLFLIMTIYLQHQPADEPVYQFLDKKRAEGKPYKVYMIAAAHKFLRIYYARAKEVMPKE

SEQ ID NO: 465564 - protein, 340 aa, unidentified
MKQIQKNYLGIDVSKSWFDCSLIVIKGQQKQPLVTERFDNNSNGLKRFKQWLKSYAVSFDKNSLLIIENTGVYHRQLWAFCSKYNLRLHIGNAAHIKWSLGITRGKSDKIDSERLCNYCYKQADELQATPVLNPVFMKLKDLMTSRSRLVVQLHSTKNYLKELQCSNDKELLALVSKAHKAAIEGIKKSITAVEQMIDKIIYEDAWILRNYELIKSVPGIGHLTAIYIICCTNNFASKPSGKQLASYAGVVPFEHSSGSSIKGKSRVHKMANKDLKKMLHLCALTAIKYYPEFRNYFDRKKAEGKNGMAVLNAIRNKLILRVVAVVNNNKPYVENLQKAA

SEQ ID NO: 465565 - protein, 387 aa, unidentified
MARKRTLSTLDTSIAYEAVGLDLAKTDVALAAFDSDHKEPYLIDRIPYDKLYELLANMAPTLVAMEPCSGAHQIAEQIQELGHEVMMISGRHVQAWVKDHCNGQKTDLNDAFAILNLAYDRWLTPIRGKTREECRLLALQSSYRQLKGQRTKTMVHVKATLHAWGFPIRAGSFNQKALHELIDANREAFGDEVVETLHLMINRVHDLDHDIATVLKLLTEATQRDPRASLLRSIPGFGVLTTSRWCAVVGDIARFDSPKQTMAFIGLVPNNRITGHHTETSSGREARGQGRMSKRGDKMLRSLCIMGAGSLCLMVRNDRLPDCPFVASIKERLASPRPWFKVLVYVAAKLVRIATALLKYGETFSFEKAGISKAVLKQWELEQAKAA

SEQ ID NO: 465566 - protein, 445 aa, unidentified
MGQRTVGIDLAIRGDHVARVLDDGRPHGKPIRFRLTSDSLAGLVARLRDGAVPGDTITAVMEPTGMAWFPVARWLRQDGINVIRVKGQRVQALRRYLSEYAKTDAADAYVLGAMPLFGGAPVDPVYVPSAERHALQRLTRQRERLEDELTSIKRRLLDLVRWACPALEAVLPDLRTDLALAVLHDLLDPARVIKARRPTLLRFIATHANGNHPHGGPFAEALVDGLRAAATETRRLHGSAVDFGLLQVEVALEVDRLRLVEAQITRLAREIEALYGNLHPSDALRTIPGIGVVLGPLVLGVLHEAGRFASLHRLRGFCGMFPRVKASGGTSQPGQAITQSGNNRIKRALYLAADAARRIDPELAAVYWRLMVRKGHHHKQALCAVATRLVNRIGKVLRTGDAYELRDTDGTPISVAQGKAIITERFTVPAEVRNARRKHRVESMV

SEQ ID NO: 465567 - protein, 369 aa, unidentified
MGEDTMSRSSLWVGLDVGADEMTVCETDDQGKVIVEQLIPTKATALHALLKRERRRIKLIGLESGTFGIALARSLRKLRYPVAVFEARQASKFLAIRQNKTDKNDARGLADIARLGRDSVSEIRVKSPECQRLRSMLVTRQKIVQIRTTVEGTMRSLFRLNGGKLKSASSVATLRRNAAEEIKRLRRFEKIDLTEDIEPLLALSVATRAYVESLDKKLGKRAEDDPVCRRFLEIPGVGPITALSFFCAVEDPARFRRNADVGAFLGLVPMVRQSGQNVARLHISKMGDRMTRTYLTTAAQQHLRHGKSSLTAWGAGLSERLRKGAVHVAVARKLAVTMLAMWKSGERYDPYRGASPADVAVEAEPSVVT

SEQ ID NO: 465568 - protein, 347 aa, unidentified
MDHYAGIDVSLECSSVCVVDASGKIVREGKVASEPEALIAWFGSLGFDLARIGLEAGPLSQWLFAALREAGLAVELLETRHVRDAFKAMPVKTDRNDARGIAQLMRLGWFRPVHCKSLAAQEVRAQLTARKLVQSKLFDVEMSLRGILRGFGLKVGPTTPKRFAGRIKELVAGHATLEVVAAALLAVHEVLRREFGGFEKRVRAMARTDARVRLLMSAPGVGAIVALTYVSAIDDPARFKSSKGVGAHFGLTPKKYQSGETDITGRISKIGDGAVRAALYEAAHVILTRPVKGGTLKSWAARLAKRAGMRKAKVALARKLAVILHRMWIDGTSFIFATPRDVAAAAA

SEQ ID NO: 465569 - protein, 392 aa, unidentified
MSKASSEVAILVNGEKVHNYTMSNDAIGFSRLLGDLKTVHKPEIIFEATGVYSRRLQAFLDEHGYAYTRLNPLEAKKQLDSLRVRKTNQIDAEKLAQSQFVLNRKPTYVQEEVYQNLRDLSRFYQNLTEDIVRAKNRLHKVLQVTFPELENILSTPTGEQYWNLVITFPCKDFVLDLSKNELSKSIRQSTSKRISDKRVAYLAEKLTALANQSYCAVKKTSPILEEVHYYAKELLRLSEQRQAVLDQMVELAQPLPEYDILLSIPGIAETTATSIIGELGDIRRFQSANQINAFIGIDLRHYESGNFLAKEHITKRGNPYARKILFKCIHNIASVSHTNPCHIADFYEKRKRQSQTTSTKPHTIASIHRLIRTMYYLIMHNKLYDYASTQNR

SEQ ID NO: 465570 - protein, 366 aa, unidentified
MSLPRPVRVNGNMIFKGHKLTIGLDLGDRWSFYCVLDEAGKVLLEQKVATTPEAMKQTFERIPRSLIALETGTHSPWVSRLLTELGHEVLVAHAQKVQLISKSNRKDDRHDARTLARLARIDPELLGPVRHRSAKAQIHLTVIRARAELVSARTALVNAARGLVKSYGQRLPKCGTQQVSRELAAGLHAELREVLEPLLKEIESLNERIQEYEVRMEKIAKESYPQVELLKQVKGVGTQIALTYVLTLEDPHRFPKSREVGCFLGLRPGRRDSGESQPEMHISKEGDPYLRTMLVQGAHYILGPFGADSDLRRWGLKLAARGGKSAKKRAVVAVARKLAILLHRLWVSGEVYEPLRNSDKALRAVA

SEQ ID NO: 465571 - protein, 324 aa, unidentified
MEQVSFIGIDVAKSKFDICVFSGDYSSSIYKTFSNDMDGYFELFSYISSVNDVKNIRIGFEATSTYMVGLQKYFDSLKIKYVLINPKKIHHYIKYKHKNSKTDKQDSFFIAEYVSTLLDDSFVSSHSEMKQLFKSYHSFIRFLTKTETHLKALGDSVKASQFSSDKMKNELESMLSQTRKLRNHAIADFANSVKSVMPEYDLLKSDLIGVSDMTLLAVLPLIYDDSEKYSIKQIQSYFGLNPVQFESGSSVSKHERVSKAGNSYARSMLYMSALSSITHNTELKMKYERLVSRGKPKKVALIAIASHVLRAIITRLNHYKSLNK

SEQ ID NO: 465572 - protein, 351 aa, unidentified
MSHNLNNAVAVIGIDIGKNSFHVVGLDSRGAIVLRQKWSRGQIEARLVNMPPCLIGMEACVGAHHLSRKLGTLGHDARLMPAKYVRPYSKGQKNDFRDAEAIAEAVQRPTMKFVATKTAEQLDLQALHRVRERLVSQRTGIINQIRAFLLERGIAVRQGLRFLRAELPRLLAAPPDVLSPRMVGVIEGLAEDWRRLDERIEHLSGEITALAHQDAGCKRLVSVPGIGPIISSAMVAAIGTGDAFSKGRDFAAWLGLVPKQISTGDRTILGKISKRGNRYLRVLFVQAAWVVLIKPQSWERHGLKPWIEAAKKRLHRNVLAIALANKLARIAWSVLARGRSFEARPVMASAA

SEQ ID NO: 465573 - protein, 339 aa, unidentified
MTIQSEKTVQEPKQLFAGIDVGAEELILVIRKNGTPYKPQKFANTPADRARLVKKLVNLPGIIVCLEATGVYHFDLSIALHDAGAAIMVVNPKSSHNFAKALMKNSKTDAVDADTLAQYAERMDFVAWTRPSDEKIAIRSFARRIDALTRQKAAAKNQLHALSASKENPKAVLRDVDLSISQLEKRIDCLSKEALVLIKKHADLERVFKLLTSVKGIAQTSAIALMGELLLLPAGLSHREWVKFAGLDPRAFDSGKSVHKKTRISKAGNRHIRSALYMPALSAKQHDPHVKAYFQHLVDNGKKPLQAVCAVMRKLLHAIHGMLKYDKPFDNTRFYAIPA

SEQ ID NO: 465574 - protein, 427 aa, unidentified
MSQRKRKARKSKFNVNNLPEHLRHINLSAAGIDIGSDRHLVAVPQGSDDVSVRQFGAFTSDLHAIADWLKKCGVTTVAMESTGVYWIPLFELLELCGFEVKLVDARHVKNVSGRKSDVLDCQWLQQLHTYGLLQGAFRPSDEVCVLRSYVRQKEMLTQASSMHIQHMQKALQQMNLLLHNVVSDITGVTGMTIIKAIIAGERDPNVLALNRQKECRNSKEIIAKSLVGNFRDDHMFALKQAVELYEIYQAKIAECEAAIANHLGEQPDITNDQPPESGKHVRARERIRADLDVREKLFKMTGVDLFAIPGLAADTLLTLASEVGFDMRPWKTDKHFTSWLSVCPGTKSSGGKALNGRTKRNANRSSVPHRGIIPCQKPNIVGSLLPTHSVQNRREKGCHCNSAQDRSDLLRHVDQRHDLRRSRSTSI

SEQ ID NO: 465575 - protein, 347 aa, unidentified
MAMTDGVTLGLDVSDKYTNYCLLDCEGEVSEEGRLKTSEPILRKRFEGTPCRVIIEAGAHSPWLSRMFGDMEYEVIVANPRRVQLIAQSNRKNDRADAETLARLGRADPKLLGPVKHRDHQAQADLAVVRGRNALVAARTLLINHIRGAVKSVGGRLPASDAHSFHRRAKEHIPQELRLALEPLVDTVEQLSFQIREADRRVKALIEERYPAATCLQQVAGVGPLISLSFILTIGDPTRFQRSRELGPYLGLVPRQRESGDSSPALRISKAGDSFLRQLLVNGAQYILGYRGPDCDLRRWGLNRAAGGKAAKKRAVVGVARRLAVLLHHLWVTGEVYEPLRRTAVAA

SEQ ID NO: 465576 - protein, 428 aa, unidentified
MNQQPDDAKEVRWDQMRLFAGLDWARDHHDVVAVDAQGRVVAELTLPDTAEGWAGLRAKLLAGAGGDLSAVAVAVETNNGPAVERLLALGCWVYPMNPKAATRYRDRKAPSGGRNDRLDAFSFADALRTDGHAWRALRPDDPITQELRLLCRDEVRLIGQRTALVNQLREALHEYYPAALEAFDDWLCPGAWSFVQRFPTPGGLVAAGKRQWEKFLHAHRLYRPATCARRLEVFTRADRFAGPPAVIKAKSRLAVALAGQLRVLQKQIGEYRAAIEALFSQHPDHDLFDSLPGAGDKLAPRLLSELGDDPKRFEEAQGLQSYGGTAPVTRQSGKSRWVQMRRACNKRLRYAVHLWVNESRKGCVWAAAYYDRKREEGKSHATALRCLGQRWLKILQRMRQDHRPYDEAMHLRNMVKRGSWKLDLAAES

SEQ ID NO: 465577 - protein, 421 aa, unidentified
MSQQNISRKLAQVKSGTLHVGIDLGLENNVAIVINEHAKRLDRFRFPNDRDGYDYFHRRIEKLQQQSKAPDVLVAMEPTNYLWKLFASDLEQKGVAYRLVNAYTVKKHREGDQLDRSKDDPRDAFTIADLSRTGKCTETQLQHGTYAELRQYISLYYRLKRQIRREKQHIWHAVGQLFPELPRIFKNITGETAKAMLITQAAAVEIRKLSEEEFITKVRGGFDGIRLYVSRLRSAYRLAMSSVGVNDGVQALQFALKLHVESLNRLLVQEKRLRNALQVCFLSLPEANSLLSVKGIGILTGATILAEIGNPKRFRHAGQLVKLAGIQPTPNRSGRKQRSATPMSHQGRPRLRSALYFTCLRLLQDDQRFSQLYQRLQVREKNPLTKMQAVGVLMNKLLHILWALMKQQTQYKPLDACLIET

SEQ ID NO: 465578 - protein, 408 aa, unidentified
MTVVGIDVSKGKSMVAAMKPGGELVAAPYEVRHSDIELSHLALDVLCMEPDTRVVMEATGRYHEPVAALLHSEGIFVSVLNPLLIKQSGAGSLRKVKSDPKDALKIAKYGLDNWSTLREYTPMEAIRQQLKLCARQCDLYSKNIVMLTNNLISLSDKTFPGVNELFSSPEKENGHLKWVDFYRTFWHCDCINRMSPDAFEERYKKWCKRKGYHFSADAAHALYAASCGLYTTLPRDNNAKLLVTVATDQLIALRENQSKLETEMLNLCKQLPEYETVMAMYGVGKSTGPHLMAELGDIRRFPRRSSIVAFAGVDPGVVGSGKMQLSSVATSKRGSPQLRKALFQVVSAYVKRKPENEAVYQFYAKKRDEGKPYYVCTTAAANKFLRIYYARVKECLNAAESATQAEEG

SEQ ID NO: 465579 - protein, 372 aa, unidentified
MNYNTVYVGMDVHKESYTLCAYTIEAEKGSYFRKTSSDYKEVLKYIEFLRTIYGIDTHFICGYEAGCLGYTLYHQLTRHNINCVIMAPTTMLEQRSRKRVKTDKRDAELIGRCLAQHNYSPVHVPTAADEETKEYLRMRTDHKIALKKIKQQILAFCLRHNYRYDGNSHWTAAHLKWLNSLNIEALYREILDEYLLTYNTLSDKLERIDARIEELANKDEYKESVKKLCCFIGVKTYTALSIIVEVGDFNRFATAEKFAAYIGLVPGENSSGDDQTRLGITKAGNRQVRMLLTEACQRYSRGQVGYKSKALKARQAGNTPQVIAYADKANERLKRKYYKMVINKGKKHNIAKTAIARELACFMWGMMTDRIA

SEQ ID NO: 465580 - protein, 391 aa, unidentified
MTNLPVYVGLDYSDASVQVCVMNDAGAVLGNRGVENDWRSIDGYVRRFGSVRGAAIESCTGAADLADELVERGGWSLSLAHPGYVARLRQSPDKSDFSDGKMLADLTRVGYLPKVWLAPQAVRELRRLVRLRDARVRQRRATKLRVGALLREHRVGKGPAGTGGAWTKKWLAWVGMVKLPEQTRWTIERELAFLKYLEGDVKLIEKRLAQATKDDPLVARLREQPGIGAVTAWILRAMIGRFDRFRTGKQMARFCSVSPRNASSGTRQADAGLIKAGDPLLRATLIELAQRLMRTKGRWGDLGRSLRSRGKPYCVAAAAVANRFVRWLFHAMREVAAGVDGRGNAEAGVKADVNVNEDAPLNKDVTVNTNVNTAMRTPATRTPPHTGPSTA

SEQ ID NO: 465581 - protein, 407 aa, unidentified
MELVALYKRVIGLDVHQAQVTACALIEEADGTTRIEQRQFGAFKRDRSDLATWVASLRPDEVVMESTGIYWKSPYAALEAAGIRAKVVNARHVKNVPGRKTDVGDAHWLATLARAGLLRGSFVPPAKLRELRLIARQRQKLVGQLASEKNRLHKVLTDSGIRLGVVVSDLHGQSARAMVKAIIAGQPLNEVLKLASRRLKASREELFDALQGDLTASHHFVLDELMRHIEEIEARIARFDARLLGELESERNMLALLQTIPGIDLIGAAMLLVEIGTDMDAFGSADRLASWVGICPGNNESAGKRKSGHVRKGNLYVRRLLCEFAHAASRTTSVFKSKFQSLVVRRGYKRAIIAIGHKILRTLFFMLKRREHYRDSATNYEELSVQRNAPRWIKALTKFGFIAQANA

SEQ ID NO: 465582 - protein, 392 aa, unidentified
MICVGIDVAKDKHDCFIMNSEGEVLADVFTVSNSKEGFEHLLQTINTCTGIGNSKIKVGLEATGHYSYNLLGFLLDNSLPTYVINPLHTNLYRKSQSLRKTKTDRVDARTIASMLMSDVSLKPYTNIAYHNSELKSLTRYRFDKVKERATLKSSVARLVNILFPELEKLLPTLHTASSYALLSELPSAKHIAEIHLTHLTNLLYVASKGRYNRDKAIQIREAARNSIGTYMPAKALELKHTIKLINEFNNEIAEIESEIQSIMDKINSPITTIPGISLRMGAMIIAEVGDFNNFDSPDKILAFAGLSPSTYQSGQLNNCYAHMEKRGSRYLRYALFNATKFVCNWNPLFADYLAKKRSEGKHYNVAVSHAAKKLVRLIFALQKSGQPYIANS

SEQ ID NO: 465583 - protein, 355 aa, unidentified
MNKISKLNFEGQQIYVGMDVHKKSWSISILTDKFEHKTFTQPPEVDTLVNYLKRNFPGASYKSVYEAGYCGFWIHDRLQEHGVQCLVVNPADVPTKDKERTKKTDRVDCRKLARSLRSRELEGIYVPSRPKVEDRSLIRTRQSMVKKQTRCKNQIKSILHFYGIQIPEELANGNWSKRFINWIEDIRMERASGNFALKVHLEDLNNMRKLIADITRAIRGLANSGEYRQNVRLLKTVPGISTLTAMILLTELYDISRFKNFDKLCSYVGLIPDTDSSGETERKTGITSRRNAQLRCILIECSWVAVRKDPALLMTFNALSKTMPKTNAIVRIARKLLNRIRYVLKNKQEYVSSTV

SEQ ID NO: 465584 - protein, 391 aa, unidentified
MICVGIDVAKDKHDCFILSSEGTVLADVFTIPNNLEGFNTLLDKLWACSTPQDSIKVGLEATGHYSYNILGFLLDNGLATYVLNPLRTNLYRKSLSLRKTKTDRVDARTIAAILLSDAGLKPYTDTAYHNEELKSLTRYRFDKVKERAKLKQSVSRLVCIIFPELEQLVPTLHMASVYALLSEFPGARQIADAHLTRLKALLADASKGRYGRDTAVDIRDADRNSIGSRMPAKSLELQHTIRLIRELDTEIEEIEAIIQAIMDELYSPITTIPGIGYRMGAMILAEVGDFSRFDSPDKLLAYAGISPSAYQSGQLKNCYPHMEKRGSRYLRYALYNAAKYVCHWNPAFADYLAKKRAEGKHYNVALSYAAKKLMRLIFALEKSRQSYCPAA

SEQ ID NO: 465585 - protein, 392 aa, unidentified
MRTVLGIDVSKSKSNLCLVSDDGEIITEKKICNDLNGFEVIKSLFSEFTPEVIFEATGVYSRKLQYFLELNGIAYTCVNPLKAKKEMDTLRVTKNDRIDSKNLAILQLRRGYSETKLEKKIYLEIRRRHRFYQSITEDSVSAQNRLHKVLQETFSGVEDLFAGTELNFFRILTIFPHAQLVSKLEVSTIAIRISEVMNRRPESVLKRAEKLKKLAVKTAVSVETDSYAIDEVRYWAKRVLDLAQQKKDLLEEMYQVASELDELQIIESIPGIGNAGALGIIAELGDIRRFSRPQKMSAFLGLDIRFSDSGKLTTRGFITKRGNSAGRKLLYRVTLSIIAASRWGNNTSVSDWYNRRAKDEHNGKKKIIVGAMDRTLRLIHHLVFEKEYYLVR

SEQ ID NO: 465586 - protein, 450 aa, unidentified
MRIALERRDDNGPLRTREEVALVNELSDPRRGRPRARTSHPQDDGLPAGVPEGAPSGGAPFTGGTPPAPQRPEPSLSLGKITRDWRCLGRKDQTPENGPVDGSTSLIPGEGKPVEWQCTNDRASVRRMVKKVLRQAPAGVRFCYEAGPCGYALQRWIREEGAACVVVAPSLIPRKRGERIKTDRRDARKLAELDRAGLLTEVHPPTEEDEAARDLCRAREAAHGDTVRSRHRVSKLLLRRGWQWMGGKRAWSQGYRLWLRSLRFEHRADQWMFEDYLLALDQVETRLKALEAQILEVSHDPRYAEAVGALRCFRGIDTITAMSLVAELHDVMRFESPRQLMAYLGLVPSEHSSGEKERRGEITKAGNGHVRRLLIESAWHYRLRPGVAALAKRREGQPIRVIAIADRAMHRLHRRFNRMVERGKPRPKVVVAVARELSGFVWAALRKDLA

SEQ ID NO: 465587 - protein, 375 aa, unidentified
MKKNSKTMRPHKNATQKTATSLSTRTVGIDLGDQTSYYCILDEQGEVVSEGTVRTTEAGFREQFRRMARARIVLEAGTHSPWVSRYLERLGHEVLVANARQVRIIYDNDRKTDQVDAGTLARLARVDKSLLHPIRHRSAEAQADLAVLRARDLLVAVRSTLINCVRGMVKSVGGRLPSASGAYFATKVREQVPACISGALLPLLDEIEQLTVRIREYDKRIDELAKTKYPKTELMRQIPGVGVVTSLAFALTLDDPNRFHKSRDVGSYLGLRPKQSDSGSSKPQLSISKAGDHLVRRLLVNCAQYVLGHWGPDCDLRRWGLSLMAHGGKNAKKRAVVAVARKLAVLMHKLWVTGEVYEPMRQASEATQTQAAPAA

SEQ ID NO: 465588 - protein, 430 aa, unidentified
MEQVNGIRLQEFRQVKKEIRGSTEHLIVGLDIAKERHNAFFGTATGKTLHKGMFFDNTYDGFQKLLIQTDALKVQHGLRKVVFGLEPTANYHKPLGEYLIKGGHLVVLVSTAATANNRELLDGRWDKHDTKDSANVADLISQGKCLYYDCPGEDLRSLRGLLSLKKRLKKEEHGLRVRIRNQLLAQYFPEMDQHFGSVMSLNVIQHCLDPSLISLMEYDEFCRTVAPGKVNLAQQRRLTQIWRAAKQSIGCSVGEAVSVEAQIMVAALHRVRETIKTVEDKIEDICLKFPEYSFLLMIPGFGPDVSSKVLSAIGDPERFTNGKQVLKMAGFDLCASRSGKTSNSATPVISKHGKSDLRYALYQAAIISSLNYKEFIVYHTNKIKGREREKGIGTKMRVKLAAKLLIIAWTLMKKTEPFAPKYLNQGDGKV

SEQ ID NO: 465589 - protein, 345 aa, unidentified
MKNTIVGVDLAKDVIQVCVYANRKVQSNIEMTHHEFLEWLFTTSETTVVFEACGTSNYWKQKAAEAGHAAHLISADLVSKIRQNQKTDKNDALAIVQASLLPDISFIKGKTVEQQQLQSILRLRELAVKQKTATGNQLKALLLEFNIRVSARKGGLGGVIESVLENAENEFSTAFREALYTAWQHHLSIIKSIATYDGCLEELVEQHEDCKRLLKLEGVGVINAVNLYIALGCADLGAFCKGKDASACIGLTPIQHTSGGKVKLGSIGRYVKNSLLRSQLITGAMAVIAQVCKRTALTSKEVWIQQLVARRGKKIAAVALANKNVRTAFAMLTQGTEYKAEPVAV

SEQ ID NO: 465590 - protein, 343 aa, unidentified
MTISILGIDIAKNTFQLHGADQAGKEVLRKRLPRHKLAAYIANLPTCTVVMESCGGANYWARVFQRSGHTVKLISPQLVKPFVKTNKNDANDAQAIVEAASRPSMNFVPIKQVEQQDIQSTHRVRTRIVKNRTALINEIRGLCLEYGVVLTPGAARVKSSLTTALADEANELTESSRNCMQGLYEELIDIEARLKKLNTRIRQLCRNNESCQRILKVPGVGELTATAIVAAVPDPGEFRNGRHMSAWLGLVPRQSSSGDRQVLLGISKRGDRYLRTLLIHGARAVLSHSKDSGSDYDRWVAKKKATLSHNKAAVALANKNARIIWSMLNTGEEFNYERQARAV

SEQ ID NO: 465591 - protein, 345 aa, unidentified
MKIVGCDLHTRYQQVAMLDQETGELIERRLEHESGEARAFYADLSAPVRVGIEATGHTRWFERMLGELGHELWIGDAAEIRASMVRKQKTDARDAAHLLELLLSDRFPRIWRPTLAERDLRQLVWHRQKLVWMRNAVGNQLHALAIGEGVCRKKKLFSKKGRAELESLALGPWASYRRQELLIMLDRLDGSLQQLDQAVAQQAEQNAEAVRLMTHPGVGPVTSLAFVLTLGAVGRFPRSKQVVSYLGLNPREHSSGGRQRLGSISKQGNPMMRSLLVEAGHTAARLDAELRQDYQRLKLRRGSGVAKVAMARKLAVRMYWMLRSQVGYAQLVRMQGSPRGTLVGQ

SEQ ID NO: 465592 - protein, 423 aa, unidentified
MKNSTVNKRKQVPAGYLVVGVDPHKKKHAAVFMTQDFMTHSKLKFDNSRGGFETVLERARTEMLKTECRGVIFAIETGAHHWRNLAYFLDEKGIPLRLINQFTLKRRREGKDLNHRKNDYRDSEVAAQLLCTGEFNAARLSQGVYAELRAAYGSYRRLVKEKARTVNLVKSLLDGLFPEFTQVFKNPCGQTAASVLCTCAMPQAIAGMTESEFAGAIKAACQGRVMKGKLRILHHVAMTSIGIGAGAQSVSSEIAFLIEKLRLIEQQLRQINEALTRLVHETMEGKYLLSIIGLSYVSVAGIIAELGSFSSYQNAKQLIKMAGSNPTESESGGKRRSHTPISKQGRPVLRHCVWTAVIPMLRFNPDFRDWAKKLRQRPAGANPLSGREVMVAAVNKLLRLVFALVKNQALYQIPEPQPVEIAI

SEQ ID NO: 465593 - protein, 320 aa, unidentified
MTKKKSRAVVGIDVSKELLEVAVHESSYHFSCPNKVSAFANLIAELVDLRPKLIVLEATGGLEKPVVNALRGVGLPVAVVNPRQVRDFAKALGQLAKTDRLDARVLAHFGAAINPPVRPLKSQDEQELAALRKRREQLAQMLGDEKNRRASAPSAKWREEIEKHIDWLQDNLAELDAQLKSLLKTSPEWQVKDQILQSTPGIGHVVSSSLIADLPELGQVSRQAISKLVGVAPLNNDSGPKRGTRHIFGGRAHVRRILYMAAFNAIRWNPVIKEFFARLIAHHKPYKVALTACMRKLLAILNMMVRNNTEWTNKAQPVSA

SEQ ID NO: 465594 - protein, 447 aa, unidentified
MKTEPEEIPDADHELIIERVAAIDVAKASGKVCLRLPRPGRPGHRVSRVWDVEATTAAVCELADHLVAGQIQRVTVESTSDYWRIWYYLLEAAGLSVQLVNARDVKNVPGRPKSDKLDSVWLAKLTEKGLLRPSFVPPTPIRQLRDYTRLRVDLTRERSRYWQRLEKLLEDALIKVSAVASTLDTLSVRDMLEALIAGERDPRGLADLARGRMKTKRAALIEALTGRFDDHHGELARMLLDQIDALSGQINTLTIRIDQLLATIANEAPGHDDGDSGAGGQPSADLTVVQRLTEIPGIGPTGAQVILAEIGLDMSRFPTAAHLVSWAKLCPRTIQSGAIQRSGKSGKGNPYLKGALGEAAAAAAKTNTFLGARYRRIVKRRGKLKALVAVARSILVIIWNLLSDNHARFRDLGPDDHATRINTERKLRNHIAQLAALGYHVAVEPAA

SEQ ID NO: 465595 - protein, 369 aa, unidentified
MGEYSEAFVAFDVAKIKHAVAVAEGGRTGEVRFLGEIDNREGPIERTVKKLAGRYGRLHFCFEAGPTGYGLYRQLQALGHDCMVVAPALIPKRRGERVKTNRRDAVTLARLHRAGELTGVWVPDAVHEAVRDLVRARQAAADDLRRKRQQFLSFLLRHSRIYSGSGHWTLAHRRWLANQAFEHAAQQIVFQDGIDAIEDAIARLRRLEEQLVAIVPSWSMAPVVEAYQAMRGASFLVAVTFAAEIGDVRRFDNPRQLMSFLGLVPAESSTGDTVRRKGLTLAGNRRARRALVEAAWTYRYPARVSETLRARLEGLPKAVRDIAWKAQIRLCARYRRLRATGKKLLVVVAAIAREMAAFLWAIGREVAPR

SEQ ID NO: 465596 - protein, 410 aa, unidentified
MRYYLGVDWADQTHAVWVVDETGSKLTACAVAHTAEGLGEWGRELDAWRAQGIELWAAIERPDGRVVDFLLDHSVVVYPVNPKALDRARDRFRQSGAKSDPFDARVLADFLRTDHAHLRALQPSSEAAQELKLLTEDCQRHIRQQTRLVNQLTATLKAYYPRALEIAEVPSALMREFLPAYPTPEALTAVTERQWQRWARAHRLSETRTADLWAVLRQPQLPVPAHVVRAKARLMHTLMAQLRPVVAAVAQYRAAIDDFFARMPAAQWARTLPIGKHGITAPTLWARLGDAPGRWESFRHLQAHAGTVPVTKRSGKQQRVVQFRFACDKALSYVVDQVAYLSLLSSAWARAYYDQQRARGHSHRQALRALGAKWLKIIFVMWQRQVPYDEQSHLATMARQQLRQHQERLA

SEQ ID NO: 465597 - protein, 381 aa, unidentified
MTATTRSEFRSVSDSTLYVAFELGKKEWKLAMTSGFGVTPWLQTVASGDLGAVERALARGRARFGLTPSAVVMSCYEAGRDGFWIHRALTQLGLRNRVVDSSSIEVNRRARRTKTDRIDALKLVTMLVRVCCGEPHVWHEVRVPSVDDEAARHVSRERTALTKEQTRLSNQIAGWLATWGCIASARARRTARWWTTARDWDNAPLPAAVQARIARADERLTMLATQIAALEEQQEATVQAADGDSALGRLVQLKGVATTSASVLLDEGLVWRAFRNRREIGGLLGFAPAKYDSGDSEHDQGISRAGNAHLQAISIQLAWNWVRWHPTSALTRWYREHFGPRRRARRIGIVAVARKLLIALWRYATTGVVPTGAIFNSGSHA

SEQ ID NO: 465598 - protein, 348 aa, unidentified
MKYYIGLDAHSTTSTAVVVKENGDIALRETFPTTEGNLVGFMRKIPGEKHLTFEECHLAQWLYVTLKAEADHLLVCNPVYVAKKQGPKTDFRDALHLAQELRGNHLKGVYHDDSKWIELRVLVNSYLDLVEQIVASKNRLKAVFRGSGLPTSETNFYTDKDRAKELPSESAKFVARSLFSQIESMEALKVEYKSYFHQNRLRYRPIRNLCTIPGIDLVRANIILAVVCMPHRFKNKHMFFGYCMLVRHIQMSGGRIYGNKRVHGRREMRDIFIGAAESILRTETSLRDYYDALRARGIAHKEARLSVARRIAALSLSLLKNNETYKDDYQADQHERIAIRKTLNLDTI

SEQ ID NO: 465599 - protein, 511 aa, unidentified
MEIVHPYCSGLDIHKKDVKACLITTGPDGEVHKEIRTYPTKTADLLQMRDWLKGAGCTCVAMESTGVYWKPIYNLLEGDFELLVVNPQYVKALRGHKTDVKDAEWIADLLWLGRLKASFIPSADQRELRELTRYRTRLVEERAREVNRLQKTLEDTNLKLGDVVSDVLGKAARLILEAMVKGETDPRRLASFAVGRVRASQEQLEAALTGKVNAHHRFMLGEHLKQIENLDAAIKRVSQAIADRFGKPETDPTTEQPESTEPKEERTETTKQTQEAASSCKSDHVVGRSGQVSSSERGAQGTQAQRDEDVQRAIQANEALACCKAPEPLSWYKAMQLLRSIPGISERAAQGILAEIGLNMCQFPSARHLASWAGVCPGNNESAGKRFSGKTRQGNPWLRRLLVQAAHAAAHSKTSYLATQYRRIASRRGAKRAAMAVAHSILVIIYHVLLEQKPYQDLGSNFFDERDRQAVEKGLVRRLERLGYRVDLQPLPQADLQPLPQADLQPLPQAG

SEQ ID NO: 465600 - protein, 344 aa, unidentified
MGEVSTIGLDVAKSVFQVHGIDAVGAIAIRKRIGRSKMLEFFANLPPCLVGIEACPAAHHWGRELQALGHTVKLMPPSYVKAYLKRSKNDANDAAAICEAVTRPSMRFVPIKTKEQQAALMLHRARQLLVRQRTMLSNAIRGHLAELGIVSAKGRNGTSELLGIIADIVDDRVPPAARGILDVLARQYSAIGAEIGSINKSILAWHRSCEASRRLEEIPGIGPIVATALVAEIGDWKAFGSGRSLAAWIGLVPKQHTTGGKDRLGSITKQGNRYLRWLLVTGAMAVIRYAQKHGTQKRPWLGRLMERRPTKVAAVALANKIARMAWAIMVHGDRYKEPKLLLAA

SEQ ID NO: 465601 - protein, 414 aa, unidentified
MDIIHTHCAGLDVHKKTVVAAIIVPDPKGGLHKETRSFGTMTADLLALSDWLLEQGITHVAMESTGEYWKPVFNILENNFEVLLVNAQHIKAVPGHKTDVKDSEWIAELLRHGLLKASFVPPLGQRELRELTRYRSTFVKERATLVNRIHKALESANIKLASVATDVTGVSGRAILQALLEGKSTPNEMAGLAKGRMREKREELTKALEGHVKAHHRFVLTELLCQIDSLDEAIGRFDEQIVEHCRPFEESVALLDTIPGIARETAEIIVAEIGTDMSRFPSANHLASWAGVAPGNNESAGKRRSGKTTKGNHALGVALNQAANAASHTKNTYLSAQYHRIAARRGKKKAIVAVEHSILIIAYHIIQDKTPYRELGSDYFDKRRPETTAKRLVKRLEHLGFQVALQQRQVPLAT

SEQ ID NO: 465602 - protein, 351 aa, unidentified
MIIIGVDYHPSDQYIAFVDTETGEYSERQLKHSDKEAEKFYRVLAARGVSVRVGMEATGYSRWFERLLAELGIEVWIGDAAEIKTKRVRKQKTDREDARLMLRLMRENNFPRIWVPSPENRDLRQLLWHRHRLVQMRTRIMNQLQALAMNEGQRRKKKLWSEQGRAQLEKLPLATWASRRRKDLLELLDRMNPTVEELTRAIEQEAKKWPEVLRLMTHPGVGPLTALAFMLIIGTPERFKCGKQIGSYVGLIPCEDSSAGHQRLGHITKQGSSLLRFLLGEAAQAAARRDSDWRRRYIHLAMRRQRNIAKVAMARRLAVRMYWMWRNGWEYAEWVKFGSHAGQLGTRHGVN

SEQ ID NO: 465603 - protein, 485 aa, unidentified
MKAKRAKVSRRHQPKQHGPIRPAAKMPQVNPHAAGIDVGATAHWVCVPEDSVPEDQSNIGSFGAFSGDLDKLVEWLLACGVKTVAMESTGVYWIPLMQKLEAAGLEALLVNARHLKNVPGRKSDVKDCQWLQQLHSYGLLTGSFRPQHDICSLRSYLRHRQTLIGSAGREVQHMQKALLQMNVHLHHAVSDLVGATGLRILEAILAGERNPKVLVELRDDKLCTKTTKEEMEKALEGHWRDEHLFALRQAFETYRHLLKQVSECDEQIQVVLSQLEAPEFKAPENPVPPNPKAADPTKSKPKKKRFHVNKTGPSLKLDLTEELKRLCGVDLTRIIGLSVLSVLMIISEIGLDMSRWRNAKAFCAWLGLCPRNKISGGKLLDSRTAHVVNRVSNLLRIVAPSIGKTDTWLGIFHRRMRSRLGPAGANTATARKLACLIYHLLKYKEEHIDVDCLVFSEKIRTQRINRLRKQAEELGMQLTENEKAA

SEQ ID NO: 465604 - protein, 351 aa, unidentified
MDIMHYVGLDIHKKTISFCVKLADGTIVSEGVVKATRKDLDRWMATLPRPWMAAMEATIFTSWVYDHLLPHAAAVKVAHPLMLRAITVAKRKNDRIDAGKIADLLRVNLLPECYMAPQELRDLRRSLRYRNLLVRQSTQMKNKVSGLLMESGIEYSKQKLHQKAYFSELLKRKGEEQLPPSLTPLLELSRTTIETAQKMERQIVRGLEQDPLLAERVERLLTIPGVGPITGLTWALETGEPGRFNSVKQAVSYCGLCGAEDSSAGKQKRTPISKQRNKHLQSVLIEAAKLAPRYNPELARVYKREKDKGNHNRATLAVARKIVAYLLAVDRRKTGFVSPPAEKVAPAEKVA

SEQ ID NO: 465605 - protein, 412 aa, unidentified
MEVIHPVIAGLDVHQETVVASLRAQAKRGIKRDLKVFGTTTRDLLDLQAWLVEKGCPMVVMESTGVYWKPVFNILEGSVEVVLANAYQVKTLPGRKTDMRDAEWLADLGAHGLVRPSFIPPAPIRELRELTRYRKVLIRERTSEVNRIQKLLETANIKLGCVVSDITGVSALAMLRAMVGGARDPVLLADMAKATLRKKKDQLVPALDGRFLDRHGFILGRMLDHMDYLNRQIDEISREVERLCVPFDEAVTLLTTIPGVGPLTAQVILSEIGADMSRFPSAHHLASWAGVCPGNNESAGKRRTGRTRKGNRWLATALSEAAWAAARTKGTYLQSLFRRLAFAKGKGKKKASVALSHSILIAAWHILHGHLPYQDLGPEHFGHRDENRTKTLHIKRLESLGYRVTLEPISAP

SEQ ID NO: 465606 - protein, 396 aa, unidentified
MGGKLTGDIMKIYVGIDMAKDKFDYCAMDDTLNILCRGSNKENRNERFRELSDLIKTLKSTGTMMKIGMESTGIYHIPLYNHLRAYGFSVRILNGLEVRGMKKSRVRKTTNDAIDAESIARYLMIREEKETFAVPENLMNLREIITAYSIVTDKIRTSKNNLIRALDMIFPGLSNAIDINADTVDLLSKYVTPEDFISADPDEIEKYLSKRRYDKIMKIASDSPVNITLERSLRMEISSLIRILKVLMDEKESFEKAMKSDPALENHVIMSIPGIGPITGSVILGKICDINRFENAEKLVAFAGIDPVIKESGKQRSQRSISKRGDSALRSAIYQSTLAAVRGNPVISEFYHRKVDGGMPKRKALVAASRKHCHIIWSVWHNNKPFEIPERFMKQE

SEQ ID NO: 465607 - protein, 355 aa, unidentified
MSHLNSGIAVIGIDIGKNSFHLVGQDRQGAIVLRQKWSRGQVEARLANLSPCLIGMEACVGAHHLSRKLQLLGHNARLMPAKYVRPYSKGQKNDFRDAEAIAEAVQRPTMKFVATKTADQLDLQALHRVRERLVSQRTGIINQIRAFLLERGIAVRQGLRFLRAELPGILATRTDVLSPRMVRILEDLSADWRRLDARIEGLTGEIETLARQDQHCERLMSVPGIGPIISSAMVAAIGTGDVFSKGRDFGAWLGLVPKQISTGDRTILGSISRRGNRYLRALFVQAAWVVLVKLGPKQWERYGLKSWIEAAKKRLHHNVLAIALANKLARIAWAVLNKGRAFACDKTDAMASRPV

SEQ ID NO: 465608 - protein, 343 aa, unidentified
MYYIGLDVHKRTISYCVKDAAGRVHREGKLGSTRRDLDAWVRTLPQPRMIAMEATIFTGWIYDYLLPHAEKVKVAHPRMLRAIALAKKKNDRIDAGKIADCLRCDFLPECHMAPTAIRDRRRVLRYLSLVIKQSVQMKNRVSGLLMETGVSYNKQRLHKVGYFRDLLTHNQEVSDSIRPLLKICREQIERSQKLDYALVSRLERDPLLKDRLERLRTVPGVGPITALTWVLEIGDVARFTSIKEAISYCGLCGEEKSSADKVMRTPISKQRNKHIQSVLIEAAKLAPRNSHELAMVYNKELLRGNPNRATLAVARKMVAYMLAVERRQQDFVPAEEFRPTAAA

SEQ ID NO: 465609 - protein, 349 aa, unidentified
MEYVGFDLGKVNSQICLLTEDGELIEKRLKTERETLAQFFGRRSEKVCILIEASTESEWVARCLEELGHEVIVADPNFAPMYATRSKKVKTDRRDARALCEACRLGAYRAAHRISDEARATKNLLAVREQLVLTRSRYISFAKSLLRGEGLRLNSVDADRLSRKLEAMELPAVLRQTLTPLIEAMKTLDEQILITDKELERLAADNETVKRLQTVPGVGVITAASFAAVIDNVERFETAKQVRMYLGLVPSENSSGERQQRGRLTKTGNRRLRYLLVEAAWSLLRSKKADTAKLQKWTQAIAGRRGKQIAVVALARKLAGILYAMWRDGTEFGIVGQESQLMMTGSQQL

SEQ ID NO: 465610 - protein, 368 aa, unidentified
MHESITAYVGLDVHKDSIAVAVAGNDREVPHFVGTVRPEFKQVRKALSRYGSPSSLQVVYEAGPCGYTLARQLLADGFGCQVIAASRITRSPTERIKTDRRDALTLARLARSGDLIAVRIPDERDEAVRDLSRAREDAVRACLKARQQLKAFLLRHGRPLRGSKPWSPTGELYLSKISFPHPAQNIAFADYRQAVLDTHARVERLTEALRAQCENWRMQPLVSALACLRGVDFLTALILVAEIGDFTRFAHPKELMGYLGLVPSEYSTGEHHHRGDITKTGNAHARRVLVEAAWNYHFPARLSHKITRRQDGQSKPVRDIAWKAQLRLGHRYRRLQSRKLHQNKIIIAIARELSGFLWDIARHVPLAA

SEQ ID NO: 465611 - protein, 319 aa, unidentified
MDVLGIDVGKRDLHAALIQGDRQASKSVANSEAGLAQLQTWLKNRKAERVHVCLEATGGWSEQVGIALSESGHVVSIVNPARIKAFAQSEMIRTKTDAVDAALIARFCRLHQPEPWKPPAPEIRILQGLVRREHSLVEMRTEEENRRGGPMVPPAVMASIEATIAHLDSEIQRVRSEISRLFDDYPTLRQQRELLISIPGIAETTAARILGEVPNIAEFRDVKAVAAYAGLSPRHYQSGSIEHRSRLAKTGNAHLRHALYFPALAAMRHNPPIRALAERLRSRGKARMTIVAAAMRKLLTLAYGVLKSGRAFDPAFGAA

SEQ ID NO: 465612 - protein, 319 aa, unidentified
MTQNNPVVVGIDVAKDKVDACIRTVTERKTCRTTAAGQRGLIVWLRKHQVGKAVMEASGGYERVWVRALRQADIEVRIVAPKRVRSFAESAGRLAKNDKIDAEMIAWFAETFSEAPSQVDDPAHEEMKALVKGRKSLIDVRARLEMQKEHELPALVRKAHARLLKKLAGEIATIETAVVAKIKTTPAFAKRAEIIQSVPGFAEATAITLLAGLPELGQVSNEVAAALVGVAPYDDDSGKRHGQRCINGGRRWVRNALYMPCVGAATLNNPVFKAFYQRLIAKGKAPKVALVACMRKLLVILNTMIARAEKWDTKRYQML

SEQ ID NO: 465613 - protein, 334 aa, unidentified
MKNFKFYLGIDVSKLSLDYCLLDEQCTIVEKGKISNLTEALKKLFFHINAQYVKDCPILTVFENTGIYSNPLARFLHENGWHYAEVSALEIKRSKGLSRGKSDRVDARQIALYGLRNRDKTVVSSGPETLHQQLKILNTEREKILSAINSFSRTSEAEDFLGREVYRVVKAINRQTMSALKKQLAALDEKIGQLIRSDEDLKHKQELLKSIPGIGEIGSIYFLLVTKGFTRFKNWRKFACYCGIAPFEYSSGTSIRGRNRVNPLADKKMKSLLHLLSLTSIRHDEELKLYFNRKKEEGKHSLLALNNVKCKLVSRIFAVIKRDTPYVKTHQYYS

SEQ ID NO: 465614 - protein, 404 aa, unidentified
MHYLGIDVSKASHECVILNANGEAINKSFTVQSSKDDFAKLVKKLSELNIPKSDLVAGLEATGNLWENIYGYLKEQGFKVILLNPYQTSKFHQVSLKKAKTDAIDAVVIAGLLRSGCASGSYIPDDHIQSLRDIIRLKDGYLKDIKDYKRKAYSLLGLVFPEFLNLVKDPFNISSTEILLKYQTAYDFKNLKPRDLLKVARGYQGNNYDEAWADKVISSAKGSIYSGKASKARSLVLKSLISNIKYLKEQIEMLENEIQNLLKPQGTQSNSDVDNLLTIPGVGPKTVAVFLAEAGDIKRFSRCKDFIGFAGLYPEIEQSGSSLNKARLTIKGSRILRHALYMASVASLIHNPYLKSVYQNKVSQGKSAKQAIIVVARKLACIMYSMLKNNTAYDPLRVAIPVAI

SEQ ID NO: 465615 - protein, 352 aa, unidentified
MQHFIGCDVHTRNQVVAWIEEETGEIKKRRLEHASQEVKEFYAQFPRGTVVGIEATFPVYWFERLMGELGHELWVGDAARIRASEVRYQKTDSRDAELLLDLLRTKRFPRIWAPSLEERDLRQLLVHRMKQVRARTQVKNQLHALAISQGVCRKGKLWSVKGRKELESLALLPWAARRRKELLESLDRLDKQVRELDRAVEEAGREREEVALLRTHPGVGMVVGLAFVLTVGPVERFSNSRKLVSYWGLNPRENSSGGRQRLGSISKQGNTMMRWLLVEAAQTAARLDPQLRRIYQRLKKQKTSGVAKVAVARRLAVRLFWMLRTRHNYAQLVHMSGSPSSAVVPPTAEPRL

SEQ ID NO: 465616 - protein, 320 aa, unidentified
MAKKKSKSFIGIDVSKQHLEVAVHESDCQFRCVNKVNAFGKLIVELIDWRPALVVLEATGGLEIPVVSALHAAGLPVVVVNPRQVRDFAKALGQLAKTDRLDARVLAHFAAALKPPLRPLKSKAEQELAALTGRRDQLIEMLIDEKNRRASAASDTVRDQIKAHIDWLEECIAELDEQLKALLQSSAPWQAKDDILQSVPGIGPVVSFSMIADLPELGTLNRQQISKLVGVAPLNRDSGQQRGSRHIYGGRAALRRVLYMAALSASRHNLVIKEFYERLCAKQKPFKVAITACMRKLLSIINVMVRDNTCWKSPQQTVSA

SEQ ID NO: 465617 - protein, 444 aa, unidentified
MTPTLPVLDPLAAFVDVGSEQMYVSIAGGPPEVFGTVTTALHRLRDWLKECGVKSVAMEATGVYWLPLYGVLEAAGLEVLMVNGKYTRNLPGRKTDMKDCQWGATLHAHGLLRAGFVPPADIRRLQDYLRLRADHIVSASANVQHQQKALERMNVKLHDVISSLVGTSGRKVIEAILKGEREPERLLALCDVQIQQKKADRVKEALRGTWAEEHLFALRQAVENWQHYQKQIAACDREIEKVLRAITGPDQPGASADSGPAAKRPGVNAPQIEGLHGLLVKLCGGKDLTVLPAHTDYSLLQLLGEVGTDLSLWPTEKHFTAWLGVAPGSHQSGKRKGSVGRKRNRAGRLFCVMARSLARSKHVALGGFYRRMAGRRGGLVANLALARKLAEWFWRVMVKGVSYVEQGLAQYEAQVLETKRRALQRLAKQLGHVVLPSLAELQRT

SEQ ID NO: 465618 - protein, 374 aa, unidentified
MREHSVAYVGLDTSKLHNAVAIAEAGRDGEVRYLGEIDNTAEATARLVRKLSARHAHLEFCYEAGPTGYGLYRQLTGLGHDCIVAAPSLIARKPGDRVKTNRRDALSLARQLRAGDLTAVWVPDARHEAMRELTRARGAAKRDQQAKGQQGSSMLLRLGRHYPGRKTWGKTHMRWLAGQQLEHLEQRLALEEMLLAVRQAADRVQRLEQAIRAAVPDWSLAPLVTALMALRGVDFIAATTLLAEIGDLSRFRTPGELMAWLGLVPSEHSTGERVRRGPITKTGNRRARRMLIQCAWSYRHPPRVGSDKLAKVAATPEVVREIAWKAQTRLTARYRALCRAGKLDVVAITAVARELAAFIWAIARAVGGKDMLTR

SEQ ID NO: 465619 - protein, 376 aa, unidentified
MIEKLRFLGLDVHAETITVAVAEADGEVRSLGTIANREESIRKLIRKLGPVEHLRACYEAGPTGFVLYWQLTQLGVKCDVVAPSLVPKKPGDKVKTDRRDALKLARSHRSGDLTAVWVPDEASEALRDLVRQREAAKQDQLRAKHRLTKFLLRTGQRPPLGVKAWTERYVEWVQQVRYTHPAREATLLDCLNEVQHMEERVKRLEQSIVEVIQLTPVPMQDVVRGLQALRGIAHISAVTIAVELGNITSRFESARDLMGYSGAFPSEDSSGERIRRGGITKSGNAHLRRIVVESAWSYRHRPAIGARLRKRQEGLPAEITEIAWKAQNGLHKRYMTLMARGKEQRKTMTAVARELLGFIWAIGIKAEASCKQQLAA

SEQ ID NO: 465620 - protein, 355 aa, unidentified
MTHHTAKRSPVTIGLDVGDRTSHLCVLGLDDQVAARGKFATTRGELRSALKRWRGARVVLEAGSQSPWMSRALRADGFEVHVADPRRVQLLSKDPRKSDRRDAEMLARLGRLGPELIGRIFHRGEQAQADLSVVRARDMVVRLRTQCVQHIRGLSKAFGCRLPDASTRTFASKVRELVPAIVLPAIRPLLDLIDTLSVVIKQFEQELADIVQQRYPETERLQQVTGVGPITSMAFVLSIDDPARFASSRRVGSWLGLCPRSQASGDKDPDLPISKAGDGYLRRLLVQCAHCILSRGKDCDLRRFGERLLRRGGGRGARRKVIVAIARKLAVLLHALLRSGAAYDPDYVLRRASAA

SEQ ID NO: 465621 - protein, 347 aa, unidentified
MKFYTQTHQHYCGIDLHARCLHVCILNQQGNILVHKNINADPQALMNLVTPYLDDLVIGVECMFSWYWVADLCRERQISFILGHALYMKAIHGGKAKNDKIDSHKIAVLMRGGMFPQAYVYPREMRGTRDLMRRRMHLMRKRSELLAHIHNTHSQYNLPPIKQDLRHVCHRDGIAERFSDPSVQKSIELDLNLMGFYDQQLSKVEWYIQKQARNCDQHSLILLRTVPGIGKILSLIMLYEIHTIERFATVQNFASYCRLIKCQKESAGKSYGTSGRKIGNAYLKWAFSEAAVLFLRANPEAQAWLQRMSNKHNKARALTLLAHKLGRAVYFMLQRKTIFDQEKFLNR

SEQ ID NO: 465622 - protein, 356 aa, unidentified
MKKVTQNTRKVELKGADCYIGVDVHKLTYYAGLLTSAGQRVEFSCPADPAGFIRQLKDMGIRILGMAYESGPTGYELAWQCQEAGLPIMVAAASKIPRPIAAGGKTDRLDGRRLAEYLAKGMLKGITIPSREEFSLRELERGRQQLINARKKLRQQIKSFLLKNHIEAPPGLTQWTKSGMEALKRLKFGHSHLRLTMDSYLRQLEFTLQEIEGTKVALSREILSQGKEEQIKNLKTIPGVGDTISHTFTVEIFRPERFDRAEEICAYVGLAPIVSQSGQSKVTARLHRVGQFYLRSILVEAAWILIGKEGYYRQIYNKIRSKTNLPQKAVIAVARRLLTIMWRVAVEKRAYQPKCI

SEQ ID NO: 465623 - protein, 280 aa, unidentified
MVDVPCFVGIDVAKAQLDIAVRPSGERWAVPNDASGVVTLVERLQALHPTLIVLEATGGLERSATAALATAGLPVVIVNPRQARDFARATGQLAKTDALDARALAHFADVIRPTPRPLPDAQTQELRALLGRRQQLIGMRTAEQNRLAGTSERLTQDIEAHIAWLNARIATLDDDLETTLRASPLWRENDDLLQSVPGIGPVCARTLLLELPELGTLTRQQIAALVGVAPLNCDSGTLRGRRTMWGGRAHVRTVLSMGTLVATRFNPQIKVFYQRLPLNF

SEQ ID NO: 465624 - protein, 356 aa, unidentified
MLARRRFVNSDDGFVEMLDAVRDYPDRVWAVEGANGVGRSVAQRLVAFDEVVVDVPAKLATRVRVYSTGHGTKTDNADAVAIARAAIHSKHLRRVLADDATVAMQLLSDRRHELVGLRTQAMCRLHRLLRELIAGGAPRQLSAEKAFDLLNDLKPNDVANVMRLEIAFDHIEDVMRLDRKIDDYNRRIVAEIKTCGTTLIRLYGVGPINAALILGEVGDVSRFPNRDHFASYTGTSPISASSGDHQRHRLNRAGNRRLNHALHIAAITQIRQDTPGRVLYRRKMSEGKPHKEALRCVKRRISDAVWRQLQTDRSEDQTQDTNWPRRPAKDTFLVAYRSPDTPRANGRPKQFKPAVV

SEQ ID NO: 465625 - protein, 430 aa, unidentified
MKSNTQNAKIEAITEKTLVLGIDVGSETHYVRAFDYRGIEYSKKPFKFSNTEVGFATFKEWILDLKERHEKDKVVPGMEPTGHYWFNLGKFLQDNEMKPVLVNPHHVKKSKELDDNNPTKNDRKDPKVIAGLVREGRYMIPYLPDGVYADLRTASNIRFQLQAELTRIQNRISRWFNIYFPEYKTVYGKPDAKSGMLILKAAPLPEDILTLGIDGVNQIWRDAKLRAVGKARAKTLIEAAEHSIGSKEGTVSARMEIRMLLEDYESKNMRLQEVMVLIEELVKEIPMAEKLLEIKGVGIRTVSGFLAEVGDISRFNNPKELQKLAGLALVENSSGKHKGKTTISRRGRKRLRYLLFEVAMSLVAKNPEFREIHNYYTTRRLNPLKKMQSLMAIAAKLIRVFYAMLTKGVDYDPKKMISDIKRPTVYLQAA

SEQ ID NO: 465626 - protein, 340 aa, unidentified
MGDITTIGLDLAKNVFQVHAVDQAGNVVVRKRIRRGQVLAFFSGIPSCLVGLEACATAHHWARELIALGHDARLMPPNYVKAYVKRNKHDVADAEAICEAVRRPSMRFVPLKTTEQQSALMMHRARDLLIRQRTMLVNALRGHLAEFGLIEAQGLHKVARLVTIVVDEVDERVPEMARQVLKVIVNQLKDIQTGIADLEKQVLVWHKNNPVSQRLATIPGIGPIIATAIAATIADPNTFRSGREFAAWLGLVPRQNSTGGKARLGGISKRGDSYLRRLLVNSAHTVLLCSKAAKNDPWLISLLSRKPRLVAAVALANKTARVAWAIMSRHDTYRHVAAAA

SEQ ID NO: 465627 - protein, 362 aa, unidentified
MLIDERTTVGLDVHARSVVAEAVDWSSGQVFSQRLVPANEVVLSWVAKLPGPVAVTYEAGPTGFGLARAFTAAGIRCEVVAPSKLERPPGDRIKTDRRDARRLARLLHIGEVAGIRVPTVVEEDARDLVRARDDARVDLMRARHRLSKLLLRHGVVYCGGRAWTGVHERWLRGQRFDLPGTRAAFDAAFDAVLATTARRDRLDEAIIATAVRPEWAPIVARLGAIRGIATLTGLGLAVEIGDWDRFTGASIGAYLGLVPSESSSGSGRHQGSITKTGNTHARRLLVEAAWHHQRLLRPAGKAVAARRAGLSPAVRARGEAADRRLRRRWMALEARKKEPGVIAVAVARELAGWCWSLATMDG

SEQ ID NO: 465628 - protein, 389 aa, unidentified
MFYIGIDIAKHNHEASIIDSDGSLLCESISFSNSQKGCEKLIALLERFSVNPDNCIVGMEATGHYWLSIYSYLFELGFDLKVINPIQSDAFRKMYIRQTKNDSKDSFVIAQIMRFGQFSSSSLSDENIMALRQLSRYRFCLVDDCSDLKRKVICLLDQVFPEYSSLFSDIFGVTSKELLLKYPTPEDMLSVSATKLSNFISKCSRGRYGRSKAEEIQSAAKSSFGIKFASNAFSFQIKQMIEQIKFIENHLKELEKEITELLIQTNQVITTIPGIGNVLGGVIIGEIGDISRFESAPKLVAYAGLDVRVSQSGQFTGTQMKISKRGSSYLRRAIWMAATVAAFSDPVLSEYYQSLRARGKHHLTAIGAVSRKLCNIIFAVLRDEPMPKR

SEQ ID NO: 465629 - protein, 392 aa, unidentified
MFIVGIDVAKRSHEVCMITSDGQTVQRPFSIRNNCTGYNLMLEKIRKHTNIKSQIVFAMESTAHYWLALFTRLRKDGYHVILLNPIQTSAMRDMFIRKIKTDAKDSFIIAELIRFGRYAESNVAQDRLLALKELCRNRFYLVDMAGDLKRKLVALIDRVFPEYEAQFDTIFCKSSVALLKKYPTPQKLSNAHLDKLTELLWNSSNGHFGEWKARELKELARNSFGVEDCDGAYSTLILLMLDQIQSLSGKADALEKEISRLFQSFDTTVTTIPGVGPIIGAVILSEVGDISRFSSADKLAAYIGVDPSVNQSGEFQAAHAHMSKRGSPYLRRCIWMASQVAVQRDPMFRAYYEKKAAEGLKYMTIIGHVTRKMTAVIFAILRDHSVPLGLET

SEQ ID NO: 465630 - protein, 391 aa, unidentified
MQVAADRSEAPAAIQTDLRAIFVSLELSRSTWLITSLSPGSGEKMSKHSVQAGDIAGLLRRFAQLKEKARARTGRDFPIIVIQEAGLDGFWIHRVLQSEGIESHVVDAASILTSRRRRRAKTDRIDGETLVRTLMAYKRGEPRVCSMARAPTPQEEDRRRVCRERRTLVGERVRHVNRIKGLLFAQGVFGYEPLRKGRRERLENLQTGDGRPLPVHLKAQIIRELDRLEILLEQVKAVEAERDALLKPATDEAASPAAMLARLKGIGPQTAAVLWSEGLFRRFDNRRQVAAYAGLAPTPWQSGSIDHEQGVSKAGNPRLRTTMVELAWLWLKNQPTSALSLWFHERVRLGGRMRKTIIVALARKLLIALWRYTTAGVVIEGAVMKAAPTTI

SEQ ID NO: 465631 - protein, 311 aa, unidentified
MASFLGIDVSSLSLDALVRPQDIRISVRNDPAGFEELVKSLRGLSIKRILLEATGGYELDVMRFLQNASYKVIRVNPKRARSFADSLGIKAKTDAIDAAVLAHFAEVIPDQPTLKTSPERALLRELLQQRDRLVQQRDDDRRRLKQAQSAMVANFLKTNLQHFASQIKLVEQAIKRQATVLNDERIAKLNEVKGIGMVTATKLVALLPELGHVESREIASLVGVAPFNHDSGRSVGKRFISGGRFEVRRALYMACLVAVKHNPTLKARYEALRGRGKLAKVALVACIRIFIVRLNAMLRTGTPWLDDLPQP

SEQ ID NO: 465632 - protein, 458 aa, unidentified
MTPRQDHLPHPQRRSRCVRLHVTNPDAAGIDVGADAHWVAVPVERDPEPVRRFGTCTADLEALADWLQACGVTTVALESTGVYWIPLYELLQARGFQVLLVDARQVARAPGRPKTDVKDCQWIQRLHSYGLLSAAFRPAEQVVVLRAYLRQRDMLVTYAGQHIQHMQKALEQLNVKLTEVVSDITGVTGMAIIKAILGGARDPVGLAKLRDPRCKESEATIARALQGTWREEHLFALRQAVTLYEFYHQQIGVCDQAIEAHLRTFADQSGGQPLPYWPRRRKREANEPRFDARARLYAACGVDLTAIEGIDETTALVLLSEIGTDMSRWPSLKHFASWLGLCPQHKISGGKILSRRVRRGSSRAKRALRLAARSLHHSKSALGAFFRRLKARQGTPSAITAAAHKLARLVYTLLKHGTDYVAQEMAAYEVRYRERKVQSISRQAQALGFVLVPAVAGE

SEQ ID NO: 465633 - protein, 390 aa, unidentified
MSQSFDASKSLTAFEQDSTLVAVIEMSQSKWLVAAVVPGIARQPLKKLDADAGALLKLLQRWREEARKAGREVKRIVCAYEAGRDGFWLVRWLQARTIETYVIHAASIAVSREHRRAKTDRIDTELLMRSFLGWLRGEKRHCSMVAIPTMMEEDARRPSRERESLVAEQTRTVNRVKAALALLGIGGFNPRLRKAAQKLETLRTVEGTPLPENVHAELRRDLERLRLVHDQIRTIESERLRRLAQAPAAATGPHAMVRLIAKVLGVGIETADMLVNEVLARNLRDRRAVARYAGLTGAPDESGKRRREKGLARAGNGRVRRAMIQLAWRSLIFQKESRLVRWFRARTADGRSTTRKTMIVALARKLLIALWRLVTTGEMTEGLKLRPAGT

SEQ ID NO: 465634 - protein, 438 aa, unidentified
MQVVHARCAGLDVHKKSVVAAVRLLSPDGTLTTHVRTFGTTTAALLDLVAWLLCLEVSHVAMESTGEFWKPLYNLLEGSFTVLVVNAAHIKYVPGRKTDVKDAEWICELLAHGLLKPSFVPEAPQRALRDLTRQRTHLIQERAGIVNRMQKVLEWANIKLSSVVTDITGVSARAMLEALVAGQTDVSQLAQLAKGRLRSKQAELKLALQGTLQEHQAFMIAQHLALLDVFDEQIAAFDERIQEALEGTRPPPPDAGAQDQGGQAEPLSAPERAWAAKAIVDAVPGIGTRVAEIIIAELGTDMSRFPSSAHASSWAGLAPGQRESAGKRKATRIRDGNKYLRATLVQAAWAAVRKADTFLAAFFRRLAVRRGKQKAIIAVAHKILVIVYTLLKTGQVYQERGAAALDEQQKERIVHRLERRIARLGYKVSLEPVTPAAA

SEQ ID NO: 465635 - protein, 328 aa, unidentified
MEHSLHFIGIDVAKAKLDVDMLRPDGRHRSKKFANTPKGHDELVSWLHQHQVMHAHICMEATGTYMEDVAAHLSDAGYQVSIINPLLSKAFVQSQGIRSKTDAVDARQLAYFCREKRPVKWEAPHPLERALRALVLRHQALTEMHVQEQNRRESAREVQLPSIDMHLLWLETELKRIVKQIKDLTDNDPDMKHRRKLLDSIPGIGPKTSAVLLAYAGLTQRFREARQFAAFAGLTPKQHESGSSIRRVSRMSKMGHVSLRRALYMPAMVTLYKTEWGRVFRERLEKNGKSAKLIIGAMMRKLAQVAYGVLKSGRPFDATQHMENACMA

SEQ ID NO: 465636 - protein, 404 aa, unidentified
MWYVGLDWADTHHDVEVLDEAGKRVGVRRFAHSHDGLNELKAFLLGIAASPEHLACIVETNHGLLITFLLEAGIPVYPVNPKTANQLRKAAGAKTDQIDAHLLAKLGRLDLADLRRLEPDSAIVQELKTLTRDQDALIQTQTRLVNQLTACLKEYYPAALHLFAKVQQRSTLVFLQTYPTPQAAQAASLEEITATLRLGKHTNPTKAAPKLVEELHRPQLVANPVIVRAKSRLMLSLVKQLLVVIQEIASYDEAIRPLFLRHDDQELWRSLPRAGKHLAPRLLAEWGDDRSRYADAASVQTLAGTAPVPFQSGNYAKAHKRFACVKPLRNVLYQFAWQSTRQEAWALAYYQRKRAEGKSHSMAVRALANVWVRIIYRMWQSKTNYQTVTFEAARLAHAPRQHVA

SEQ ID NO: 465637 - protein, 322 aa, unidentified
MGTLSFCGIDVSKDRLDAMVLPEQQSSCVGNDPAGWAQLVEWLSDFSIAAIGLEASGGYERGVMRALLAAGLSVRQINPFKLRQFANASGVLAKNDRLDARMIASFIAVMPTRAAQRRTPGIEQMSEIVTVRRHLSDQKIAAENATKLLEDAMLQRLSRRRIAQLASDIAQLDNRLAEIVAADSALSRRYQVLTSMPGVGLVLACTLIALLPELGRMSRKQIAALVGVAPYDFDSGKLKGKRCIWGGRAPVRHVLYMAAMSAGNWNPTLKAFRHRLKTTGKVPKVTIVAVMRKMITTLNAMVRDDVAWADHLAGRRSAPTAR

SEQ ID NO: 465638 - protein, 443 aa, unidentified
MSRKKRTHLRGTRGQAFADQLRGIPLDRILCVSLDIHKYFHVVMLHNALGEIVTPTFEIDIFQTGFDQLCQAIEAAVVHLHAQVVLLGMEPSSHYFENLARHLLARPQPVTLINSFAVKQNRDQHMMQREKDDEIDTAAIGDLLRRGEGSPYRPARGVYLQLQQLDRVRLGKVKIRTMLQNQILGHLDRIFPGLVILGDEATERYTPLFKMNFWACQTLQHLIRVCPNPRQLAALSPQVLVKMFHAQGYRLGRLAAAKIITYAKTILLPDAELITIRTELLQHDLALLEEVERHIAQLEKHLVALVTETPYQVLTKLKGLAAVQVASLAAAIGDPSHYQYAGQVFRRAGLVCGRDDSGTRQRKGKGKHVVKVGDVYLRRALLSALATLMLHQPVLRTYYTQLKKSKPNGVARVATARRALGILWATLRDQRPATLVLKRGATL

SEQ ID NO: 465639 - protein, 358 aa, unidentified
MTSHSIADVPASVTIGVDTHKHTHFAAAKDQLGRDLGNIEIDTNPRGYAALLRWSQGFSGQVVFGVEGTSSYGAGLARFLRANGQTVVEVLRPTRQDRRLHGKSDRIDANAAASAVQSGRARAVPKTGDDGIEMIRALKVAKSTAIKARTQCMNALKALIMTAPDEIREQLRGLTPKALINTMAAFQVPDIVDPGSATKWSIRSMARRYAMLDNEVIELEGRLDELTRKLVPELRQCVGVGQDVAAALVLTAGLNGDRIRSEASFSMLCGSSPIPASSGLTNRHRLNRGGDRQANAALHRIVLVRMRYHKPTREYVAKRTAEGKTKAEIFRCLKRYVAREVFKLLVAQARQLEGATAA

SEQ ID NO: 465640 - protein, 328 aa, unidentified
MGFDIAKASVDFCLLSRCGALLWRGRFDNEPQAIKEFLALVRRRGWKLSQIHFALESSGVYGKRLIAALHEAGLAVSVLNPAQVKFFAISVLRRTKNDRVDAEIIARFCLERKPLSTRPLRPVEEQLKLLVHERDSRVAEQTRERNRAKKDPFQIQLPPLISRQRQHRIKQLQKEIAQMDEAINALIASDEYLSTQSKLLSSIPGIAQNTAAKILSEIAGKEFDSARQLVAYAGLTPSEFRSGARCYGKTHLSKIGNAFLRKALYLPAAVARRWCKPIKPWVSLLEERKLSDLAIRGAIMRKLLHIAFGVLKHQKPFDPSLVFMPKTV

SEQ ID NO: 465641 - protein, 387 aa, unidentified
MPHPNDLSRSLVALEQDATLIAVIEMGQSSWLIAGIVPGLERQPLKKLAADPDTLLQLLHRWRNEAMQAGRSIKRIALAYEAGRDGFWLARWLRAHQIEAYVIHPASIPVSREHRRAKTDRLDAELLKRAFLGWLRGEPKHCTMAAIPTLEDEDARRPSRERESLVGECTRIVNRVKATLARLGIRGFRLTLARASEQLKTLRTPEGAAVPPNTLAELRRDLARLNFVKQQVKEIEAARTERLEATPGGGRNAMVHLLARVVGVGVESADMLVQEVFSRKLRDRKALARYAGLTGAPDESGRRRRERGLAKAGNARVRRGMIQLAWGHLLHQKESALAEWYRGRTADARGGTRKTMIVALARKLLIVLWRLATTGEAPAGLRLRPAA

SEQ ID NO: 465642 - protein, 362 aa, unidentified
MSKISKAARRREATKEKPEMTMGIDVGDRYSHLCLVDEEGEVVERDRVRSTEEAFRRYFEDAPRLRIALECGTHSPWMSRFLKQLGHQVIVANARKIPTITESESKNDGRDAEQLALMAAFNPKLLSPLEHRSLVRQQDLNLIQARAILVKARTMIVNALRGLVKSAGGRLPACSTESLPDRAAGAVPPALAAVAGPLIEQIARLNVQIGAMDRQIEKLAAKYPEIGTLRSAPGVGVLVAAAYVLTLDRPDAVPSSRSAGAFLGLRPGQSQSGDSDPQRRITRTGNTYLRCLLVQSAQYILGRFGPDSALRRWGLKLAASGGKRGKKRAIVAVARKLAVILHSMWRSGQRFQPFPQPALAQA

SEQ ID NO: 465643 - protein, 338 aa, unidentified
MKTHVGVDLHQRFCYLTAVDASGKTRKQGQVVNQCEALRAWLRQLPGPRQVVVEASGFWPAFARAAGAESERLVMVHPQRVKAIASAKLKNDRVDSETLAHLSRCGLLPEAWMADGPTQQLRLLVRLRISLGRQRARAKNQLQAVLHQEGFIKPVTGVFGKRGRAWLAELELSAAGRVVVDTWLREVDHLDVELAAQTRELERLAKADARARFLETVPGIGAYAAMVILAEVGDVERFQHKRALASYAGLTPVVRESAGKRRRGGITHRGSNTLRWIMLQVAQVAARCSPGARSYYARLRQRKPAQVARIALARKLLTVVWALLHHGVCYDEELLIRG

SEQ ID NO: 465644 - protein, 321 aa, unidentified
MTYVGIDVSKVTFVVAYSSVKTNKTRTFKNTVNGVHEFVQTISASEHNCVLEATGNYSALLVYLLSEAGITISLENPLKIKNFARVMLTVTKTDEIDARLIALYGEKMQPAPYKLRSDAILVLKQKRTVLRQLKKQLVTTRNLKGSMEGLPFFDPKCKKTIEKTITFLEKQIKEMEEELASLAQGEYKKQMDLLTSIKGIGVTLAAALIVATGRFSYFDNAKQLTRYLGLSPTYQQSGTSVNVKGHINRNGDSSLRSQLYVAAFSSLRCNTECKACFDRLRSNGKPGKVVVIAVANKLVRQAFAVVTQGKPYVDGFKSEKP

SEQ ID NO: 465645 - protein, 368 aa, unidentified
MLYLAIDQHSKQLTVNLRNETGQIVLRRQVSTRGDAPRQFLEDVRQRSLAEGGYVTIVEVCGFNDWLLELLAATGCRETVLVQADRRSKRKTDRRDANKLGELLWVNRHRLAAGQPISHLRRVRILSRREREDRRVTQMRRNIGRELTRTINSIKTILRRENLEQHCPTKGIQTQAAERWLKKLPLAPLDRMELDQLLARWKLLREQKLQIEEEIARRAAAHPDVPLVQTLPGAAAYTALALAARVGPIERFPRPRSLANYWGLTPGCRNSGETTDRLGSITKEGSSLARFILGQLVLHVLREDPVMRAWYKRIKRRRGSKIARVAVMRRLATILWHMLKKREPYTIGGPPRKKLKRHKPALAETSTA

SEQ ID NO: 465646 - protein, 287 aa, unidentified
MYNTTIFVGMDVHKETFSLCCYTIEKDEFSHPHTTEADYIHVLSYLASLRAALGENVSFICGYEAGCLGYTLYHQLTEHNITCVILAPTTMPVVKGKKKIKTDKRDARNIAKCLAHHDYSPVYVPTGQDEQVKDYIRMRDDHRLPLKKMKQEINAFCLRHNLRYGGRSTWTAAHTKWLRWLEPEGLYREILEEYLLTLSTLMDKIDRLDRRIGELTAREEYCEKTKQLSCFLGIKTHTALAVVVETVDFKRFPSAEKYACYLGLVPGGIQAAQARRGLGSQRRGTAM

SEQ ID NO: 465647 - protein, 391 aa, unidentified
MIYIGIDVAKDKHDCFITNSDSEVLVKAFTIANNLDGFNDLYQKIESVMDDVTKVKVGLEATGHYSYNLLGYLIDKGLPTYVINPLHTNLYRKSLSLRQTKTDKVDARTIASMLMSDVNLKSYSDTFYHNEELKSLTRYRFDKVKERAKLKTSVSRLVCILFPELEKLVPTLHIASVYALLSEFPSAKHVATAHLTRLTNLLSESSKGRYGKDTAITFRDAARASIGSNMPAKSLELKHTIKLIQELDSEIDEIENEIKIIMDEINSPILSIPGINYRMGAMIIAEIGDFNRFDSPDKILAYAGFSPSTYQSGQLDGAYAHMEKRGSRYLRYALYNATKYVCHWDPTFAAYLAKKRAEGKHYNVAISHAVKKLVRVIYHLEKTKQQYIKVA

SEQ ID NO: 465648 - protein, 401 aa, unidentified
MQYIGVDIAKHTHVAASELDDGAPHGRPFSFPNTEKGFAGLLQRFDELGATPDDCLIIMESTGHYWMALWEFLDAHGFKVAVVNPVLTDAFRKADTLRKTKTDGIDALLIAEFARFKRLGPSRISPEAAEGLKQLTRYRHHLVTERTSLKNRLTAACDRIFPELASLFSDKHGATAMALVREIGSARAIAATDIRTIERVVRTASRGHHGRAKAEEVKHAAKHSVGCSFAEGALSFEAKHIAALIGHLDAEIDALDEEISRAVDPEIDELLRSIPGIGPVCAATIAAEVGDPDRFGDPRKLMAYAGLDSSTCQSGKFKGDEQHMSKRGSAPLRNALMTAADKARMRDPYFGDYYGQMRSRGKHHYVAVSGCARKLCGVILAVLRERRPYERRPSIQSQDRA

SEQ ID NO: 465649 - protein, 407 aa, unidentified
MLDYDLYVGIDWAAETHQICFLDPGGHVLEEARVAHSGAGLATLVEHLRRLGPSEPGRVAVAIETPRGAVVDTLMAHGCHVFAVNPKQLDRFRDRHTVAGAKDDRRDAFVAADALRTDGGAFRRVQIEEPRVIQLREVSRLHAELVQEHTRLTNRVREQLQRFYPQPLALCAAADEPWLWTLLERAPTPALAQRLRRNTLRALLATHRIRRFTAEELYALLQAAPLIVAPGTAEAAAEHLALLIPRVRLVHDQQTQCERRLAQLLDTLAEGEQQEHRDVTVLRSVAGVGTIVAAAMLAEATGPLAGRDYQTLRAHTGVAPVTRQSGKTRLVSMRRSCNARLRAAVFHWAANSIRLDPHSRAHYDRLRQRHGHARALRGVADRLLRILIAMLTTGTLYDPARRQAIPA

SEQ ID NO: 465650 - protein, 482 aa, unidentified
MTLVSSDDDLDWEFVFDSRLGHPTGRSEEPMVKRSKKRCEELPILHPHAAGIDVGASELFVAVSADRDPQPIRSFPTFTRDLNALADWLQQCGVRSVAMESTSVYWIPVYQILESRGLEVCLVNAQHVKNVPGRKTDVSDCQWLQYLHSVGLLRASFRPPGFICAIRSLWRHRSSLIQMAAEHVLHMQKALDQMNLQIHRVLNDITGMSGLRILDAILAGERDPVTLARLCHGGVKNSEDTIAKSLEGDYRPEHLFALRQSLAAFHYYQQLVVEVDQEIQGQLGSLETATTAEPTVPKRTKASAYQRRRYEPKTFDLRGELYRIFGVDLTNVPGISAITAQTVLCEIGTDVSRFRNASAFASWLGLCPENKISGGKVLYTKSRRVRSRVATALRMAANSLHHAKDYLGEFFRRITRKLGKPQAITATAHKLARIVYHLLSTKEAYNETVFHRCDEEAIKRAQYRLRKQAAQLGFQVIPLQNG

SEQ ID NO: 465651 - protein, 346 aa, unidentified
MSVYVGIDVHRKRSQVAVVTEDGTVQLNKNVVNGSEPMLRLIGALPAGTPVAFEAAFGWSWLAELLEDYGFEAHMVHPLRCKAIASARLKNDKVDAAILAQLLRADLLPEAWIAPAKVRQLRALLRHRISLVRLATQARNRIHAVAADHGYDRSASYWTGPGRGWLAELDLPAASREIITDCLAVIDGLAPVIDRIDGELHQHAKADPRVKVLRTLSGVGEFTALVMVAEIGDITRFGSARKLASWAGLTPTVRGSDLHVRHGHISKQGSVWLRWVMNQAAQTAKRSPEFATAYSGIARRRGKKIATIAIARKLLTRAWHLLNDMQAADAATPLRRPETGGPPSPG

SEQ ID NO: 465652 - protein, 350 aa, unidentified
MIIIGVDFHPEFQQIAWVDTDSGEFQEKGLAHREEAERFYRELAAAGQKVRVGMEASGHGRWFERLLSELQIELWIGDAAEIRARRVRKQKTDRQDAQLILKLMLKDDFPQIWVPSWENRDLRQLLWHRHRMVQARTRIMNQLQAVALNEGLRCKKRLWRKHGRQQLEAFRLAPWASRRRRDLLELMDRLNPTITELSQAIEQEVEKCPEARRLMTHPGVGALTALAFVLIIGKADRFRCGKQIASYLGLVPLEDSSGNRRRLGHITKQGSSMMRFLLVEAAQVTVRSVPEWRSKYLHLMMRRGRKTAKVAMARKLAVRLYWMMRKGWDYQQWSKFGSHVGQPGHRDGVQ

SEQ ID NO: 465653 - protein, 388 aa, unidentified
MIKKDLEESNGGRTVVGIDPCSEFLQLAILAPNKETEFKKLPLSPSITEEIAKSTDPKTTQIAIESYGSYGKLFIYDLLKKGYDIREVNPHISKKLSSLYSEEHSDQKDAESLAKALLLIPDLPKISITDKKQWLAKLTRTRKKLVKDLNGYLNRLHKALTESYGVIYKSFFKILFAKKALKFFEEYPTINDSLSDKDVMKRLGETKWNLLKQAGKWEDDFYLETLRTEIRGFIEIIRCINSTKLAIEDKIHEIADQVEEMRILKTFPGIGGISGATLLSEIGDIDRFGQESYLSAYCGVSPVIWQSGTGRIRTKRRKRYSRRLKGILYFISLSQIRINPESKAYYQRKIKEGKTHWQAMNALSRQLIKIIYYMLKNMEPYRRPVLVN

SEQ ID NO: 465654 - protein, 519 aa, unidentified
MLQPRDRKFLVLRASPKTDRGAGRNHPLLRLRESFSREEHAEENLWLSPPTLEHLTTEEILWEKMESRRDEMELLYERCAGLDVHKKNVKACFASPGEGGKRQKETRTYLTMTQDLLEMRDWLKEQGCTHIAMEATGVYWKPIYNLLEGDFEILVVNAHHIKTVPGRKTDVKDAEWIADLLSHGLLSASFIPSAPQREWRELTRYRTKLVEERAREVNRLQKTLEDTNLKLGDVVSDVMGKAAQMILRAVVDGETDPVRLAAFAVGRVRASQEALERALTGKVTAHHRFLLGEHLTQIEHLDEAIRRVSEEIARRLSPSEPPTPEPDEENQSVSQNACESSESPLSPGPRPPLSWQQAVEIIDQITGISQRVAQGLLAEIGVNMGQFPSAKHLASWGGICPGNHESAGKRLSGKTRKGNPYARQLLIQAAHAASHSKNTYLAAQYRRIAARRGAKKAAVAVGHSILVIIYHLLRDGSAYQDLGGNYFDERDRQVVQKQLLRRLERMGYQVELQPMAQAG

SEQ ID NO: 465655 - protein, 398 aa, unidentified
MVSIGIDVSKGKSTVCMMKPFGEIVAGPMEISHTESDLKALIKFINSLNDEARVIMEATGIYHLPLLTFLKDQNLFVTVINPYQMKRYRIQGLRKVKTNKADSMVIAKYGLDNWYSLSDYIRSEDKYGELSTLSRQYRHYMRIHVSSLQELTHLLDHTMPGIKKQFKSWVPETGKDKLSDFVEQYWHYDNIKKKSERQFVDSYLKWAKRKGYRCDQNKAAKIYSMAKEGIPTLPADQTTKMLVNQAIDILRRVDATLTTILAHMQEIAKTLPEYPVVRSMGGVGNILAPKLIADIGDVRRFHSSKALIAYAGIDAPPFQSGQFQGSNRKISKRGSSAIRKTGYEVMRSLKMHKMPEDAAVYNFILQKEAEGKPKKVAKMAGLNKFLRIYYARVMEVYS

SEQ ID NO: 465656 - protein, 358 aa, unidentified
MKKIVIGIDISKEKIDASAIDVRNAQQGIQKLGYETFENRPMGFRRMLVWARHLIKGVALDEVLFCCETTGGYDRSLCDYIYAKDLDIWRESALQIKRSMGVRKGKDDKADSLMIAEYAMRHMDKAVIYETPSQTIRELKALLQYRHKLVQEKTEKKVRMSHLADTAAKSKSMSFILRDARKSIKALEKSVKQCERQILELIKGDEELSRSYRHIISVSGIGIVNATALIAYSNNFRGITTANRMASYYGIAAFRDTSGTSVDKKAYVKCYSNSLLKAYLTQAAEWTIRENGIYHDYCLRLKEKGKPYGIIINNARNKLIHLVFSLVQNDMDYERNHEYIRMKRRVNADLTTGLKNIN

SEQ ID NO: 465657 - protein, 475 aa, unidentified
MNIKGIKKKNQVVTANIFEQQELLKKSEVIKENLTASTWRELETNGKFDKNKKLSFISDDMLILGCDVGSETHYVRAIDTRGRELSKSAYSFNNNQEGFRSAKEWAVRIAAEHDKGQIVLGLEPTGHYWFCLATWMIANGISVVQVNPYAVKQTKEVEDNSQLKDDRKDPKLIANLVKDGNFGMPYLPEKIYAELRRLSMFRDQLNEDRIRTINRMHREMKIYFPEYKEALGKVDGAFSLELLKEAPFPDELTALGEEGIRQIWHAAKLRGRGYSRAREILQYAKASVGIKDGSIASKTAVKWFVQKIMELDVELAVIENQINQKCQEIPHTGNVLEISGIGENTLSGILAEMGDISRFDDVKEIQKLSGLGLVACSSGKHKGETKISHRGRKRLRYWLFQAAKSAVAHAEEFKELHMYYTTRADNPLKKMQSLIVIACKLLRIIYTILNTGTFYDPKKMLMDIRRPENKEAIVA

SEQ ID NO: 465658 - protein, 421 aa, unidentified
MKTVHSEFAAYIGLDWADKKHDLCLQVGLDSARERSVLEHTPKAIHAWAEQLRKRFAGSKVAVCLELAKGPIVSALLEHDFIVIFLVQPAMLARYRNAFTPSRAKDDPTDAEFALELLLRYPDRVQRLKPESANMRVLRQLVETRRGLVDDRVRVTNRIVAHLKAYFPQVVAIFREKDTGVFADFLERWPTLEAAQQARRSALESFFREHNVRYQSTIDRRIDTLKSDEPLTTDASVIRPARLLVELSLPQLKALCSAIERLEQEIADCCAKVADYKLFSSLPGAGANLAPRLLVAFGEHRERFPNAAAFQEYAGVAPVTERSGNKCWVHWRYSCSTFLRQSFIEWVGQTIPRSFWAKTYYEAYRARGGSHQAALRALAFKWIRILYRCWVDRLPYDESKYLMALQKRHAPLLKHAASAST

SEQ ID NO: 465659 - protein, 366 aa, unidentified
MYYPISIGLDVHLNSISASALNAETGEVTQARFGGADTEGLEKWILSFGQEAQAVYESGFCGFALKRKLDTAGIPCKIAAISKLARPAGDRVKTDKRDATFLARQLAVGNIVAVHVPDIDREGMRDLSRTLDVVRANLTAAKLRVMQTHHRYGLRYSGKTKRAWVLGWVSWATSLKMPSIGAQYAYDFHMADALRLIDEKKRIEALIHNWCDDEAIKGKVAALTAIKGISKTAAFCLISEIGEFSRFSKGSGFSSFLGLVPSENSSGETIRRGSITRTGNEHVRKTLIESAWCFTRVKTPYKKTPDGVKPEIAVIAQKANTRLFEKRRRMGNTKKSCVVNAAIAREMACWIWAVAVAADIDMAKGN

SEQ ID NO: 465660 - protein, 348 aa, unidentified
MRFYSGQHRFYCGVDLHTRTLSLCVLDSVGAIALEVTLPPDPDRLLAALAPYRDGLVVGCECLFAWYWLADLCNEQKIPFVLGHALYLKAIHGGKTKTDTIDAQKLARLLRGGTFTEAYVYPKAMRATRDLLRRRTYLVRKRAELLAHLQMTFLQYNLTPPAQKLCYAANRAKLNLNVFADVSTRSMLQADLAIVSALDQQIKRLEGELVRTAKVHDPQTFARLRSVPGIGPVLALILLYEVHDIRRFVDESHFLSYARLVGGVRESAGKFKGTGGRKIGNAHLKWAFSEATCLLIRSLPKAKTWLARRERKIGKKRALGALAARLARTVYHLWRKQEAFEEKRFLAS

SEQ ID NO: 465661 - protein, 418 aa, unidentified
MQRTLNVGIDISRHRHDVCMLDEAGERVGKPFTIQNNRSGATELVERLARTAPEYERVRLGMEATGIYWYHLYRTLMREPALEGCEARVVVFNPRLIQGFRDAYTAMDKTDPDDAELIAERLRFGRLPDHSPPDPRYFPLQRLTRYRFHLVQTLVRTKAQALTSLFLAKSEYGRLEPFSDPFGATSMAVLTEFGTLDELAAVPLEELTTFIAEHGRHRFTDPSEPARKLLQVAQDSYQLDEDAVEPVQFALSSALAHVRFLSGQLASLDKRIARELERFPNTLLTVPGIGPVYAAGLVAEIGDVARFPDNDALAKYAGLWWPRRQSGQFEAEDRPLSKAGNAYLRYYFCEAANSLRMHNEEYRRFYERKHEETPRHAHKRATVLTARKLVRLVYALLRTNQLYRGPGALSPKKQPRQR

SEQ ID NO: 465662 - protein, 402 aa, unidentified
MKKSSRMSVIHPHAAGVDIGAEFHVVAVPPDADAAPVRTFQRFTGDLHRMSGWLKTCHITTIAMESTGFYWLPAFEIPEAAGFNVILVNARDAKNVPGRKTDVNDAQWLQKLHSFGLLRASFRPEHDISVLRSYLRQRERLTEYRAAHIQHMQKALMQMNVQLHHAVSDITGVTGLSIVRAIVSGERDPSVLIQYRDVRCKKTPEVLQQALTGNWQPEHLFALEQSVAFFDFYQEKIRECDDQIETSLLQLSTGTEEPEGVLPSARHRTKQPNQLSFDVRPLLWKITGADLTQIHGFGPYLALKFVAECGTDMNRWPDASHFTSWLCLSPGNKISGGKVLSPKTRRSSSRIAAALRLAATTIGRSDTALGAFYRRLSSRIGKAKAVTATARELAILFYNALK

SEQ ID NO: 465663 - protein, 338 aa, unidentified
MSLYAAIDLHSSNSVLAVMDGNGKPVLRCRRSNDLPRLLGDLAPYRDELVGVAVESTYNWYWLVDGLMDHGYAVHLVNTTAIPQYDGLKHGDDDSDALHLAQLMRLGLLPEGYIYPREQRGTRDLLRRRFSLVRQAVRLMLSIQSSFSRSTGKQLSANALRRLTPSQLVDLFPDLSVRYGVLIQFKLWLTLQEQITALELWIRKDLTRPDRLVRLQSVPGIGPILGMTILLESGAIERFASVGDYASYCRMVESVRLSNGKRKGHGNRKCGNRYLCWAFMEAANYAVRFDPLIRRWYERKRARKHRVVAIKAVAHKLARACYHMLHEGTTFDLTRAFG

SEQ ID NO: 465664 - protein, 349 aa, unidentified
MAMTIVEPAAGAVTGGVDTHLDVHVAAALDDIGGLLGVESFEASRAGNDKLLAWLVSFGAVAQVGVEGTGSYGASLARSLRAAHVKVVEVDRPNRQARRRTGKSDPADAVEAARAALSGRAQGAGKNRDGNVEAIRALVVAKRSARSTRIKSLNQIRHLGFTAPDELRDRLRGVSRDHLGGVAAALRPRADGDPVMSATKTAIRILGRRVLALDDELATIDALLAPLVAKTAPTLLDVHGVGVDTAATLLVAAGDNPQRLRSEAAWAHLCGVAPIQASSGKVTRWRLNRGGDRQANGALWVVVITRMSSDPRTRAYVARRLHQGRSKPEIIRILKRYVAREVFHHLPRS

SEQ ID NO: 465665 - protein, 376 aa, unidentified
MRKVALDLGARKTAYCEVREGKVVQRETVTAVQSLDSLLGPEQLPAVVAIEACREAWYVHDLLTSWGNEVVLVDTTRSRRLGIGQHGRKTDRIDAEVLALALERGGIPVAHVLSPRRRELRRWLGVRRALAETRAQFVTTARGIAREYGSPLPHCATERFVSNVCKKQLAPDLQAALEPLLKMLEINSIQLENVELELAKLCVTEPVIALLATAPGVGPVVATCFVSVIDEAKRFRCAHHVESYLGLVPSEDSSGGKRRIGAISKKGNKYMRALLIQSAWTILRTADRSDPLRLWAEAVAARRGKPVAVVALARRLVGVLWAMWSKGTAYEAARLAAAGSRGLSQAAQSLEFRAEALKKASKKQSMKKLTAAAVTH

SEQ ID NO: 465666 - protein, 352 aa, unidentified
MPFYIASDFHAHQQTVAWCDTETGETQITTLKHNLEQVRVFYASLPPGIVGVEASSKARWFEDLLEETGHQLVVGNPVLIRRRATSRHKSDRRDAELILQLLLRDEFPAIWRRSREQTQVLEILKLRHSLVCQRTQVYNRLQALAKSCGLGKARTRTTAFQERFKASDLDEVEALQRSQLLQLIGNFDGQLKELDKWLAKRAALDPQVQLLVTQPGVGNLTALALVNSLGDISRFTHPTKQVPAYFGLDPLEKESAGKRQAAGTSRAGSAITRFLLGQAAQSAARRDPQLKAFYKRLAKKKPKGVAKTAVARKLLIKLVIMLRDAITAEEFDRRGGTSGGGSKSSWIERSEV

SEQ ID NO: 465667 - protein, 388 aa, unidentified
MQTAADHPEAPTAIRHDLGAIFISLELSRSTWLITSLSPGGGEKMSKHSVRGGNVAGLLERFAQLQEKARARTGRTFPIIVIQEAGLDGFWIHRVLQNEGIESHVVDPASVATSRRRRRAKTDRIDGEALLRTLLAYKRGEPRVCAMVKAPTPEEEDRRRLCRERKVLTNERVQHVNRIKGLLFGQGVSGYEPLRRNRRQQLDELRTGDGRPLPKHLKTQISRELDRLELLLEQIKAVETERDALLAAQKVALPGPAAMLLDFNGIGPEFTAVLWSEGLFRHFDNRREVASYAGLAPTPWQSGSVDHEQGVSKAGNPRLRTTLIQLAWLWLRHQPQSALALWFKERVARNGGRHKKTTIVALARKLLVALWKYVTAGVVIEGAVMKTA

SEQ ID NO: 465668 - protein, 418 aa, unidentified
MEVLHPHCAGLDVHKDTVVACVRHMVGGTVGRQVQTFKTTTRDLMALSEWLSAEGCTHIAMEATGVYWKPVWHILSDGEFELVLANAAHVKNVPGRKTDVNDAAWLADLMAHGLIRGSFVPDAHTQELRALLRTRKQFVRERSSHIQRLQKALEDANIKLDSALSDVMGLSGRAMIEALIAGESDPDTLAGLAHRRVKAPPEELREALRGRGTKHHRFLLQLHLQQVDAIDAAISRIDREVDANVEPFRAAITILSTIPGVSDLSARVIMAEIGNDMSRFPTDGHLISWAGLCPRNDESAGKRRSTRMRKGAPWLKTTLIQCAWAGARKKGSYLQAQFHRLRSRRGAKKAIGAVAASILTAAYHMLADGTLYQDLGPDHFDRRAKASQTRRLVARLHNLGYVVQITPLTASPHTSVSC

SEQ ID NO: 465669 - protein, 364 aa, unidentified
MKRSLKYVGLDVHQATTVTSVREESGRVIARTVLPTDGRMLVEYFRGMRGSIHVAFEEGTQAQWLHDLLQPVVDQVVVCDRRGTTARGNKGDQPDADALSEQLRRGALRSVYHGSGERATLKEVARTYRNLVEDTTRVMLRLKALFRARGITTAGRSVYRADERADWLAQLDAAAGPGASRGVHFRAATLYAELAVLQALRPTARRALIVEAKRDPAWAVLRSIPFLGPIRVALLLATLQTPWRFRTKRQLWGYAGLAVVTRTTAEWALVDGRAVRRRRPPMTRGLNRNHNRVVKEVFKSAATAAATRSGPLQDWYQEMLKRGMREELARVTLARKLAAITLHLWQTGARYDPSHLMPSTVPAR

SEQ ID NO: 465670 - protein, 370 aa, unidentified
MLDTTTFIGLDVHARSIKAVSLDVMTGEVRAATFGYDAGAVAEWVRSVDPRARCVYESGVTGFDLQKRLSGLGVDCVVGAVSKMIKPSADRRRKNDRNDAEFLARMLSVGNVVEVWVPDDECEAARDLTRALEDARDDLSRSKQRLSKFLLRHGLAFDERTPTGRRKGNWTRAHWSWIESIRFAERADNDVLAYYVDAVRRAAEEKARLEGLVEAEARKPRWRKRVDSLRCLKGVDTASAADLVFEAGEFSRFRNARSFAAWVGLTPSEHSSGESDRRGAITKAGNKHLRKTLVEAAWHYLTCSGRPKDLAKGQAPDRVARRHAAKGVRRLVERREALLARGVHNNKANVATARELACWVWAVGLMAEEA

SEQ ID NO: 465671 - protein, 299 aa, unidentified
MLYAGLDLSRKRLDFHLLDREGVTVEDGAAPPDADGLHSLTARLDRHGETIRAAIESMNGARFVHDRLELAGWQVEIADAQEVKGLAPLACKTDRIDAWVLAELSRRDLVPAIWLPDPRVRAERERARWRLHLVRHRSSLKQRVHAVLLTHGKPCPVSDLFGLQGRQLLSRLGLPEPWQGTIEASLRLIDELDREISECERELRRLGADHRYVPLLCTVPGISWVLVYTIAAEIGDISRFAAPQKLAGYSGLCPRVYQSCERDLRGPLGGCPRRSGTCSAAANPSLPKAPPTPWPPDGP

SEQ ID NO: 465672 - protein, 343 aa, unidentified
MQSITTIGLDIAKSVFQVHGVDPDGHVVVRRQLKRRYVLAFFEKLAPCLIGIEACASSHHWSRQLQALRHDVRLMPPSYVKPYVKRQKNDGTDAEAICEAVSRANMRFVPTKTPEQQSGLVLHRTRHLCIRQQTSVINAIRAHCAEFGIVAPVGRRGIEELLNVIANANDEQVPEIARACLSALGDQLHRIKAQILAFDRMIGAWHRSCAASKRLDEIPGVGPALATALVASIADPRTFRSGRDFAAWIGLVPKQSSSGGKPRLGSISKQGDRYLRGLFTAGALAVIRYAKIHRIGHRPWLTALLARRPTKVAAIALANKIARMAWAMMARGERYREPAALAA

SEQ ID NO: 465673 - protein, 343 aa, unidentified
MGIVVLGIDLGKNSCSLAGLDASGRVVLRRRMRRGSLESFVGGLERCVVAMEAYGGVHHLGRVFVGQGHAVRLMSPEYVRPYVKAQKNDELDAEAIAEAATRPTMRFVEVKSRAQSDVQALHRARERLVSERTALINHLRALLLERGIVVPQGRRKLEEEIAVFADEDAIEALSPRIRRLIEDLRSEWRTLDERIATFDAEFVRMAREDETVRRLITIPGIGTINATALAAAVGDARTFARGRDMAAWLGLTPRQMTTGGKPRLLGITKRGNRYLRKNLVHGARAVLPYLIERETPLGRWARGLMARAHKNIVVVALANKLARIAWAVLARGCTYEPGGAAAA

SEQ ID NO: 465674 - protein, 453 aa, unidentified
MAQSKARRGSKPHKARVNLVITHPNAAGIDIGSAAHFVAVPPDRDDEPVREFPSFTTDLSAIADWLSACGVDVVAMESTGVYWIPLFELLESRGFKVLLVNARHVKNVSGRKSDVLDCQWIQQLMTYGLLNGAFRPTEQVCVLRSFMRQRAMLLKSQATHVQHMQKALTQMNIQLANVISDVAGETGQKILRAILAGERDGRVLAAMKNSRIHASDDEIAKSLQGNWRAEHLFALKQAVAGFDFVGCQLAEVDQEIERQLQDLEAHEGDPPPGKKRGKARNAPRFDLRSLLFKMCGVDLTRIDGIDVTTALAVISEIGTDMSRFPTEKNFTSWLGLCPGTRITGGKVMSGRTKRCANRAAQALRLAAAALRTSKSALGAYFRRMCSRMEKAKAVTAAAHKLARLIYTLLTKGQEYTDQGQEYYETRYRQRVVNHLSQRAAKLGMKMVPIEQAL

SEQ ID NO: 465675 - protein, 385 aa, unidentified
MGTQTFIPRDYDVFAGLDVDKKSISVTFTDHQGFLKSLNMPYKVEHLVNYVRKHYPDKKVAFAYEAGPTGYGLYDGLEAQAYPCLIASPSMIPKAPGQRVKTNRLDSRGISENLRGGQLKGIHVPTPLYRELRHLTQLRDTLVSEMVRMKQRIKSLLLMEGLEFPPAPAGSQWSFLVKKKLRELPCSTTVRFKLDRLLDSLEFDEKQVLKSTREIRRFCQTDPELSQCIEYLRTLPGIGWIVASQLLARVGDWRQIKNIRQLPAFLGLVPTENSTGERTERGSITHTGDGRLRSKLIQASWSAIRQDGELREFFRIVAKKHPRHLGSRVAIVAVAHKLSVRASVVLMKQRPYEVRQKVQSAPLTQEETVPQGTTRRLAVPGETNS

SEQ ID NO: 465676 - protein, 375 aa, unidentified
MGTSQGKALRRRVIITNDKQGFDKLLEETTAVQKQHGFEKRVFGMEPTGNYHKPLAQWLMDQDHMVVLVTGKAVKENRQLLDGRWDKNDTKDSANIADLVSQGKCQFFANPDKMTTCLRDLLSLRKRLKRQEHSLRMCIRNSLLSKHFPEMDRYWGSCLRENLAIVRWCFPRKIAAMPLKEFIRMVTSTDRGLRQVNRLQSIHQVAVDSIGLPVTEATRFEARLLVDELEQVCERIVQLQEQVKTLCNGSLHYKLLQTIPGVGPYIVAVVLAAIGNPHRFTNRSQVIRLAGLDLSANRSGKNSDKAVPVLSKKGDAHLRYALYQASLIATYHNDGFKQLFRHLPIHRLQETLERRPLCRNSSPIVGISILYFSSS

SEQ ID NO: 465677 - protein, 347 aa, unidentified
MLHLGLDLSRKRLDVCVLNEAGTKLAVTQAPPDLDGLRHLAKEVAALGGPVSAAIESMNGARFVHDSLELMGWDVEIADAQKVKGLAPLACKTDKIDAWVLAELSRRDLVPAIWLPDPEIRAERERARFRLHLVRHRVMLKDRIHSSLLAFGKPCPVSDLFGRSGRELLGRLELPDPWTKNIATALSMIDDLDSEIDACEKELRSLGADHPYVSLLQPAPGIAWVLGFTIASEIGDISRFSSPKKLMGYTGLCPRVYQSGGKDFRGPISKNGPKYLRWSLIEAAVHASSHPVYRDHYDRTKARLGRQRGAKIARIEVARKLAEAIWHMLQTGSMFAPARSPAAPLVA

SEQ ID NO: 465678 - protein, 345 aa, unidentified
MPVAEVDTFAGIDVSAHELSVALRRGQGHDKPAMAKFPNHPSGHKALVAYLLRGGGRVRVCLEASGNYSLDLALTLQAHRQVEISVINPRRARRFAESLGERSKTDPVDARVLCEYAARMPWVRWQPPSPVALHLRALTRAIADLGVIHTQQNNRAYAAAASQALPVLVVKEMQRHKKYLEQRMTRLRREAVRLIACDPELDRRFRLMLTTIGIAETSALQILGELAVLPDMLDARQWVAFSGLDPRLFKSGKSVEKRPRISRSGSRHLRRALYMPALVALRRDPYLRVFYQNLLARGKARLQAVVAVMRKLLHALFAMFRSNQPYDGSKLCAVDLAVHAIAACA

SEQ ID NO: 465679 - protein, 356 aa, unidentified
MSHDVKYIGMDVHKEAIVIAVLNGSGKLVMETIVETKASSILEFLHGLRGELHVTWEEGTWAAWLYDLLQPQVQEVVVCNPRRNALLKEGSKSDKVDARKLADLLRTGMLRPVYHGENGLRTLRELGRSYQTISKDLTRVMNRLKALYRGWGIACAGTQVYAPRYREEWLSKIVQAGVRRRAELLYQQLDGLQALRRNLRPEFLAESRKHKAAKLLRQIPCIGPIRAARLIALMQTPHRFRSKRQLWTYSGLGIETHDSAQFRFVRGQLQRSKKPQQLRGLNRNHNHEMKEIFKSTATRASCGRGPFHEFYAALLAKGMKPEMARLTLARKIAAITLTLWKKGARFDAEQLKTQAA

SEQ ID NO: 465680 - protein, 356 aa, unidentified
MTNQATQYLALDVHQATIVATLRSADGSIRMRATVPTEARAVVNLVRGAGPHVRVALEEGAQAQWLHDVIAPVADEVVVCNTRGRSEIENKNDRIDADRLSELLRIGAVKPIFHSALETLSLKELVRNYLTLVEDATKTKLRIKSMFRARGIRTPGRQVFIPEHRGEWLDQLPSPGARLHAEHLLTALDTLTALRRRAKAAMVVEAQKRTAWKVLRSIPVLGPVRISCLMAIVVTPHRFRTKRQLWPYCGLAVVTRSSGEREFADGALRRRRKHPPATRGLNRNYNRTMKSVFKGAAAAALIKAGPLKDFYEQCVERGIRPELAKLTLARKIAAVTLRLWKKGELWDPKKLTMQTT

SEQ ID NO: 465681 - protein, 374 aa, unidentified
MSYVTSIGLDVHARSITAVAFDPATGEVRSKRFGYAPAEVAAWTLAFDSPKAVYESGVTGFHLVRALRGLGVDCIVGAVSKMHKPAADKRKKNDRNDAEFLTRQLAARNIKEVWIPDEECEAARDLSRVLEDVREDLTRAKHRLTHLLIRHGYAFDEIGPDGKRKGKWTRAHWEWIRSIELSEAAARDALDFYVSEVRHIEAQKKAIEKEIADYARADRWRGRVEALRRLKGIETMTAFSLVAEAGVFSRFESARAFSSWLGLTPSEHSSGERVSRGGIIKAGNTHLRKQLVESSWHYTRATTKRKRDQRGEEVPLAIENHAARGREAPCREAGSLCKAQSSPGGGQRGHRKRALLLGMGCGLHVGRGSRIETR

SEQ ID NO: 465682 - protein, 343 aa, unidentified
MQTITTIGFDIAKSVFQVHGVDAGGQVVIRRQLKRRYVLAFFQKLSPCLVGIEACASAHHWSRELQALGHTVRLIPPAYVKPYVKRQKNDAADAEAICEAVTRANMRFVPTKTPEQQSGLVLHRARHLFIRQQTAVINAIRAHLAEFGIVAPVGRHGVEELLNVVADPNDKRVPEMARTCLLAFGAQLRGIKEQILEFDRLIRAWHRSNEMSMRLDEAPGVGPVLATALVAAVADPKSFRSGRNFSAWIGIVPKQHSSGGKNRLGNISKQGDRYLRGLFVAGALSVIRYAKIHGTNHRPWLTALLARRPTKVAAIALANKIARMVWAMMARGERYKEPVALAR

SEQ ID NO: 465683 - protein, 437 aa, unidentified
MSKRLQVGLDIHQKHNHVCLMTNDGQMVNPHQRFDNNWPGFQQLLEMLVNVLMEGQFEGVDIAGEATGLLWFHPFYHLAQADELAPFEPHLYLFNPRTIKHFKKVLAQRDKVDPKDAQAVVERLRFGGRLPHEVAFDDRYLPLQRLTRYRYHLARTLAREKVYARMVPIYLKVSDYTRKPKPFSNVFGATSRYILSEYATIDELATMPLDDLAEELDRIGRHHFEDAADNARRLQRAAAQSYPLAPCLVGPVNVILDSLLAHIRFLENELSKLDLVIEEALVDVPGAPWVRSIEGLGLVYTSGILAEVQDPHRFMQGLKRDKRGNLRPKTKHDGQASLARFVGLWWPRGDSGDFQAEDRRLPKTGNPYGRYYFVEGANSLRRHNAEFTAYYQRKYEESLKHKHWRATVLTARKLVRLVFALLHDEEMYQPPEVRYRS

SEQ ID NO: 465684 - protein, 343 aa, unidentified
MGEVSTIGLDIAKSVFQVHGVDGTGAMVMRKRVGRSKVLEFFAGLSPCLVGIEACPSAHYWSRELQALGHTVKLMPPSYVKAYLKRGKNDANDAAAICEAVTRPSMRFVPIKTQDQQTGLMLHRTRQLLVRQRTMLSNAIRGHMAELGIISAKGRNGTAELLQIIGDMADDRVPPVAGFCLDLLARQYLSLSAEVSSIDKRIHAWHRACEESRRLEEIPGIGPIVATALVAEIGDWGAFRSGRNLAAWIGLVAKQHSTGGKERLGSITKQGNRYLRWLLVTGAMAVIRYARAHGTKRPWLTRIMDRRPAKVAAVALANKIARMAWAIMVRAERYKEPKLLQAA

SEQ ID NO: 465685 - protein, 341 aa, unidentified
MRIVGGLDVHRRQITFDYLDERSGQSRRGRIAPADRLLLRRWLSTTVGESPAAFAVEACTGWRFVVEELQRAGIEAHLAEPADTAAARGPKRRAKTDRTDARHLRELLATGRLPESWIPPEQVLEMRARLQQFKDLREEHTAWMQRVHAILLHQGAPAIAGDLLGADNRRRLEAAEELSPAGRQAVATALRILDALDAELAPLRKQIAAFARRQPGCKALQAHYGVGEITAVALWAELGDTRRFSSSRKAVRHTGLDITVYSSDGKRPPGHLSRQGSPLLRWALFEAAKCAARPGAPDHAYYRQVADRLGGNRAALSVARKITRRAHHTLRALGEEALAPV

SEQ ID NO: 465686 - protein, 429 aa, unidentified
MQNESTPDARGPVFCGVDTHADSHWLCVLDWRGRRVLSRRFPADAAGYEALAGAIAAAGEPACVAMEGTSSYGAGLTRHLASLGMPVREALSPARTQRRRPGQGKCDESDAERAARAAMSGSKLGTPKSQDGWVDGVRCMLAARSGAVKARTSAINTARSLLTTAPEGLRSRFRGVAGPRLMEELPSVRAEGALGAALGALADLWAAARDAALDMELAIEASLEENCPALLAMYGCGPVSAAKLAVAAGDNPGRLRSEASFAAICGACPIPASSGKTVRHRLNRGGDRQANSALHEIARQRVMRDPETAEYAERARGRGKSDREVMRCLKRYVAREAYRALMHPHEIRRPEDASELVAARRAAKVSQVRAASILGTSEKYISMLERGQRELKPIRRAYEAWVEAGLPLDWDRQAFEAERKMDSKKHLAK

SEQ ID NO: 465687 - protein, 337 aa, unidentified
MEQYVGLDVSQETTSIAVRQDGRRVWRGKCPTDPKALSEVIRKHAPHAVRIVFETGPLATWLYHALQAENLPVVCIDARHAKAALDMAPNKTDANDADGLAQIAEIGFYREVRVKGYGPMLTRTLVGARSQLLRISVQLSNQIRGIMKTFGLIVPKGAGRIFERNARALLETNEAVARVVLPLLETWQVVRARAAELDRQLIAAARTGSSYRLLMTIPGVGAITAVSFVAAIGVPENFKRSRAVGAWLGLTTRRYQSGETDYDGHISRRGDRYLRALVYEAAVAVLTRTRTDCALRSWGLKLKAKVGFKRAAIAVARKLSVIMHTMLKTGAAFAAAA

SEQ ID NO: 465688 - protein, 475 aa, unidentified
MSTSKRPANTGGPGPTIAQSKRGSENQKKEAGHAVFQPNAAGIDIGAREIYIAVPADRNNDPVRKCGTFTSDLDQMAEWLVSCGITTVAMESTGVYWIPVYDAVERHGIEPCLVNPRNMKNVPGKRTDFHECQWIQHLHSLGLLHAAFRPESEVCAVRSLMRHRNDLVQMASQHVQHMQKALTQMNVQFQHVISDLTGLTGLAILDAILAGERDLAVLAKLRDPRIKADEETIRKSLEGNWRIEHLLVLKQRLSLYRSYRDQIHDCDQEIEKLVAAFAPQVDPAAKPLPEDRKKRQRQRKKKSGSPDFDMRTEAYKLFGVDLTQIPGLMTLVFVLFSEVGRDMSRWPTAAHFVSWLGLCPDNDISGGKVLWRGARRTKNRAGTLFRMAASSLYREQSPIGDYLRRMKAKLGPTAGTTATAHKIAVIFYTMVNNQMEYDASLWAKRDVMREKRLEARLHKQAAQRGYKLVPLEAAA

SEQ ID NO: 465689 - protein, 454 aa, unidentified
MKKQDSYDYYAGIDCAQNKHDFAMKNNQDKFLIKRGHFSNTLQGYEKFLNTVLSKCLNKDKILFGMEVTGIYGTNLYERLKSDGYHVVMISPDSVKNYRDYKRLNKTDKIDSGCIAELLLNGDAQIVHVAKNGYTDLKAYIRRRNALKVTCTQETNRFLAKVCLCFPDLLKVFPSGRATLKAIFSIYPTPYSIIEADFDELVSVLQKASKNKFGVDKANELIHAARNSIVVRKSISDGELYNIHSLIDSIDSLESEIRNLEKIIDSKAEEFPAYHVLLTLTGCGKITAATIVAEIGDISRFHKASQIVSLAGLYGDNSKSGSSVNKRGKISKKGSRYLRHAIYMVAEFARRNNPIFKAYFTRKKNGDRTKHTLAVNAVANKLCKVIYSLMKNQSTYIIQYRDLVKLSESTQNEFFQNAETDFSAKTRRKKYLYEDEYGELHEFVFKSIKTALIE

SEQ ID NO: 465690 - protein, 421 aa, unidentified
MKFKAQDKQNQLIENITVHHLVVGVDIAQDTHVARAVSFRGIALGTPLAFNSHLEGFEQFGRWIQDLFKTYTLNKVIVGMEPTGHYWLSLARWLASQGIEVVLVNPHLVKKNKENQDNTPSKSDRKDALVIADMVKNGYYSPVRFPSETFEGLRILMANRETVTKRLNSAVNQIHRWVDIVFPELRQVFKILTCTSSIATLRLFPLPKEISRLSTDQVLAGWKQFVKRHAGVKRAEQLIALAKCSVGTTQALHAYKLHLGQLLEEYDLALRQLAQIERELHLILECIPYAKKLLEIRGVNVTGLAGVLGEAGDLSGFAHGNALLRHAGLNLAEASSGKWQGKMVLSKRGRPRLRHFLYLMTMCMVMTNPEIRALHRYNVEEKKLKRMKSIMKLCGKVARMLIGLAKSSEAYNPTRVFPQAA

SEQ ID NO: 465691 - protein, 392 aa, unidentified
MKVTYQTCCGVDVHKSFLVATIVKTTGGIEPSYQKKRFSTFNNSILEFKQWLLDNDCHDVCMESTGKYWVPVFNLLEDEINVVIANPKWVKAVKGNKDDTKDSKWIGDLFRLGLVKGSYIPCKKIRILREYTRYRYKLVSCRSSEKNRYQNALTVCNVALDSVVSDIFGKSSTSIIDYLLKQSGTSVNHEEIASKLLRSLKSKEDAVIESIEGYQMTDAQKYRMRLVRAHMDYITAEINDVDKMIENMISSNPDFENAIQFLCTIPGVKRDSAITIISEIGTDMSQFSSSKRLCCWAGLTPGSNESAGKKKSVRITRAGVYLKPALVQCAHAAVKSDKSPYYKKKYESLVKRRGKKRAIIAIARMIFLLPSTRCCLLVSSGIRAIFTKSICL

SEQ ID NO: 465692 - protein, 379 aa, unidentified
MTCKECGQVVRLTRTMNKCRLNTELSSHEETRSQFNGCTGVIKLGIDVHQQFYVVVLQEGGSNPKPPQRFAKEAFLHWAAKLKSQGGEVHAVYEACGFGFGLQRKLSALGIQCYVVCPQKLDERNRRVKTDGLDAKALCLKLDRFVQGNGHALALVRVPSEREEQLRAIHRQREQLIKATKQLEAQGRSLMVNHGMEPVKRWWKPRTFAALQMPAWIKELLGNSQPILLALQQKVRALTLQLQSSAALNQPRGLGAMTSVIIDREIGDWKRFDNRRQVASYTGLCPGEYSSGNTRLQSCVTKHGNPRLRAALVELAWRLVRFQPNYRPILKWKEILHRGALATGAARKKAIVAVARQLAVDLWRIRTGQVSPETLGLIN

SEQ ID NO: 465693 - protein, 447 aa, unidentified
MINEHAAGIDISDKEHVVAVPENIGKERVRKFGTMTCDLQLIVLWLKECLIKTVALESTGVYWRPLFSVLVRAGFEVHLVNAKHVKNVTGRKTDEDDAMWIQKLHSCGLLKSSYLPDDQQDALRTLVRHRRTLVQDSTRFVTRMQKAMELMNIKFHTVINDIVGQTGKAVVEAIIGGERNAQNFLPLIGKGIKADHEIIRKSLEGNWRQEHLYTLKDSYEFYKIYVTRIEQLDKEIEKQLQEYEAKCNEGVLEIKKENTDKSDKTSSGKEKKKKKQKQKNHPPFDVRGFLERIHGVDVMAIYGLSETSGLEIPAETGTDLSRWETDAHFRSWLNLCPNNKISGGKIISSKVMRKKANAASEAFRHAANGVQRSDHWLGDYFRRMRAKGGKKYAVLATAGKLATIYYNMVRNKEEFKPMDLIKYQQKYKQAKISYLERTLKRLKQVAA

SEQ ID NO: 465694 - protein, 293 aa, unidentified
MQQTLIVGVDVSKMTLDIHIKPSGYWVKIPNQPKGFRLLLKELNREASAQSRVMVVMEHTGKYSWRLENFLRSRSIDYCKVPALEIKRSQGLVRGKNDKVDSERIAMYGWLRRDELKADQPIVEGVRELQDLLRLRSKLVRQRSGYMCRLKEMKVSGEETKGFAGNMQRKLINEFTEHICSLEKEIRAVIQANSAIQKTFNLLRSIKGVGLIVAASMISCTNNFSRFENARKFNCYAGLAPFDYLSGTSIRGKSRVSHLANKEVKAILTLAASTAIQHDPELKKYYKKRVAEG

SEQ ID NO: 465695 - protein, 348 aa, unidentified
MNTLHYIGFDVHKKTISFCVKTAAGEIVEEGSLPAQRAGLRQWASARSQPWQGAMEATLFSGWIYDTLKPYGEQLEMAHPAKMKAISAGKKKSDTIDARTIADLVRCNLLPACYVAPPRIRELRRLLRYRSLVVSEAVRMKNKMAGLLMESGALYVKEKLHRKKYFASLLEELEEVPLSVIDLLRLSRGALEMFESTQKRLVRELLADPELTQRVERLMTIPAVGEITALTWALEVGDPQRFHSNSDAMSYCGLTAALKSSAGKQQRGPISKQRNRWLQTTLIEAAKLAPRWNPQLAALHARELERGHRNRATLAVARKLVAYLLAVDKSGQPFQVRAAAEVPTQKVA

SEQ ID NO: 465696 - protein, 384 aa, unidentified
MDEHTLYVGLDTAKNHIDVAVAEPLPGGDVRYWGKVANEGAALERLMRRLQQNGRRLKVCYEAGPCGYGIYRRLNAKQSVSCEVVAPSLTPRRLGVRVKTNRRDCLTLVKLLRAEELTAAWVPDAAHEAMRDLIRIRSAAVEDLVRCRQRIGGFLLRQEIRYAGKPWSKRHRVWLGRLELAAPAHRLMFGELLEALDQAQARRDRLNDHIAELVPSWSLAWLVEALQALRGYRLINAASLVAEIGDPRRFASPRELMGYLGMVPSEHSTGDTVRRGGLTKTGNRRARKVLIEAAWTYARRAKAVSPRPGGQPSAVRAIAEKARHRLSGRYRRLTARGKLGVVAIAAVARESLGFIWAIAHAAGPANVIQRCRPASGTGRGSGSR

SEQ ID NO: 465697 - protein, 337 aa, unidentified
MELYAGIDLHSNNSVVVVLDASDRVVYQKRLPNRREAIIGALAACGPIVSVAVESTFNWYWLVDALEDAGYVVKLVNTAAVKQYDGLKHSGDFSDARHLAHLMRLGILPTGYIYPREGRAVRDLLRKRGQMVRGRTTQILSMQNLLARNLGTQTSGNELKRWQTIDIEELDLLPEQRLAIASNLAVMHCLDEQVKALEAAVLAQARLSPDFQGLLTVSGVGKVLGLTIALETGEINRFDSAGNYASYARVVDSRRESNGKKKGEGNAKCGNKHLAWAFVEAAHFAVRYDAQIKRWHQKKAAKSLQVVAIKAVAHKLARACYHILKTGEAFDVKRAFS

SEQ ID NO: 465698 - protein, 345 aa, unidentified
MPIVGGLDIHRKQITFDYLDTVTGEVRRGQIAPADREHLRAWLARFAGHGDVAFAVEGCTGWRYVTRELAAAGIAAHLGEPADTAALRGRKRHAKTDKTDSAHLRRLLAEGRLPECWIPPEHILEYRALLETYHDLRREHTAWVQRIHAVFFHQGAPPLGEGVLRTEAGLARLRAAAAAHLSAAGQQQVATALDMLAATEARMGPLRHQLRQAAAHLMGAKVLAERLYGVGPVTGLALTCWLAGAGRFSSSRKAVRFTGLDITVHSSDRKGPPGRLSRQGPPVLRWAVYEAGKTHARAAAPDHGYYAAVKDRSNGKRAALSEARKIVRQACHILTELGDDALTAA

SEQ ID NO: 465699 - protein, 314 aa, unidentified
MAMPASRPEIGIDAAKDNLVIHHQDLNQTLTIDNTPQAIRQWLATLPEGCDIAIEATSTYHMDLTERAHAKGHRVYVVDGYRLSHYRKGVGGRAKTDLADAQLLARHLHKEKDELRPWSPPPKAYRMLQSLLRRRAALVKARTALRQSLSGEPELKAPLRALIAEMDRIDSLIQKRLKSAVSAAGLQTQVQRCDAIDGVGEITATALVMAFLRGDFKNSDAFVAFLGLDVRVRDSGKLTGKRKLTKQGDTEVRRLLHCAAMSASRHPVWRAFYQRYRDRGLHTTQALVILARKIARTAFALMKQQQEYCPAKLF

SEQ ID NO: 465700 - protein, 410 aa, unidentified
MELLHRRCCGLDVHKETVVACLRLVSDGKVTTEVRTFQTTTAHLLRLSEWLAANECTHVAMEASGVYWKPVWHILDDGEFELVLANAAHVKNVPGRKTDVNDAMWLAELLAHGLIRASFVPDTQTQEMRNLLRTRKQLVREQSSHVQRVQKTLEDANIKLDSVLSDLMGKSGRAMIEAMIAGETNPAKLASLAHPRAKASHEEFREALRGRVTKHHRFLLRLHLNQIDALNAAMATLDTQVEANLGPFRTAVELIMSIPGIKNLGANVIASEIGIDMSRFPSDAHLISWAGICPRNDESAGKRRSNRLRKGAPWLKTTLVQCAWAAVKKKDSYLQAQFYRIKARRGPKKAIMAVAASILTAIYHMLKDGTMYKDLGCNHFDRRSTDQQKKRLVKRLADLGYAVEIKPLAA

SEQ ID NO: 465701 - protein, 402 aa, unidentified
MNCVGIDVSKGKSMIAVMRPFGEVVVSPFEVRHTANELSELAGLLKSLDGETRVVMESTGNYHAPVAWLLHDAGLYVSVVNAMLVHDYGNNSLRRAKTDKKDAVKLANYGLDHWLTLPRYVPEEDTRLMLKTCYRQYQQYSKVQTMLKNNLISLLDTTFPDANRLFTSPPRADGSEKWVDFVATFWHCECVCGRSEKAFTTQYQKWCRKHGYNFSEDKALDIYASACRHFGVIPKTDTAKLLVEQAISQLQTTSSALAALKQEMQSLAASLPEYPVVMGMFGVGPTLGPQLLAEIGDVRRFHSKKALVAFAGIDAPPYQSGQIDVRSRSISKRGSASLRRTLFLVMGVLLQCAPMDEPVYQFMDKKRSEGKPYRVYMMASANKFLRIYYASVKAYLDSLEHD

SEQ ID NO: 465702 - protein, 352 aa, unidentified
MKEYNMFLGMDIGDKFNTCCLLDSEGEIIRKFRVPCRTARLASLFDELTPCVIAIEACTHSPWISRLAEAAGHKVLVGNPRKLRAIYDTPYKDDGRDAELLARLARFEPRLLHPIHHRGEQAQADLMMLKARQVMVSNRTKLINSVRGLLKSFDVRVATCSAACFHKKARLVIPEILKEAIFPLLDAIEAHTTAVRDYDVRIAQISKERYDTETELLRSVSGVGPLTSLCFVLTLEEPNRIKHSRDVGAFLGLVPRRDQSGEIDKQLRITKAGNKYLRELLVSASHYILGPHGPDTALRRWGLKLTERGGKNAKKRAVVAVARKLAVLLHRLWVTGEVYVAFPQTDRFMEVA

SEQ ID NO: 465703 - protein, 324 aa, unidentified
MYAALDLHEKSIQCVLKDDAGKVMRESKVPKDEERILEFLDGTNAHVVMESGYNHQHIRDVLKEKGYDVKVAHPLMVKAIAYAKVKNDKVDARTLADLLRADMIPESYVPDEKTREVRDLVRRRHSLVETRTGFKSKVKAELAKRWVKHEGDVFTQEGRKFLRSLHIDAVDDYLDTIEFLDGKIGELDVKVKEIAQQDRYAKLLVTVPGISYYSGLLISSEIADISRFPDHEHLCSYAGLVPGMRQSAESSHTTQSKTRSALLNWIMIQCTRVHVRRCDSSITRFYAELAKRRGEKVAIVAAARKLMRAMYIMLKEEQAFRLDG

SEQ ID NO: 465704 - protein, 373 aa, unidentified
MKYSTVYVGMDVHKETFSLCCYTNEKEEAEYPQKVDGHYSKVINYIEAMRFHYGDDATFICGYEAGCLGFTLYHQLKDHNVKCIVMAPTTLLKPSGRKTIKTDKRDAALLARCLAHHDYASVHIPTDQDEQIKEYIRMRCDHKLALKKIKQQILAFCLRHGYRFTETNHHWTQAHLRWLRALKPDGLYQEILEEYLISFDHLTAKIERLDKRIEELASGEEHQEDVKKLTCFLGIQTQTALSVIVEVGDFKRFADAQHFASYLGLTPGEASSGPDQNRLAITKAGNRHLRMLLVEAAQCYGRGQIGYKSKALKKRQEGNSPAVIAYADKANERLRRRYYHLVLGKNKRSNVAKTAVARELACFIWGMMTENVA

SEQ ID NO: 465705 - protein, 345 aa, unidentified
MTGTSVHYVGFDIHKKTIAFCVKTAGGTIRDEGTIAATRDGLHQWAASRKRPWIGAMEATLFTGWIYDELLPLARALKVAHPAMLKAIGASKKKNDRADAAMIADLLRADLLPECHMASKQTRDLRRVLRYRHLIVREGTRMKNKMSGLLMEVGAQYSKEKLHGKGYFSSLLAEAIDIPDSVVDLLATSRGALEMFQSNEKRLIRTLKNDPALKERIELLLTIGGVGEITALCWALEIGDVSRFSSSSDAISYCGLCSAQVSSAGKDKRGPISKKRNKHLQRVLIETAKLAPQWNPALAAVHERELTRGNRNRATLAVARKLVRYLMAVDKSGKPYELRMPVSLC

SEQ ID NO: 465706 - protein, 413 aa, unidentified
MDVVHPRCVGIDCSKKDAKVCVRIQGQGRRRGSSTVTTWGATTSQILALREYLVAQKVTCVVIESTSDYWKPFYYLLDDELNVMLVNASRVRNVPGRKTDVSDAAWLADLGAHGLVSASFVPPPSIRALRDLTRTRTHITRERSREIQRLEKLLEDAGIKLSSVATDITGVSGRAMLEALISGQRDPAVIADLAQRRMRSKIPALTEALTGRFSEHHSFMARLFLDRIDSHSADIARLDQRIEEAIAPFVAARELLASIPGFSRIVAEVFIAETGADMAVFPTAGHLASWAGLSPGSNESAGRVKSTKTRPGNRYLKGALGTAALSAARSKNTYFSAKYRRIASRRGPMRATVAVEHAMVIAAWNMLTNGDFYRDPGADYYTAHHPARSKARALNQLEALGYRVTLQPLTQSA

SEQ ID NO: 465707 - protein, 339 aa, unidentified
MKLYTGLDLHSSNSFLGIIDETGKRVYKQKLPNDRERILAALNPYKNDISGIVVESTYNWYWLVDLLMGESYHVHLANPAAIKKYTGLKFADDQHDAFWLAEMLRLGILPEGYIYPKEDRPVRDLLRKRMHLVRLRTSLIVSLQNILSRNNGFKLKTSDVKALTEDRVTPYLAGSEDLALAGMVSKESIDFLTRQIKKIEAVIETKVELKPPYEKLQSVFGIGKILALTIMLETGPISRFAKVGNYVSYCRKVSSKWLSNDKVKGKGNKKSGNKYLAWAYSEAAEHARRSYTQARTYYNRKMQKTNFMAAHNALAHKLARAAYYVMRDEVLFMPEKIFV

SEQ ID NO: 465708 - protein, 343 aa, unidentified
MDIAVLGVDLGKNVCSVVGLDASGAVVMRRRVRRETLIGLAEKLPPCVVGMEACCGAHHLGRLFAARGHDVRLMSPEYVLPYVKAQKNDDRDAEGIAEATTRPTMRFVELKSQDQLDMQTLHRSRDRLVAERTALINQLRAILLERGLIAPQGKRKLEQFLSVLMDEPGGADLSPRMVQLVEDARAQWGELDRRIAAFDAELVCWAKENEDARRLTTIPGIGAIVASALVAAVGRAESFDHGGDLAAWLGLVPRQFTTGGKAKLLGISKRGNKYLRRQLIHGARAALPYVAERDTPLGRWAKGLISRAHRNVAVVAFANKLARIAWAVLRRGQRFAAGQPMTA

SEQ ID NO: 465709 - protein, 320 aa, unidentified
MQKIALGLDISKQTIDAYFNGQEDFMCVMNNKSGIEKLIERIKNYQQQSKEIHACCEYTGVYYLPLASALHESGIKISVINPLSIKLYGEYRLRRTKTDKQDAKLIADYCEKENPPLWKPLSEKRNTLKVLNRRIEQLNALLNIESNRKDVSDTVIKSGIERIINSIKEEIESCKTAIQNLIDSDEELRHNQKLLQTISGVGKSTAAWLLSVLVDIDKFENSKKLISYLGLSPVIKDSGTSVRQAKISKMGDKKVRKALYYPARVACLRSKLWRPWFDQKIKQGKHPKQIYILMMCKIVKYAYAVIKTGQPFDENRHKPA

SEQ ID NO: 465710 - protein, 357 aa, unidentified
MSQQSNNCAIAVIGIDIGKNSFHVVGHDRRGAIVLRQKWSRGQVEARLANLSPCLIGMEACVGAHHLSRKLQLLGHNARLMPAKYVRPYSKGQKNDFRDAEAIAEAVQRPTMKFVASKTADQLDLQALHRVRERPVSQRTGIINQIRAFLLERGVAVRQGLRFLRAELPSILAMQTDVLSPRMLRILEDLSADWRGLDARIEGLSDEIETLAHQDQHCERLMTVPGIGPIISSAMVAAIGSGEVFSKGRDFGAWLGLVPKQISTGDRTILGSISKRGNRYLRALFVQAAWVVLVKLGPKQWERYGLKSWIEAAKRRLHYNVLAIALANKLARIAWAVLNKGRAFTCVKTDAMASRPA

SEQ ID NO: 465711 - protein, 351 aa, unidentified
MKYYTTKTEYNCGIDLHTRQMYICVMDRAGNVLVHRNIRNNDFEFFLKLVEPYRHDLTVTCESCFVCFWLADACEDAGINFVLAHAYYVKSIAANKHKNDKEDARELAECLRTNRIPPAFVCPRDLRPARKLLRRRNKYVKNRAVLTGHSTCEVMAVGNQPLNISSNSKERWRDGIRDSFDDPLDAFTADAELFMIESYDRIIMQMEQRIEKHARDFKQQDYRLLRTVPGIGKILALTILYETINIKRFPTEKDFVSYCRLVAGTNESGGKDFGGKGRKMGNPHLKWAFMQAAILCKRADPKLNAYFEKLNRKKGKHVANAIVAAKIARAVYFMLDRKTGFSNEMLIRGKR

SEQ ID NO: 465712 - protein, 316 aa, unidentified
MTEEAVCIGVDVAKGTLDLAVSNSIETRQFENNHEGITSAATYIAGLKPTIIILEATGHFEMPLAAVLQTNHLPVVIVNPRQVRDFARATGVLAKTDKIDSRILALFGLQIKPQVRLLPEQKVRDMESLLSRRRQLIEMLTAEHNRVLQADGSIRKGIKIHIRWLEKAISAINDDLDSQIKNSPSWREKDDLLKSVPGVGKVVSTTLLIELPELGQLNRRKIAALVGVAPLNRDSGTMRGKRTVWGGRAKLRAVLYMAALVGVRHNPVITSFYERLLKVGKAKKVALVACMRKLLTILNAMIRSNTVWQEAAMETK

SEQ ID NO: 465713 - protein, 355 aa, unidentified
MNDEKYIGLDVHQATIVVAVMDSTGKLVMESILETEAATILQFFAGLRGTLSVTFEEGTWSVWLYDLLNPHVDKLVVCNPRKNALLKDGNKSDRIDARKLAELLRGNQLKPVYHGETGVRMLRELSRSYLTIVKDLSRVMNRLKAVYRSWAIPCAGRDVYYRRHRAQWLDKIREAGVRRRAERLYEQLDTLQHLRQQARRELLAESRKHAITAKLRQIPYLGPIRSALAVALMQTPHRFRSKRQLWAYSGLALETRISAEYRLVEGQVRRSKKLLSIRGLNKDHNHDLKGLFKAAATMASVRPGPFQDFYQAALAKGIKPTMARLTLARKIAAITLTLWKKGENFDAEKLKSQAA

SEQ ID NO: 465714 - protein, 410 aa, unidentified
MDVLYANCAGLDIHKDTVVACSRRMIDGKVMREVRTFKTTTGELLALSEWLASLGATHIVMEATGVYWKPVWNILSDGDFALILANAAHVKNVPGRKTDVNDATWLADLLAHGLIRASFVPDAQTQEQRGLLRTRKQLTRERTSHIQRLQKTLEEANIKLDSVISDVIGTSGRAMIEALIAGETGPMRLASLASSRIKASPAVLAEALRGRVTRHHRFLLRLHLQQIDALDRAIAEIDKEVEANLTPFRDLIPVLTSIPGIGDLAARILLAEIGTDMSRFPTAGHLISWAGLCPGNDESAGKRRSTRMRKGAPWLKTTLIQCAWAAARKKASYLAAQFHRLRARRGPKKAVGAVAASILTAAYHMIADGTLYQDLGADHFERRAKPNQIKRLVAKIQSLGYDVEIKPLAA

SEQ ID NO: 465715 - protein, 348 aa, unidentified
MTVYIGVDFHARQQTISYLTTEDGEIQQLVLAHEEPAKVRAFYEQFASQQVVVGFESSGYAAWFEELLEELGCEIWIGHAADIRRFARRRQKNDRRDAALILDLLVAGDFPRIHRYSAASREVLQQLRYRQKLVKMRTMVVNGLLFMASSRGVTLRSQLQSKRGQARMRQLALPAPLAQQRDELCQLLLELSGKITTVQAWLESRAEQDVRVQRLRTQHGIGPLTGLCLAATLECPERFANGRKVTAYAGLDPTEDSSAERRRMGAISKQGSRLLRFYLVEAGQVAMRKDADLARVYQRLLRRCGHAKAKVAIGRRLLVRAFIMLRDEIDYAEFQRRGVAARSSRGTA

SEQ ID NO: 465716 - protein, 466 aa, unidentified
MKPFYLGIDVSKGYADFMIVNAKKQPVIQGFQLDDIFDGHRCLYNLLSRFLADHLQSTLFAAMESTGGYENNWYNSLVQFQGSLDIQTARLNPLGVMHNSKADLKKNTTDKISAQNVAEYLVAHPEKVVYQKDDQQAGLRKQWGFIKMLTKQCTQFLNQLNTLVYTASPELLHYCQTGMPDWILKLLVKYPGAAKLRKAHFKTVAKIPYVTTKRAQQIIAEAKRSVASPTDPVTQQLIMATARQILHLKKTIADQTKQMIDQCRLPEVKLLKSFPGISDSSAIGLIIEIQTAERFANAKKLASFFGVHPVYKVSGDGVGGIKMSKQGRKEPRQILYMITLSAIQYNPLIKQIYEEHQKQGKHNMAIMGICMHKILRIVYGMLKHNMPFNPQIDIANRQRGAQTKNDKTVEATDRRFQDYAAKAPVSMCQRKKRLERDRSNSVADTKSGITVPVPLGNIITDILPQL

SEQ ID NO: 465717 - protein, 329 aa, unidentified
MVELGIDVSKAKLDCTLLLDVNTLRCRSKSLPNTLDGVKVLLQWVERHSGCAAEHVRAALEPTGVYHEAAALALHEAGVRVFVVNPAQLRDFAKGHAVRTKTDAKDSLVLALCVAQVKLILWQPAPLEIRELRALMSRLDAVEGELRAELNRQEKAQIAADPPLVQRSIAHAIAFWQAERERLQQAIDEHIDRHPGLKSEQERLLSIPAVGQKTANRMLCMLHGGQFRSASQLAAYLGLVPVEHQSGTSIRGRPRLSKAGNARVRAALYMAAVTAIRHNPDVRALYERLLSRGKAKMSALCAAMRKLVHICFGVFKNAQPYRPQIDQIA

SEQ ID NO: 465718 - protein, 461 aa, unidentified
MAKKAKKVKTAKGAELRIVNPDAAGIDIADGIMQVCVPADRSKDNNRAFGAYTSDLHAISAWLRECGIKTVAMESTGVYWIPLFCRLQEDGMDVVLTNARDVKNITERKTDESDAEWLMLLHQYGLLKASFQPHNDAKRMRTLTRHRDTLSREASSIVLRMQKAMQQMNIKLTLVLSDITGKSGIRIIEAILAGERDPKRLADLADIQCKTPKEEIAKALEGNWEEDLMFVLRQNYDTFKHYCTQLGECDAELEKLMENYRAEVAKVEDTSYSPAKKRRDYKKTRHTVGFDVERKAYEMWGVNVFEIPGISHLTALELMSELGHDFTRKFPSSKQFCCWCNISPNTKISGGKRISSHVPHRRNNVGLIFRSIASSLANAKNQLGNFYRRIRSRAGGKAAVIATAHKVAEIFFAMVANQTTYNPERVGIDEKVLLEKRITRYKRELERITGTHIEIGNACVP

SEQ ID NO: 465719 - protein, 319 aa, unidentified
MMNNKNDQDEINVGVDTGKYQLDIYVRPLDVFFSVSNDDKGIKEAVLKIKKHSPHRIIIEATGRLEHAFIVACVKANLPFVVANPLHVKRFAGAIGRIAKTDPLDAQLIAHYGEAIKPKLSQLKPENIRLMSDLLSRRRQLITMQTMEKNRLKIMPKVISGAIKPILTVIKNQIEKVDKKLLKLIEESPEYQLKNDILQSVPGIGNIVAFSLLSDMPELGTISNKQAAALIGVAPFNRESGSYKGQRRIRGGRYQVRTVMFMAMMSAIQCNPLFKAKYQQLVAQGKPKKLAIIACVRKMIVILNSMLRDGVKWELDYAK

SEQ ID NO: 465720 - protein, 325 aa, unidentified
MRQPQSQVKPHTQVGLDVSSQTLDAHIRVDGKAFSVPNTDAGFDQLCEMLSAYDVSMILMEATGGYEDSAACYLQLQGYDVVVINPRHARRFAQSMGRLAKTDRIDAAILAHMAFMIDSGPDRERYIKPVTDEQRKQLSRMSSRRRQVVDLITIEKQRLTHADDYARESINDIISLLNARLKRIESDILRYVKKNFSELASRLLSIPGVGSQSMTVLIADLAELGHVNRRRISALLGVAPFNHDSGKFKGQRRIRDGRSSVRNVLYMGVISATRFNPVIRAFYDSLLLRGKPRKVAIIACMHKLIRIINAMMRTGKPFDMLLHGV

SEQ ID NO: 465721 - protein, 457 aa, unidentified
MNRKGKRTPGIEEAHPFTGMSRVNENAAGVDIGAIEIVACVSGDENTQIVRAFGNYTVDLQALARWLKGYNVRTVAMESTGVYWIPLFEELERQSFECLLISSRSLRRVSGRKTDITDAQWIQTLHSYGLLESSFRPQGELVALRTLLRHRNQLVEHRSPHIQHMQKALLQMNIQLSQAVSDMTGITGQTIIRAILAGERDPQTLAAMREPGCKKSEEEIGRALTGTWREEHLFILKQSMELYDYYTQQILGCDEEIERMYGATRPDWDAGEVRPLSVRKRNSHSKNAPHNPEGIRKHLKRISGVDLSVVDGFGVSLAQTVIMEVGTDMGKFPDEKHFCSWLGLAPKHEVSGGKVLKNKTLKTKNRAGQAFRMAAQSVKQADCVFGVLYRRLRARLGPAQATVATAHAIARVVYRMLKYRVEYEPISLNEYQMRYEEQQIKYMKKKAAKFGLLLVPG

SEQ ID NO: 465722 - protein, 344 aa, unidentified
MKLTTVGIDLAKQVFQFHGIDEHGKVLVKKQLRRDQMATFFVNLPPCLVGMEACGSAHYWARKLQAMGHTVRLMAPQFVKPYVKTNKNDAADAEAICEAVGRPNMRFVPIKNIEQQAVLALHRVRQGFVKARTAQANQIRGLLGEFGLIVPQGIGYIATRVPELIEDAENELPGSFRLLVQRLLDHLKELGQQVEELEAQIQAWHRNSDLSTKLAQVPGIGPITASALVASIGDAKNFEGGRQLAAWLGLVPRQHSSGGKSNLLGMSKRGDSYLRTLLIHGARSVIYRAGQKADPCSWINAVVQRRNKNVAAVALANKNARIVWALLAHDRRYETGYRKAAEVA

SEQ ID NO: 465723 - protein, 392 aa, unidentified
MSEAYDGQQVVGMDLHRRRSVLVRMTADGRKLETTRITNSPAELRKVIARAGRRPRVALEATYGWYWAADTLAAAGARVHLAHPLGVRGFAYRRVKNDEKDAADLADLLRMGRLPEAWIAPGEIRELRELTRYRIKLVRLRTSCKDQVHAVLAKLGVPVTCSDIFGVWGNTWLDGLELPQPYAGKVASLRTLATELTAEITVLEAAIADLLAHHDGYHAIQALPGIGPVLAAVLVAEIGDITRFGHPGRLCSWAGLTPRHRESDVKVRRGHITKQGSPLVRWALMEAIQHVPAGHPLRARKDDILARRGAEAKNIAKVAAARQLLTWVFYAMRDGQVRALAAGSPKAASVFGIAQIAVNPPRAAAAALIDPAARTRTRPMPPRQPAAGTPKG

SEQ ID NO: 465724 - protein, 343 aa, unidentified
MLEVSIIGLDIAKNVFHAHGADASGRALFSRKIGRGKLLEFFAGHQRCTVALEACGGAHHWGRELTRLGYKVKLIPPAYVKPFVKRNKNDAADAEAICEAAQRPSMRFVAIKSEEQQASGLVFRTRDLLVRQRTQLINAIRGHLTEYGWVAPKGPSHVAMLGDLLEDEMASSLPEAARSMFRTMLDLLEELNEKIGDLDKEIARRAREDAVARRLMTIPGVGPITATALAALAPPAESFTKGRDFAAWLGLAPRQMSTGGKQKLGSISKMGERTLRRLLIIGCSAVVLQASKRGAPQGSWLEQMMARKPRMLVTVALANKTARIIWAVLVKGEDYRAPVAAAA

SEQ ID NO: 465725 - protein, 316 aa, unidentified
MKNYIGIDISKSSIDVYDGKKSYKFENNEKGFNKIISLSGNIKETIFIFEPTGIYSYALTSFCSKKKISIVMVGPKESRDFARSLKVRSKTDKIDARILYKYQLHVEPSMVKVPKINHHAIKIQEMLNVYEGIQASKQRFKNQLESTNKTHKDLVRTLNRIVSDLDMEATKLFNKIELLLLKDAETKERYDAISAIPSIGQKSALYLTAFFLKYPTANAKQMTALIGLDPVMKDSGLFRGKQRISKHGGQQLRNLLYLPTLCAIQHNSWIKAFYERLTAQAKTKKLAVIASMRKLILMAFSIFKSKDVYQPLKAII

SEQ ID NO: 465726 - protein, 408 aa, unidentified
MTVVGIDVSKSKSMVAAMKPGGKLVAAPYEVRHSDIELSHLALDVLCMEPDTRVVMEATGRYHEPVAAQLHSAGIFVSILNPLLIKQSGAGSLRKVKSDPKDALKIAKYGLDNWSTLREYTPMEAIRQQLKLCARQCDLYNKSIVMLTNNLISLSDKTFPGVNELFSSPEKADGHLKWVDFYRTFWHCDCINRMSPDTFGERYQKWCKRKGYHFSADAADALYAASCGLYTTLPRDNNARLLVTVAADQLIALRENQSKLEAEMLNSCKQLPEYETVMAMYGVGKSTGPHLMAELGDVRRFLHRSSIVAFAGVDPGVVGSGKMQLSSVATSKRGSPQLRKALFQVVSTYVKCKPENEAVYQFYTKKRDEGKPFFVCTTAAANKFLRIYYARVKECLNAAESATQVEEG

SEQ ID NO: 465727 - protein, 409 aa, unidentified
MDVVITRCAGLDVHQATVVATVRVPDDQGGRRVVTDTFGTMTADLLALRDWLHAYGVTHVALESTGVYWKPVYYMLEDAFTLLLINMQELKRVPGRKTDVKDSEWLAQLLECGLLRPSFVPPPPIRELRDLTRYRVQQVRDRSQEVNRLCKVLEDAGLKLTTVITDVMGKSGRAMLQALVDGTTDPAVLAELARGKLRKKLPELRRALQGRFRPHHAFLIEQIFAKIDFLDEALERLTTEIDQRLVPFEPMLTALDTIPGVDRIGAISIVAETGGDMTRFLTAGHLCSWGAMCPGQNESAGKRRSGKTRKGNRYLRGTLIQAGLGAMRKNGSALQARYRRVARHRGHKKAVVAVGHQILEIAFYIMRDGVTYEELGADYFNRRHAEKAVRRHVKQLEALGFHVTIEKAA

SEQ ID NO: 465728 - protein, 328 aa, unidentified
MERETQSTLGIDISKATLDVVLLRPDQGAQAASYDNNPAGFKKLAKWLRKRRAGQVHACLEATGLYGDDVALFLHEEGHIVSVVNPARIKGYAASQLQRNKTDRLDAALIADFCRTQQPPAWTPPDPTWRELRVLARHLLDLKDMRQQERNRLQAGVPSVTVRQTLEAHIAFIQRQIDELEQHIRDHIDHHPDLKRQRELLDSIPGIGPLTASLLIAEIGDLQRFDHAGQVAAFAGLNPRQRRSGSSVRGQTPLSKTGSATLRRILYFPAISARHHNPVIAPWCDQLAARGKPKMQVIGAAMRKLLVLAYGVLKSGQPFDPNFHLVTP

SEQ ID NO: 465729 - protein, 313 aa, unidentified
MPVSLSKPIVGVDVAKNELVIYQYDGDSLQEIPNTKTSIKQWLKALSGTVAIAIEATNIYHLDFADLAYEAGCTIYMVGGYELKHYREGVKIRAKTDALDAKLLARYLKNEAEELRHWTPPSPLYRQLLSLFRRRAALVQARVGLVQSWSNEPLLKAAFAEQVKSMQQLETLIEKTINDQLKEAGLLGQLKRCLKVEGIGFLTGARLITAFQRGDFRNADAFIAFLGMDLRVAKSGQKDARRSLSKRGDPEARRLLHNAAMSASRTKAWKGYYEEQRTRGFSTTQALVMLARKLARVVFALLKGQSEYQPKAS

SEQ ID NO: 465730 - protein, 314 aa, unidentified
MDETKHFVGIDVSKAALDVHVLPVGKSQRFPNDGDGHAALAGWLSSHPVERVVLEATGGYERKAVQALQQQGYHVCVVNPARPRDFAKAGSRLAKTDRLDAAVLAHYAQVFDPPSAPRPGDVEAKLARYASARDSFVAEKTRLRNQLGLNDDADLERMHRDILETIEAKLAELDRMIQSCIREKAEVSQRYDQLRAVPGIGPVAAVSLLAFLPELGQVSRRAIAALVGVAPFARDSGMMRGQRRIAGGRAKVRRMLFMASLSAARHNPIIKTFYERLIKGGTGKKQAIIACSRKLLTILNAMVRDNREWQPMTT

SEQ ID NO: 465731 - protein, 338 aa, unidentified
MDVKVIGVDIAKRYFQLHGVSASGMATIRRKISRDGFLKLLADLPPCLIGLEAGSGAHHWAREIARLGHEVRLMPPQFVRPYVKTNKNDAADAEACCEAVQRPGMRFVPVKSLKQQAAMALHRVRDHLVRQRTGTINALRGHLAEYGIVARALRGGLNQLFSIVEAEDDDEYLPSSVKQLLRTLVAEIRAADAHIAELDRKLKDDARVDEDCRRLIEVPGIGPVIATVVVATVPDEQRFSSGRHFAAWLGLTPKQHSSGGKERLLGISKRGDAYIRRQFINGARSLVRIASGRTGGYWDWINALLTRRAFNVVTVALANKLARVAWALQAYGGRWKAP

SEQ ID NO: 465732 - protein, 386 aa, unidentified
MSTIIGIDVSQKSSSFCILSDGETQVIHGSFSMDRNGFDSLLKTTSHFESPRFFMESTGRYHIPLAHHLLQNGHTTTIVNPVLVKQFSNANTLRKTKTDKIDAQLVARYGQQVPKERKVNQRAMDDQRLSIARRREQVAEDVAKVKTQLKADLTVAWPELLAYNVFTQTMLRLLTQFPCAQDAQEATDERLALALKSPKGRGRTIGLSVEKLRQLANESIGIASYGPLVANSAHNLLFLEQSLSQLTETLVALVRETQDEEMEIITSIPGIGEITAAHFLAEIGSIDRFERYQNLIAFCGTDPSIYESGNILKRGRITKRGNTSLRKYLYLMATGVIRCNAHLKAYYDKKREEGFPHRKAMVALMNKIIKTLFAMLKKKEMYIVPS

SEQ ID NO: 465733 - protein, 522 aa, unidentified
MTGFPMVPACPYRSLVPRLSADPLVKFRGLTRARGTILFKRLQFFMPLLGRNHNHTNMKSKTLKSKKEKKKISVDQGWEAINPQAAGIDIGAKEHFACVPAKATPQNVRSFGTCTADLNALADWFKECGITSVAMEATGVYWIPVFQILEARGLAVILVNARQTKNVAGRKSDVQDCQWIQRLHTYGLLQGSFRPEDAYCVLRTYLRYRDELVSARSTQCQHMQKALQQMNVQLVQVLSDVMGVSGMAIIQAILEGERDPVKLANMVHRRVRATAIQIQKALEGDYREEHLFVLRQAFSLYGTYEEKINACDEQIVRETATLSDKVDPQHKPLPPRKEGRPASKDKMQGQDMREVLYRKFGADLTAIEGVGVTTALVVLTEVGPDVSGFKTEKHFCSWLGLCPDNRISGGKVLSSHTRRVINRASDALRMAAVTLERSQSALGGFYRRMKGRLGAAEAITATAHKLARIIYRLIKFGEAYVRQGMEDYERKFRERKLHALKKTAMSMGFNLIAKQQLTSPVS

SEQ ID NO: 465734 - protein, 412 aa, unidentified
MKDLLEISCGLDVHKEKIVACILTGPLGKPTRSEIREFTTLIPDMIALRDWIVSQNCHHVAMESTGIYWMPIYEILEDAFSGDITLLVVNARHMKNVPGKKTDMRDSEWISTLLRAGLLNGSFIPEKRIREFRDLNRYRKSVIRDITSQKNRIEKFLQSSGFRLSSFISDIFGASGRNIILHLIEHGQIDKTALDSCLKTKTRNRIDEILMSVNGTLSEHQKTFLKILMTHYDSLKKHLAEIETSLEEDMAPFALQVEQLNSIYGISTTASCAIIAEIGIDMKPFKTAEHICSWAGLCPGNNESAGKRKSASVTKGNPYIKSMLCEIAWVIAGKRNTYLSAWYWRIKQKKGAKKAIVALARKLLVIIYTMLKQGTLFDESCFETRRKNCEQKQLSRYIRELEKHGYHVEAQS

SEQ ID NO: 465735 - protein, 381 aa, unidentified
MTTAATYHEPGNTPAGTLFVAFELSEKTWKLGFTTGHGQKPRERTVTARQQERVLDEIAQAKRRLRLPDTAPVVSCYEAGREGFWLHRFLQGHGITNHVVDSSAIEVNRRRRRAKSDGLDVRKLLSMLMRYAQGERQGWQVVKVPSVEAADHRHLHRDLETLKQERASTTTRILGLLSSQGLRVTSLTKLPEQLEALRLWDGSPVPPGLRRRVLRVYAHHTFLSEQIAAVEAERRAQLQVSTDARIDKVRQLMLLKGIGINGAWLLVMEFFGWRAFKNRREVGGLAGFTPTPYQSGESAREQGITKSGNRHVRWMTTELAWSWLRFQPDSTLSVWFRERFGGGGKRLRRIGIVAVARKLLIALWRFLETGVVPEGAILKAA

SEQ ID NO: 465736 - protein, 350 aa, unidentified
MLIIGCDYHPGFQQIAYVDSETGEFQERRLKHPEEAEKFYRTLWEQGVKVRVGMEASGHARWFERLLEELSFELWTGDAAKIRAKRVRKKKTDREDARHILELLLENRFPKIWVATWQNRDLRQLLWHRHRMVQTRTRIMNQLQAVAINEEVRYKKRLWREAGRKQLESLPLAPWASRRRKDLLEVLDRINPTIAELTRSIEEEAEKCPPARRLMTHPGVGALTAVAFVLIIGEAHRFDCGKQIAAYLGLVPEEDSSGERRRLGHISKQGNSLLRFLLVEAAQATARCDQRWRNQFFHLAQRRGRKIAKVAMARRLAVRLYWMWRREWNYEQLQSFGSHVGQPGHPHGVQ

SEQ ID NO: 465737 - protein, 355 aa, unidentified
MRVHRNCCGLDVHKKIIAACVIKEDADGNSLYEKRLFGSMTRDLHELAQWLCTAQVTAVAMEATGVYWMPVWNVLEPYGLQLLLINPEHYKAVRGKKTDLKDGTRIAELLQDGRLEGSYVPAVAIRVLRDLTRYRTKLVQYQSSLANRIQRLLEQCNIKLASVASDVLGVSAMAMLRALAEGETDAVRMAEMAKKQLRKKIPQLQLALEGCVLPHHRWLLREMIEDLDHVGTKISHIEETIEQQMRPFQSAVDRWISVPGVKHRLAWTLVAEVGPTVEAFPTAADIVSWAGVCPGNHQTGGKRKSGTTRAANPWLRRALCEAAWAASKTKATYLQAQFRRLAALRGPKARPDCRS

SEQ ID NO: 465738 - protein, 343 aa, unidentified
MDHFAGLDVSVKETSVCIVDDTGRIVKEVKAASEHEALLQVLGNPAYRLKRIGLEAGPLSQWLFSGLAEAGLPVVCVETRHMQAVLKAQINKTDRNDARGIAQMMRAGLYRPVHVKTLRSQKLRMLLTHRKLLQSKAIAIENDLRGTLRNFGLKVGMVGKMRFEARIKELVESLPDLAELVEPLLIVRRALREQIVVLHRRLLAIVRDDEVCQRLMTTPGVGPVVALTYRATVDVPARFRKSKAVGAVFGLTCARYQSGEIDWSGRISRCGDEMMRVMLYEAAQSMMRSKKWSWLKAWAMQIARRRGMKKAIVALARRLAVIMHRIWVDGTEFRWTREQATAA

SEQ ID NO: 465739 - protein, 344 aa, unidentified
MNAIKVIGIDLAKNVFQVCVWMADGSVASNRKISRQKLLDTVRTFSPGTLIAMEACATSHYWGRTLQAMGFIIRLVPTQHVNAFSHHQKNDANDALAICETACRPGLHFVPVKTVEQQDIKALRSARQLMVEQRTALANQIRAFLAEEGVIVPAGLQKLQQYLPEILEEESHELSSVRRRLLHTLGEDLRDLNIRIHEMDNEIAALSRQQSGYHHLLTIPGVGPLIAAAFVSEVSAPQFANGRQLSAWCGLVPRQHSSGGKNRLSSLSKNGNRHLRTLIIHGARAVMRCVQNRDDCLGEWLRKLIARCGFMKATIALANKLTRIIWRVLRDEVDFNMQKAFTIN

SEQ ID NO: 465740 - protein, 369 aa, unidentified
MSNATTSWVAMDTDAANIQVAIFRGEGKDPDEEFQVGSDSRGIGRLKKKLEKEPGPVKCVYEAGPCGYGLYRQLREAGYECEVIAPSLTPRKPGQQVKTNRLDARRLAVYYRGGQLTPVRIPDEKQETLRDMLRARDDVRRDVMQRRQRLNGFLLRHGHHFQDGKNRWTQKHWAWIRSQSLEGKLDVVLNEYITAVEQSQEQLKRFDQQIEEAAQKPEYARKVARYSVLRGVRTLSAMTIIAEGGDLRQYAGAAAFMGSTGMVPRESSTGDHQRRGSITKAGNGYLRRILIEAAWAYQKRAHGGATIQKRRQDQPEWLIAIARKADQRLHQKFAKLQYRYNKKTVVAAVAVARELAGFIWAIGQQIEQD

SEQ ID NO: 465741 - protein, 356 aa, unidentified
MQLQDALRKPKIFIGLDIHKKSWTVSIQMDLFFHKTYSMPSVAEDLFQYVEQTFPNHQVDLVYEAGCCGFCAARYFLNLGWNVLVVNPSDVKTGDKQRYQKTDALDSRNLSNQLNAGVLRGVYIPTEEHEQFTTLARHRTQVTKKLRQTKLHIKSMLLFHGIKVPDEFDTPNWSQDFIVWLEKIKFSTTCGELALQGKIRMYRFIKSEYLEIANQMRAHCRNTHKKDYDLLRSIPGIGSYLASVILAECGDLRRFNNEGQFSSFIGLVPGIYNSGGSEKCLGITPRSRSQLRSYLVEAAWIAIRKDVEMQNYYRKHQGRNVKSVIIKIAHKMARRILSVIKTETPYQINRNLVLEK

SEQ ID NO: 465742 - protein, 449 aa, unidentified
MSRAQVIDDQDHERVHDRVAAVDVAKDTGMVCIRTPHPSRPGARRATVWTVKARTGAVRALGRQLKAEAIQIVTLESTSDYWRIWFFVLEACGLVVQLVSPAQARQLSGRPKTDKLDAQWLARLTEWGMLRPSFVPPRAIRDLRDYTRARALLVRERTRCWQRLEKLLEGALIKVSSVASKLTTLSAQDMINAMIAGQRDPQALAGLARARMKAKHDDLVAALDGTFDEHHGELARLLLDHIAFLDERVAQLGARAAQLTAALPAAWGIDADGTTGPAAGTAPGAPVLPAVARLAEIPGISEDLARTIIAEIGLDMTRFPTAARLVSWAGLCPSARQSGPRTRAGKKGQGDTWLRSALGQAVPGAARTPTFLGERYARIARRRGKAKAQVAVARSILIIIWHLLADPAARFTDLGPGYYQTRTDTDRKIRNHIRQINALGYDVTLTKTT

SEQ ID NO: 465743 - protein, 340 aa, unidentified
MTIIIGIDPHKATHTAVAIGSDESELATVTIRATRQQTDKLLSWAEPFEERTWAIESAGGLGYLLAQQLVGAGEQVLDVPATLASRVRVLGSGRSNKNDPNDARSVAIAALRSPGLRAVSIADHAEVLRLLAKRNGDIGDHRTQVVCRLHALIAALEAGGIAKELNASDANGLLGSFEPSSPAERTRHQLALELLADVRHLDGQLAESKQRIKVAVSASGTSLTEVFGIGPVIACSLLGYTGDVSRFASRDQFAAYNGTAPIEVSSGGRVAHRLSRRGNRNLNHAIHMAAICQIRHTHSEGRAYFDRKVAEGKTKREAIRSLKRQISNTVYRHLVLDAAK

SEQ ID NO: 465744 - protein, 430 aa, unidentified
MRLTARSGRERISVVETFEWFLGIDWASEVHALCLTDARGRVRGTRSVAHTAVAVDEAVRWLGEQTGTGPEAIAVAIETPRGVLVDTLIERGFPVFAVNPKQLDRFRDRFSPAGAKDDAEDAHVLADALRTDRRAFRQVRPDHPLIIQLRDVTRLREDLLEEESRLTNRLRDQLYRVDAAWLTLSPAADEPWLWTMLAQAADPAAWAHLARRRIAAVLRAHRIRRLSADDVLHALRQPRLTVAPGVTDAVATRITTVVQQLQLVHDQRNTAEHHLDRLLARLASMERPEGEASEHRDVEILQSLPGVGRIVAATMLTDATGPLADRDYATLRAHAGAAPVTKRSGKRAVVHMRYACKGALRQALYHWARTSIQLDAAARAYYKALRARGHRHGRALRSVGDRWLRILIAMLKTRTLYDATRFAQAEALPA

SEQ ID NO: 465745 - protein, 309 aa, unidentified
MSEFIGIDVSKATLDVAVHASEARLQAENSEQGLKRLSEQLLELAPELVVMEASGGYERLCAATLAQAGLPVAVVNARQVRAFAVATGVLAKTDAVDARVLAHFAAAVRPAVRPLPDEQRAALDEIMGRRRQLVGMLVMEKNRLAQARNPGVRRDIKSLIAVLEKRIGGCDGELQRQIQASPVWRAQEDLLRSFNGIGPVNARVLLIELPELGTLDRKKIAALVGLAPIARDSGRHRGRRSIAGGRGQVRASLYMATVAAIRANAVIRAFYQRLREAGKPAKVAIVACMRKILTILNAMVRNQTRWQNA

SEQ ID NO: 465746 - protein, 379 aa, unidentified
MGWLPPSPDGIVMCQKVVLKEPRNGEDGEMKDTMIGVDLAKAVFQLHGASMTGQLKYRKKLTRVQFQKFMAGQSPAVVVMEACGSAHHWARELTALGHDVKLIAPQYVRPFVKRQKNDAADAEAIVIAAQRPEMRFVEAKSKEQQARAVLFRARERLVHQRTELVNALRAVLYEFGHAVPKGIGNIKRIDAILEEPNCDLPTLVRDECRDLVKQIAEQTIRIDAKTKTAKEMAATADTARRLQTMPGVGPLTALAVEAFAPAMQSFKRGRDFAAWLGLVPRQHSSGGKERLGRVSKAGQTDIRRLLIIGAMSRLNWMGRKTITEGSWLARMLARKPRMLVAVALANKMARGIWAMLTKNEDYRDPAQAVAAQSTCAAAT

SEQ ID NO: 465747 - protein, 373 aa, unidentified
MNYNTVYVGMDVHKESFTLRYYTFDMDEPSTAVKTQADYKQVLKYLDSVRRILGEECRFLCGYEAGCLGYTLYHQLQSHDIECVILAPTTIPETRGKKKVKNDKRDAGNIATCLANRSYRPVHIPSEQDEEIKEYIRMRSDHKTALKKVKQQILSFCLRHGYRYTDTKKTWTQAHIKWLKNLPAEGVYKEVMEEYMGTFTYLTDKIERLDRQIEEYAQKEEYQEPVKKLCCFMGIKTMTALTTLVEVGDFKRFPSPANFASYLGLMPGEDSSGPSEKRLGITKAGNAHVRRLLVEAAQSYGRGTAGYKSQALKKRQQGNPPAVIAYADRANERMRRKYYHMVLGNGKKPNVAKTAIARELSCFIWGMMTEHTD

SEQ ID NO: 465748 - protein, 480 aa, unidentified
MHDRRLVGIDLGIISAHTVRVLGGDGSLVCRRTAVPTQDSLLEVERAALAGTPAGTRLEIVLEPTGPSWLPIAVFFTRRGHTVYRVSSAKAHDLRRVLSRHAKSNGIDADTLARLPLVDPAGLHPLQLPAAERAALDRRVRACDRLTQQGACHKRRIKDLVRQLLPTSPLVGELGVADLAVLERTGADPHALLAAGPARLTRLITKASAGHQDAQRAAQWLQAARAAVDLYADHPAVAFTDLAAEVQTEVRLLRATQAELARHATQREYCYRWVDPLGLARSLPGLAQVGGPALAATMGPAHRFATAGKFRAFTGLAPRASETGNTDRKPQPISKAGNRLLRTTLVRAADNARHQDPQLARIYHVQMVQRGKDHLGAVCVVAAHLAERAWTVLDRGMPYVICDTDNTPVTPEQAKQIIAERYTVPEEVRRRRRSSKKAGKAPHQVLAGHVSGAQGATRRPSPPASLGPQDSNVKPVQQPA

SEQ ID NO: 465749 - protein, 477 aa, unidentified
MSRDFEEFGVIEDALLMSLTGSSPNDIKEDAVSKGNRLSRGDKRRNAKLAELRRLVPFDHAILTLDLADKKQAVVVCDHDSRVLARTTVKARAWELDPVLEWGQRIADKHGFAGVTVGCEPTGHRWMVLNQLAAQRDIIMVCVNPMLVGRAREEEDYTRDKSDDKDAVLIARLVAKLHCYAPERAEEIWARLRQLGARRERLITESTACIQQLRDLLECAWPGVLEAAADPFGSTNWCAALAVVLDRCDGHPDRLARGGLARFEAAVVRELARWGGSRRRRSIIAAVFTALVDPRGVMTQRPGALERAGWVLADWRATKTRLAEVESRMVAVLDELELTEYVTSIPGVSAVGAAAILAETGDPTRFDSPRTLVKHAGLAPRDNNSGTFKGRSKISRRGRPRLRLAAWRATWGALHHNPVMAARYRYLTTRPRNKLTDGQARAAIAAALLRWIHVVVTQRVRWEAAIAGASSEMPAAA

SEQ ID NO: 465750 - protein, 392 aa, unidentified
MIYVGIDVAKDKHDCFAMNSDGEILIENLTVANNLDGFETLYNSLMNLSDSLDNIKVGLEATGHYSNNILNFLTEKGFNIYLINPLQTNLYVKGQSLRKTKTDKLDAHVIATMLISDNLKPYIPVSYHISELKSLTRHRFRLVKENSKFKTSLVRLVDIVFPELPKIVSSVAQKSCLALLCELPNAKKIAECNLTHLTHLLSDNSNKKFDRDKAIQIRELARKSIGLNSDSVSFELKQTISIIQFIQEQLDDVEKRIKEILKEIKSPILSIPGISFKTAGSILAEIGDISRFDSPAKLLAFAGLDPSMYQSGKFFSTHSVMVKRGSKYLRFALMTAARMVCMNDATFNEFKNRKIAEGKHYMVAMGHVAKKLVRVIYYLLKTNNVYQADKVA

SEQ ID NO: 465751 - protein, 339 aa, unidentified
MEHFVGVDLHKRVSQLAALREPKPALQVRFLNDAVTVERVLKKLPQGSKIALEATGSWWWFVELTQRTGHEVVMSHPKQTKAIASARLKSDKVDALMLAKLLKSDLLPTVWIPPAKQRHIRELLTHRARLVRQRTSVINELHALYAKRNIDPGMTFHRIRPPAFRSEDLSGYGPRIVEEDVDLLAFFNRQLRGLDTELKKIAEEDVESKRLMTIPGVGPLSAVAVNCWVGTIERFSKAKKLSSYFGLAPRVRQSGDRERHGHITKEGNRMVRSLLIQAALWHIRIGKGDARKHYLGVLKRRGKQIARVAAANKLLGTMFHMMKDRIDYQEFLRRGGSAQ

SEQ ID NO: 465752 - protein, 316 aa, unidentified
MPETFIGIDVARDSLEIAVRPTGAHWSASNEPTALGELVARLLELDPQLIVLEATGGLELALLAALGSAGLPVVAVNPRQVRDFAKARGTLAKTDRLDAQVLAHFAAAMRPSVRPLPEAATQALAALVTRRRQLLEMLVAEQNRTAMAPPAIRSQIEEHIAWLRQRLTGVDRELATTVRASPLWRAQEDLLRSVPGIGPVASVTLLAELPELGTLNRKQIAALVGVAPLNRDSGAWRGKRTVWGGRATVRSALYMAALVGARHNPVLRALYTRLVAAGKPKKVALTACMRKLLIICNAMLKHGARWAPPDPMAPNP

SEQ ID NO: 465753 - protein, 411 aa, unidentified
MVEVVYERCSGLDLHKQTVVACLIVPGPDTALRKEIRTFGTMTDDLLQLADWLTAAGCTHVAMESTGVYWKPIYNLLEGSFELLLVNARHIKQVPGRKTDVRDCEWIADLLRHGLLRASFVPDRPQRELRELTRYRTALIRERAAEVNRLQKTLEGANVKLSSVATDVLGVSGRQMLAALVAGTADPASLAELATGKLRTKLPQLERALTGRVGAHQRFLLAQQLAHVDALDELIERLSAEVQERLRPFVATVARLDAIPGVGLRTAETLVAEIGTDLGRFPTSGHLASWAGMCPGNDESAGKRRTGTTRKGDQWLRSALIEAAQAAGRSRGTYLAAQYHRLAARRGKKKALVAVGHTILVIAYHLLTEQTEYRDLGPLHFDQRDQPHVARRLVNRLQALGYTVTLARPAA

SEQ ID NO: 465754 - protein, 429 aa, unidentified
MQNESTPDARGPVFCGVDTHADSHWLYVLDWRGRKVLSRRFPADAAGYEALAGAIAAAGEPACIAMEGTSSYGAGLTRHLASLGMPVREALSPAGTQRRRPGQGKCDESDAERAVRAAMSGSKLGTPKSQDGWVDGVRCMLAARSGAVKARTSAINTARSLLTTAPEGLRSRFRGMGGPRLMEELPSVRAEGALGAALGALADLWAAARDAALDMERAIEASLEENCPALLAMYGCGPVSAAKLAVAAGDNPGRLRSEASFAAICGACPIPASSGKTVRHRLNRGGDRQANSALHEIARQRVMRDPETAEYAERARARGKSDREVMRCLKRYVAREAYRALMRPHEIRRPEDASELVAARRAARVSQVRAASILGTSEKYISMLERGQRDLKPIRRAYEAWVEAGLPLDWDRQAFEAERKMDSKKHLAK

SEQ ID NO: 465755 - protein, 436 aa, unidentified
MRGCRCSMIMGFTKPIEHFNLQRKKVITMNTLYVGIDVSSKSNVIYLMLPNGDKHSNFSVANSHEGSTQLVKRILSALTSHSLDTVLIGLEATSVYGDNLVYFLREDATLAPFNRKIHVLNPKQVKKFHDAYNDLPKNDYVDSFVIADCLRFGRINKEVYMGDYRYKALQNLTRARFFAVQNLVKEKQRFMNVLFKKYSTMTQEKVFSDTFSTTALAVYDEFESAEALANMDLHELTDFIIEKGKNRFPDPDAVAKAIQKAARSSYRLPKTVNDSVNQVLSISITSMKALESQIKEFDKAIKAQMELLPNVLISIPGIGPVYSAGIMAEIGDINRFNSQAALAKYAGLAWKQHQSGGFESEVTRLIPSGNRFLKYYLCEAAFSLVRCDKEYSDFYYLKYKEVNRCQHKRALALTARKFVRLVFRLLKDNRLYCPAK

SEQ ID NO: 465756 - protein, 466 aa, unidentified
MTFVNGELQARFMSRVRGLDPQRCLAVPVDVGKAVAMALVADHYGEILVAPFEFALTEAGFGVLSAAITSARHERDALVVRVGVEAAGHYHRTLVARLQAAGLEVVELNPRAVKDARGQQLLRTLKSDTRDCGAMAELLIRGSGRPPQCRDEALAEQAAWVAHRRRKVAAQVVLANQIHGQLDLIFPGLTGCFAHGLDAATLRVLIRDLPDPDRVRRLGVEGILRFVRRRGVHMSRPKAEQVVRAAHVALRLPGTERHAPLVVLAADWALFEALDQQIHDATTRLPALLPKTPAGVLLGIPGVGVVTASSYGAAIGDPMRYHDAGSAYRASGLVPIRYESAGRARSRTGISREGSVELRRAIIDLGRGVGLHHPDFITYRRQMLARGKPPLVALIAVSHRAHRLAFAMLRSQRPFDADRWARAVAGRRHRTDEQARHGDTATFGGPPARRDLPAQHTFTHAEAASN

SEQ ID NO: 465757 - protein, 356 aa, unidentified
MNYVGIDYHKRYSVVTAIDEKGQVIRTQRLDNQPDPFQAFFSSLDGPSEAVLEATRTWGVLYDLLEEIDGVESVTLAHSLKVRAIAEAKIKTDKIDSHTLAQLLRVDLIPAAYIPGKETRSFKDMIRQRVFLVRMRTRLKNRIHVLLDRRHIPPPPVTDIFGKGGTAYLKKLALPGIDGEILRENLELLEVFDTLIKDAEREIQRLIGDDPRVKLLRTIPGLGSILAAVVALEIDDVARFGAAPKLAAYAGLVPSTYASGGKIFHGHLIHMSNKWLRWALVEAAWVAMRNSPYCRAYFESRKRHKGPHVAIIALARRLSEIVWHVLNEKRAYEERPSRVYKRTPSKETSPAALTIT

SEQ ID NO: 465758 - protein, 330 aa, unidentified
MGNWNVILGVDVSKLTLDISCAERRPHIKIDNQSKGFAMFKKWCKTNSIELKEVLVVMEFTGGYEYRFIQFLESQSIAYTRLSGLQIKNSMGMVRGKNDKDDSFRIGQYGEDKIKRLEASRPLNNNILILRQLLSFRKRLVREKAGLESTLKERIYMFSTGKDDKISRIIRSKIKADQKHQSEIEAEISSIIKQDREMLKNYRIISSIKGIGKVNAWMTIAYTENFASFPDARKYAVYVGVIPFGNTSGTTIKGKPKVSYLAQKELKQELNQAAKSAMQHDPEISAYAERKQKTKGYNLVLNNVKFKLILRMFSLVKRGEMYVENYRRAS

SEQ ID NO: 465759 - protein, 386 aa, unidentified
MQTAADRPEAPTAIRTDLGAIFVSLELSRSTWLITSLSPGGGEKMSKHVVRGGDVAALLERFAQLRKKTRARTGKVFPFVVIQEAGLEGFWIDRVLRNEGIESHVVDPASIATSRRRRRAKTDRIDGEALVRALLAYKRGEPRVCAMVKAPTPEEEDRRRLCRERKVLIAERVRHVNRVKGLLFSQGISGYEPQRRDRRERLDMLQTGDGHLLPDHLKAQVCRELDRLELLLEQIKAVEAERDVLLAAQQVTAPATMLLDIKGIGPEFAAILWSEGLFRHFDNRRQVASYAGLAPTPWQSGSVDREQGVSKAGNPRLRTTLIQLAWLRLRHQPQSALALWFEERVRRNGGRHKKTTIVALARKLLVALWKYVTAGVVIEGAVMKAA

SEQ ID NO: 465760 - protein, 409 aa, unidentified
MDQLIERCCGLDVHRDTVVACVRGPGPNGRRQHEVRTFGTTAVELLALRDWLEAHAVTDVAMESTGVYWKPVFYVLEEAFTCLLVNAAHIKQVPGRKTDVKDCMWIAQCLEHGLLRGSFVPPAPIRELRDLTRHRKVLIQERTRAANRLHKLLEDAGIKLASVATNILGVSGRAMLAALVHGTTDPAVLADLARGKLRKKLPALRQALAGRFRPHHAFLVSQLLAHVDYLDEAITTMSEEVEERLAPFAAQLTQLDTIPGINTRTAEVIIAELGVDMSCFPSDRHLASWAGICPGNNESAGKHQSGKTRKGNRWLRMTLIEAAGAAIRTKDSALGARYRRVMRHRGHKKAVVAVAHAMLRAVYHLLAEGTTYREPGADYYDRHHTHRVTRRAIQLLERQGYRVVLEPAA

SEQ ID NO: 465761 - protein, 319 aa, unidentified
MTPVIFGVDIAKQKFDAARLCENKYRHKTFANNAEGFVAFLVWLASFGDTAPWIAMEATGAYSIPLAEFLVAHGYRVSVVNPAKIHAFAKSALSRAKTDQADAKLIARYCLAMLPDRWTPPPPAIRTLQALLRRVEQLLELQQMERNRLDTADPSHSDSLQAVLATLDQELNATRARIKQHIDTHPDLQHRRDLLESIPGVGPAVSAYLLTLLSEHYGFANAKQVVAFAGLAPKIQESGKWVGKTRIAKTGDPALRKVLYMPALTAWQHNPVIRAFCERLKANGKNGKAIVCAAMRKLIHLAYAILKSGQPFDAKHGLA

SEQ ID NO: 465762 - protein, 431 aa, unidentified
MVSMNTYEERKRVSVFKLKQTVFHQKKKGVNDVKSPCVAVDVSKGKSYFQGFIEIDKPANKATPIQHDLEGFKSLYELGQTLKEAYSDVVYVFESTGIYHKVLETFLMNYEEKCIILNPLEASKIRKTDLRSTKTDVRDCKSIAKAYFLKDFTLHNQKDELYEKLQSMNGHYNFLVQQLREMKVHFRNALDIVYPRFDEVYPDPYLDIPMSILKRYPHPDELKSKRVETIVKCIMKDTKYREPKAMDEAKKLRGYIDNVSSGCRMSSYEVTILKTMVHRISEQEVEIELCLDEMRDLVTEIPLYHQLMSIPGIGDNLAIRLIGELGDLDRFERSQQLVAYAGIDPRVYQSGQMTGDHLHITKKGNKHLRTLLFLGISSNVRVGKTNPILDFFNKKRQQAYPLAYKAALIACANKLLRIIFGMYKSGMNFHR

SEQ ID NO: 465763 - protein, 346 aa, unidentified
MAISIVGVDLSKSVFQLSLADAKHHVVDRKRLSRAQFHRFLAQTEPVHLVMEACGTSNYWGRTAQSLGHEVKLLHAKYVKAYVRRTKTDAADADALVLADNDKSLHPIPVKPEELQALQGLHKIREQWKQARIARICEARALLAEFGISTPAGVRDIGRKLTLATEQAPMLIQPILLDLIQEIGELEQRLKRVDQALAAYAKSNPDVQALLDIQGIGVTIATAFVARVSNIHMFKRGRSFSSWLGLTCREYSSGQNRRLGSITKQGDCYLRTMLIHGARAALMAARRKQAIGKELTRLETWAVNTQARVGHNKATVALANKMARIMWAVWTRQDTFNGNDALRFAA

SEQ ID NO: 465764 - protein, 349 aa, unidentified
MLADEVDYVVGVDTHRDQHVLAVVVAGTGVVVARRSVRASARGYAEALRFAQVDADGARVWAVEGAGHYGAGLARHLSSRGETVLEAGRGPRDERRLQGKDDSLDAIRAARTALASETLALPRSGQRREALRLFLLARRSAVDVRRLALVQLRSVIVTCPDQLREELRALPAGRLVERCSRLRRSPSRTPDELAATLVLRSLARRIQAATVEAAELEREILAHVRALAPQLLDEPGVGPIVAAQLIVSWSHHGRVRSEAAFARLAGVAPVPASSGQTVRQRLSRGGDRQLNRALHTVILHRRLHDPATKDYIARRIAEGKTRRDATRLLKRYLARHLYRVINNQTPLTT

SEQ ID NO: 465765 - protein, 484 aa, unidentified
MEAADQSDAGSRLPEGPFIVASSTRVSFFRTPPAPRAAPVLQASKSGKGTRVEEVSDEPLYRDRVCGIDIGKAELYATIRVPSDNDPARRAAETRGFATTKRGVLALADWLRCWQVPAVVMEATGDYWKGPFYRLEAEGFECVLADARQVKNLPGRPKRDPSDSAWLAACFERGAVTSCFVAAPEFRLIRLHTRYRRDLTDERTREKNRAEKLLESAAIKLSSVLTDLHGVTGRDIMDHLIAGERSPKALAQLARARARRKITELEAALEGAEFFTGEHAALLKAMLDRIDRVNAEIAELSQVIERLLAPFEEQLAQAESMPGWGRRSAEDAVAETGADMSRFPTGAHLASWAGRTPLDHQSGKRKGRSRSKKGNRYLAAVTGETAVAAGKTQTREGARYRRLARRRGKAKAQVALGNTQLKVYHALLSRPGTRYQDLGPDYYDRQASTRRQIAHHVGKLGALGFEVTLCRLPDPGETSPTRAA

SEQ ID NO: 465766 - protein, 482 aa, unidentified
MPKRTTGDRPELKTVSVGAAAIDIGSKMHMAAVNPACTDVPVRSFGTFTQHLHDLADWFKACGVTSVAMESTGIYWIPVYEILEQRGFDVILVNARYAKNVPGRKTDVSDAAWLRQLHSYGLLRGSFRPDAEIATLRAYLRQRERLVEYAAAHIQHMQKALMEMNLQLHHVVSDITGATGMRIIRAVVAGERNPDVLATYRDVRCHSSPETIRAALVGNDRDEHIFALTQSLELYAIYQAKMLDCDRKLEVLIAALSNKGEKPVGKPSKPRIKTKQVNTPTFDVRTALYGVLGVDLTEIHGLGPSLALKLVGECGTDLRAWPSAKHFTSWLCLAPGNKISGGKVLSSRTRRSSSRAAALLRLAATTVGRSDTALGAFYRRLSSRAGKSKAVTATARKIAVLFYNTLRHGMSYRDAGADHYEQQYRSRVLANLQRRAKSLGGPDLGIPNRINLTPFRSRPRLPRLIAVDANSKARTKSGLPTR

SEQ ID NO: 465767 - protein, 351 aa, unidentified
MPRASTVHAVIAIGIDMGKNTLHMVGLDSCGAIVLREKVSRGRIASRLVNLPPCLIGIEAGMATHYVARELAALGHDVKQVPATYAKPFRQGHKNDFRDAHAVAEAVQRPTTRFVPAKTDEQLDLQALHRVRSRLVSERTAVINQIRGFLLERGIIVRQGLRFLRQLLPDILAKRADVLSPRIVRSVWELAGDWRRLDERIETVTGEIEALAKSDDSCRRVMTVPGIGPIISSAMVAAIGNGVAFARGRDFSAWLGLVPKQMSTGDRTILGRISKRGNGYLRMLFMQAARVILLRPANWPKHGFGAWLARAAQRLHPNVLAAALANKLARIAWTVLAQERSYETRVTKAAA

SEQ ID NO: 465768 - protein, 340 aa, unidentified
MGDITTIGLDLAKNVFQVHAVDVAGSVVLRKRLRRGQVLAFFAELPPCLIGLEACATAHHWARELIALGHETRLMPPSYVKAYVKRNKHDVADAEAICEAVRRPSMRFVPLKTAEQQSALMMHRARDLLIRQRTMLVNALRGHLAEFGLVEAQGLHKVARLIAIVMDEMDARVPDIARQVLKVIVSQIEDIQTRIAGLETQVLAWHKSNPVSQRLATIPGIGPIIATAIAATVADPSTFRSGREFAAWLGLVPRQNSTGGKARLGGISKRGDSYLRRLLVNSAHTVLLCSKVAKTDPWLTSLLSRKPRLVVAVALANKTARMAWAIMSRPDLYRHAAVTA

SEQ ID NO: 465769 - protein, 448 aa, unidentified
MEITYTHVAGLDVHKKTVVACVFSPGPKGKPVKETRTFGTMTQDLLALADWLTLKGITHVAMESTGEVWKPVYNLLEASFTVLVVNAHHIKTVPGRKTDVKDAEWIADLLRHGLLKGSFIPPLPQRDLRDLTRQRTNLVQDRARVVNQLHKVLEWANLKLSSVVSDVMGVSARAMLAAIVGGEADQGVLAELAKGRLRTKQAELERALEGHVRAHHRFMLAQHLIHIDFLEGQLAEFDRQIVEYMAAHGPPSVLPPAPDPEGRLGTAQPATDEPATAVPWAEAVELLDSAPGIGRTLAEQIIAEVGTDMSRFPSEGHLASWAKVCPGNHESAGKRKSGKTGKGSRWLRTALIQAAWGAVKVKESHLAAVYRRLAVRRGKQKAIMAVAHRLLVAIYHMLKERVPYREHGAAPLSDQVKQKLAERMQHKIEQLGFTVHMTPATFPAPQSV

SEQ ID NO: 465770 - protein, 365 aa, unidentified
MKEQKTQTTRYVGIDLGKRTYEMAIVGKQGKVTFTNGKTTIEGRQMLYKKLCSKDKVALEAGNLAFIMAKEIEAIVGCQVYVLNPYQLVIIYKSMKKTDKEDSLKLAHILEDTREERLPTVAVPSDEEMRRRKLLASYRREQQSRTRALNRLHSLFLAQGITTIRKKNLDTVASRKKAIIILTGLELEEAEHLLLSLELYEQRIEVLDQRMTEATKGDEQIERLQTVPGVGPKVSFAFVSHVAAERFENAAQVSNYLGMVPRVYISGDTKRYGKITKRGNSYIRALLVQAAWSLTRTKAGGKLKERYIYMTKEKGISKKKAIVAIARRIGELMYAMMRDGTKYEPRPFIRDKEYGCNLARLALSA

SEQ ID NO: 465771 - protein, 276 aa, unidentified
MSEMTFEKFVGIDVSKGTLDLCTEPAGETLHVDYDDKGISHIVKHLVALAPTLIVMEATGGLEMRLAGELAAKSLQVAIINPRQARDFAKATGQLAKTDLVDAAILAAFARAIRPVVRPLKNADTRDLDDLVTRRRQLVDMRVQEMLRMGTASKVQKKSLTSHITWLDKRIADLDDDLTKRLRASDVWRIKDDLLRGIPGVGAVTSLTMLAKCPEIGQLNRREIAALTGVAPLAKDSGKHRGKRFVWGGRADVRAALYMATVSAIRFNSQIKIFAE

SEQ ID NO: 465772 - protein, 364 aa, unidentified
MHYVNNTELSSHEETRSQFNGGRGAIKLGIDVHQDFYVVVEQVGGSNPKPPQRFQKEAFLHWAGRLKRKSGAEVHAVYEACGFGFSLQRKLSALSIQCHVICPQRLDEHNRRVKTDGLDAKALCLRLDRFVQGNRAALAIVRVPTEEEEQLRAIHRQREQLVKARKQLEAQGRSLLVNHGLEPVQNWWKPRTFAALPAPQWMKELLANSQPILVALQQKIAALSVQLQSAASPEQPRGLGKMTSVIIDREIGDWKRFNNRRQIASYTGLCPGEYSSGNTRLQSCVTKHGNPRLRAALVELAWRLVRFQPNYKPIRKWNATLRKGALATGAARKKAIVAVARQLAVDLWRIKTGRLSAEELGLIN

SEQ ID NO: 465773 - protein, 344 aa, unidentified
MNNTIVGVDLAKEVIQVCIYTNQRVRSNKEMTTSEFLTFLANLKSAIVVFEACSTSNYWKQKASCLGHDARLISPKLVNSVRQNQKTDKNDALAIVQAALLPDVNFISGKNIEQQQLQSIMRFRELAIRQKTALSNQLKGLLLELNIRVSSRRGGLKGVIQSTLEDGENDLSFEFRSALKMAWTQYSTLLKSIAHYEETLAKISTKHSECKRLLKLEGVSTINAVNLYIVLGCQPEMFNKGKDASACIGLTPIQYSSGGKAKLGSIGKYVKNSMLRSNLVVGAMAAINRIITREAKTKKEAWIQALVARRGKRCAAVALANKTVRTAFAMLTQGTEYKAELISA

SEQ ID NO: 465774 - protein, 441 aa, unidentified
MQYAPAETLLSIDFSVDYLDVTLLGPAGAVLIPHHRYANNWLGFDALRGDLVRQLHAFDDVSLTAVGESTGNYWWHAFYHLSTHPDLQAFDPRLILLNPAHVKAFRKALPEADKTDDYDPSLIGAYYRTHGADHEYLFDERYLPLRFLTRAYHRVAHTLAAEKAFCLSVVFLTASDYQRRITLQDSFGATSLYILTEYPDLMAIADLPVADLAAELNVPAHGQLQDPVALVRALQHIARSSYPVPDTLRPTLHQVLRMTLDHIRFLEGQKATYYHLIEAALAELPEAGTLWVLALDYKGLGPILVAGCLSEIGDTRRFVTGDKYDRKSKAWRPRTYRDGQAGVAKMAGLWWPRSSSGHFESQNRHLAIERDPHLRYWFVQAAYALKGHQPEYGAYYRQKFRETSKHSHKRALVLTARKAVRLIFALLHKGQMARLEEGAAT

SEQ ID NO: 465775 - protein, 374 aa, unidentified
MMKSTRYVGLDVHAETIAAAVGEGQGKTRSLGQFPNRPESVRKFVEQLGGPQGLKICYEAGPTGYALYWQLTKMGVDCEVVAPSLIPRKPGEKIKTDRRDAEKLAQCFQSGTLTPVWVPDAAHEALRDLVRARAATKSDESRAKHRLVKYLLRNGLRHPDECRSWTHPWWRWVQGIKFDHETQQVTLADLVAEVLHQRERLARLDLAIDRAIECAPPEKKGVIDALQALRGVAKLTAVTIVTEVGTFQRFRKPTELMGYTGLVPSEYSSGGREAKGRITRTGNAHLRHVLGEAAWHARHRPWLNVRLRKTLPTLPAGVSEIAWKAQERLHRKFTKLTFHRKPPAKVATAVAREFVGFIWAIGRLAERSTASASA

SEQ ID NO: 465776 - protein, 372 aa, unidentified
MNIIGIDLGKTVFHLVTMDQDGKIVGRKKLSRPQLLKHMATTPVSIVGMEASCGAHYLGRSFRDQGHEVRLIPAQFVRPFVKSQKNDYVDAEAIAEAVQRPTMRFVPIKTEDQLDLQAIHRVRDRLVLRRTSLINQLRAFFLERGIALRTGRSRLRRMMPALLADAEQHLSPRIYRLLCLVAQEWRSVEEEVDQLDQEIETIASQDAACQRLITVPGIGVLIATAIVAAIGNGAAFSRGREFAAWLGLIPKQCSTGGKPKLLGISKTGNEYLRRLLIHGGRSIQHRVARDRHAFGPWLTELEARANTNVVAVAMANKLARIAWVVLNRQQDYRHGKLAVESAGFGLSVSDTPVSAAGQGSSMNSLRSALTGV

SEQ ID NO: 465777 - protein, 390 aa, unidentified
MIYVGIDVAKTTHYAAAADSDGVVLVEPFAFDNDAPGFAKFISKITSFPKEQLVIGLESTGIYSENLICFLFDSGYKLAVINPIQTATLRKTNIRKTKTDKVDTLLIIKSLMVNSYRLYTEQDTQSLKLKSLCRFRQSLKKSKARLKIQLSGYVNLLFPELLSFFKSGIHISTCYTLLKRCSSPAEIAALRLDSLSKLLSNASRGRFSRSTAEALKSLAKSSVGVKNPYISIQIAQTIQQIELLEQQIDEIENVIKDTICELDSVIMSIPGIGAIDGAMILGEIGNIDRFASPAKLLAYAGLDPTVCQSGKFKARSTKMSKRGSKILRFALINSAWQLTLKNDTFFNYYQLKLSQGLSHYGVLGHVAHKLVRVIFTLLKHNVLFDPTRLV

SEQ ID NO: 465778 - protein, 339 aa, unidentified
MNATPVGIDIAKNVFQVHYVDAQTGEIVNRSIKRAQFLEHFANRAPCLIGMEACGSAHHWARQLTKMGHEVRLMPAQFVKAFNIRNKSDAADAKAIWLAVQQPCKAVAVKTEMQQAVLMMHRQREQLVKFRTMQINGLRGMLAEFGEAMGKGRSALSKAIPDALTRVEQSLPKVLIDTLREQWTRIEKMDEEIATIERRLREWKKEDKAVKAIIEIPGVGLLTATAGVAMIGDPKAFRSGREFAAWVGIVPRQTGSGGKVNLHGISKRGDTYLPTLLIHGARAVLTRAKEPGPWVEQMKKRRPPNVVATALANKMARTIWAVLAHDRSYEKGYVSMKPV

SEQ ID NO: 465779 - protein, 352 aa, unidentified
MTVTNLARSITGGVDTHLDVHVAAALDDRGAVLGVESFATTTDGYKKLLGWLSDFGPVELVGVEGTGSYGAGLTRHLQAERVCVVEVDRPNRQRRRRKGKSDPEDAITAARAALSGDAAGEAKTRDGNVESMRVLRVARASARKGRTQALNQMRGLISTAPEPIRAELRGLNVFRLLERASTYRPGAKRDIVSLTKFSLRMLARRALTLEEEISEIDAILEPLVNETAPRLVGALGIGPDTASTLLVTAGDNPDRLRSEAAFAHLCGASPIEASSGKQQRHRLNRSGDRQANSALWHIVITRMVYDPRTTEYIDRRIAEGLTKKEAVRCLKRYVAREVFSLLPHEKLGLDSP

SEQ ID NO: 465780 - protein, 314 aa, unidentified
MSQPVFVGIDVAKDTVEVACSDASSQSFTNNEAGHAKVLRWLARKRVALLVLEATGGYEQACAVTLAAAGLPVSVLNPRQARDFARAMGRLAKTDRIDASVLAEFAAVLHARGHQPRALASVEQRELAALVARRRQLVVMLVSERQRLGVAHARAKPSIEAVIELLLSQLADIDGDLKRTLKDRHADLSALLQSVKGVGPTTTSTLIAELPELGLLTRKQITSLVGLAPLNRDSGTFRGQRHIFGGRASVRRVLYVAALVATRFNPAIKTCYQRLLGAGKPKKVALAACMRKLLITLNAIARTKSPWRSDFGSL

SEQ ID NO: 465781 - protein, 398 aa, unidentified
MTRKNTLKSLPTDTEFRVVGLDLAKSDVSVAAIPVDDNTPSLVDRMTYADLLDWAGKISPTLFAMEPCNGYSLLCLQLENLGHEIKVISGSTVSMWINTHLSGQKTDLNDAIALARLAVSDAELTPIRHKSITEIRIQTVQAVRQQLMSQRSKSIVSFKALAQQWGIPCAAGHRNLKKLRESIEAKVDLITRPVANAMLFLLDAVKSLDRQIGQLNQTLQELVMSDERGRLLQSVLGVGTQISARVITVVGNIERFNSPRSLVAYVGVAPRNFITGHKNLTKKKHGNCPDLSHKGQSKISRRGDKLLRSLFIQGAACLYMQFCKDQLPECQLKRWILKQLASQKPYGKLIVSLAAKLIRIVWAVLTYGEKFNIQKAGMTRSMWSEMALETPLNKEVPA

SEQ ID NO: 465782 - protein, 304 aa, unidentified
MKSTLNIGIDASKETLEVAVDGRGGSIKVGNELKQIKVWLSSLAEPCRIGIESTGHYHQLLVRCAMAMGHTLYVLNPKDLSHYVRSLGRRAKTDRLDAQAIARYVAREYEQLHAYQLPTALQFELDELTQRRRVVVQMQVSLRQSFTEVSRKPRAVARSQRALQALIDEIDGRMASLIAKDPQLTEHAKRLRSVIGFGPLLSTVMTHALTRRSFKNGDAFVAYIGLDPKARDSGQMRGRRFLSKRGPAELRRLLYVAAMSASKTSTWRAIYQRYRGSWTVQYGHLGDHRAQTGACRLLHRQAPH

SEQ ID NO: 465783 - protein, 345 aa, unidentified
MKKVTLLGIDIAKEIFQLHGVDESGKAVLKKKLKRTELLKFIAQMEPCMIAMEACGGSHYWAREFKKLGHRTELISPQYVKPFVRGNKNDRNDAEAIVEAVSRPRARFVPINDEAEQDVRSVHRIRSRLVSERTALVNEIRGLLYEYGIFHAKGITKIENFLAKVAGDHENKIQLTAMMRELCIEIYEELTEINKRIEKHNRRLEAIANTNEICQNLMTIPGVGILSATILFTVLNDPTIFENGRHFAAYLGLVPRQHSSGGKEKLLGISKRGDSYIRSLLVHGGRSVVKNAAKKDDSRSKWVCKLRERAAYNCTAVAVANKNARVAWALAKNLIEYKADYKKAA

SEQ ID NO: 465784 - protein, 375 aa, unidentified
MKEKVRFLGLDVHAETIAVAVAEQDGEVRSLGTIANREESIRKLVKKLGPVEQLRACYEAGPTGYVLYWQLTQLGVECAVVAPTLVPVKAGDRVKTDRRDAEKLARNHRSDDLTAVWVPDEGSEALRDLVRAREAAKQDQLRARHRLSKFLLRTGRRPAMGLKAWTERYLAWVQQIHFSQPAQEFTLLDYLHEVQHMDERVKRLEQAIAEAVKLASPQVQEVIRGLQALRGVAHLSAVTIAAELGNISRFESARKLMGYSGAVPSEDSSGKRQRRGNITKTGNAHLRRIAVESAWSYRFRPAIGPRLRQRQEGVPEEIKEIAWKAQIRLHKRYLKLMAAGKDKQKIITAVGRELLGFVWAIGIKAETAGKLQMAA

SEQ ID NO: 465785 - protein, 344 aa, unidentified
MDYFVGLDVSLRSVAVCVIDTDGRSVLERAVACEIEDISRCLAGFRCSELKIGFEAGAMSQHLFFGLREAGFSVVCMEARQVNAALSAMRNKTDKTDARGIANVLRSGWFNPVHMKSREAHAVRALLSSRKAVQRKCIDLANEIRGLFRIFGLRLPSRIDQASFDEKVRPIIEADPDLSHALLPLLDARSVLFATYRELDRRVKRLASHDETCLRFMAIPGVGPIAALTFKAAVDDPNRFTSSRTVAAHFGLTPRRYQSGEMDNPGRISKAGDADVRSALYAAANAMMMRSVASSEIKSWGLRLMRRKGRRRAVVAVARKLAVVMHRMWADNTEFRHRPLEAAA

SEQ ID NO: 465786 - protein, 430 aa, unidentified
MRLRLRRSEEGPGPDGTRSKEAGMVYVGIDVAKRSHVLSAVGADGETVVESFKFANTEAGFKKLADRLAKAGIEPGSSLFCMEATGHYWVALFDFLSSRGFDAAVVNPIQTDAFRDVWSIRKVKTDALDAAMIADLARYKRYEPSALGDEAADELRALARYRMSLVERSTMLKNRATAVLDRVFPELDGLFSGSFSPTQRALLRHAATPRQVLSTDVRTLARILSEASNGRLGRAKAEQLKAAARSSVGVGFGSGTLAFELRMLMEELDFVRGQIDEVEAELARLLDATAGRWLLTVPGIGPALAATIAGEIGDANRFAGPGRLMAYAGMDPTRSESGETVASDGSMSKRGSAALRWALMQAAESTRRFDPYFGECYAKKRAEGKHHYVALSCVARKLMGVCLALMKEGRPYEPAPPAHHRPGHLQEADS

SEQ ID NO: 465787 - protein, 406 aa, unidentified
MSPPDASPKRFIGLDIHKFYLIATGVDQDLNLIYGPRRIELTALERWMASDLTPQDEVVIEMTTNTWQIYDDLLPHVLSITVVHPPQISLITRAQVMNDKIAALTLARLLAKGLLVGIWVPPKEVRDVRALIAQRSKLTRLATQAKNRLHAILHRHHLLPPPGDPFLPAQRSWWAGLPLSPAERATLLCDWDTLAFAQAQVAQLEASLADLAALDERIPLLIQLPGVSLITALTLLAAIGPIQRFPSAKHLAGYAGFGVRLHDSGLTTRSGRITKAGRKDIRSVMVEAAQTAANTHPHWKAVLAHLEPRLGSNKAIVAIARKLLVAVWHVLSHQAADRNADPVRVARKLFQHAYRLGKHNRSSDLSTAAYVRTQLDRLGLGADLQSIPWGQKKKPIPLPPSTLVAS

SEQ ID NO: 465788 - protein, 423 aa, unidentified
MKEWKEITHYAGFDWARDHHAVVIVDAGGQIVADFEFDHSQEGWKKFLEKTVPYPNLAVAVETSQGAAVDQLLQHEFTIYPVNPVASESYRKRKAPSGVKTDHHDGWGLADALRVDGQGWKVLQPRDPLTEKLRLLCKDEIVLIQQRTLLVNQLQQALVEYYPAALEAFDDWTADFTWDFIVEFPTPQSLVKAGQRRWEKFLHAHKLWRPETTQKRLEIFARADQFKGSAPVTEAKSQLALSLCKILRAVDQQLEQYSKQIQALFKEHPDHDLFGSLPGAKKVLGPRLLGAIGTDPDRYGSHNVLQCFAGTAPIRYQSGQINRVKIRWACDPFLRHTMHLWANSFRKASAWGQTYYEKKREQKKSHACALRCLGQRLLKILFRMITNKKPYDAEFHGRNQKKHGSWVLDLINQTTDVAKPLGE

SEQ ID NO: 465789 - protein, 397 aa, unidentified
MDPTYAVFCGIDVGKGEHHAVGLDPAGTRLFDKALPNDEAKLRAVFDRLAEHGPVLVIVDQPNTIGALPVTVARACGHAVAYLPGLTMRRVADLYPGQAKTDARDAFIIADTARTMPHTLRRIDVGDEALAELGVLVGFDDDLAGEATRISNRIRGLLTGIHPALERVLGPRIAHPAVLEILSRCGGPVGIRKAGKRRLTTLATKHAPRMGARLAEEILTALDAQSVTVPGSNAAEIVLPKLADSLKEVLQQRKSIAEDVERMLDDHPLSQVLMSMPGVGVRTAARILLEVGDGSAFASAAHLAAYAGIAPVTHRSGSSIRGEHPARSGNRKLKRVLFLSAFAALHDPTSRAYYDRKRAEGKKHNAALICLARRRCDVLYAMLKNKTFYRTPAAAPA

SEQ ID NO: 465790 - protein, 400 aa, unidentified
MIAVGIDVSKYKSTVAIISNTGEILLPPKVYTHTYSALLSLVSLLKKQKDDIRIVMEATGHYHYPILKLLLDNHFFVSVVNPYIIKKYNDNNLRKVKTDKQDAIRLAFYALEKSYCLNAYVPAGEKYADLKFLYQQYTQRIHIIQKEKINLCHLLEESMPGLYDMLSTSVRNPGKNLLYSFVKRFKSFNRIKRMGKERFLNSYFKMTAEIGSRRRKNYALDIYEMAKDCIATGSTEPYSTMAQEECLRSLILAEEAANRLCEQMNSIANTLPEYPLVRSMYGVGDKIAPQLIALIGDIRKFKSGKALNAYAGNDAPPYQSGQFESKNRHISKRGSTELRKVCFEIMCCIKVHKSPEDPIYQFMQKKENEGKAKKVAIMAGINKFLRIYYARVSEVYQKAL

SEQ ID NO: 465791 - protein, 373 aa, unidentified
MNNTTVYVGMDVHKNSFSLCCYTVRDDACSHYVKIDPDYRLVFEYIESMREIYGDDSKFICGYEAGCLGYTLYHQLNDHGVECIILAPSTMAKSPIQKKKKTDKRDSEMIARCLAHHSYHKVHVPTSEEEQIKEFIRMRDDHKLALKKIKQQILAFCLRHGFTYNAGASHWTAAHLSWLRSLKPEGLYKEILSEYLLTYDKLTDTLERLDRRIEELADQDAYRESVRKLCCFLGIKTQTALAVIVEVGDLKRFQKAQQFASYIGLVPGEDSSGDGINRLPITKAGNTHVRRLLVEAAQSYGRGRIGFKSEALKARQEGNPSEVIAYADKANERLRRKYYRMTLKCGKKVNVVKTSIARELACFMWGMMTGETE

SEQ ID NO: 465792 - protein, 405 aa, unidentified
MRIQERVSHAAMDCHRTFSRLTARDAENRVLFRRRLEHKDRAAMRNQFKLLPAATPVIIEGTFGWGWMADELEACGLRAYLSNSRAVDGWRKSRGLAKTNTIDADLLSELWLERPHWWNVWLAPREVRDQREWLRYRMGLVHIQTMTKCRIHATLHRHGILHPYSDVFGSRGRVWLKELTEAQDSPLRESSRRTLEGHLCLLGQLRRQIAQVTRELRRQVRRSAAARRWDTLPGIGWVLAYSIQAEIGDIGRFGNHKKLARYSLLAPVADDSGEETDGRPVGRHVGHMGRQTLKWAFIEAARGAVKKSPRFRAIFDRRTEGGKRDKNRGYIAVARHLCHIGYVCQKKGVDYMEHRPPRPGERLPSPAAASVDSCPELGQPETPMIRLNQRRGRKAPEPRPRSSVK

SEQ ID NO: 465793 - protein, 363 aa, unidentified
MPSMPQPVADDQDDSAANEVILGVDTHNDVHVAAVITAQGALLGSTNFPTTTVGYQALADWAGTFGTLRRAGVEGTGSYGAALARHLRAAGIEVIEVNAPDKTTRRRRGKTDTLDAEAAARAVLNGRASGIAKAGDGPVEMLRMLKMAKDSAVKARTQTINQLKAVLVAADPQLREALSGLTNTVLIRRCAQLESTTPQDVTSAAVYTLHLLARRVVQLTQEIHDLVHHITDTITAHCPRLLTRRGVGPDNAAALLITAGDNPHRLHSETSFAALCGVNPLEASSGKTSRRRLNRGGDRQANSALYRIALSRLRWDTRTRDYLTRRITEGKTRREAIRCLKRYLAREIYQIITSPPEAEPSAA

SEQ ID NO: 465794 - protein, 338 aa, unidentified
MIVIGVDVHKQSVTAVAVDDAGRMLDEQTAGVGDDDLLTWAAGLEEDRLWAVEDCRRLTRWLERQLLAAGQELVRVPPKLMAPERRAGKGRGKSDAIDALAVARAALREPGLSRPRPDEEPFRELKLLVDHRDAIVDERRRVHQRLRWHLHQLDPTFAVPLRMLARRSHLERVSRWLARQDQELQVRLARELIASCRSLDRTIAALDRELEQRTAQLAPTLLDLPGCGPLTAAKLLAEIGPVERFESDAQLARHSGVAPLEASSGRIQRHRLDRGGNRQLNAALYRIAITQARVHPPARAYLERKRTEGKSRREAIRCLKRLLVRVVFQTLKANPALT

SEQ ID NO: 465795 - protein, 313 aa, unidentified
MSQNNTNILYVGLDIAKLSLQLHLAGRFTTLTNDLKGHARLLKHLRAHPNAQVVCEATGGYEQCIVRTLQAAGIPVSILEAGRVRHFARAQGQRAKTDPIDATVLSEYGHTFHPAPTPPASPQQRQLADWSQRRQQLVRLLSIERNHAEHYTDAFSNRQSRQLIRLLEKQIDQCDKAIATLIAQDPQLAYKASRLQAIPGVGPVVAATVLAQMPELGTLNKQTAAALAGLAPYNRDSGTLKGRRSISGGRRIVRKVLYMATLSAMRYDRILKEFYQRLCAAGKKPLVAMTACMRKLIILMNSLLKNIHFELAP

SEQ ID NO: 465796 - protein, 344 aa, unidentified
MGEVSTIGLDIAKSVFQVHGVDVAGAVVIRKRVSRAKVLEYFGGLPPCLVGIEACPSAHHWGRELQALGHTVRLIPPSYVKAYLKRSKNDANDAAAICEAVTRPSMRFVPIKTKEQQTALMLHRTRQLLVRQRTMLSNALRGHLAELGIVSAKGRNGTAESLRIITDDGDSRVPPAVRGILDVLARQYGAIGTEIASIDKSIMALHRGCEASRRLAEIPGIGPIGATALVAEIGDWKTFSSGRSVAAWIGLVPKQHTTGGKDKLGSITKQGNRYLRWLLVVGAMAVIRYARKHGTQKRPWLGRLMERRPTKVAAVALANKIARMAWAIMVRGERYKEPKLLLAA

SEQ ID NO: 465797 - protein, 380 aa, unidentified
MPEAVIGLDVGKSSHWACVATRDGEVLLSAPVANREGDLDSLFVRFPDALVVVDQSRNIGALALARARAAGMSAAYLPGLAAHGAARLFAGDAKTDERDAMVIAKTALGIPDALLPVGDPGPTIAAARALAAQRNFLTCENTRNKNRLRSILLESCPDFEALVDLSDGPQLRLMASLGGAWSVADAGPRRAAALTRGAARGKIEALVRSTASSTRPDAAAVAAEDRAVKLLARRISENSAEIEAITAEISALLEGDDTYRCLLTVPGIGPKTASELAISIDIEDFPSHDRLASYCGLAPRNRQSGTSISSVTASRQGNKRLKNLVIFSCNCLTRTEGRWGDYYTRCRERGMSHGKALKALARKRLKVIYAVMRDRVPYAA

SEQ ID NO: 465798 - protein, 352 aa, unidentified
MITIGVDFSKRTSVYSVLDGNGQRIKRFKMENNPVLMKEFFEALGDEPKELTMEATRNWGLYYETVKGHVDHFYLGHPLKMRAITQSETKNDSNDADLIAKLTRSGFLPKAHISGLETRQLRSLLRFRLFLVRQRTALRNQIQTLLDRNIWPCQRPGSFKNPLCQRGLLWLGSLELPERERFILDQALKSFFGLNRQIGDIERYAQAQSVELPGTEYLRTVPGFHRSKVHIYTVLLEIDDIHRFKKARNLAHYAGLIPREHSSGDKHRTGHLIKQANSHLRGAILESVFGAIAKDKTLRTYYQSVKIRRGSGAAIIATARKLSYAIYHVLKDRTCYKVFPSVTANGASAAED

SEQ ID NO: 465799 - protein, 433 aa, unidentified
MKVLYERVAGIDVHKDMIKVAIRSPGEKPWTRKTEILEFRTFYGVLQAMARELRKRGVTHVVMEASGVYTEPVYYALCEQDFTQVAVINPAHAKALKGHKTDARDCARLAELFECGLLRGSYIPPAELKEVRDLTRYRMKTVQARTSEIQRLGKALESAGIKLGSVASSITGTASTAMIEALIDGERRGGVLADLAIGRMRAAGKLTDLSMALAGRFTEHHALLCRLHLDRIAVFDDAVDGLDKRITGKAARWQREAGLLTSVPGFGNVVAQAWLGEIGPAPHRHFATCDKLASWVTLCPGNNISARKRKHGRTGDAGTYIKPMLVQAAWAAIRVRGRLQARYNRLVRRFGGDKNPGAKKKAITAIAHTLLKIAYQVLKSGTPYQEPGADFYTRRESPEHKQAWLERQLQRLHPGCTITVTISPPEAALPPRG

SEQ ID NO: 465800 - protein, 352 aa, unidentified
MAKDSIDELMSIGIDIGKDTFHIVAFDPDGQLVMRKQIKRLALVATFEKLPRCVVGMEACLSAHFVSRTLRKMGFEPRIIPAIYVKPFTKGQKNDYNDAEAIAEAALRPNLPVVPEKSQEQLDLQALHRVRSRLVSRRTATINQIRAFLIEQGITVRKGLRALKNSFETILEERKDEISPRMRTILIGLYGDWLWLDDRIETVSKEIELISRTEENCVNVMTIPGIGPMISTAMVAAIGTGEAFGRGRDFAAWVGLAPRQFSTGGRTVLGRITKRGSRYLRMLFVQAAKVILMRTNRWPDFSFGDWLAKAAERMNRNKLAVALANKLARMAWSILRNKTAFDANRDEIAIGV

SEQ ID NO: 465801 - protein, 343 aa, unidentified
MYFIGLDVHKKTISFCVKDAAGRVLQEGKIGSSRRELDAWIGTMPQPRTIAMEATIFTGWIYDHLLPHAEKVKVAHPLMLRAIAAAKKKNDRIDAGKIADCLRCDFLPECHMVSTAIRDRRRTLRYRSLVVKQMVQMKNRVSGLLMETGVGYNKQRLHKVGYFEELMATNEDVHDSIRPLLKLSREMISRSQKLDYALISSLERDPLLKERIRRLRTVPGVGPITALTWALEIGDYTRFASNKQAISYCGLCGDENSSADKVLRMPISKQRNKHIQRVLIEAAKLATRESPELAMIRARELERGNPNRATLAVARKMVAYMLAVERRQQDWVPAEQFNRAAAA

SEQ ID NO: 465802 - protein, 344 aa, unidentified
MMNIQLKTNDVQVNSIHQAGIDVGAEELVMVIRKNGKLFNPQTFTNTRADRARLVMKLVKLPGVIVCMEATGVYHFDLAVALHDAGVLVMVINPKSSHNFAKVLMKNSKTDAVDANTLAEYAARMDFAAWTRPSDETIAVRCFSRRITALTTQKAAAKNHLHALTATQETPKAVLRDAKLAITQLQKRIDRLTTEALLLIGKHPKLERTLALLISIKGIAQTSAISLMGELLLLPPDLTHREWVKFAGLDPKAFDSGKSVHKKSRISKAGNRNIRAALYMPALSAKQHDPHVRAYFQHLVANGKKPLQAVCAIMRKLIHAIHGMLKNDEPFDNTRFYKIPVSAV

SEQ ID NO: 465803 - protein, 401 aa, unidentified
MKNKDATIIPVIKVGAGLDVHKDKIVICVIQVKGETFFEEFGTSTAELYKIVKYLQDLSVERCVMESTGVYWLSIYSLIEEQGIETVLVNPAYIKQLPGRKTDINDSQWLCRLLINGMVKGSFIPGKEQRQLRDLCRNRLYYQQDLTRIKNRIIKLLEIHNIKIRSVVSNINTQTAKGIIKALSEGETDVDKLLMLCKGKTKKKAKEMKEALNGVLSVHDIKLLKLLIKDWEHYDSQLDELESDINKIITADYKDQVNRINKVSGIGIKTSQVIISEAGKDMDRFHNEDHFASWCGLAPGNDQSADKIRNAKTRKGNKYIRIAMIQSAWAAVRTKNSYWSALFVNLKRRMPGKKAIVAIARKLLRILYRILNGSIEYINYTADNYWERVYNRRLNYTTAKN

SEQ ID NO: 465804 - protein, 379 aa, unidentified
MDFSTVALPPVSDKPATLFVALELSKATWLVALHSPSADKVSLHRLAGGDTQELLTLIARKRDQAQTALARPVHVMSCYEAGYDGLWLHRFLYASGIDNRVLDAASILVDRRSRRAKTDRLDAAALLRTLMALDRGEPRVCRVVRVPSPEHEDERRRSRERARLVNERGQHASRIKGLLMTQGIRDFVPTRRDWRERLAELRTADGRALAPCLTAEIERECRRLWQVIAMIAEVEAEQHRAAEKSSTGAVQLSRLRGIGLTIASVLADEVFFRSFHNRREIAGYLGLASSPWNSGAVSRDQGLQRSGNPRARRTAIELAWLWLRHQPESDLARWFQERVGAGKGRIRRTMIVALARKLMVALWRYVTQGLVPEGAAIKG

SEQ ID NO: 465805 - protein, 373 aa, unidentified
MTQLSSQPVSSQPVSPLFIGIDVAKDKLDLARSDTGELLTVSNDQAGIGRIVQILAAATPTRIVLESTGGLERPLLQALLDANLPVALVNPARVRHLAIGLGILAKTDAIDASVLTEFARMGNPRLAEKCSKNQTELDALITCRRQLTRARAEQSNCRFSTVSKTALQSIDAILKTLDKQIELLDKKIRKLIESDDDFKHLDKLLRSVPGVGPVLSSTLVAELPELGKTDRQRIGALVGVAPFNHDSGTLKGKRSIRGGRVQVRCVLYMATLAAIRFNPVLRKFSERLTRAGKAKKVIIVACMRKLLALLNVMLRDNLMWSENELPCLLAIVRNEREPGTSLSGRTVVRSSWASSRPRSSGERFLPCSTRRWP

SEQ ID NO: 465806 - protein, 381 aa, unidentified
MTTAAPHHEHGNITEATLFVACELSEKTWKLGFTTGHGQKPRERTMTARQQERILDEIAQAKRRLGLPETAPVVSGYEAGREGFWLHRFLQAHGITNQVVDSSSIEVNRRRRRAKSDGLDVRKLLSMLIRYAHGERQVWQVVKVPSVEAEDHRHLHRDLETLKQERASTTTRILGLLRSQGLRVTSLTKLPEQLEALRLWDGSPVPPGLRRRVLRVYAHHTFLSEQIAEVEAERRAQLQASTDARIDKVRQLMLLKGIGINGAWLVVMAFFGWRAFKNRREVGGLAGFTPTPYQSGESAREQGITKSGNRHVRWMTTELAWSWLRFQPDSALSCWFRERFGSGGKRLRRIGIVAVARKLLIALWRFLETGVVPEGAVLKEG

SEQ ID NO: 465807 - protein, 318 aa, unidentified
MHNTRLDPHVLFDPQKFANTPADRARLVKKRVKLPGIIVCLEATGIYHFDLAIALHDAGVSLMAVNPKASHNFAKVLMKNSKTDAVDANTLAEYAERMDFVAWTRPSDEKIALRCFSRRINSLTGRKAAAKNHLHALTATQETPKAVLRDAKLAITQLQKRIDCLTAEALVLIGKHPELTRTLQLLIGIKGIAETSAIALMGELLLLPPDLSHREWVKFAGLDPRAFDSGKSVHKKTRISKAGNRYIRAALYMPALSAKQHDPRIQAYFLHLVVDNGKEKMQAVCAVMRKLLHAIHGMLKYDKPFDNTRFYAIQASVG

SEQ ID NO: 465808 - protein, 364 aa, unidentified
MLIIGCDYHPSGQQVFGIDTESGEVFADRWIAHTGKELDEFYSALPAGAVVGVESSGNMLWFERRLRQYGHQLRLGDAAKIRAWETRKQKHDRRDAELIARLLLEGNFPDLRWVPTLAERDQRQLLMHRHKLVRMRAQVKNQLQHIAMNQGEQKKRQLWTKAGRELLENLPLEPWTARRRDDLLRWLDLLDGDCEGLDQAVQQAAEARADARLLMTHPGIGPVISLGFVLTIGSIERFERSRELVSYLGLNPSENSSGERRRLGGISKQGSSFMRLLLIQGAQTAVRGDEALCRQYRRLASKKHRAVAKVMVARKLAVRMFWMLKTRKTHAELVRMRGSSSHPGVSQTDRLSEHPASLRIQPQG

SEQ ID NO: 465809 - protein, 381 aa, unidentified
MNSYIGLLVGESNTLLDWGNMVDVSSEAKSSATGVTNPYRRTEHCDKIHAYRCDKEVGVIGIDVSKDHLITSRGRVRRYENSKKGYEEILKMKPCTIVLEPTGVYAIKPSQYFKEKGIKVLQVSPNMLSREKEFRGKKTDFYDAEKLENMVNKAKEYDYNPLKELVTLYLFLKDIETKYKNRLKRALFLVNDNDKVNKDRLERLAKGDFTREELYQLEYTPIVLEEIKILAKNLLEIQERLKEVRRMIEGQVPQDHVLLTIPGVGKLAAGIVGDIRRFPKPESFVAYCGLDPVVERSGRAVISRGISKRGNKYLRSLFYFLAVRNYSRNPTLLKFYETHKDRLKGRKLYVALARKLARVVWSVWYNNRPYEPVGVILVMQK

SEQ ID NO: 465810 - protein, 449 aa, unidentified
MTAVMIGIDPHKASHTAVAISAAEEPLGELRVRACAAQAERLLAWAAAWPQRIWAVEGAGGLGHLLARQLPGAGERVLDVQPKPSARVWLLTAGDSNKSDPDDARSVAIAALRSAGVREARPDDHAAVLKIWSKRYRDLGRTRTQVACRLHAVLCELIPGGLSKEITAGHATRVLEAITPAGAVEAARCELAAAFAEDLRGIDARIRQTRAKPATAIQATGTSLTGLFGVGPVIAAAVIGDVRDVSRFPGRDHFAACNGTAPVEVSSGPRKVCRLSRRGNRRHGHAIHMAAVTQIRHRHSQGRAYYDKKLAEGKTGKEALRSLKRQVSNAIFACLQAGARRAAARAGGPGGQQGNDSVASAAGSHPRHRLFGQATPGPGDHPTATFSSPAPGSAHGRGTAGHSPVAATPPPATRRSRWSARSATRTNDLGARQDDGRTRPRRRPRPKDR

SEQ ID NO: 465811 - protein, 424 aa, unidentified
MKVTYQTCCGVDVHKSFLVATIVKTTGGIEPSYQKKRFSTFNNSILEFKQWLLDNHCHDVCMESTGKYWVPVFNLLEDKINVVIANPKWVKAVKGNKDDTKDSKWIGDLFRLGLVKGSYIPCKAIRILREYTRYRYKLVSCRSSEKNRYQNALTVCNVALDSIVSDIFGKSSTSIIDYLLEQSGTSINHEEIASKLLRSLKSKEDAVIESVEGYQMTDAQKYRMRLVRAHMDYITAEINDVDKMIENMISSNPDFENAVQFLCTIPGVKRDSAITIISETGTDMSQFSSSKRLCCWAGLTPGSNESAGKKKSVRITRAGVYLKPALVQCAHAAVKSDKSPYYKKKYESLVKRRGKKRAIIAIARMILTAIYQMLSTGEQWNPSDLYKIDMPVALVEKQKAKAIKQAKKLLQREGLLPPDEPLAS

SEQ ID NO: 465812 - protein, 333 aa, unidentified
MNKSETTFLPCGIEISAAILVVDLSGKAPCEFPNTPVGHQSLIRWLQLAGSEIRVCMEATGLYGLDLALALHAAGIAFMIANPRSVRNFARAMMQRSKTDRLDVIVLREYAARMPFEPWRPPSSQALHLMAIAHRLQALTRMITAEKNRLHAASLSRALPALVRRDLLRSIQSMERALKRLTQAALDLVLSDPQLARRNQLLLSVPGIGVTSALNVLAEILRLGPDCGVRQWVAYVGLDPRHYTSGTSVAKKPVISKSGNAHLRRALYMPALVTVQHEPHFRGFYQHLLDRGKTKLQALVAVMRKLLHAIFGMFKHNQLFDGAKVYALETSCA

SEQ ID NO: 465813 - protein, 414 aa, unidentified
MELLHERCAALDIGKKDLKACVRTPSPKGKRSRRQEIRTFATTTNALLELRDWLVAEQVSLVVVEATGDYWRGAFYLLEDQLNVILVNAAHAKGLPGRKTDVCDAAWLCQLGECGLLRASFVPPEPIRQLRDLTRYRTTLTAERSREAQRLEKELEDAGIKLSSVATDITGVSGRAMLAALIDGERDPQVLAEMAKARMRPKIPHLVQALTGNFGEHHAFLCRLHLQRIDELTAAIAELSARIAEQMRPFARQLEHLMTIPGVGQTVAEVIVAETGTDMGRFRTGANLASWAGVCPGHHESAGKRKSGKTRHGDRWLTGALGTAAMAAARTKDTTHLGARYRRLAPRLGKKKALVAIEHSILVAVWHMLTNNVDYHDLGGDYFARLDPERAMHRIIRQANSLGFTVRFDPIQAA

SEQ ID NO: 465814 - protein, 347 aa, unidentified
MQEFFLGVDFHKKSSFVTCMSEKGKIVLRRQFANSKDNWECLLGELHSNTRVVVEATCNWYYLYELIENRFPVTLAHPLRTRAIASARIKNDKVDSETLAHLLRADLIPASYIPPREIRDLRELLRYRISLIQVQTQMKNRIHAILSKNGLLFPFSDVFGKKGIAWLKSQSLRKVYMDEINGYTNLWESLHAQIEVVQKEISSKAQKDEMVELLMSMPGVGEFSALLILSEIGNIDRFPSAEKLCSYAGLVPTVRASGEHIKMGHISKQGSQYLRWIMVELAYHLVRGSDHFKEYYERVKFKKGSAVARVSVARKALKIIYFLLKTKTAFKEKGNGRMPLGSAAAIA

SEQ ID NO: 465815 - protein, 356 aa, unidentified
MYKLSPSGGRCRAATASKHGNHNYTTLEHLMHTPTTYVGIDISKAKLDVALYHDDALKAETITVAYDRRGLLVLRRWLHQATTDRPLLIGMEATGAYWQPVAASLHASGARVYVLNPRCVKDSARAENQRQKTDRVDAGVIARHLRAHCVELHPWTPPTPAVATLRALLTRWDQLGQELQREYNRRADVHEPLVHASFRRMIRFLLHERRTIRAALDQHCAAAAELHNAVDAVAAEPGIGLLSAMRLVALMRTHTFTTARQAAAFLGITPRHCESGTSLKRPPRISRVGDAALRHALFFPAVVARHHHPVLKPWADGLVARGKTPKQAACAVMRRIVHIAFGIVKRIDREQPLLAA

SEQ ID NO: 465816 - protein, 407 aa, unidentified
MKDQEQIAAWIGVDWADEGHQVWEYNLGTGSKETYVVQHNAESLQEWLSQLRSRYRGSGVAVVLEQARGGLIYALMGTDFIVMYPVNPQSLSKYRKALYPSGAKSDPSDAELLGEMVRQNPQRFRAWIPGDAQTRSLQLLTEDRRKLVEDMTARTNQLTSVLKTYYPQALEWAGHPGSEQACAFLEKWPTLVELQRSRPFRVREFYQKYGRPTREVLNQRVDQILKAQPLTSDRAVVKASVMMVQALVAQIRPLRLAIENYDQEIERVFRQHPDRVVFESFPGAGKVLAPRLLAAFGADRDRFQTALEVQEFSGTAPVTERSGKAIWVHRRLACPKFMLQTFHEFANCAWRFCAWSKLYYQQQRARGKDHHAAVRALAYKWIGIMFRCWKDRTPYDDSLYVKSEQSL

SEQ ID NO: 465817 - protein, 421 aa, unidentified
MENTAARKRKQVPEGYLIIGIDPHKKRHAAVAITQDFSIRDKSKFANTREGLETMLRRTRTEMVKADCRGVMFAIETGGHYWRNIAYFLDEQGIPFRFINQYTLKRRREGKDLNHRKNDYRDSEVAAQLLCTGEFTESTIPQGVYAELRTAHNAYRRLVKERTRITNLVKGLLDGLFPEFTQVFKDPCGLTALSVLSACAIPGVIARMMEDEFVAAIEVKHQGRLMRKKLKELHYKAKASIGIEAGARSVSSEISFLVEKYELIRRHICIIERTLVSLVDEAEEGKYLLSIRGLNYVAVAGLLAELGCFKLYRSAKQMIKMAGSNPTESESAGKRGSHTPMSKQGRPVLRYCAWTSVIPMLRFNPDFRVWAKQRRERPAHANPLNGREVVGAALNRLFRLAFAMVKNQTYYRSPQLAQVTD

SEQ ID NO: 465818 - protein, 377 aa, unidentified
MKYVGIDLHKKTISACVVVKEYERRQVAARKRLECKDESAIAAWFRELGPFEVVVEATSSYEWFVKLVEPLAHRVLLAHPKKLRVIAESKRKSDKLDAQVLAEFLASDEIPLAYRPSPRVREHRALVRYREYLQRRITSVKNKLRHILAKYNADVPHLFTDAGQEHLAAVSLSPCDRLVADALSVELNQHGLRLTKINRELRRFATKAPLPEKEARAVLDSIPNVGPVTADIVLAELGDWRRFRSQTDVVSYAGLAPGYRESAGKAKQLGITKEGSRVLRWAMVELAWRMVRTSRKWGRHFTRLEVRVGAKKAIVAIARRLVGMIFALLREGKQYSLALESSPPASCRSKSPRDTNPSDPACLRSQPRQASSLGAGG

SEQ ID NO: 465819 - protein, 396 aa, unidentified
MLSQLSYTLNQDQVADRLNAGIDMGKNKWVMDALDTATGKHRRHVFTGESHLRDALAKVRALVATGRETDVIYEAGRNGFTPARMMQASGARVVVVPVNKLEVVKMGKKAKSDRIDARGLSERDARAKGFPSVWVPSVDQECRRRMLREDQRLRRDIKRNNNRILGILERWAVPPESRHLPAAVWRQRIREWQRHGVIGAALPQTELACICNMVAELELLEKNLAEWQTLMAAELEKERATAVKAGRSHPVDILREYKGIGEHSARELVWYVGDFDRFANGKKFASYLGLAPVPWDSGQMSRCQGISKSGNPELRRLLIELAWLWTRYQPGSPITKKWAPALVRRGRGRKTAIVAVARQMAVALFRLLKHGEPLEGAVKNRPIRVPAATPGSPLAV

SEQ ID NO: 465820 - protein, 455 aa, unidentified
MTKRDAKQRRPGTFKQALTVINANAAGIDVGAKEHYVAVAPDRAEQSVRRFSAFTHDLHQLAQWLRQCGVTTVAMESTGVYWIPLYQLLQDYGFTVKLVNARHVKHVPGRKSDVQDCQWLQQLESFGLLTASFRPDAQICVLRSYMRQREQLIRSAARPVQQMQKALAQMNLKLQHVLSDITGVTGMAIIRAILRGEREPLKLAALKDRRIKSDTSTIAKSLEGDYRAEHLFVLRQALELYDYYQQQIAECDAQIYEEMKKLESNSEAVPSTSQRKRSCHNPFHFNAQSELQRVLGVDLTRINGISETTAQLILSELGSKVVTTWPSEAHFASWLGLCPNNEISGGKVLRRGTRKVVNRVANALRMCAESLLQSKSALGAYARRMRSRRDTRIAITATAHKLARLVYRTLKYGEEYVDQGQQLYEQQYQAAVLKSLNRTARKLGYELVTRQPPPS

SEQ ID NO: 465821 - protein, 354 aa, unidentified
MVVVGTDVHKRTHTFVAVDEVGRKLGEKVAPATTAGHLKAVAWAREQFGAELLWGIEDCRNLSARLERDLIGAGQSVVRVAPKLMAQARAMARTRGKSDPIDALAVAHAVLRNPDLPVAAHDKVSRELKLLTDRREDLVKQRTSTINRFLGRVHELDPAQNPKKGSMDRTKTHNALAVWLDTQHGVLAEVAREELADIIRLTAAITALAARIGERVQKVAPTLLALPGCGELTAAKIVAETAGISRFRSEAAFARHTGTAPIPVWSGNSAGQVRLNRSGNRQLNAALHRIAVTQIGMADSAGQLYYRHKLTDKKGTKAALRCLKRRLNRTVYRCLQHDHNTTQTPQKPNSGVAA

SEQ ID NO: 465822 - protein, 419 aa, unidentified
MNKLFVGMDISLDDVKVHILDQDGIDACSRFSIDNNPSGCNILVSHILDCCNKYNIQKVFIGLESTSVYGWHIQYYLADHASLKPFNPSVTTFNANTVKAFKKSLGNLPKNDWVDAFVIAEKLRFGRLPKSCPVDFRYLALQRLTRHRFHIVDSIVREKNYFLSNLFLKFSGLCQIKVFSNNFGTTATEIFNEFLTLDDIAARPLEDLVAFLVDKGRDHFNDPNATAKLLQQAVRKSYRINANVNDSLNFVIKSCLDNIQYLEKQKKASEKTIANEVKGFKNQFLCLTSVNGIGPTIAAGLISEIGGISRFDNDNALAKFSGIYWSEYQSADFKAEDTYLKRTGNEYLRYYFIQAADQLRKYCPEFSQYYARKFNESKTHKHKRALVLTARKAVRLVFALLREEKLYKPPAMKGDDCKE

SEQ ID NO: 465823 - protein, 421 aa, unidentified
MDDIGDELELVERVCAIDIGKTALVACVRVPHDTLPGRRVQEVREQATTTGSVLGLADWLRCQQVELVAMEATSDYWKPVYYLLEAQGLRCWLLNAKHVKNVPGRPKTDKLDAVWLAKVVERGMCRPSLVHPRPIRRLRDLTRYRRSLVRERSREKQRLEKVLEDAQIKLDTVVASLHSVSGRAMLEAMIAGERDPHVLAGMARGVMRRKIPQLEEALRGHFDDHHGFICATMLRRIDALAADIATLDAKITELVDAHLEAIQRLDEIPGVGARSAQELIAEIGVDMAAFATAAHLVSWAKFAPIDAQSAGRRKTSSTGKGNPWLAATLGEIVAALSRTDTFLGDRYRRLARRRGKKRAIVAVGNSVLTIVWHLLSDPTAHFHDLGSDYYESRINTQRRQRDLVRQLEHLTGQRVTLQPAA

SEQ ID NO: 465824 - protein, 340 aa, unidentified
MGQVVRIGLDLAKSVFQVHGVDAAGEVVVRRKLRRSQLVPFFARQPACLVGVEACASSHHWARELIALGHAVKLMPAQYVKPYVKRSKNDAADAEAICEAVTRPTMRFVAIKSPEQQCAMMLHRVRLVLCRQRTQLSNALRAHLAEFGIVAPVGRLGLERLLEIVADPEDHRLPEGARTSLQMLVAQLAVVKTQILENDRRVIADARATELGRRLMAIPGVGPLLASALVATVADPGVFRSGRDLAAWIGLVPRQNSSGGKERLGSISKAGHRYLRQMLVVGSMAVIRHAARSPKRRPWLTQLLARRKAKVVAVALANKIARTAWAMMITGERYREPRAV

SEQ ID NO: 465825 - protein, 334 aa, unidentified
MKQYVGLDVSQRETSVCVVDDAGRSVFQGKVKSDPGALTELLRKRAPHAERIGFETGAMSSWLWHELKRVGMPVICIDARHAKAALSVRMNKSDENDARGLAELVRVGWYREVKVKSTESQATRSLLVARSRLIAIRRDLENQVRSMLKEYGLQFSRSIGAQFRRKVEALVVDGHQLRSVIEPLLTVHEQACREQEKLERQVRRLAREDDTTRRLMTVPGVGVVTALTYRHTIDDPSRFSSASDVGAYLGLTPRRKQSGETDVNSRVSRWGDRLLRTYLYEAASVLMHRTKKWSTLKAWGVRLSKRIGMKKAKVAVARKIAVLLHCLWVDWHQL

SEQ ID NO: 465826 - protein, 318 aa, unidentified
MTYTQQQTALYVGIDGSKETLAVATYPTHQVKVIPNDADHCEALADELAQQSVQFVLLEGSGGFEKLIVRALQQAGVPMAIVPPQRARYFAKSLRGNLKTDRVDARLLARFASCYLALEATEVPAVQAQLKELWARREQLVQMLESEKKRVQVATHPLVRASLERTIAGLHAELAQIEAAIEALVAPDEALAQKAALLQTVVGVGWVVASGLLAELPELGQVSHKVIAALAGLAPVRRESGRWRGSARIGGGRCRVRRLLYLAAVVAVSHDARWKAVYQALLAKGKAKKVALCAVARRILVVMNAMVRDGRAYERKRE

SEQ ID NO: 465827 - protein, 314 aa, unidentified
MAEEDVYIGIDVSKAWLDIAVDPTGQYWRAENNDRAITELEARLAESNPKCIVVEATGGYEAKLVTHLCEANLPVARVNPGRVRRFAQGLNWLAKTDKIDAMLLARFAEKANPRLTKLPTEHEKRLAALVKRRKQVLDMLVSEHNRLETADPDVLPYIQNSTAMLEKQLKELDQAIRSLIDNTPDLKGKQDLLLSVPGVGQVTASTLTSQLPELGTCDRKEIASLVGVAPFSHDSGKKRGKRVIKGGRPAIRSVLYMATLSATRFNPVIRKFYDRLINNGKETKVAIVACMRKLLTILNAIIRDQHHWNPEIVS

SEQ ID NO: 465828 - protein, 343 aa, unidentified
MTKISTIGLDLAKNVFQLHGVDGSGAVVLKKQLRRGALEKFFAQLPPCLVGTEACGSAHHWARVIGRYGHEVRLMPPAYVKPYVKRNKNDGRDAEGICEAVGRPTMRFVPVKSVEQQATLAVHGTRALLVRQRTMAANALRAALSELGMVAAQGYEGLRELMARLEEPGEEIPEVMRGALLVLARHWQALDADERLLERQIAKAARSDQDARRLMEVPSVGPIIASTVLAKVPDAKVFRSGRDFAAWIGLTGKDHGTGGKHRPGRISKQGDRMLRAMLICGASAYLRHQKARGVSDPWLRELLARRPYKVVMVALAAKTARIIWAMLAKGEPYRDRASASAAA

SEQ ID NO: 465829 - protein, 342 aa, unidentified
MKDVRILGVDLGKNSCSVVGMDAAGRVVLRRRMRRESIIALAAKLPGCVVAMEACCGAHHLGRLLVAQGHEVRLMSPEYVRPYVKAQKNDDRDAEAIAEAATRPTMRFVALKSEAQLDVQVLHRVRDRLVGQRTSLMNQIRSILLERGIVVAQGRRKLLDALVALSSDGGGVGPRVRLLLNDMLDQWHALDTRITALDDEFADMARNDPAARRLATIPGIGVLNATALVAAIGDGFTFSRGRDLSAWLGLVPRQASTGGKAKLLGITKRGSKYLRKLIIQGARAALPSLSRTATPLGSWLRGLLSRAHGNTVVVALASKLVRIAWALLRHRTDFDRRAFAGA

SEQ ID NO: 465830 - protein, 425 aa, unidentified
MKKTDYLSTLFVGIDIGSRTNVVSAIDFNQDFFIRMKPVPNAKEGAETLESLLVDVLSAHHEFNHVIIGLESTGFYGVHIANYLSASGLLAPFGTEVYCLNPKEVAKYKESFNSLDKNDGIDSFVIADFARVGRISIKPWRGAQYLALQRLTRHRLHITECIAREKTYVLSNIFLKFSEFAMLKKEDHPFSNKYGATAEAILEQYVTNDDIIGASIEELVELIESKSRGRITDPEETVKILKAAANGSYRLDKVVAEPITLSISSSFNCIRAFEKELKAIEKAIEHTVQGLNPVEYQVLKSIPGIGHVYAAGILAEIGTIKAFTGNGALAKYCGIVWKENQSGNFRAEDTKMSKAGNRYLRYYVIEATGSVINNCPEYKDFYDKKFAETTTHQHKRALALTSRKFLRMLFGLLDKSQLYSLERSR

SEQ ID NO: 465831 - protein, 348 aa, unidentified
MKNIIIGIDFSKETFDATVLDLSKTSGVLPSSFNGMHERFQNSKRGFQQLLAWIKKSTKQEPSKDWVFCGEQTGKYSHGLCDFLFDKGLDMWIEAPLRIKRCMGIARGKNDSLDSLRIAEYAYRYQDKMTTYQPVSKAIAQLKELFLARLKFVEQRKALFVRNNTSTEYSKGSDAEKTVAKLSRNLIKQYDESIRQLEEEMQAIIDSDEEILETFENISSIKGISLINASAFIIYTNNFKDFGANPRRIASYWGVAVFAQNSGTSVHHPARTSPLCSKMLKSLLSEAAVAARLYNPDIKRYYNRLIAKGKHKGVALNNVKNKLVHIITALAVNKTEYVEGYECFRKPS

SEQ ID NO: 465832 - protein, 341 aa, unidentified
MSDYSYFCGIDLAKNHFSLHAVNQNGKVLLHKSVTRSKLLTTIANMPLMRIGVEACGGAHYWARTLNKLGHDARIMAVKYVVPYRTKGKNDLNDAVAICEAVQRPSTRFVPVKSPEQQAILSVHRMREHWVRERTALMNRMRALLSEFGLIIPVGRSSLMKQIPLMLEDAENELPHLARTVIADAYHHLGELNQRIADTEQVFDSFAKVSANVQRVMKVRGIGPQTATAILASIGNGSQFDKSRDFSAWLGLVPKQYSTGGKPRLGRITKHGDKYLRTLLVHGARTVIANLGDKQDKLSQWCRGVLERRGMNRAIVALAAKNARIIWSLLHNQTEYENYAA

SEQ ID NO: 465833 - protein, 338 aa, unidentified
MSIVYVGIDLAKNVFAVHGVDEAGKPALVRPSVARARLHDLIAGLPPCTVAMEACTGAHHWARLFAAHGHTVRLIAPKFVTPYRMSGPRGKTDAADAAAICEAVQRPNMRFVPLKSEQQQGQLLVHRARQGYVQARTACINRIRGFLAEFGHVLPLKADTVRRQAASLLEELPGWANTVIGDLLSELRRLDERIAQYDRHVAQIAREDERAGQLMQLPGIGATTATAVVAMVGNGHEFKCGRQFAAWLGLTPGQYSSGGKARLGRITKAGDGYLRSLLILGARSVLALAKGRSDALSNWALAVQERRGYWKAVVAIAAKNARLCWAVLRQGENFKLPA

SEQ ID NO: 465834 - protein, 320 aa, unidentified
MSATSVVVGIDVAKADVDVAVLGGKLETQRFENEAEGHSALAAILQPLGVALVVMEATGGYEAALACALQAATLPVAVVNPKQARDFAKAMRRLATTARIDARMLAELAAVLVRRDDLARFIRPLTDAQQQALVALVTRRRQLLTMLLSERQRLQLAIPLVRPSIEAMIQAIRAQLDDVEAQMTGHVRTHFAELDTLLRSARGIGPIASATLIAELPELGRLNRREVAALVAVAPVANDSGTTRGRRRVQGGRFEIRRVPYMATLVAARHNPVIQTFYQRLIDAGKLPKAALVACMRKLLTTLNAMVRTNKPWDSSFHRA

SEQ ID NO: 465835 - protein, 363 aa, unidentified
MMIIGCDYHPSWQQICWVDTLTGETEEKKLDHGSGEAERFYRALPGPAVIGMESTGNCQWFVEMATTAGHEVWIGDAAKIRASEVRQQKHDRRDAALILKLLLEGRFPRIWTPSGEEKDLRQLLIHRHKLVRIRAQVKNELQHLAMNQGVTRKRKLWSKAGEKVLRELPLKPWASRRREDLFKVREMLDGQIGLLDQAVVEVAKKNEKARLLMTQPGVGPITSMAFVLTMGDVKRFQRGKQVASYLGLIPREYSSGGHQRLGSISKQGNGFMRMLLVEAAQVAVRCAADAFGIFTPLPPESKGRGESGGGQEVGDSTLLDAAHESRVSRGRACREQLAGADGQRKLDRRVDWALSSRCKSGFA

SEQ ID NO: 465836 - protein, 345 aa, unidentified
MAIVGGFDIHRRQVTFDYLDTGTGQVRRGRIDPACRQTLRAWLERFAGRDDVTFAVEGCTGWRFVVEELQRAGITALLAEPAETAHQRGPKKRAKTDRADARHLRTLVAEGRVPVSWIPPGQARELRVLLQLYRDLREEHTAWTQRIHATLFHQGVPSLAGRLSDPRARALLEQDIGLSPAGAQAVAVALRRMDDLEAALAPVHARIAAFARRQIACKALAAELYGVGPLVAAIVWAFLGDARRFSSSAQAVRHTGLDVTVYSSDDKRAPGHLSHQGPPILRWALFEAGHQGSRASSPDHLYYTDVAARIDANRAALSVARKLARRSHHILRRLGDQAYAPLPGW

SEQ ID NO: 465837 - protein, 337 aa, unidentified
MKRYLGVDLHRTQFTVCTRDEQGGKTLRQWRSEQLPEFVEQLRSEDEIAVEATSTTARFHEAVVDHVARVVVVNPHQFKVISESVKKTDDRDAETLALFLSKDMLPEVRMKNPQQRELQHLAETRDLLVKQRSALKNKINNLLAAQGINLQREALSSQKALDRVLATQVSALVKIELRVLVDQIRSLTSSIAEVDELLEEEGRRLPGHANLTSIKGIGHLSATILLTSIGDVRDFANENKLAAYFGLVPRVQNSNESEHSGRITKRGNKLARTALVQCGLIAQRYSPYLKRFYERIKSRRGGGKAKIALARKLVKIVYDTLKNNWVFDDFPSFTLAA

SEQ ID NO: 465838 - protein, 429 aa, unidentified
MNYTQNEKIEQVTDAMLVIGIDIGSQTHYARAFDNRGRELTKRVFSFGNDIEGFNSFHQWAEKLKTENDKSAILIGCEPTGHYWFSFAKYATDHKMILVMVNPFSVKKIKELDDNSPKKTDAKDPKTIAKLVIDGRFSIPYMPEGIYAEIRDLEYSRDRIIKQHNISANRIQRWLAIHFPEYLGIYTRFDATSGLAVLEKAPLPKDIISLGVSGIRKIWHDNRMRGRGVTEDRAMTLVEAAHNSIGLDGGPGTRSELYMLLEEHKLWTSQLETVNKALEEAVLKVKNVEKLLAIKGVGIITIAGFIAEVGDIRRFKSPKQIQKYAGLELVENSSGKHKGRSRISKRGRRKLRKILYQVMIPLLASNKEFRQIYDYFVSRVKNPLKRRQAMMAVSCKLIRVFYAVLTKGVDYDRFKMMSDIHHEGDLIAA

SEQ ID NO: 465839 - protein, 378 aa, unidentified
MKNDNRYVGLDVHAETIAVAVVETDGEVRFLGTIPNRAETVRRLVKRLGPANRLRFCYEAGPTGYVLYWQLTGLGAHCDVVAPTLVPVKPGDRVKTDRRDAEKLAVLYRGGHLTPVWVPDQAHEALRDLVRAREAAKSDQLRARHRLQKFLLRHGRRPPQGTKAWTQKHLDWVRREVHFEAPAQEAVLVDHLAEVEHARERLRRLGGAIDVAVEAAPTCMRAVIEALQGLRGIAKVSAATIVSEVGSLSRFRKPRQLMGYSGGVPREDSSGERVRRGGITKTGNAHLRRIVGEAAWSYRHRPTVRGELLKRQAGLSEEVKAISWKAQHRLYSRYRRLIGKGKAKQQVVTAVARELLGFIWAIGVHVEQQHGTAARRAA

SEQ ID NO: 465840 - protein, 336 aa, unidentified
MYNFIGIDVSKLTLQIYIEANESSVEIDNDEKSLKTFYKDLKKLYSNDKPFVFIYEPTANYSVALTRFCAKNNIYVYVVNTFVSSNFSKSLGNRNKTDISDAHMLFNMQMMINKKDIEVPVINPTVDELRELVGYYRFLQKQKVAFKNYNEAVTANKSSNYILNDVKKNITRINKQQQELINKAKAIIDGDETLKKSFAHITSIKGIGTLVGIFLIHLFLNYPNANRQQITALLGLDPITIESGTSVKKRSRISKKGLSMYRGVIFYSILSTVRFNEEFKTYYEHLKDRKKHTTSAQIAVMRKLILLAHSLYKNNVDYNPEQFKLKKAVQKEEYAA

SEQ ID NO: 465841 - protein, 426 aa, unidentified
MTPLLSQQFRAFVGIDWADAKHDICLQPAGDDTREFACIPHQVARIDEWVAALHKRFGGPIAVALELSRGPIVSVLQRHSFLTLFPINPSMLAKYREAFKPSRAKDDPTDAELALDLLLRHPDRFSALNPQSADMRSLLSLIEQRRELVGDKIRFTNRLTHALKQYYPQALEWFEDIDTIQFCDFLTRWPTLPAAKRARRTTLEDFFHAHNCRRAQLIERRLASIRGAMPMTDDPGVVAPNRLLALMLVAQLRTVLAAIDVFDKEIARIARTLPDFDLFDSLPGAGPHLTPRLLAAFGEQRDRYNGAEELQKYSGIAPVTERSGKKRWVHWRWQCPTFLRQTFVEWAGQTINKSSWAGAYYRQQRAKGSSYQAAVRALAFKWIRILYRCWQTGTRYDEELYLNALKRRGSPLIGHLEARPDTKLNR

SEQ ID NO: 465842 - protein, 348 aa, unidentified
MRFYTQQHRYSCGIDLHARSMYGCIVDAVGTIVVHKDLGAAPASFLRVIAPSRDDLVVAVECIFTWYWLADLCAREGIHFVLGHALYMKAIHGGKAKNDKIDSHKIAVLLRGGMLPTAYVYPAAMRATRDLLRRRCHLVRQRGELLAHIQNTTSQYNLPALGKKIAYKANRVGVAERFPDPAVRASIALDLALIDHYDALLTAVELSIVRTAKQHDAQAFYRLRSVPGIGKILALVILYEVHDITRFPRVQDFASYCRLVKCAKESAGKRLGSSGKKIGNAHLKWAFSEAAVLFLRQNLTGQRYFARLERKHGKGKALTVLAHKLARAVYHMLTRAQAFDLERFVTAH

SEQ ID NO: 465843 - protein, 418 aa, unidentified
MRKIRNKKRIFNEKTILVTVDIGKEYNYGYIRCYDGTEVAPFKFHNTYGGFTIFWHAIESIQRETHVPDIIIGFESTGCYGIPLIHFLHDKPVTLVYVNPKHTKKVKEISDNSPNKHDKKDPKVIADIIELGNWLRVVVPRGVAAELRELVHDRDDELKLLTELYNKLHAHVFKIFPEFQRVFTHLDTKTAHYLLTHYPTPEAIADLGVEKLAAIIRHQSRGRMPQERAEQLYQYALTSVGIKEGQHCIADRIHRLLHIIEEHEQWVAIYEQRIAHVLSRVPESHLMLSIKGVGPITAAGLIGEIGNFHEFANYAELEKFVGLNLYEISSGKHRGHKRIAKRGRPLARKLLFFAAINVVRQGGIYHEQYQSYVARGMKKIKALTAISRKLLRLIYALVHHQCEFDLQYFQKQHARNAA

SEQ ID NO: 465844 - protein, 433 aa, unidentified
MQDVHDEPLFAERVAGLDIAKAEVEVTIRVPSDTQPGRRQQEIRTFATTRRELDALAGWLRSWGVTKAGMEATGDYWKPVFFLLESRGLDCDLYNAAQVKALPGRPKTDRADSIWLAKITERGMISSSFVPPEPIRRLRTCTRYRRHLTQAPAAEKQRVEKLLEDGHLKLSSVISDIHGVSGRDMLDAIAAGQRDPRALAQLARGTMRGKIRRLEEALDCSFFTDEHAAVLAMMLTTIDYYTAQIEQLTAKIEVLIEPYLHQVGQLDEIDGIGAICAQDIIAEIGTDMTVFPTASHLVSWARWSPQVKQSAGKRKGSNATGRGNPYLGAALGESTASAGRTQSFLGAKYRRLSRRMPKKKALVATGNSMLTIMHALLSDPDVRYTDLGADYYEARTHTRRQARNHVKSLERLGYQVTIQALNPDTGEPLAAAT

SEQ ID NO: 465845 - protein, 374 aa, unidentified
MSKTENGRLCVGVDLHKTQFTVCAIDEEGEYLLERRYPTTEEGYEVFSQEMHSREEEGYSIELAVETTGNARYFKNRMEKEYFAVKVVNTNRFKVITLSTKKTDANDAATLAYYLMKEMLPEANLCSQTSEEIRRMLKTRTILVQSTVKIKNQIHGMMLGYGIETKAAQFQSKKKRQELMNDLADHEYSAFTASSLKVMLQIIDDLSEEIKRVEAQLAEMVKKNEDVELLMSIPGVGINTATTIAAYTENLERFDGNYKRFASYIGIVPSVHNSNETKHLGRITKHGPQELRTAFVQAALGMVRLNKVTSEWRLIKDYHRKKEDKGSGRAIIALARKISRIVFVMLSKRETFNPDLMRITEQNFQKQPKSIDFL

SEQ ID NO: 465846 - protein, 366 aa, unidentified
MKKSSTVAKRGNEIFRKPKLTIGLDLGDRTSHYCILDEAGNVILERSLPTTPKGIHQTFSKMPRSRIALETGTHSPWVSRQLTQLGHEVIVAHARNVRLIGESSRKDDQLDARTLARLARIDPGLLGPVRHRSAKAQIHLTAIRARAALVSTRTALVNAARGLTKSYGERLRKCGTRQMNREIAQGLSQELRDALEPLLEEIESLNERIAEYDRRIEQIAKEGYPEVALLQQVKGVGTLIALTYVLTLDDPHRFRRSRDAGCFLGLRPGRRNSGRSEPQLHISKEGDRYLRTLMVQGAHYILGPFGQDSDLRRWGLKLAERGGKNAKKRAVIAVARKLAVLLHKLWVSGEVYEPLRNNHQVVSVVA

SEQ ID NO: 465847 - protein, 366 aa, unidentified
MEVTTIGIDLAKSVFAVSGADSRGRVVIRRQLRRAQVLGFMRGLPRCVVGMEATGGAQYWARQFNALGHEVRLMSPALVMPYRKGNKTDRNDADAILEAVSRPSMRFVMVKSVAQQDLLALHRVRAQLVKSRTALCNQLRGLLRERGVAVRMGVAALKRSLPAALADESSELSGEMRELLSEMSQWLRTLEQRIASCEARITRKFKHDERCVRLAEVPGVGPLTATALVAAVGNAQRFKNGRELSAYLGLVPRQHSSGGKTVLLGITKRGDRYLRTLLIHGARSALRQCKLKGDARSDWARRISAARGPNVAAVAMANKNARILWALLSRGDRYRSSRVLTRAVLRPGSPPPVKRARGAKLRVAKD

SEQ ID NO: 465848 - protein, 412 aa, unidentified
METLVERGCGLDVHQATVVACLLIVRKDGKVEKQVRTFGTATRELLSMREWLLSQGCTHVAMESTGVYWKPVYAILEGAFQIVVANAQHVKKVPGRKTDVKDAEWIADLLCHGLLRSSFVPPKPIRELRDLTRYRRKLVESQVAERNRLLKVLETANIKLASVATDVFGTSGRLMLRALIEGKATPQEMAELAKRKLRSKIPQLQLGLEGRLEDHHRFLLKLPLDRLERVEGDLAVLEQHIQEKLAPYAAQLALLDEIPGVDWTLAVVIIAELGVDMSVFQSVSQLASWAGVCPGNNQSAGKRKSSRIPKGNVYLKTALVEAAQSAAKTKGTYLRDKFHRLKARRGYKRAAVAIGHKILVSIYHMVSQNVSYNDLGDLYLDKLNKHHLTRNLVHRLERLGYSVTLEPQQKAA

SEQ ID NO: 465849 - protein, 387 aa, unidentified
MPQPNDLSRSLVALDQNSTIIAVIEMSQSSWLVAGMLPGIERQPRKKLEPSPERLLGLLHRWRYEAVRAGRTITRIALAFEAGRDGFWLARWLAARGIEAHVIHASSVAVSREHRRAKTDRLDTELLKRGFLGWLRGERGHCSMARVPTIAEEDAKRPNRERDSLVGERTRIVNRIKSTLARLGIRNFKPILRKAAERLATVHTPEGMPLPPNTLAELQRDMARLGFVVSQIREIEDARQKRLEQQSETGPHAMVRLLARIVGVGVETADMLVHELLSRPMRDRRAVARYAGLTGSPDESGALRREQGLARAGNARVRRGMIQLAWRFLMFQKESALALWYRARTADSRSGTRKTMIVALARKLVIALWRFVTTGEPLEGVVLRPAS

SEQ ID NO: 465850 - protein, 369 aa, unidentified
MNITTFVGLDVHARSIKAVALDAMTGEVRSATFGYDAAEVAGWVSSVDPSAKCVYESGVTGFDLQKRLSSMGIDCVVGAVSKMIKPSADRRRKNDRNDAEFLARMLSVGNVVEVCVPDDECEAARDLTRALDDAREDLKRCKQRLSKFLLRHGLVFSETNAKGQRKKNWTAAHWAWIRSISFPDKADDEVLAYYIDAARQAMEDKARLERLVEAEASKPRWKKRVDSVRCLKGIDVTSAADLVFEAGEFSRFKSARSFAAWIGLTPSEHSSGESVRQGGITKAGNKHLRRVLVESAWHYLGCSPHSKDLAKGQAPDPGARRHAAKGVRRLVGRRAAMLERGVHKNKANVATARELACWCWAIGRMVENG

SEQ ID NO: 465851 - protein, 401 aa, unidentified
MAHVVGLDWGGTSHAVCVIDKESGAVVDRFEAVHDRKGLAEMIRRLARVAPSADLPVSIERPSGLIVDVLVEAGHSVVPIHPNAVKAARPRYRAAGGKDDKGDAYLLADLLRTDGHRFRSLSPLSDEMRALRALVRGRDDLVATRVALANQLRSLLEGFWPGAAAIFADIDSPIALAFLGKYPTPQSAARLGPKRMASFMAQHRYCGRRSAEQLLERLRSAPTGLAGEDEAEAKGEIVRAHLAALAPLVAQIADISARIRHAVAQAPGGDIVMSFPRAGQICAAQILAEIGDDPARFQTADQLAAEAGLCPVTHQSGKSRGVGFRWACNRRLRKALTCFADNSRHACPWAADVYKKARARGCRHPHAIRILGRAWVRVLWRAWKSGTKYDPDLHKAAKAIA

SEQ ID NO: 465852 - protein, 353 aa, unidentified
MAVAEGERGGEVRFHGTIPNEDDAVRGMVKRLAGPGITLDFCYEAGPCGYGLQRLLTRQGQPCIVISPSMMPRRPGDQIKTDRRDAMTLARLLRAGELAPIWVPDEAHEAIRDLIRARRSAQEDTSAAKQSVRSFLLRHDRRFSGKSAWTKTYWRWLSEQRFDFAHQQLAFEEAKRRVLEAQARTARLEAALVEAVDGWRFAPLVRSLQALRGVRLIVAATLVAEVGDLTRFQNPKQLMAYLGLVPSEYSSGARVQRGRITRAGNAHARTMLVEAGWTYRLPAREERRYRDRVADLPEDIQAIGWKAQVRLCQRFRRLSATGKPQPKVNTAIARELVGFAWDIARRVQPVVAV

SEQ ID NO: 465853 - protein, 364 aa, unidentified
MSEGICFAGLDVHARKTAAAAVQLGSGEVWKAQIAGSPTAAIEWLQTLPGPVRAVYEAGPTGFGLARAARATGIELMVCSPGAIPRQPGDRIKTDTRDALKLARLHAAGQLRAVTVPSPELEALRDLVRAREDLRGDLMAARHRISKLLLRRGRVYGGPGHPWESQRHAAWLSAIDLGDPLARVVLGEYLACHEVLLARRDRLEHLIAEQARDEQWAALVGRLRCMRGIDTLTAVGLIAEIGDFAAFSHPKQLASFLGLVPAEHSTGEKRKQGSITKAGSSHARRLLIEAAWHYRRQPAVSLTLRRRQDGQPPAAIDAAWRAQLRLSARWAHLDARRAKRRTTVAVAVARELACFVWEIARQAD

SEQ ID NO: 465854 - protein, 424 aa, unidentified
MTKIIVAQDAPVLVAIDIAKARHEVLIAIPDKKRRRRLTVLNELADFNCLATALKEYGRPVRVAFEATGNYHRALAYHLATSGFEVKLVSSVALARTREALNHSWDKNDPKDAQVILHMMEIGNEQYYHDPLVCGTNDIQELSKTHDIVSKSKTELWHRVLTHYLPLYFPEAERFYRSSRSDWFFAFLERYPSPHLITAMGKAAFTADAWDVIGRKVAKERLLADIYETAKSSVGLPFAPDSDAIRMFRLVLGEGRSLIAQRNQIEDRAVALLKDLPDYQLLTSIPGIGPINALTILAEAGDLRRFGHHRQFLKFCGMHCPAGDCEAICRKGLGNHQSGTFRGQTKLSKYGNARLRRTLWMAGQVAILQRTNSFRDKFERYIAKDRHNSHLRRKAYTAIAATLSGHCCAIPCRAVNGPHSSRDH

SEQ ID NO: 465855 - protein, 349 aa, unidentified
MKITTSGIDVAKSVFQVHGVDEKGNVVLRRQIRRTQVLLFFSKLEPCLIGMEACASSHYWARKLTALGHTVRLMAPQFVKPYRKNDKNDGNDAEAICEAVQRPSMRFVPVKSPEQQAELAVHRVRRRLMGERTALINQLRGLLGEYGLVLAQGANHVRSKLPALLEDCSESLPPLAVELFRDLYEELVQLEQRIDTYDRRIERLYRANPVCQRLGQQEGIGALTATAFVATVAHAAQFKNGRQCAAWLGLVPKQDSTGGKTRLLGISKRGDIYLRTLLVHGARSAMRHTPKRNDPKSRWVEQLRKRRGENIAAVALAAKHARILWALMVRGEPSAPATHGIDPLEQATV

SEQ ID NO: 465856 - protein, 359 aa, unidentified
MFYGIDLHTDSFKTAILGENTEKITVKTVNLKTDAFTQFLNTLTEEDYMVVEASTNTFWFVEQVEKRVKEVYVVDPFKFSIIANSRKKTDKIDATKLAKKLKYYVCYDQSADEFPTIYIPCKDVNELRSMFTTYEILKKQACMTKNRIRSLFRQNGIFNLAGENLSYNHVQEKIKGLQVSASLSAQLRILLSLLNTQEDERENIKAEILIKGKVFYREIKILTSIRGVSPFLAIAIMSDIADINRFPNAKKLCSYLRTAPRIDASGSKEHVGKVNKQSRTLTASLMTESIKHFIDSSDRMNKFYFDKRKGKSAGKVRVAVMRKVIVIIYNMLKDEKLYYYKDEKNHAAKLKQYESILAA

SEQ ID NO: 465857 - protein, 334 aa, unidentified
MEKITTLGIDLAKSVFSLHGVDGVGRVVLRRTVRRDQLLGVVASLSPCLIGMEACSGAHEWGRRFQGLGHTVRLMAPKFVAPYRKSGKNDGNDAEAICEAVTRPSMRFVPVKSLEQQALLAMHRVRQGFVVERTATINRLRGLLTEFGVVLPLRSVTVRRQAAQAAENLPDLARRAIGDLLDELRSLDERIGGYDREIEAQAKLCEPAQRLMKIRGIGPTTALAIVATVGNAREFKNGRQFAAWIGLTPSQYSTGGKARLGHISKRGDAYLRNLLVQGARSVLNSAGRHQDRMSRWVIELQPRRGYYRTLVAIANKNARIAWALLAKGESVRSA

SEQ ID NO: 465858 - protein, 343 aa, unidentified
MHYIGLDVHKKSIAYCIKQADGTILREGSIVASRPDLDRWAATLPQPWTGAMEATLFSDWIYDHLHPQAADLRMGHPAKMRAITAGKKKSDTLDARTICDLLRCDLLPPAYVLPLEIRELRRVLRYRNLLVRAAVQMHNKIAGLLLEMGIAYETPRLHRKRYFHQLMDQPQQPIPESARHLLAFSRTQYETLHRMEQQLLDGLAAHPDIAERVERLMEIPGVGPVLALTWALEVGPVERLGNISRAISFCGLCSALRESAGQQKRGPLSKQRNAHLQRVLIEAAHLAPRWNPLLAEIKQKELMRGNRNRATLAVARKLVAFLMGADRGHQPRCPAPATAGRIS

SEQ ID NO: 465859 - protein, 438 aa, unidentified
MKVLHEHVAGIDVHKDMIKVAIRSPGEKPWTRKTEVLEFRTFYGVLQEMARELRRRGVTHVAMEASGVYTEPVYHALCEQDFTEVIVVNPAHVKALRGHKTDARDCARIAELLECGLLHGSFIPSAEQKEVRDLTRYRMKTVQARTSEIQRLHKALESAGIKLGSVLSDITGVSGRLMIDALIDGERRAQVMADLAKGTLRQAGKQADLSMALAARFTDHHAMLCRLHRDQIKLADHAIAGLDAQIADRAGRWPRELGLLDSVPGFGDVVSAAWLAEIGPAPHRWFPSHGKLASWVTLCPGNNISARKRKHGRTGDAGTYIKPVLVQAAWAAIRVRGRLQARYRRLVRRFGGDKNPGAKKKAIIAIAHTLLKIAYQVLKTGQPYADLGADFYTRRQSPEQQQAYLERRLQKLHPGCTVTITISPPPGSPPPSAPAEAA

SEQ ID NO: 465860 - protein, 367 aa, unidentified
MKESIIWVGMDVHARSVTIAEATDQGDPVVREVANDARRMKQLFTELAKRGQVRACYEAGPCGFELQRTLLAAGVSCDVIAPSLIPSRPGDRIKTDRRDAIRLLRLYRAGELTSVVVPSEEQEAARDLLRARDDLRRARTTARLQLSTFLARHGRHYRAGTHWTLKHWAWVRSQRFEIASLTSTFVHYVDQLDYFDQRTAELDGEIAKLAKDPLFEDGVARLTCLRGISVLSAMVLLTELGDLRRFPHPRQLMAYVGIVPGERSSGETRRRTGITKTGNAHVRRILVEAAWSYRSASTTLGPRAIARMRGQPPEFVAISRRATTRLARRHGRMTARSKNPQVIAVAIARELCAFVWALATTEVKSAA

SEQ ID NO: 465861 - protein, 351 aa, unidentified
MIIIGVDYHPSFQQIAFLDQETGECGERPLNHSDGEAEKFYRELKPRGVSVRVGMEATGHSRWFERLLAELGIETWIGDAAKIKRQRIRKQKTDREDARLLLKLLLENRFPRIWVPSPENRDLRQLLWHRHRLVQMRTRIMNQLQAVAMNEGYRWKKKLFSAQGRALLENLWLAPWASRRRKELLELLDQLDPKIAELTAAAEREAKKQPDVVRLMTHPGVGPLTALAFVLIIGTTVRFRCGKQIGSYTGLIPCEDSSARKQRLGHISKQANTLLRFLLVEAAQAAARCNPDWRRRYVHLAMRRHKNIAKAAMARKLAVRLYWMWRNGWDYSQLVEFGSNAGKLATGHGVN

SEQ ID NO: 465862 - protein, 341 aa, unidentified
MTILGGLDIHRAQLTYDYVDLITGEVHGGRITPADRGNLRVWLQRFAGVGDVAFALEGCTGWRYVVEELVQAGVTAHVAEPAETAALRGKKSRAKTDRADARHLRQLLVDGRVPESWIPPPAVLDARVLVRLYKDLVDERTGWLQRVHATLFHHGVPAVGASLVTAAGRDQLAAALLPAAGRCAVDTGMRQVERLSSEMLPLRRQIVAVAAQQPSCQALQQHYGIGPLLAVAIWEELGDCRRFTSSDDAVRHAGLDVTVWSSDGKRTRGHLAKQGPPVLRWALYEAAVYAARPSSPDYAHYRRLRQRLEAHIALITIARKLARRCYHTLRNTGDAAFAVAA

SEQ ID NO: 465863 - protein, 314 aa, unidentified
MSIQESKVYVGVDVASKHLDLFFPDTRKHERIANDAEQVKSLCTRLKSNSQYMVVMEASGGYESILCTQLGNHAISYAVVNARRVREFARSMGADAKTDEIDARMISQFAAVLKPIATEAQSDEERRHSALVTRRSQLVDLITQERNRLKQTWDAYAKKSVQKMLKHLEKELEAIDKLLVKMLRNDTKNKRKIEILQSAKGIGDVSTSVLLAHLPELGKLNREQIAKLVGVAPMNRDSGGTTGKRFIMGGRGNVRAILYMSTLVAIRHNTKIRAYYTHLKSQKKESKVAIVACMRKLITILNYLIKTDQVWTTQ

SEQ ID NO: 465864 - protein, 402 aa, unidentified
MGEAVVGYDSVDVFVGVDVGKGEHHAVALDKTGKRLFDKALPNDEKKLRELIGGLKEHGTVLFVVDQPNTVGALPVTVAYDEGVVVGYLPGLAMRRIADLHAGEAKTDARDAAIIAEAARTMPHALRSLNLVDEQVNELSALCGFDDDLATQITATSNRIRGFLTQIHPALERVLGLHLDHRAVVDLIQRYPSPAALRAAGETRLASRLVKLAPRLGPRLATEIVRALSEQTVVVPGTSAAATVLPKLAEQLATLRRQRDEIALEVERLLEAHPLYQVLTSMPGVGVRTAARLITELSGKDFASAGHLAAYAGLAPVTRRSGSSIRGEHSSRRGNKTLKRALYLSAFAALGDPTSRAYYEGKKAQGKRHTQALIALARRRCDVLFAMMRDGTLYQEPMANAA

SEQ ID NO: 465865 - protein, 457 aa, unidentified
MGRKGKRMAGIEEAHPFTGMSQVNPNAAGVDIGAVEIVVCVSGDENTQIVRAFGNYTVDLQAIGRWLKEYQVETVAMESTGVYWIPLFEELERQGFECLLISSRSLRRVAGRKSDIIDAQWIQTLHGYGLLESSFRPEAELIGLRTLLRHRSQLVEHRSPHILHMQKALLQMNVQLSQAVSDVTGVTGQTIIRAILAGECDPQELASLREPGCKKSAEEIGKALTGTWREEHLFVLKQSMEMYVFYTGQMRACDEEIERVYGLTRPDWEAGEVQPLSERKRNSHSKNKPQNPEGIRKHLKRISGVDLSVLDGFGVSLAQTVIMEVGTDMSKFPSEKHFCSWLGLAPKHEISGGKVLKNKTLKTKNRAGQAFRMAAQSVKQADCVFGVMYRRLKARLGPAQATVATAHAIARVAYRMLKYKVEYETISVEEYEKKYKDQQFKYMRKKAAKLGYQLVPA

SEQ ID NO: 465866 - protein, 401 aa, unidentified
MASVRDNATRIKRFRELKATLRTHRQRLLVGIDVAQADDVVHLRHAHTRVVVPTLTIPNTPRGFTALWARIQQAQRATGCREVVCGLEPTGTYHQAIATFLEAQGADVVLVSSSVAYWNRRTQDGTWDKHDPKDAANCADLLEQGKVLFYSQPTGPLAELRHLVRCLRRARSELAACKARWRTTLRPALAPMGAPLPPRLWAELPAVLQAWERAAPGRPAVPKGRLPLGLATACADLGAQVTAVQARIVALEAACTPVAERLPASALLRSIPGIGPTVGAILLAEIGDIAWFTKFSQLRKLAGLDIIRIQSGQFAGQARISKCGRGLLRWALYQAAVGAARTVAGRAHLAALKAKRRGDRYAGFKAVVELAAKVLRIVWGVWRSGTPYDPMRTGGLQRQAR

SEQ ID NO: 465867 - protein, 464 aa, unidentified
MKPIYRRCCGIDVHKKSLSVCVLPPEGQQGMVKRERFGTFLRDLKRLRAWLKHCQVTEIAMESTGQYWRPVWNVLEGHVANLVLLNPAHVKGLRGRKTDRRDAEWLARLHEREHLRGSFIPSVDLREMRELTRTRVHLLEDCNRMKNRIAQVCEAGNIKISSVASDLFGTSGRRMLAALIEGKHRAGWIADYACTRLRGKRDQLEMALEGTLTGHQKALLTRLIRQLNAQETEVTSLTVEIESRVVVWNAIVDRLVEIPGIERVSAWTILAEIGTDMSVFPDARHLASWAAVCPGNRESGGKRMSGKTRKGNVYLRRILCQAAWAATRKKGSYLGAFYRRVRARRGHQKAIMALAHHMLTVIYHMLRDNQPYQEPGATYYEEKRKPEITRRMVQRLERLGYQVTLEVRLTAGEIHEFSAATPQHSAAPQPERRRGRPCKCDERGLACIHRTSARAQETAEIIPE

SEQ ID NO: 465868 - protein, 347 aa, unidentified
MDYYAGIDVSLEASSVCIVDASGKIMREAKVLSEPENLIGWFQGLGLELTRIGLEAGPLSQWLYAAMKKEGLAVELLETRHVHDAFKSMPVKSDRNDARGIAQLMRLGWFRPVHCKSMPAQEVRALLTARKLVQSKLFDIEMSLRGILRGFGLKIGRTNPNRFGLRVEELVSGHPTLEIIGKALTAAHEVLLRELDGFEKRVRRLARQDERVRLVMSAPGVGPIVGLTYVAAIDDPARFKSSKQVGPHFGLTPKKYQSGETDYSGRISKVGDASVRTALYEAANVILTKPLKGATSLKSWGMKLAKRAGMAKAKVALARKLGVILHRIWVDGTRFADRAGSLKPAAA

SEQ ID NO: 465869 - protein, 342 aa, unidentified
MTTIKYCVGVDIASGTFTAAVGEMPWKVFLKAQTFENTEDGYQTLLEWFAQHNLSVSETVVCMEATGVYSEGLAYFLHAKGYRVAVQSPLEVKRTFKPYGPKSDAVDSLQIAEYACRHTDKLSFWKPRSEILEQVKALLAVREQFVAQNTAHKNALKAIQRKVVRTPFAEQAYLQLIEQVKKQITAIDLEVRRLIESNPTFKEMLLLLLSVPGVGLLLAAHFILLAQVSLEYKVLASFLGICPNEHSSGTSVFKHATSRHFGPPAIRKLLYLAACSICTHRPQFGLYLARKTKQGKPARLVLNNVENKLVRIMCAVLQSKTAFIENYHSVQPLVFQKALTRS

SEQ ID NO: 465870 - protein, 357 aa, unidentified
MQRNKLSFKGQNIYVGIDVHLKTWHVTTVTESGYKYSFAQHSDARELFDRLNRKFPDAHFLSAYEAGFCGFSVHYALTELGFENIVVHAADIPTTGKEKAMKTDAVDSEKIAWALKRGELKGIYVKDKQYMDDTNLMRLRQRFVADLSRQKNRTKHLLYTQGVTYPECFSKNSTHWSRNFIKWLREEVVLLSGEKRALMHLCDQVEDTRRAILAITREICRLSTTDRYRGNYELLTSVPGFGLILSMSMLTELDNDVTRFPNECSFVSMLGLIPMCHDSGEKKAVGEKTNRGNKQLGPLIIEASWVAIQKDKGLGSYYCNCCQRMKPHKAIIMVARKLACRAYAVLKTKTKYKYEQS

SEQ ID NO: 465871 - protein, 344 aa, unidentified
MEITTIGLDLAKNVFQVHGINSDSEVAVKKALRRSQVRRFFEQLDPCLVGIEACGTSHYWAREISKLGHEVRLMPPAYVKPYVKRGKSDAGDAEAICEAVRRPTMRYVAIKSADQQAALALHRTRDLFVKQRTQLVNMIRGLLAEFGIEIRRGIEQALMLAKRIAVHEGPDIPPLAAKMIAGLAGQVLDLQARLGEIERELLAWHRSNDIAKRLATIPGIGTVCATALAASVTDPHQFRSGRQFAAWLGLTPLQHSSGGKERLGRISKMGDKYLRRLLVVGMTSLIRRAKYKPEAVDPWLTELLSRKPARLVTVALANKAARVAWAIMVRGGVYRMPAAVTTSV

SEQ ID NO: 465872 - protein, 359 aa, unidentified
MTAMSIVAHSHAFVVGVDTHARNHVYAIIAATTGELVATRDFPTTGAGINRAMAWVARRTGADLAALWVIEGPASYGAILAGTVAAKGYPVVEAARMDARAHHGVGKSDELDAQRIARAVMPLEEKQLRRPRLNEGIRAALRVLVSARDSMTGERTRAVNALTALVRVNELGLDARKALTGEQVTEVSRWRAREEELGLSVARTEAVRLAKRIGELDKEVADNNNKITNLVKVSEAAPLLEVKGFGAITAATCLTVWSHRGRVHSEAAYASLAGVNPIPASSGNTVRHRLNRGGDRALNSALHMVAITRITHDEETRKYVQKREAEGLSTKEIRRCIKRYLARRVYRIFNSQAEALTAG

SEQ ID NO: 465873 - protein, 359 aa, unidentified
MQRNKISFKGQKIFVGIDVHKTTWEVAVLTESGLLRRHSQESSAKVLFDFLRKHYPDGEYHTVYESGFSGFATYYALKEFGIECTITHAADVPTTQYEEVMKTDRIDAEKLARALKNGEIKRPVYIREKDNIDDRAVIRIRKTIQKQLSGYKARVKHMLHCNGVEIPECYSKPSQYWSRAFITWLMKDVKLLSSTRRSLDLLIRQVEVIRGTLLEATRELRKLSQTERYKHRFELLMTIPGIGQHVSMCILTEVWDVDRFPNEKAFAHAMGLVPTCHDSGPHKSNGEQTFRGNRYLGPMIIEACWVAIHKDMGLGACYAYHKQRSNPQKAIVRVARRMSNIIYSVLKNDKAYEPYQWDK

SEQ ID NO: 465874 - protein, 426 aa, unidentified
MKSTTQNAKIAVISEKTLVIGIDVGSETHYARAFDWRGIEFSKKPLMFSNDEEGFETFRIWIEELKTKHGMEKVIPGMEPTGHYWFNLGRFLQDKGMSPVHVNPHHVKKSKEMDDNDPSKNDRKDPKVIAGLVREGRYFRPYIPDGVYAEIRALSGLQVLAQNEIIRLKNRIARWFSIYFPNYKDVYGNIAAVSGLMILKVAPLPEDIIKLGVEGVNRIWRDAKLRGAGLKRAKTLVAAAEHSIGCRSAQEAARIEFQILLSDYELQTNRLKELMALIEKKITEVPYIDKLLEIRGVGLKTVVGFVAEVGDIRRFDDPKQLQKLAGFSIVKNESGKHKGESHISYRGRKRLRYVLYEAAVSVVAHNPEFKSIHQYYTTRNGNPLKKMQSLIAVACKLTRVFYLILRTGATYDATKMMGDIRRPAVA

SEQ ID NO: 465875 - protein, 337 aa, unidentified
MKRYLGVDLHRTQFVVCTRWENGEQEIRQWRIGELPKFVEQLCNEDQIAVEAMGTTARFYDAVAGRVERVMVVNPHQFKVISESVKKTDRNDAQALALYLEKDMLPEVRMKPKQNRELMHLAETRDLLVKQRSALKGKINNLLAMQGIELKREALSSKIALARVLALPVSGMVQLELRVLVEQVRALTESIGELDERLEEEGQQLPGYENLTSIKGIGSLSATVLLTVIGKISDFADENKLAAYLGLVPRIANSNESERSGRITKQGNKLARTALVQCGLVAKRYSPYLSRFYDRIKQRRGGGKAKIALARKLVKIVYDTLKNQWVFEDFPSFTLAA

SEQ ID NO: 465876 - protein, 345 aa, unidentified
MEFSRIIAIDLAKSVFQICVLEQRNQVVCVKTLRRGGLTCWLARQKPSLVALEACGSAHHWARVAQADGHQAMIIPPRQVASYRQGHKTDANDALAIAIAAQQPKLKTVGVKTLEQQSVQTMKRVQEHMSDQLTATGNALRALIAEFGITVPKGAKALATRVPAILDDQDDALPTDVRATLRMLYQQWRQQRTALKLADMSLTQRARELEPCTRLRALEGIGPKNAVGLYIRIGNGAHFKNGREAAACTGLTPKQSSTGGKVRLGSIGKFKGDQRLRSSLITGAMSVVNALKKRAPRNAKEQWLKALIERRGPGRAAVALANKNVRTAWAMLRTNSQYQPAPLSH

SEQ ID NO: 465877 - protein, 409 aa, unidentified
MQECNAATHRIETASSPVALSAASGKGAAKQYAAYIGLDVHKETIAVAVADPGRGEPIYRGEIANTPKKVEKLIAQLSAAYDGGLLLFCYEAGPCGYGLYRQLIASGHDCQVVAPSLIPKKAGERIKTDRRDALKLARLLRSGDLTAVWVPDREQERMRDLSRARDDLKAQERKARQQLNAFLLRHGQHWPKGKSRWTPAHENWLAGLKLDDPWQQIVLETYIDAERAAGERVAQLTDQLMRALPQWSLAPVVDSLVALRGIDKLAAIVLLAELGDISRFDSPKQLMAFLGLVPSEHSTGGRRRQGAITLTGNSHARRMLVESAWSYRFPARQTKHLKSKAANASPAAKQIAWKAQVRLCGRYRSMTRAGKNTKLVCVAIARELAGFLWDIVRQEMPRLTPMQAPATSA

SEQ ID NO: 465878 - protein, 372 aa, unidentified
MGHHTEAFVGIDTSKSRNAVAIADSGRGGEVRYLGEFPATEAAIRKLVAKLAAKCCHLTFCYEAGPTGYGLYRLLKSLGHDCLVVAPSLVPKKAGDRVKTNRRDALSLAKLLRAGELTAVWVPDERHEAMRDLSRARLAVKKDLQGKRQQISSLMLRLGRIYPGKTTWGRAHMRWLMEQKFEHREQRIAFEELLEGIRQESERMERLEDAIREVVPDWSLAEVVAALQAMRGIDLIAAVGVLAEIGDLSRFQNPRELMGYLGLVPTEDSTGDKVKRGGITKAGNGRARRILVEAAWSYRYPPRVSRDKQPKVEAAPRRAREIAWKAQTRLCGRFRSLERKGKRRTVIVTAMARELSAFIWAINRELLPPRQA

SEQ ID NO: 465879 - protein, 371 aa, unidentified
MKSILSVGMDVHKNSFSLCAYDGYTGEIVSESTFASDVKLVIKFVETLKSRYENDVEIKCGYEAGCLGYSLYKSLTARGVDCVILAPTTMQVSAKNKMVKNDRMDALNIAKNLASGSYKSVYVPDEEDVEIKEYIRMIHDFKKELKRVKQEICAFVLRHGYQYDGKSKWTIRYMNWIRELEMSEIQRETLNEYIAEMENLNDKINRFMNRIDEMYQSERYHEKVSKLRCFKGIETFAAMTIQVETADFERFPSAKAYASYTGLTTGEHSSGDKNNRIGITKQGNTVIRKTLVECAQSLVKGNVYAKKSQGLKSRQKGMDVNIIAYADKATERLKKKYQKLIERNVPRNKAIVAVARELACFIWGMETGNIH

SEQ ID NO: 465880 - protein, 317 aa, unidentified
MTANQPFVGIDVAKDRLDLDTLPHSKAWHTTNDTKGIAQLCQRLRALEPQLIVVEATGGYERVLSAALAADGLPVAVVNPRQVRHFARATGQLAKTDAIDAQVLALFAERIRPQVRPLPEAEQQTMAALVARRRQLIEMLQAEKNRLPMAHKAVQNELRAHIRFLEKRLDNGNRALKETIEASPIWRTKEDLLRSTPGVGPVLSATLLAELPELGQLSGREIAALVGVAPFNRDSGQFRGQRCIWGGRVSVRCALYMATLVAVRHNPVLRPFYEQLLARGKTKKVALVACMRKLLVILNAMMKTQTHWNPDFCCKST

SEQ ID NO: 465881 - protein, 349 aa, unidentified
MIVVGIDPHKQTHTAVAVDAATGEVIGELTVRARTSGFERLVGWARDLDAERLFAVEDGRHVSGHLERHLIARGERSVRVPPRMMAEARRTDRVAGKSDPVDATAVARAALRHPDLPEATLAGPERQIGLLVAHREMLINERTDRICKLRWLLHDIDPDLAPALRTLGRFKTLDRLVQALGTMQPTVEVEICLDLLARCREITVRANELERRIDALAKTHAPALLQIPGCASLTAAKIVAETAQVARFPSEGHFARYAGTAPIPASSGARHRQRFNRRGNRQLNAAVHRIAVTQIRMHDPAKDYLARKRAEGKTKTESIRALKRHITRVVFKTMTSTTEPAERLTAPAA

SEQ ID NO: 465882 - protein, 350 aa, unidentified
MTIIGCDLHTRYQVVAWVDETGEIRTRRLEHAKGEAGKFYASLPRGAIVGIEATMPALWFERLLAECGHQLWVGHAAQIRASVVREQKADTRDAEHLLDLLLSGRFPRLWVPSREERDVRQLLVHRMKLVRTRTALKNQLHHLAISQGVCRGRKLWSGRGRAELEGLELLPWASRRRQELLELLEQLDGSLAELDQAVYAEAQKRPAAVRLMTHPGVGAVTALAMVLTLGPVERFPNRRKLVSYLGLNPREHSSGGHQRLGAISKQGNSLLRWLLVEAAQTAARLDPELRRVYHRLKFRRPSGVAKVAIARRLAVRLYWMLRARVDYAQLVRTSGSPSSAVAPTGSGSTV

SEQ ID NO: 465883 - protein, 317 aa, unidentified
MAQKGTIVGIDVAKEKIDAAIRFGAEASFANGAEGRRELRAWLQEHGVYKAVMEASGGYERSWAALLRGAGVEVVIADPNRVRHFAKSAGQLAKNDPIDARMIAWFGEVFGHASGQPHDEERQELDQMVTARMGIARLKEQIEGWGEHEQPKAVQKAHQALLKAVAIQLDKLEDIIAAKIDKTEPFAQRAEIIQSVPGLAGNAAAGLIAFLPELGLVDRQAASALLGVAPFDDDSGKRHGQRHIQGGRRKLRKLLFMPIVGAATQHNPVLKACYQRLIAKGKKAKVALIACMRKLIGILNTMIARGEKWDPAKHAIA

SEQ ID NO: 465884 - protein, 469 aa, unidentified
MDLLKLPIYTFYCEFLDMEERFMKKVFIGIDVGKFKNSISIIDTEGNPIIKKGLSIENDYYGFAKLEEQIDLIINNYGFTYDDCIAGVESTGHYWFNLRDYLKDIGIETVMIKTDSVKHRRALEEGQKGKNDTLDARVIASCLRNGNYVYIRDNERELRALQKLTRMRNDISDDLVALKNKIHRCIDICNPVFFKIFENLNSKTGVALIKLYPSPEDIINVDLDNIKRELGEIVDKPNMRMVSLYKEECEIWSGLIKEPSYAEKVEMIAYIDKFLLQNESKEHLDKQIKEIAKNIIPLYSEFEEIKGIPLIQLISVLSEIGDIRNFKNTRSILAFLGLSLKGNASGKYIGERKINKAGSRIVRKHLFNIMDTLVKHNEYFRIAYCYYKSYNHKNPTKKRSMQIAVMCKFVRVMYGMLKYNTPFDYKEMLKGYYFGDCNIKVFKEEFEGEKRSKKIENYKLAYSIFINYS

SEQ ID NO: 465885 - protein, 347 aa, unidentified
MLHVGLDLSRKRLDICAISDQGELVDELAAPFDEEGLCRLSERMAEKHAGRVRAVVESMNGARFVHDTLEAQGWDVLVADAQRVKGLAPLACKTDKIDARVLAELSFRDLVPAIWLPDPQVRRERELARFRLHLVRHRSSLKNRIHSTLITFGKPCPVSDLFGVAGRKLLERLDVPEPWRENVEASVVLIDQLDRQIDAVASELKYVGADHPYVPLLVSAPGVGWLVGFSIACEIGDISRFSSPTKLCGYTGLCPRVIQSGESDRRGPISKHGPKYLRWALFEAALNACDHPLYKERYERTKKRLGRQRGPKVAQIELSRKLAEAIWHMLTRNQPFAPAGAPFRLAA

SEQ ID NO: 465886 - protein, 385 aa, unidentified
MTDQAEVSGFVAQNYEIFGGVDVDKHSMAVTFTDHTRLLNSLRLPYSSEQLLHYVHKHYPEQRVAFVYEAGPTGFGLYDDLTAKGYPCLVVAPSMVPTAPGQRVKTNRLDSKKLSEGLRGGQLRSIHVPSPIYRELRHLVQLRDTQVRQLTATKCRIKSLLLYEGMEFPAENGKWSERVLRELEAMPCSEAVRFKLDHLIATLYFHFNSGAVVQKQIRRFCEKDPELRQSVRLLTSIPGIGWIVATHLVARLGDWRQIDNVRQIAGFLGLVSSEHSTGDRENRGPITRTGDSRLRNKLIQSAWTAIRKDPELRVFYRRVYQRHPKKVAPRKAIVAVARKLTTRIYAVLKQQRPYEFRTDSSAAPLTAEETGGPRERLDAAQNEQP

SEQ ID NO: 465887 - protein, 349 aa, unidentified
MYIGVDTHKAAHVLVALDEQGRTLGIRDITNSPDGWGEALRWTQGWPGERVWGLENSGSWGKGLAQALLAQGEAVVCEVSPQRTAQYRRRGRTQDKTDYADALAIARLLVAEGEQLPRVQADDASTELRLLSDHRDNLLGERTRLINQLHDQMVQLDPAYKVNSGPLKQRRGILYCRDWTLAQPSGVASTRLLIVHQLATQILRLDDELTAITTEISARVQATQTPLLALRGVGEVTAARLIGELGSPPRIRSATALAALSGIAPVAVSSGGRTGYRLNRGGNRRLNRAIHIIALSQRRCEPRAQAYYAKKRAEGKTAREAMRCLKRRLVDVLYRTLCQDRGVPAASAA

SEQ ID NO: 465888 - protein, 456 aa, unidentified
MPDMKKDKQKEQKVVEMDAFEQINHNAAGVDVGAEEFYVAVPKGRDTESVRKFPTFTADIHRLADWLARCSVKTVAIESTGVYWIPLYEILEKRGFEVYLVNARHLKNVSGRKTDVLDCQWLQQLHTYGLLRASFRPSEQICAIRSLVRHRDMLVSYRSAHIQHMQKALNLMNVRLTNVLSDITGVTGMKIIRAILNGERNRETLASYRDAKCAKSEEEIEKSLEGNYKLEHLFVLKQALELFDFYDQQMKQCDQELEILYNEFEPPDQPGTPAPEKRQRKRRKNQPHFDLSESLYRMTGGIDLTKIDGLEALTVQEILSETGTDMSKWPTVKHFASWLCLAPNNKITGGKVKSSHTPHTKNRASNAFRIAAQSLMKSKSALGAYCRRMAALHDAPTAITATAHKLAKIFYFMLKRREAYRPLTTDYYEKEHRDKVVRSLQRRAATLGFRLETVTS

SEQ ID NO: 465889 - protein, 332 aa, unidentified
MKFSETIGIDISKSWIDARMHLARLERRFDNTIGGYKKLIKWVEKNLLLPKESILFAFEHTGLYSYGLSSFLSSGGYSFILIPGLELHRSMGIVRGKEDHIDATKIALFAYRRREEITPYQMPARIIDHLRHLLSLRDRLVVQRAGYQASLKESAHFLQKNQDPDFFQIHEKMIHYLSKQIDKIDLKLATTIQQDQNMNHLFEMICSIKGVGPQTAYYMIVLTHGFILFSEWRKFASYAGTAPFPYQSGTSIRGKTKVNHMANKKIKSLLHSCALSAILYNPEMKAYYNRRSESGKSKMSTLNIIRNKILARIFAVATRGTPYVDTHKYAAA

SEQ ID NO: 465890 - protein, 317 aa, unidentified
MKNNFVSIGIDISKDFLDICGLGKNFPERISNNINDITKLVDHLLKTRPDLILCEASGGYERLLHMIIEQSGLSLAIVNARQIRDFAKAKGVLAKTDKLDAKIIAQYGELFKPQAKQISRSQELTGYVNRRKQLVEMLKLEKQHLSKICDFRIKDECEQHIDIIKQRIEMLEAKIIAYIEDNQELSEKYQIITSCKGVGIVTASELIVNMPELGTANHSEIAALAGLAPFNCDSGNMRGMRRIKGGRGEVRKALYMATISAISNNNQDIKRFYDKLKQKGKASKVAIVACMRKLLIMLNSMLRDNRKWTQEYQVKSV

SEQ ID NO: 465891 - protein, 428 aa, unidentified
MYYTQNEKILQVGEEKIIVGIDVGSEKHYARAFDWRGMEYSKKAYVFTNDAEGFAGFFEWITGIMEKSGKETVMPAMEPTGHYWFDLAKFIQDNGMQPVLVNPLHVKRSKELDDHLPSKNDRKDPKTIAKLVIEGRYAYPYMPEGIYAELRNATVLRFQAEAELTRIKNRIQRWFAIYFPEYKDVYGSFSAVSSMMILKKAALPCDIIALGEEKINEIWREAKLRAVGKKRAKTLVEAARRSIGHTEGHETARFEITLLLEDYDRLQNRLEQIMELIETLVSKVPYAKKLMQIKGIGIKTVSGFIAEVGDVSRFNDPKQIQKLAGQAIVANSSGKHKGQSRISKRGRKRLRFLLFEAVLSLTATNPEFKEIHHYYTGRKTNPLKKKQSLMVLSNKLIRVFYAILKSGADYDPEKLLRDIRRPEELQAA

SEQ ID NO: 465892 - protein, 403 aa, unidentified
MEGPLISLDVSKGKSNYRFFENGTDRKGKKGVIRHDIRGFDSIRDEAEKMEERLQIKPSVIFESTGVYSDVVEKYFTDKGFDVYVISPLLSASMRKEGVRPAKNDSLDTLSIAKVFYSRDDLRKCSENDKKAERLREMSYELDMMNRRIRPMKCQFLRLLDKVWPCLDEVSDYSSRFMLDFIIAFGHPENIKTVKGVLSVIRKSEMGTAGRKDKIAQDLFDYCHTHLSAVSKDSSYVELLKRMAIELKAMAKKKSELIDRMAEEARNKDEFVRLLTIPAVAKTTALKIMARVGDISRFRNAEALVAYCGLDPRVYQSGKMTGEHRTITKKGDCILRSTLFLAVKLMVMLYPDTKVARFVAAKAKNGLSYKQAVVAGSAKLARIIYSMLTHHENYVEFNADIVA

SEQ ID NO: 465893 - protein, 431 aa, unidentified
MKNRTNERLDEINHTTLIMGVDIAKEMHLARFVDYRGREISKAVKIKNDRKGFEGIVTKIEETINLKKTQQAYTNVIIGMEPTGHYWKPLVEYLMQAGYRVVCVNPYHTKKAKELDDNSQTASDYKEALVIARLVKDGRYFNPYIPQEAYGELRVLTNARTSALRRAATIKNILTALMDEYFPELWTVWKYPLKSKAARQVMKKCPLPADILTLGIEGVLSEIKQAVRKTTGIKKAAQLYAAAAVSIGVGTGKESTRQRISMLIDELELLEKNISAIEQAMAHNLEATGYAEQMLSIKGIGVVTAASFLGEIGDPLRFQNARQIANYAGYNLIEDSSGKSKSGTCISKRGRSQLRSLLYKMAFVMVAQNPEMKTLHHYLTTRGKNPLKKKQSLVVISKKIITVIHSLIKKRAMYEPTLVMGKVRREMMNAA

SEQ ID NO: 465894 - protein, 360 aa, unidentified
MTTMTETRCRVTGGVDTHKDAHLATALDEVGRVLGTEAFPATLAGYRQLSRWLRSFGEVVAVGVEGTGSWGAGLARFLTAAGVAVIEVTRPNRQHRRRHGKSDPADAIGAARAVLSGEATGTPKAQTGTVEATRMLRVARRSAVKARTQAANQLHAVIDTAPADLRQRLGSVNTEQIVAVAARFHRRHPGTPAEAARLALRTLARRWEVLDDEITMLDAHLDELTAAVAPALRAINGVGPQNAAALLAAAGDNPDRLRSAASFAALCGTSPIDASSGRQQRHRLNRGGDRQANCALYYIVMSRLRWHQPTKNYMARRIAEGRTPKEVIRCLKRYVAIEVHRAITTDLGTRATSKPSRIAA

SEQ ID NO: 465895 - protein, 339 aa, unidentified
MRLYAGIDLHANSHYLGIIDEQGKVVFKHKMVNELRQTLSVLEPFRSELKGVVVESTFNWYWLVDGLMDHGYQVHLANPSAIQQYEGLKHSDDERDAIWLANLLRLGILPEGYIYPKQERPIRDLLRKRLQLVRHRTSHILSIQNIVSRSLGIRMRGNEVKGLDEEQVAELFREEHLYLAVRSSVGVMRYLGDKIKEIEGVVKGWVKLRKEFEKLLTLPGVGPILGLTIMLEVGDIGRFPEVGNYASYCRCVRSTRISNGKLKGEGNRKNGNKYLAWAYVEAAHFAIRDYSEVNRYYHRKAAGANKVVAIKAVSHKLARASYYIMRDQVAYDPNKLFHY

SEQ ID NO: 465896 - protein, 335 aa, unidentified
MRYVGLDVHQSMSAVCILDEHGKKEKQFIVRGRWTKLVEALQEIPRPFAVCYEASNGYGFLSDLFSRMCDKVVVAHPGQLRLIFRSKRKNDRVDAEKLAKLLFLDEVPPVYVPRLNIREWRDMITFRSHLVRDQTASKNRLRALLRTHGMEAPKGLWSRKGLAWLQQRTWPSEQAALRCDILLDELAHHRHRIKRVERHLASIAKIHPGVALAMTIPGVGIRTAEAMVAWIDQPARFAKNKCIGSYFGLVPCQDTSAGKERLGHITQQGPSLVRKLLTEASWQAIRRSPEVRRYFERVQRGDPKKRKKIALIATAHYLARVILAIGRAWNPALAA

SEQ ID NO: 465897 - protein, 445 aa, unidentified
MKQEKISKESRMKLPKHLRNINQHAAGIDIGSRSHFVAVPEGADEQPVREFSTFTGDLERLAEWLGSCGVTTVAMESTGVYWIPVFEMLESHGFEVRLVNARHVKNVPGRKSDVLDCQWLQQLHTYGLLRGAFRPVEQVCTLRAYVRQRGTLVRTSSSYIQRMQKALAQMNLQLHNVVADITGLTGMRIIKAILAGERNPDVLAAMRDKRCKNSESTIARSLKGHYRPEHLFSLRQAVEIYEFHQEKIADCDRQILKQLQCFDSQDVPNDAPPANVGEALQRMSGVDLTGIDGIDTNTALKILAEIGTDMSRWKTAKHFASWLGLSPGTKVSGGKVLSSATKPVANKAAAAFRMAAFTLFNSRSALGAYLRRQRARLGAPKAITATAHKLARLVYTMLTHGTSYVDAGQEYYEERYRSRVVQNLKRKAHEMGFELVSMQEVPASA

SEQ ID NO: 465898 - protein, 347 aa, unidentified
MNYIGCDCHISTLDCAVVNERGQETKKQKMNTGVKGLVEFVKSIPKPRKIIIEEGTLASWLLEVCTAYGEELIITDPKINRWIGRAGQKNDEIDASKLAQLARGGYIKEIYHPIGHRRRFRELVMLYHDTVKSQTRIKNKLKAKFRQNGIKCSGETVYSVKYREEWQKRLPQEKVVEVMVVGLWQQLDQVHEVQEELLSHIRKQSRQYSEIKRFKHIPGIGTVHAATISAIVETPHRFANKKKLWMYAGLGLAEKASGEKVYSRNLTRSYNRLLKSALKQAAEAAISARDNQFRRQYLRLTLEKGIPSHRAKLTVARSILATAYGIWKSGEEYDPTIDKKRTESDNT

SEQ ID NO: 465899 - protein, 348 aa, unidentified
MRFYTQPHQYYCGIDLHTRTLSLCLLDAAGAIRLEATLPPDRDRLAAALAPYRDGLVIGCECLFAWYWLADWCAEQGIPFVLGHALYLRAVHGGKTKTDAVDAAKLARLLRGGTFAEAYVYPNAMRATRDLLRRRTYLVRQRATLIAHLQTTFLQYNLPAPQKKLAYAANRADLDLSVFPDPSTRSMLEADLAVAAALDAQVKRLEAELVRTAKVHDPQTFARLRSVPGIGPVLALIMLYEVQSIHRFEHEGQFLSYARLVGGVRESAGKSKGTGGRKIGNAHLKWAFGEAACLMLRESGKAKTWVARKERKVGKPRALGALACRIGRTVYHLWRKQASFDAAKFLAS

SEQ ID NO: 465900 - protein, 352 aa, unidentified
MQMITTIGLDIAKSVFQVHGVDAAGEVVIRRQLKRRYVLAFFQKLSPCLVGIEACASSHYWSRELQALGHTVRLMPPAYVKPYVKRQKNDMADAEAICEAVTRANMRFVPTKTPEQQSCLMLHRTRHLFIRQQTAVINSIRAHLAEFGIVAPVGRKGVTELLHVVADPGDKRVPEVARACLAALGTQLLHLKQQILEFDRLIMAWHRSNQTSTRLHYIPGVGPMLATALVASVADPRTFRSGRNFSAWIGLVPKQHSSGGKDRLGSISKQGDRYLRSLFVAGAPAVIRYAKIHGTKHRPWLTALLGRRPTKVAAIALANKIARMAWAMMAKGERYRQPSRLRRKRDCAGHPA

SEQ ID NO: 465901 - protein, 343 aa, unidentified
MSVVIGIDPHKASHHAFAVDEREVELAQLSVRATRTQVERLLSWAAPFEQRTWAVEGADGLGYLLSQQLVAAGERVVNVPATLAARTRVLGSTKSNKTDPNDARSVALTALRHDDLREVRPVGHSEVLRLLAKHNTDIGNRRTQVVCRIHALLVGLAPGGIAKEINASDIDTFLAGLSPTDPVERVRRDLVVELLAEIRMLDTQLKASHKRIREAVAASGTTVTELFGVGPIIAAMLIGHTGDIGRFANRDHFAAYNGTAPVEFSSGGRTVHRLSQRGNRQLNHAIHMAAISQLRQPHCEGRAFFDRKVAEGKTKREAIRALKRQISNAVYRHLAADARRQAG

SEQ ID NO: 465902 - protein, 347 aa, unidentified
MSISMIGLDTAKSVFQIHGVNETGKVEIKRKLRRSELIAFFEKQESCTVVMEACGAAHHWARMFTGLGHTVKLIAAEAVKPFVKKGKKNDAADAAAICEAASRPDARFVPAKTIQQQGILALHAARSLLVKQQTTLANAMRGLATEFGVTVPKGIRKLDELMTLVNTDETIPKQAKQAITGLHDYRNDLSEGIETFEAEIVAHARTDETARRLATIPGIGPITASLITATVVDIGLFKSARQFAAWLGLVPRQNSTGGKTRLGRITKTGNREVRKLLVLGATSMVCRADGWNSAVGAWLRTILERRPVRLVTVALANKMARIAWAVMTRKEVYRPKGGVAVAAQATA

SEQ ID NO: 465903 - protein, 346 aa, unidentified
MEHYVGLDVSLKLTAICIVDRTGKIEREGVVASNPEAIAAFIKSHAPHVARIGLETGATSTWLWTELNKMGLPVICIDARHAKAALRMQINKSDRNDAVGIARIMQCGWYKEVRVKDVESHAIKALLVSRALLVKIKRDLENQIRVLLKNLGLVIGRAKMNVFALRAAELTEDRPELAGAVEPLLKAREAIERQIADLDRKVLRLARNDAQVRRFMTAPGVGAITALCFLATIDDPTRFKRSRSVGAYVGLTTRRYASGEVDWTGRISKCGDKLLRSYLYEAANVLLTRVAKWSALKAWGIRLAKRSGLRKAKVAVARKLAVILHRMWIEGTEFKWSSKEAANQPA

SEQ ID NO: 465904 - protein, 355 aa, unidentified
MSILAKNLDYVIGVDTHLHSHTAAVLTANGAVVASLRIEAEQAGYCRLVRLVGRAAPGRRLWAVEGTRSYGAGLTGHLLSLGEAVGEVDRPKRPARKRGKSDEIDAVRAAREALSMGRLASPRGSGRREALRIAASTRQEVMEERTRAMNQLRALVVSAPEHMAARFRDGSGRSHSLERLTKRCLALRVAGTVDVEDRIRLDTMKRIARRIVELEREAAHYETEMAELIRELAPGLLELPGVGPSTAAMVLTTYSHRGRFRSEAAFASMAGVAPIPASSGKQQRHRLNRGGDRRLNQALDLIVKNRIRYDPETIAYMERNKGGRRTDRDLRRILKRYLARSLFRFLEHVPPLDKG

SEQ ID NO: 465905 - protein, 348 aa, unidentified
MQIAVLGIDLGKNSCSVAGLDATGRIVLRRRMNREGVIKLASRLPGCVMAMEACCGAHHLGRALQSVGHQVRLMSPEYVQPYVKAQKNDERDAEAIAEAATRPTMRFVELKNETQLDMQSLHRARSRLVGDRTALINQLRAVLLERGITIAQGRRRLEQYLALALNGEGSPPLQLSTRMRVLIDDMRAEWHELDRRIAVFDAEFVAAARNDQTARRLASIPGIGIMNATALLAAVGDARTFARARDLSAWLGLVPRQATTGGRPRLLGITKRGNKYLRTLLIHGARAALPSLATTGGSLGNWLRGLSARAHRNTVIVALASKLARIAWAVLRSAATYNATIGDHPAAA

SEQ ID NO: 465906 - protein, 323 aa, unidentified
MQGKVSPERSAITAVYVGIDVCKERLDVYIHPVGLTLAFANSAQGIKRLKRSLTAHKVALVAMEATGKFHRAAHRSLHADGFAVAIVNPLRSRLFAEAAGTLAKTDRVDARMLAIMGECLDPEISEPPSELMETVQELTRCRAAAVAARTALLNQLAAAQAGAATLEIKRQLRAAETAIENLGAEIERLIGADPLLARRLAILASIPGVGTITAIALIAGLAEIGSLSAKEAAMIVGLAPIACDSGENSGARHIRGGRAHLRRALYMAAVAAARFNPPLKAFYERLLTNGKKPKVALTAVMRKLIVLANTLIRQNRLWEPHHA

SEQ ID NO: 465907 - protein, 374 aa, unidentified
MQKQDSYDYYVGIDCAQNKHDFAMKNNQDKFLIKKGHFSNTLQGYEKFLNTVLSKCPNKDKILFGMEVTGIYGTNLYERLKSDGYHVVMIFPDSVKNYRDYKRLNKTDKIDSACIAELLLNGDAQIVHVEKNGYTDLKAYIRRRNALKVTCTQETNRFLAKVCLYFPDLLKVFPSGRATLKAIFSIYPTPYSIIEADFDELVSVLQKASKNKFGVDKANELIHAARKSIVVRKSISDGELYNIHSLIDSIDFLESEIRNLEKIIDSKAEEFPTYHVLLTLTGCGKITAATIVAEIGDISRFHKASQIVSLAGLYGDNSKSGSSVNKRGKISKKVLVIFAMQFTWLLNLHEETTQYLKLILLRKRMEIVPNIFLQ

SEQ ID NO: 465908 - protein, 335 aa, unidentified
MQVYGIDLSMEKFDVNFIDAKGKEKEKEVKNGVVSISKFLSSVPKDSILCAEHTGAYGDLLVYLCNQVNVPIALVPGYTIKHSLGLLKGKSDPMDSRRIREYGERFTDKLVHTEYAEENIAELRQLYTFRHQLVKSRQALLTSDTGRGHLPMQSIRVHNHIQTVLTGLDKEIASVEEEIEKLIKAYQDLNENYELVTSIIGIGPVIATDLLIKTGNFKTINTARKAASYAGVCPFPNTSGKMVGKSKTSPFADKKLKSLLYMGAKSAVKHNKEYRLYYQKKQLEGKPHYLIMNNISNKMLRTIYSVVKNKTPYSQDHICLDPRERKLNSSTKKVA

SEQ ID NO: 465909 - protein, 301 aa, unidentified
MDQQHQPEQHYAGLDVSLDATAICVLDAKGAVVWRGKCASTPEAIRDVLRQHAPALVRAGLETGQLSNWLTHGLRHLGVPVVCLDARHAKAALKLQLNKTDANDALGLAQIVRTGWYREVAVKGMDAQTLRLLLVARAQLVSQRQALANTVRGLLKTFGLRIAHGSGGLFAPRVREAAKGNDALLAIVDPLLLAWQALREQAAILDRQILARAKDDATARRLMTVPGVGVVVALAYMAVIDDPARFRRSSLVAAYVGLTPKRHQSGEEDWSGHISRCGDDLLPICSRPRPCCSTATRARAR

SEQ ID NO: 465910 - protein, 338 aa, unidentified
MNTVTLLGIDIGKNTFHLHGQDARGHQVLRKKLNRNQLLPYLAQLSTCKIAMESCGGSQWLARKIKEQGHQVQLIAPQHVKAYVTGNKNDFIDAEAICEAASRPRTRSVQVKTVEQQVLCTEHRLRKSLVSRRTAVINQVHGFLLEFGVIFPAGYAALDRVSGLMQSRELPIRLINAIERMLEDIRQLTGEIKKLDVEIKQNLVQSDAGQRLQSIPGIGPLIASALVADVGDASVFKSSRDFAASLGLVPRQYSTGGETVLLGISKRGDKYLRSLLVQGAHTVLYRVDHRTDALGMWAKNLLARKPLNKVACALANKMARIIWVLLTKGGTYNSQLLA

SEQ ID NO: 465911 - protein, 378 aa, unidentified
MKQDNKAKQNKGKVSVEAPQDTCDLGQRRWKVQREGLTVGLDVGDKISHYCVLNEEAEVVERGKLKTTPAALQPWIEALPAGTRVVLETGTHSSWISRLMEQARQEVLVAQPRKMPQIYACKRKNDRRDAEKLARTGRLDPNSMGPIRHRSAEQQADLAVIQARDALVQVRTQLINTVRGMVKGTGERLMGCSARSIAQQVEIPHRWRAALLPLVSQIRSLSEQIERYDVEVEKLAQKKYPETELLRQVSGVGPVTSLAFVLTVADRWRFRHSRDVGPFLGLVPAQDDSGESSPQLRISKAGNTYLRRLLVGSAHYILGPFGPDCELRRWGKKLSERGDKNARKRAKVAVARRLAVLLHKLWVSGEVYEPLPEKRAAA

SEQ ID NO: 465912 - protein, 347 aa, unidentified
MPQYIGIDLHKATSFITRMDQRGRILEQLQLRNDAPTLQGYLTRLRPDTRIAVEATGNWTYLYELIEDRHPDLVLAHPLKTKAIASARIKTDKIDATTLAHLLRADLLPAAYIPPRPVRDTREVLRTRASLVRLQTQVKNKVHAILAKTGLRTPTKNAFGKKAQRFLAQVPVRPCYRLALDGYLRLLAALTTELATVTATIEAQVQRDPQAQLLCTMPGIGPYSALLILSEIGDVRRFPDARRLCSYAGLVPSVHASGGTTRHGRLTKQGSKWLRWILVEVSVHAITGAPQFRSLYHRVAKKHGANVGRVAVARGMLKTIYAMLRKGEAFRSIGTGTTGQRRGVMAG

SEQ ID NO: 465913 - protein, 428 aa, unidentified
MNDSDLSRIKAFRQLKREIRGSDRHLIVGVDIAKSRHHAFLGTSNGKTVLKGMIFDNSRQGLEKLLTRVQFYIDRDGFRSVVFGVEPTSVYHKPLAEQLIERGHMVVYVTNEAIKKNRSLLDGRWDKNDTKDAANVADLIGQGKCNYYDLPRMPIRELRSLLLLRKRLKRQLHGSRVRIRNNLVAQYFPELDKSWNQAEDENLAIVRWFLSPEKIRSLEFEDFFNRVTKRYNGIRQHRRLRTIWEMAGESIGCRPGVTAMQFEAKVLTENIKNTKAQIERVEKEIERICRSCKEYAYLLTIPGFGPYVSAVVVAAIGNPHRFENIQQLKRLAGLDLNASRSGKKSSSAVPVISKKGKGELRYALYQAALVASSLTVQFRAYYHSILKGREREKGIGTKMRVKLATKFLVIAWTLMKKKEPFSPSYLKT

SEQ ID NO: 465914 - protein, 424 aa, unidentified
MNLTQNDRLKQVTADTLIVGVDIGSKTHFCRAFDWRGFELSRKVFRFSNTGVGFLTFLRWTEEVMNKTGMKKVIVGCEPTGCYWLTFQKFLQDHGVQLVTVNPFTVNRSKELDDNSPEKSDLKDPKTIALLVKDGRYSTSYLPSGVYAEIREASVCRDQIMKQHIRLSNQIQGWLQKFFPEYLECYAEWDSTSGLLLLKEAPSPQDILRIGTGGINQIWRNAKVRAAGIKRAQTLVEAAQNSVGLETGEAARLEIWVLVNDYILKAEQLKRLDEYLEEKVKEVPNVEKLLAIKGVGMSTVIGFVAEVGDIGRFTDPKQIQKLAGLEIVKKSSGKKKGQPRISKRGRRKLRRTMYESARALMNWNPAFQDVFLYYRNRKKNPLGGMQAKIAVACKAIRIFYVVLQTGCDFDEEKFRKDIIRPEAA

SEQ ID NO: 465915 - protein, 354 aa, unidentified
MGQLIRIGMDTSKNVFQLHGVDAEEQVVLRRKVRRRDLMGFFAKLPALQVGMETCGGSHHWARELESLGHEVVLLPPQYVKPYVDRGKNDAADAAAICEAMSRPKVAKRFVAVKTVGQQGTQMLIGVRAGLMKRRTQVSNTIRGHAAEFGLVAPRGLGHVEPLLKRIAEDETLPAPVRELFVMLAGQYWHASAQLQEIEARLLAFHRASATSRRLADVPTIGPVTASALVAKISDPKAFRSGRDFAAWLGMTAKDHSSGGKQRQGGITRAGDEMLRSLLVNGATSVIQRVREGKAGASPWLVALIARKPPKLAAVALANKTARIVWKMMVTGEPYDPRRQGTSLETAAVLAEVA

SEQ ID NO: 465916 - protein, 401 aa, unidentified
MFFVGIDWASRAHELCVVDEHGVVIEQFGFGHSERGISGALVRLAKLAVPGELPVAIERPDGLLVDRLLEAGHQVVPIHANAFHAARPRWEGAGSKSDVGDAYRLADLLRTDRRRLRPLDQATRELQALVRLRDDHVRARIAATNQLAALLGQHWPGAAAIFARLDSEIALSFLERYPTPQSSTRLGESRLDAFLRRHSYCGRRNAGELLARLREAPRPVHALDPEIISELVLAQARLLRTLLSSIADLDRAIAATLDQHSKAQILKPLPRVGTINLGQLVAEVGPLLDRTESADAAAALCGAAPITKRSGQQRSVSFRYATNTQARKALTLYADNSRRASPWAERIYRDARARGCRHAHAIRILARAWLRVIWACWHTDTPYDPTRHREHQRHLALQTLT

SEQ ID NO: 465917 - protein, 408 aa, unidentified
MEVVVVVGAGLDVHKKKIVACCIDGRNSPPTVVTCTFGTFRDEIERMRDWLIQRECTHVAMESTGVYWMSVYEVLEGVLEIILGNPRHMANVPGRKTDVSDAHWIAKLLRHGLIQPNFVPPRPIRDLRQATRYRRKLMQTRTACLLRVEKLLQCATIKLSSVASNIFGVSGRLMLAGLAGGVTDPQELSEMAKGKLRGKRGALKRAFRGSFREEDASLLQVELQVIADLEAQLEQLGALIEQKVGSFEDVIALLDTIPGVNRVTAIDLIAEIGTDMTAWKTDRQFAAWSGTCPGNRESAGVRKKAKAREGNPYVKTILIQAAVSASQTIGSHLAHRFHRLAARRGPRRAFVAVAREIAVALYHMISEKVPYTPPRNADPEVTRQQRSRHLMRELTKLGYEVNCKPLKT

SEQ ID NO: 465918 - protein, 339 aa, unidentified
MMEISRIGLDIAKTVFEVHAVNAREEVVVRRSLRRNQLLGWFAKLPACLIGMEACGTANHWARELTALGHTVRLIPPAYAKPYVRRNKNDAADARAICEAVSRPSMRFVPIKTVDRQAEAVTHKARQMLIKQRTMTQNSLRSLMAEFGIVVPQGPHHIGKLLIILADPQDIRIPGVARAALNGMADILATLDQQIEALDKAIKAQVRANPTARRLITIPGFGPILSGAIAAIVTDPRHFDSGRDFAAALGLVPRQDGTGGKVKLGPISKRGNGYLRRLLVNGATAVLHGKNARTDPWRARLLDGKPRKLAAVALANKMARIAWAVMTRQEEFRPRAVAA

SEQ ID NO: 465919 - protein, 339 aa, unidentified
MKNTKYFIGLDVHKEKTTYVIRNRLGDILLEGETATRYTELYKQLKNYLKSSIIGLEASTSYYALYQNFLRNNYNIKVANTIQLRQLIAKNDKLDAKRLSEMLRLGTFPCSYIPDEKIQRLRSLLQVRHSLMEELVRCNNRIQAFLDRNGIVMPDQEAFSKKWRQKLLQYIGSEEVSLELRYEYDHFVYLEKKSEHLGQEISGYTMKYWKEEYRLIQSITGFGPVLSCYIIAHILPISRFSSNRKLRRYAGVVPAFHESGGKKSKGHIPKTSSRKHLRWALIQAANAAGRTNTKLGYYYRKKKKQKDNASIAHVAVASSMIDIIYKVLITKKPYNPKNC

SEQ ID NO: 465920 - protein, 358 aa, unidentified
MPQEQVHVTGGVDTHGEQHVAAVLDDTGRLVATAAFSADAAGYRQLLAWLTSFGVLDRVGVEGTGCYGAGLARYLARQDVTVTEVNRPDRQARRRRGKSDPADAAAAARAALNGDATAVPKAGTGPAESLRALRAARRSAMKARTQAANQIAALTVTAPDPVRRRLAGLRPAARIAACARLRPAGSIADPAVAARHALRLLARRHQALTAEVTDLDTAITALCAQASPALLATPGVGPDTASALLATAGDNPGRLRTEASFAALCGASPLPASSGKTTRHRLNRGGDRQANNALWRIAIVRLATDPHTRAYAARRTAEGKTSREIIRCLKRYIAREIYASLPRPETTKPAAQPTGLTT

SEQ ID NO: 465921 - protein, 343 aa, unidentified
MNQYIGLDVSLKDTAISIREDGKRIWRGKCPSDPKLLAETIRKHAPHARRVVFETGPLSTWFYHALTNEGFPAICIEARHAQKILHETLNKTDANDADGLAQMAEAGFYKAVRVKSFDAMTTRALVAARDKLVHISTQLGNQIRGVMKTFGLIVPEGKGRIFDGNVRELLAGNDNLARIILPLLDAWRDIRKRAAILDRQLLAAARQSQSTMLLTTIPGIGAITAISYVAAIEHPQNFRTSRSIGAWLGLTTRRYQSGEVDYDGHISRRGDNHLRALLYEAATVMLTRTGARTESRLKDWGLKLRERLGFKRAAVAVARKLAVIMHTMLKTGEIFNPSASAIV

SEQ ID NO: 465922 - protein, 347 aa, unidentified
MKKIVKQAVGIDVAQKELVVSLGRMHDDWTLEVFAHKTFRNTEKGFNSLVIWVKKLNQAEVTVRYVMEATGVYHERLAYFLEEKNYELTIVLPNKISSFMKTLDLKTITDKTASEAIARFGLERKLENWKRPPVIFKKLKQLTRERDQILQDRTGTKNQLHAEKSEAEPNTSSISRMKKRILVLTTQEKEIKAEIVELLRQDKQLEKSVELLCSLPGVAHLTAVTVLGETNAFELIRNKRQLTSYAGLDVKEKLSGTSVKGKPRISKRGNRYLRKALYFPALAAIRTDNRFKSIFVRLVSKHGLKLKAAVAVQRKLLEMMYTLFKNNKPYDENYLQIENQEKSVALN

SEQ ID NO: 465923 - protein, 295 aa, unidentified
MPQSRTRSVGLDVHKDSLAVADAAQDHGAAVVALGNLGTRQRDLDQLVRRRQSQSPPLVLVSEAGPCGYWLSRSLTTKGHACWVVAPSLRPKKAGARVTTHRRDALKLARLMRSGALTPVSVPAVEDAAMRDLCRARDDVIRALQAATFRRQAFLLRPALRSTGPATWGPAHRRWLREVAWPTPAPQSVLQEDGPAVTAPTARLERLELALHDPVQPGRLAPVVDALHGLRGVQCTVAVTTVAARGDLTRFEHPRPRMRYLGLTPAAYSSGARRRQGGMTQTGHSQARRALREGA

SEQ ID NO: 465924 - protein, 363 aa, unidentified
MKKIAYVGIDYHLKTLTCAVLIENKKDFYDTIRFKNNDKNIKKYMKKLSDKYDIKTCYEASCNGYSFQRKMQSWGYHCDVIAPSLVPKKPGDRRKNDFRDARNLTQHYAHGMLAIVHPPTEDEESVRHLIRCRMAMKKNEKSVKQQINSLLLTQDLRWPKTKWTGQHRVWLSKLKLRDKYSQQVFDEFLGLLGYLGNRIQYLDKQIEEVAQSEIYAPSVKKLKAFKGIQTLTAMLLIAEITDFRRFPNPRALMAFLGLIPSEDSSDDVKKPGAITKAGNSRCRTQMIESVIHYIKKPIISAQMKNDLKEVDSHSANIAIKCMKRLHKRYWFLVMRGKNSNKAKTAIAREFVGFIWAMMQPAEV

SEQ ID NO: 465925 - protein, 378 aa, unidentified
MAKSQTVLQRKDTTSNSALYISFDLGDKNWQLSLGDDRFHVSRHTVAAGDTAAVASLILKAAARFKISGRSEVYSVYEAGRDGWWFHRWLCELGVGNIVVDPASIEVNRRARQAKTDRLDADKLLAMLIRHHAGERVWSVLREPSSEDEDARREHRELQRLTHERTAHTNRIGSLLVLHNLRPGIVIGGRDWAKWWHAHRELVPTLLRAELERECERLRLVKDQVRAIESAHRKELAEGKQPLVDQLVRLRAIGPKGAWVLVKEVFGWRSFANRRELASSLGLVPTPHASGSIDREQGISKAGNRRVRSLLVELAWSWLRLQPDSELTHWFNRRFAASGGRMRRVGIVALARRLAIALWRYMKDGEIPPGAQLKPTAA

SEQ ID NO: 465926 - protein, 425 aa, unidentified
MKKTDYLSTLFVGIDIGSRTNVVSAIDFNQEYLIRMKPVPNAKEGAETLESLLVDVLSAHHEFNHVIIGLESTGFYGVHIANYLSASDKLSPFGTEVYCLNPKEVAKYKESFNSLDKNDGIDSFVIADFARVGRISIKPWRGAQYLALQRLTRHRLHIAECIAREKTYVLNNIFLKFSEFSMMQKEDHPFSNKYGVAAEAVLEQYVTNDDIIEASIADLVELIESKSRGRITDPEETAKLLQAAAKGSYRLDKVVAEPITLSISSSFNCIRAFEKELKAIEKAIEQTVQGLNPTEYQVLKSIPGIGHVYAAGILAEIGTIKAFPNNDALAKYCGIVWKENQSGNFRAEDTKMSKAGNRYLRYYVIEATGSVINHCPEFKAFYNKKFAETTKHQHKRALALTSRKFLRMLFGLLDKSQLYSPEKSR

SEQ ID NO: 465927 - protein, 318 aa, unidentified
MQMLAIDLGKQSFHIYGITCEGEVISRKVSRAKLVDAVTRLQPQSVAMEACASSHHWGRVFEALSYAVRLIHPRFVKPFVKGSKNDAVDAEAIFEAANRPTMRFVPLKSVEQQDLQALHRTRDRLIVQRTALINHTRGLLAEYGVVMPAGASRFRLQVDKMIEIAELSHLAKDLFLKLVEEYRDLDARVSTLDDMLVDICRRDDRCKRLTTLPGVGPIVATSLIAAIDDGRHFASGRALSAWIGLVPRQYTTGGKPRLGGIGNRANHYLRRQLIHGARSALLRIAKHDDRCQRRSKSRPLGRAKPGHLIRVLASAGRA

SEQ ID NO: 465928 - protein, 325 aa, unidentified
MQTTRAFYGADVGKSEVVIATHADAKRAVRTLKNTTTSLGKWLETLPAGSVLALESTGGYERLLADLAYERGIRVYVLNPKVVHHYAKSQGQRGKTDPLDAATIARYVALEHDRLHPYEPTPEHIERLRQIQRLRKKAVVMRTQLRLSGERHNSAGSQAQVEKVLQALDELTESLERDMLAQIAAEPDLADDFSLITSITGVGKLTGTALVTTFARIPFASGDAVVAYAGLDPRPKESGAYKGQRKLSKQGDALLRSLAYNAATAASRSAVFKPIYQALLTRGLATTQALNVIARKLLRIAFGVWKSRKPFDANLFMDNQACAKP

SEQ ID NO: 465929 - protein, 342 aa, unidentified
MRNSTTYDAFVGIDISKLTLDVMLDNPDQNQPEEIQLDNNPEGFKRLDCWLIECGADPEKTFLCGEHTGRYGEHLTRWAGQSQWDYAAVKTTALKKVGPDHHHKSDPYDASLLAEYARRYTDKLTLQKPTDRAIKQLKRLRKERRFMVDQRARLAQKISEAAYHDADMELITQYYQQQIDLLSRQIKSIEQQIQTLIESNPGLNHRYKQIQTAPGIGKVIGCFWLSLFAGEGQLNPRQISSRFGFAPHPYQSGTSVKGRKRSSGFGNGDMRRIMHQAARSVATHNAHYKAYYQRKLAEGKDEKLIMNNIINKIIRTVCSMWNHNVDYDPGYIQKMKKIHQAA

SEQ ID NO: 465930 - protein, 422 aa, unidentified
MEVIHPRSGGLDVHKETVVACVRLALGDKVTREVRTFETTTTGLLLLLAWLTEMGCTHVAMEATGVYWKPVWNILSDGDFELVLANAAHIKNVPGRKSDVSDAVWITDLLAHGLIRSSFVPDQEIQELRELMRTRKQLTRQQTSHVQRLQKTLECANIKLDSVITDIVGKSGRAMIQALIAGETDPVKLAALADRRIKASPQELREALRGRVTDHHRFLLRLHLQHIEFADAAILDIDRNVAALIARMDQEVEAGRAFHTLIALLITIPGIDVLAARAILAEIGPDMSRFPTAGHLLSWGGLCPRNDESAGKRRSTRLRKGDRWLKTLLVQCAWAARRKKDSYFRAQFYRITARRGPKKAACAVAASLLTTIYHMLKDGTPFQDLGADHFDRRSKEARAERLVTQLAKLGFDAKLTPLAQAA

SEQ ID NO: 465931 - protein, 409 aa, unidentified
MRYYVGVDWADQTHAVWVVDASGTKITARTVPHTAAGFSEWGRELDEWRAQGIERWAAIERPDGRVVDFLLDHGVVVYPVNPKALDRARDRFRQSGAKSDPFDARVLADFLRTDYLHLQALQPSSDVAQELKLLTEDCQRHIRQQTRLVNQLTTTLKAYYPRALEVAELTTALAREFLQAYPTPDAVTALTTRQWQRWARGRRLSETRIGALWAVLQQPQLPVPAHVVRAKARLMLSLVEQLTPVVAAVAQYRKAIDDFFASMPAAQWARTLPIGKRGITAPTLWARLGDAPGRWESFRHLQAQAGTVPVTKRSGKQRSVHFRFACDKSLRHVVDQVAFLSLLSSAWARAYYDQQRARGHAHHQALRALGAKWLKIIFVMWHRQVPYDEQYHLATMARQQLRQRQQQIA

SEQ ID NO: 465932 - protein, 335 aa, unidentified
MEFDFFIGIDVSKNELDFAVQQGKCFLFHREIANEPGAIKMFVKELSKLSGFSLSGAVFCMEHTGIYNNHLLSCLHQKKTNICLESAIHIKKSLGNIRGKNDKIDAIRIADYAYEKREKLRLWAPKRDVIQQLAHLAATRTRLIEARKMLKTPLKEHDIFSPKKITRKNVSLCNSTFKAIDADLIKTEKAIDQLITSDLELKRLFSLTTSVTGIGKVTAAQIIITSNEFKTIADPKQYASYSGVAPFTEESGIFKGKGRVSQMANKKVKTLLHMSALVAIQSNAELKIYYQRKVSEDKKNKMSVINAVRNKLVLRVFACVNQNRPYEINYQKTLV

SEQ ID NO: 465933 - protein, 335 aa, unidentified
MDFKFFVGIDVAKLTIDVALFTKGDKNYLHQAFPNDKKGFAELFKWIRQVNTEPTRHLVVCLEHTGIYSLPLCIFLQHKGFSYCLQPALQIKRSMGIKRGKNDRIDAQMIARYAYLHREELLMSTLPSKTLLRLKSLLSYRERLVKCKVAIQTAHKELNAFGGSTIDKFVRLNSLTQIQQLEKGISQTDKKLLQIIEQDDQVLKTYQLVTSVKGVGLQIAANMIVYTTCFTRFENWRKFSCYCGLAPFEYSSGTSIRGKTKVSHLGNKKLKALIGNGIASAIQHDPELTQYYYRKIQEGKHKLSVQNAIKNKLISRVFATVKRGTPYVPLKQYLS

SEQ ID NO: 465934 - protein, 346 aa, unidentified
MKILALDLGKYKSVACVYETASLTHKFATIVTTPQALHDLLVAEEPERVVIEICPLAGWVSDLVGSLGIELEVASTTHEAWRWKNVKRKNDRQDGLKLAQLSALGQLTLVHMPEPKVRQWRALINYRQRLVSRRTRIRNHIRALLLRQARAMGRGAAAWTRAGMAQLEALARPLAEVNGAELWRGELELELAALKALAEPLRQVEEKLDELGAADKRVQLLRTIPGVGPRGGEALVAVIDEAQRFKRGKQVGAYLGLVPKQIQSGESNRLGRITHQGNRMLRSLLIEISWSGLRYNSWMRAVYERVRRGSKARKKIAIVAVARRLLIRCWAMLRDGTRWRPALSST

SEQ ID NO: 465935 - protein, 426 aa, unidentified
MAYKIAGIDVHKKMLAVVVCDVEVDGEYQFVRRMFGGSPEQLRALAAWLFDQGVDEVVMESTAQYWRPVWESLEMYWKPICEQRDDRRPGSAALHLALALSNRGRRGRKRDFADAERLVKRLVAGELTLSFVPDAEQRLWRTVTRRKYQLTRDRIRLQNQLEALLEEAHIKLSSLVSDLLGASARRILQALAKGEADPVALAALADKRLRATAEQLSDSLGAVRDLKPTYRRLLKMALDQLELLDLQIGQLDQEMAGLISQHQNAVQRLTEIPGVGVDAAQQIVAEVGPTAATFPSAKSLSSWVGVCPGEEESAGVNYSHRSPKGNRQMRRILNQTANAAVKAKGSIFEFVFRRCVERLGYKQAIGAISHRQCRLIWLILHQGVRYEERGPAVIKQSQQKRTARMVRQLRSLGYKIDAPQTAPAGA

SEQ ID NO: 465936 - protein, 357 aa, unidentified
MSMLADDVDFVIGVDTHRDTNTAAVVNAATGAALADMQCTTDALGYKRVLAFANKHSTTRRVWAIEGTGSYGSGLTTFLLEHGEWVVEIDRPGRPARRNGAKTDELDAVRAAREALSREHLAAPRARGDREAMRVLMTARQGAVVARTKAIGQLKALIVNAPESLRDQLRRGTTDQQLDRCSRLRTLPSHSLEHRATVRALRSVARRALMLEAEAAEYESELEDLVSAACPELLDKPGVGAITAAQFLVSWSHSKRIRNEAAFATLAGVAPIPASSGATTRHRLNRSGDRQLNRALHTVALSRLQHDKQTKDYAAKREAEGKTSRDIKRCLKRAIAREIYRTLETHAAAPQHAQNAA

SEQ ID NO: 465937 - protein, 316 aa, unidentified
MTESLYVGIDVAKDSFDVASLPAGLHASLPNDPAGRRQFLDTLRPHPVALIVLEATGGYERDLAADLLGAGLKVVVANPRQVRDFARGIGQLAKNDRLDAQVLARFAQMVRPQPRPRPEGEGEALGELVLRRRQLTDLHTQEANRLPQARNSHVKKSLQKNLRALESQIEVLDRLIRQHIDSDDSLKRKDQIVQSLKGVGPGTSAMLLARLPELGRLNRGQIAALVGVAPWDVDSGQWAGQRRIWGGRREVRNVLYMAALSAIRWNPVIRAHFEQLDARGKRFKVAITACMRKLLVILNTLVRNDSLWSPRVAKKS

SEQ ID NO: 465938 - protein, 309 aa, unidentified
METEVGCDISMDWIDVCVLEPSRHFRVANKAKPVERLARELPPGSRIGMEATGTMHQLLADAMCAAGHTVYELNPRWVHRYAGGVGARGKGDRGDAMVIARYVHAEGAHLHPYRSPTPQQREIRTLLHRRAQVMKLKTASRQSLGDQANEVVQKFEQLVKDIDRRIATLLAADPQWKNLAAKLRRIPGVGPLVAAHLVEALARRPFEAVAAFIAYTGMDPRPNDSGRKKGIRRLTHHGDAHLRAALFMGAMAACKVAQWRAIYEHNRHKGLPSTAALIVVARKLARVAFCLFKTGQDYDPERIGGVAPT

SEQ ID NO: 465939 - protein, 353 aa, unidentified
MIIIGVDYHPEFQQIALLDKDSGEFQEKRLSHAEEAEQFYRGLAVMSQKVRVGMEASGHARWFERLLAELQMELWVRDAADIQSKRGRKQKTDRQDAQHILNLMLKDDFPRIWVPSWENRDLRQLLWHRHRMVQARTRIMNQLQAVAINEGLRCKKRLWRGGGRQQLESFRLARWASRRRQDLLELLDRLTPTIAELSQAIEQEAENCPEARRLRTHPGVGALTALAFVLIIGNVERFQCGKQVASYLGLVPLEKSSGNRRRLGHITKQGSSMLRFLLVEAAQVTVRSLPEWRGQYFRLLMRRGRKTAKVAMARRLAICLYWMWREGRDYEWRSVRTQDSPDQAMVCTRTPSN

SEQ ID NO: 465940 - protein, 345 aa, unidentified
MKIVGCDLHTRYQQVAMLDEETGELIERRLEHESGEARAFYAGLEGPVRVGIEATGHTRWFERMLAELGQELWIGDAAEIRASMVRKQKTDARDAAHLLDLLLSGRFPRIWRPTMAERDLRQLVWHRQKLVWMRNAIGNQLHALAMGEGVCRKKKLFTKKGRVELESLALDRWASRRRQELLRLVDQLDASLKEFDQAVAEQAEQSEAAVLLMTHPGVGPVTSLAFVLTLGPVERFARSKQVVSYLGLNPREHSSGGRQRLGSISKQGNPMMRSLLVEAGHTAARLDGELRQDYQRLKLRRGGGVAKIAIARKLAVRMYWMLRSQASYAQLVRMQGSPRGTLVGQ

SEQ ID NO: 465941 - protein, 313 aa, unidentified
MTVKYEYIGIDVSKATLDVACQTSREYKQFSNTTQGINALIKWLENIHPELIVMEATGGLELPCVAELAHTKMPVAIVNPRRIREFARSIGQLAKTDKLDARVIAHFGEATHPEPRKLPTEQEEKLTALLTRRRQVVEMLTAERNRVHSARFAMRERIEVHIQWLNQELMGLDNEITDFIHQSSLWKEKNTLLQSVPGVGKVTSATMLAMLPELGTLNRQKIAALVGVAPVNKDSGRRQRKRRVFGGRANVRSVLYMAALSASKHNPKIKAFYNHLVDMGKEKKVALTACMRKLLVILNAMIRANQPFTTNLV

SEQ ID NO: 465942 - protein, 410 aa, unidentified
MEVLHPRCCGLDVHKETVVACLRLVIDGKAIKETRTFATTTAGLLALSEWLTETQCTHVAMEATGVYWKPVWHILSDGDFELVLANAAHIKNVPGRKSDVKDSDWISDLLAHGLIQPSFVPDGPTQEMRTLLRTRKQVVREKSSHVLRIQKTLEDANIKLDSVITDIMGVSGRKMIEALIAGEKDPAKLARLADPRVKASKESLREALRGRVTKNHRFLLRLHLRQIDAIDAAIAEIDREVDASIAPFRTAVEQVSTVPGVKSLAAQTILSEIGLDMSRFPSSGHLISWACICPRSDESAGKRRSTRIRKGSPWLKTTLVQCAWAATRTKGSYLQAQFYRIRARRGAKKAILAVAASILTAIYHMLKDGTFYQDLGPDHFDPRTKERHKNRLIKRLADLGYVVELVPQAS

SEQ ID NO: 465943 - protein, 411 aa, unidentified
MIEQQNLIYVGVDLHKQHHTAVITDCWSKKLGELKFDNKPSAFPLLLKELKKYTKKGLSVVYGLEDIGGYGRGLAVYLKDNHCWVKEVNAKLANARRQSHVTVQKTDSWDAECVAKVLRDELERLPDAKPIDLYWAISQLVTQRRWLAKILTETVKKLHQQISYSYPSYKKFFSEVEGKTALAFWETYPSPYTLKDVSEEALAAFLRKYSNNGLSHKKANQILTLIDADGETYRDYQQSRDSIVVSQVESARFFQEQLVSIEDEIDFLLKRLGFQLESMTGIDVVTAAQLVAEIGDIYRFSSPDKLARFAGIAPVTVGSGNKSRNYKSKQGNRELHDIIKSLAIRQIGVTRTKREPKNAYFHSYYEQKIAEGKTKQQAVVCLMRKLVNIIYAMMKKKSAYVMPNTPVRQAG

SEQ ID NO: 465944 - protein, 448 aa, unidentified
MEKACGLDVHKDSVFACILDEQGKKIFEKRFGTLTPDLDELRDTLVAQGCGRVAMESTSIYWMPIWRVLEADFSLTLVNPYFIRQLPGRKSDVKDAAWIAECLQKNLLRGSFVAGEELQQMRLYTRQHRRLTKSRVRLEQQLDNQLQRCNIRFSNYVSNQGQNVSLRKIIDNLICGERDPTKLSSKVHGRTLNKHGKQVITDSLSGVVGAADVEMLRQCVEQIELLEKQQAACLTHLEELANKHFAKEISLLCTIPSIKHFSAYCILAEIGNDMSPFQKATHLIGWAGLRPRNDETSEKIRNRKILYGNKYLRQILVEVSWSVSRSNKTFLGKKFNMLKKRMKSQKALIAITRKLLVIIYNVLKTKQPFDHSKNLPVDPKVSQSNVCTLTSQCDTKQIVSDDKTVFGKQTDKDTKDTDCQNPKKNGKSVKCAEKKKAGRPKKLQVDKA

SEQ ID NO: 465945 - protein, 332 aa, unidentified
MSIIGCDLHTRYQVIAMLDRETGEVTTRRLEHEGGETKAFYAGLGKPARIGIEATGYTQWFERLVGELGHELWVGDAAEIRARAVRRQKTDTRDAEHLLDLLLNQRFPRLWIPTPEERDYRQLLKHRDKLVKMQTSVRNQLHFLAMSQGVCRKRRLWSARGRRELEALQLGPWASVRRQELLTFLDGLGPRIEEMDRAVKAEALRRAEAVRLMEQQGVGPATALAFVLTVGPVERFANSRKLVSYLGLNPSEDSSGGHQRLGHISKQGNEMLRWLLVEAGHTAARLDPELGRVYQRLKFRRGGSVAKVAMARRLAVRLYWKLRHRAAGSHVQ

SEQ ID NO: 465946 - protein, 316 aa, unidentified
MSRGKIAPADRQQVRSWLERFEERGDVDFALEGCTGWRFVAEELERVGARAHLAEPADTARERGRKQRAKTDRADARLLRELLAMGRLPESWIPPDHVLEVRARVRLYKALADERRAWMQRIRATLFHQGVPALACHLLDADGQAHLERADLSSSGREAVAVVLDQIDRLDTELGRLRGDLVAFGRRQIGCRALQGHYGIGALLSVAVWEEMGDCRRFGSSSDAVRHAGLDVTVWASDSQRAQGHLARQGPAILRWALYEAAMSAAKRTSPDHQYYLRVPDRLGPERAALSVGRKLSRRCFHTLRDLGDDALAPAA

SEQ ID NO: 465947 - protein, 370 aa, unidentified
MKQYSEAFVRFDTAKKKHAVAIADVGRAGEIRYLGEIDSSPAAVERMIRKLAGRYEELHFCYEAGPTGYGLYRQVRALGHHCSGVAPALIPKKPGDRVKTNRRDAVTLARLLRAGELTSVWVPDTVHEAVRDLIRAREAASQDLRRKRQQLLSFLLRHGRIFSGRQHWSRAHLRWLAQQQFDHPAQQIVFQDAVDAIDDAATRLRRLDEQVAAIVPNWSMAPVVEAYQAMRGVSFVVAVTFVAEIGDLRRFDNPRQLMAFLGLVPSERSTGERVRRAGLTLAGNKRARRVLIEGAWSYRYPARVSQPLQARLEGLPKVVRAIAWKGQIRLCPRYRRLTTAGKKLPVVIAAIAREMAAFLWAIARHVAPAA

SEQ ID NO: 465948 - protein, 319 aa, unidentified
MGSLTRFVGIDVSKDRLDLVELPSGTSWSVENDPSGFAELLRKLKPEATTTLVVLEATGGYEAAVAATLASDGIHVAVVNPRQVRDFARATGQLAKTDEIDAHVLALFAERIRPEPRPLPDPVAQELDALVARRRQLQQMLGAERNRLRLAAPRVRKGIAKHVRWLERQVDDVDSDLDRLVRQSPLWRAKDDLLQSVPGIGPTTSRTLLAELPELGHLNRREIAALVGVAPLNRDSGTLRGKRTIWGGRASVRRTLYMAALTATRHNPVIRAFYQRLRGNGKPPKVALTACMRKLLVILNTMTRNQTHWDPSLHPAPCS

SEQ ID NO: 465949 - protein, 381 aa, unidentified
MTGISATISNEQSIYAALELSKNSWLLAIQVPERDNPSLHTIKGGDTDGLMAKLDAARDRVVKLTGQTSTVTLCYEAGYDGFWLARFLEQRGLECLVMEPASLQVNRRARRVKTDRIDVENILHTLIAWSRGERHVCSMVVIPSIDEEDLRRSHRERDRLIRERTAHINRIKGLLFGQGIRGINVKSRYQTLTPAALVTGDGRPLPERLGREITREIERLALVQVQIAEIEHERDKTPTSCEVTERKRHQLLCLKGMGPALSSTLTREVYYRRFANRRQVASYIGITPSAYDSGEGHRSQGISKAGNRLARVAIVEAAWLWLRHQPDSALSQWFHERTQGQKGRIRRVMIVALARKLAIALWRYLETGLIPEGASLKARQR

SEQ ID NO: 465950 - protein, 417 aa, unidentified
MRIVRPICCGADIHKDLIVATIAATNQDGITEYIQSSFSSQNFDLVRLKAWLIEHHCFEIAMESTGKYWIPVFNVLEGEIKVFVVHPKYTKAIKGKKTDKKDSKWIADLFKHDLLKFSFIPPKEIRELRELSRYRIKLIAMRSSERNRYQNSMTISNIGLASILSDPFGKSSRAVMKEVIRSSSVTEERISKLLERNAKKKVKEVLQSLVGSHIESDQRLKMNIASQHMDQIDSHVRRLETEMAIRCIPYATLINLLLDIPGISYLSAMTIIAEIGTDMSVFETSKQLSCWAGLAPANNESANKKKSVRISKAGSYLKPLLVQCALAAINSKSNPYYRIKYNRIKKRRGHKKAIIAIARMILVNIYHILSTGEVYSPCDMEQIINPKPVKKVMTIQNAIEFLQSQGFDTSKLISSSS

SEQ ID NO: 465951 - protein, 358 aa, unidentified
MTQVVVDSSQVIIGIDTHKDNHVAFAINSLGIRLADCTVPATLAGYQQLLGWASALGQMAVFGVEGTGSYGSGLTRFLRSQGLKVIEVSRPSRRDHRRSQGKNDVLDAEQAARQVLSGEATAIPKSTDGVVEMIRVIKVARDSAVKAQTQVLVSLKAIIVTADADLRALLESLSTPQLVATCAKLEADQLDSPTTVMRYALAAMANRWLQLHKEIEAHTQHLTTLTREAAPELVQAYGIGPDSAAEILITFGDNGHRVHSEAAFAKMCGVCPIPASSGKTQRYRLNRGGNRQANAALFRVVIVRMRWHEATKAYVARRTAQGLSKREIIRCLKRYLAREIYQIIRKTFPTAKAEVINP

SEQ ID NO: 465952 - protein, 345 aa, unidentified
MIIGCDFHPSWQQIAWLDSETGETGERKLVHAAGDAKAFYQQLAAPARIGMEATGNSQWFIELVQDLGHEIWIGDAAQIRASYVRKQKTDKRDAAHILKLVVEGRFPRLWTPDGEQRDLRQLVLHRHKLVEIRSRVKNELQHLALNKGMQRKAKLWSQAGQKLLRELPLKPWAACRREDLLGLLALLNQQIGTLDQAGQQAADQHPQAKLLMTQPGVGPNTALAFVLTMGDVSRFPRGKQVASYLGLIPREESSGGRQKLGAISKQGNRLLRSLLVEAAQIAVRYDPGLRKQYLHRCHQKPKGVAKVAAARQLAVRLYWMLRTEKPYPEIVCIESSPRVALVGAS

SEQ ID NO: 465953 - protein, 339 aa, unidentified
MNKRKVVKQNVGLDISKDDFKICYYHQYEDFKQVIKGTRRFKNTLTAFREFLKWVDKRSSTDVLVRITLEATGVYYEQLVHFLKDKTDYHISVVLPNKSKSFAKSYNIKTKTDSVDAKILGIMGLERDLKAWQPPSPKLFTIKQLSRDRIALTEEKVALMNKLHALNHSFEPNNSVIKRMTIRLKLIKKQLMQVETELKKAVKKDPELSERIDKVCKVKGLGFITVATIIAETNGFELFTSRAQLTSYAGYDVVENQSGSSVRGKQRISKKGNRFIRRALHFPALSARKYEPQFKNLYERVLERTAIKMKACVAVQRKLLLLIYTLFTKNIAYDPNYQN

SEQ ID NO: 465954 - protein, 365 aa, unidentified
MTSMTDQALEVTGGVDTHGRTHHAAVIDRIGRHLADREFPATGVGYRQLLAWLSSFGAVTAVGVEGTGAYGAELARVLRRAGLTVIEVDRPDRKTRRMKGKSDPIDAYAAAQAVASGRASGTPKTRDGIVEAIRTLRVVRRSAVKSRTQAVNQARQLLVTAPENLRAQMRGLSTTALAQTCARLRPGDDLADPVQAVKAALRRLGKRILALTDEADELDTQLKKLTAQAAPDLLALKGVGPDVAGQLLATAGDNPDRLHSEAAFAHLCGVAPIPASSGRRDRYRLNRGGDRAANHALHTIVVSRMRWDERTRAYVERRTTEGLAKKDIMRCLKRHIAREVYRVLQRSMRSDTSHQTTQSDLTEAA

SEQ ID NO: 465955 - protein, 391 aa, unidentified
MPVAADHTEVSAAIRTDLGAIFVSLELSRSTWLVTSLSPGGKEKMSKHSVRGGDMAGLLERFAQLREKAKAKIGRDFPIVAIQEAGLDGFWIHRALEGNSIESHVVDPASIATSRRHRRAKTDKIDGETLVRTLLAHKRGEPRVCSMVRAPTPEEEDRRRVCRERKILVAERTEHSNRIKGLLFAQGIGDYDPLRRNRREHLEELRTGDGRPLTKFLKAQICRELDRLEVLLDQIKIVDAERDALLAVEKKGLLPSDPSAAMLLGIRGVGPEFAAVLWSEGLFRHFDNRRQVAAYAGLAPSPWQSGSTDREQGVSKAGNPRLRTVMVQLSWLWLRHQPKSALTLWFEERVKRSGGRGRKSAIVALARKLLVALWKYVTVGVVIEGAILKAA

SEQ ID NO: 465956 - protein, 460 aa, unidentified
MKKKAQKRSHKKQKTKGSLPVLNPDAAGIDIGHREHWCAVPADRCEQPVRAFGTFTQDLEEMARWLKECGIKTVAMESTGVYWIPAFQILERHGFEVFLVNARHVKNVSGRKTDIQDCQWLQRLHSFGLLNASFRPPDHICVLRSYLRYRDDLVGLRSMQSQHMQKALQQMNVQLHQVLSDVTGLSGTRIIEAILQGERDPVQLAGLVDKRVRASKATIQKALQGDYRPEHLFMLQTAFDLYQIYGQKIHLCDEQALAQMAQLPSQESQPLPERKACRKPIHDMVAGTDLRAELHRWAGVDLTAIEGFGVLTAQVILGEIGPDVSRWPGEKHFASWLGLCPDHRISGGKVLSRHTRRVVNKVSNALRQAAVTLQNSQTALGAFYRRMRGKLGAAAGVTATAHKLARLVYRLLKHGELYVQQGLEDYERKHRERALYNLKKTAASLGLEVIEKQPLASGVS

SEQ ID NO: 465957 - protein, 367 aa, unidentified
MKKVSTVAVRASRKISQPKLTVGLDLGDRSSWYCVLDESGAILREHRLSTTAKALQEIFGRMPHSRIALETGMHSPWVSRLLSELGHEVIVAHARNVRLIGESRKKDDRLDAQTLARLARIDPELLCPVKHRSAQAQADLTVIRARAGLVRARTALVNTARGLAKSYGERLRGCNVRNLNPEKAAGLSPELQRALEPLLAGIEVLSQPIGEYNERIEKLAQESYPQATLLKQIKGVGTLIALTFLRTLEDPHRFAKSRDVGCYLGLQPGRRNSGQSEPQMHISKQGDPYLRTLLVQGAQHILGPFGVDCDLRRWGLKLAERGGKSEKKRAIVAVARKLAVLLHHLWVSGELYEPLHNHRRVALTAAA

SEQ ID NO: 465958 - protein, 349 aa, unidentified
MKIIGCDFHPGYQQIAMLDEETGELSEKALSHEKIEEVRAFYSALQGPVRVGIEASGQSQWFERLLAELGHELWIGDAAKIRASCERKQKTDRRDALLLLQLLMEGRFPRIWVPTPAERDVRQLLLHRAKLVRMRTQVKNQLQALALNQGVQRKWKLWSVAGRKQLEGLALMPWASRRRAELLVLHDQLEGSVSELDLAVAEQANTRSAVRRLMTHPGVGPITALAFALTVGPAQRFRRGKQVASYLGLIPSERSSGGRRQRLGHISKQGNTFLRGLLVEAAQSAVRHEPEMRREYQRLAQRKCRALAKVAMARKLAVRLYWMLRSDLDYAKLIQGSHAGQPESFRGRG

SEQ ID NO: 465959 - protein, 446 aa, unidentified
MKTTKLPLIYPDAAGIDIGSEMHYVCVPADRDAQPVRKFGCFTPDLHELATWLKNCNIKTVAMESTGVYWIPLFQILEHNGFEVILVNARHVKNVPGRKTDVQDCQWLQQLHGYGLLRGSFRPADEICVLRSYMRQRENLIRSASGHIQRMQKALVQMNLQLHKVISDVTGTTGIKIIEAIIKGERNPHLLASLKDYRIKNSEETIAKALDGDYREEHLFSLKQEFDLYRIYQEKIIECDNQIVQYYKKIDSKVDKNIQLPENKPEKRPKTQQKFNIQNELYRITGVDLVKIPGLENITLQTITSEVGLNMDKWPTEKHFASWLGLSPANKITGEKVFSTRTRMVVNRAATAFRLGAFAAGKSYTALGAYYRRLKSRLGAPKAITATARKLACLFYRAMKFGNTYVEKGMDYYEKNYQDQVIKNLSQKAKKLGFVLVKSEASDGVS

SEQ ID NO: 465960 - protein, 462 aa, unidentified
MARKDKASKKPVRAETTPLSGYRPDVAGIDIGSREHWVCAPVGDGATIVRPFGTTTPQLEALVAWLVEHNVKSVAMESTSVYWIPLYELLEAHGIESALVNARQLHNVPGRKTDVQDCQWLQTLHSHGLLRGSFRPSDAVTRLRALQRQQANLVEERTRFVQWMQKALDQMNVQVHRAVSELTGETGMAIVRAIVAGERDPVRLAAHRDQRCRRSKEEIAEYLKGSWRDEHLFNLQSALRLYDAVEQQIASYDQLLLEEVKVLQLPDKQDLAVPPHPSPAKEKTIRNRREQPMRTTLWRFAGVDLTRIDGIRVEAAKIILTEIGPDLGEFPSEKHFISWLRLCPRTPISGGKPLKKRRNGLGANRVAAVLRMAAVTLQRTKTALGAAYRRVARHKGAAVAVFATARKLAQLVFRMLRHGHDYIDAGEAAYEAQFQARRLAGLTEAARSLGYALVQGDPMVAT

SEQ ID NO: 465961 - protein, 360 aa, unidentified
MISERTSVGLDVHALSVVGCAIDGVTGELDRRRLTPDPAEVLAWVSSLPGPVRVVYEAGPTGFGLVRFLRERGVDCLVAAPSKLQRPAGDRVKTDAGDALLLARLLKLGEFVEVTLPTVEQEAARDLVRAREDARGDLMRARHRLSKLLLRQGIVYYGGQAWTGKHDVWLRSQRFELSGLQLAYDSAYEAMLHTVDRRDRLDRAITEMAMSSDYREVVQRLACLRGISTLTGFGLAVEIGDWHRFTGSSIGAYLGLVPSEHSSGKSRSQGSITKTGNTHARRLLVEAAWHHRKTYRTPGATMRARWDQAPMPARVRGHEGNTRLHARWNAFTVRKKRPVIANVAIARELAGWCWSLAVLE

SEQ ID NO: 465962 - protein, 343 aa, unidentified
MDHFAGLDVSVKETSICIVDDTGKIVGEAKVASEPDALLQVLKNSAYHFKRIGLEAGPLSQWLFSALAEAGLSAICVETRHMRAVLKAQINKTDRNDARGIAQMMRAGLYRPVHVKTLRSQKLRMLLTHRKLLQSKAIAVENDLRGTLRNFGLRVGMVGKVKFEARIKELIENLPDLAVLVEPLLVVRRVLREQLGILHRRLLVIVQDDEVCRRLMTIPGVGPVVALTYRVTVDVPARFRNSKAVGAVLGLTPSKYQSGEINRTGAISKCGDEMMRVMLYEAAQSMLVRSTKWSWLKAWAMQIARRRGMKKAIVALARRLAVIMHRIWIDGAEFRWSKNAVAA

SEQ ID NO: 465963 - protein, 350 aa, unidentified
MVTIGVDAHKRTHTFAVVDEVGRELANRTFAATPDGHLAALGWARAWPERTFALEDCRHLTRRLEGDLLRAGERVLRVPPRLMAEARRTGRERGKSDPIDAVAVARAALREPGLPVAQLDGEARRIRLLVDHREDLVAERTRIQCRLRWHLHELFPGLEIPPKGLRRLNVIADLERRLRDVEGPVASIARELLVRTRELTVRANELEREITRLVHPLAPRLLALAGCGALSAAKILGEVAGVSRFRSKAAFARWNGTAPIPVWSGNDTRHRLHRGGNRQVNAALHRIALTQWRGVGPGRDYVLHRIESGDSKTEALRLLRRRLSDEVFRRLRTDETTPEHPTTLEEVVAA

SEQ ID NO: 465964 - protein, 412 aa, unidentified
MELIVERPAALDVHKAQVTACVRVPDEHGHREEHVAEFATTVRGLLGLRDWLAAQRVQQVVMEATGVYWKAPWAILEDEFECLLVNARHVKQVPGRKTDVSDAAWLCRLAEAGLLKASFVPPKPIRQLRNLTRYRKTQIQERAREVNRLHKALDDAGIKLDCVAADVMGKSGRDMLDALVAGTTDPDVLAELARRQMRKKIPQLREALEGHFDAHHALWIGAILAHVDFLNEQIDRLTDAIEEQLRPFAPAVELLCTVVGIQRRGAQCILAEIGADMSRFPSARHLASWAGQCPGNDQSAGKRRSGKTRNGSKWLDFALEEAAMAAIRVKANYPAAQYHRLKPRRGHKRALGAVKHSLICTIWQMLSTGETYRDLGGDYFVNRDPERQTKRLVKQLERLGHHVTLTEEAAAA

SEQ ID NO: 465965 - protein, 353 aa, unidentified
MNDTSSIAWLGLDAHSKNCVLGHLDDQGTELNWWQFATQPQQLLKHVQAIPAPDKRLMLEESNLARWIGQLLKPLVKQLVVCDARRNRLISQDAHKHDRRDAFALARLLRLNEFKPVWQPTDDQRVLFKRTAKAYENAVLRQTRLKLQLKSLFQHWGLFPAGATVYSKPGRVAWLKQMPYDTLRSQALLLYELLDQALTGQSQVRRLMCQTGRTFPEIQRLRTVPGIGLVGSHLFVAYVQDPKRFATFSRLTRYCRLGIRDRTSDNKPLGFEQLDRQGLGSLKAVSYRAYLQAAKRRSGPVWDFYQASLRHTGSTTHARLNTQRKILLTLWTLWLNGKEFDPDLFFRSQPIDV

SEQ ID NO: 465966 - protein, 345 aa, unidentified
MNISIAGVDLAKKVIQVCVVKRNTVLSNKEMTPDQFKEWLAKSKPMTVVFEACSTSNYWKQTAQQYGHDAKLISAKLVSAIRQKQKTDANDALAIVQASQLADIQFINGKSEAQQELQSLLRMRELAVKQKVALQNQVRALLAEFNIHGSPAKGGLNGVVQLTLEDAENGFSMPFRDALHATWQACLLTINRIKAYDEYLAQAVKQHPDCQRLMALEGVSVINAINLYILLGCSDDLHFKNGREASACVGVTPIQHSTGGKATLGSIGHYVKQGILRSQLISGAMAVVGALSKRLPKTTKEVWLKQLIERRGKRCAAVALANKTIRTAFAMLSKGTEYQAQAITA

SEQ ID NO: 465967 - protein, 390 aa, unidentified
MPKPNDTSRSLVALDQDSTLIAVIEMSQTIWLVAGIVPGVARQPLKKLGPDPDTVLALLERWRKEAGKSGRAISRIAVAYEAGRDGFWLARWLRARGIEAQVIHPTSVAVARTHRRAKTDRLDTQLLKRAFLGWLRGEPDHCTMAPIPTLAEEDARRPNRERETLVGEKTRIVNRMKAALARLGIRGFNPKLRKAADRLAALRTPEGEPLPENTLAELRRDMARLALVRAQIAEIEAARLARLERAPDQGPHAMVRLIARVIGVGLETADMLVHEVLSRTLRDRRAVARYGGVTGAPDESGKRRREKGLARAGNARVRRGLIQLAWRFLRFQKDSELARWYRARTEEVTGDRRIIRKKLIVALARKLLIALWRMATTGEVPEGVVLRPAA

SEQ ID NO: 465968 - protein, 342 aa, unidentified
MTTTAIIGMDISKYSFELCGTDERGQHTLHRRLHRDKVSLFFANFPTCTVAMESCSGSQHWARKLTELGHKVMLIPAQHVVAFRQGAKNDRNDAAAIAEAAARPNIRTVPVKSTDQQDLQTIHRVRERLVHHRTALINEIRGLLLEYGVVCAKGVTRFLIWLREEFEARIADLSPMAQETFQALRDEFRALDARLDALDRRIKAVFKSNPVCQQLATVPGIGALIATAIVASVCEPQRFKNGRQFAAYLGLVPRQHSTGGKPKLLGISKAGNRYVRTLLVHGARSIIYHHRAKEDPRSRWVTKLVERRGFHKANVALANKNARVIWKLLTTPGEQFSEQLAA

SEQ ID NO: 465969 - protein, 364 aa, unidentified
MNDTYYIGLDVHKKSISYCVKTASGAIVQEGQVVARRTDLRAWATAQPKPWRGAMEATLFSAWIYDTLKPYAQQLDMAHPARMKAITSGKKKSDRLDARTIADLLRCNLLPTCYVLSPEMRDLRRLLRYRQLVVTQSVRMQNKMAGLLMETGAPFVKAKLHGKKYFTQLLATLQEVPESVKDLLRMSRGALEMFEISQKQLVKRLLAEPVLEARVERLASIPAVGPITALTWALEIVDPHRFSAIGDAESYCGLTTAFRSSAGKEQRGPLSKQRNPWLQTALIEAAKLAPRWNPQLAAVHERELKRGHRNRATLQVARKLVAYLMAVDKSGQPFQLRTSPALATALPTRKKEKAAPPAVVLQPA

SEQ ID NO: 465970 - protein, 343 aa, unidentified
MEVHTIGIDLGKTLFHLVGVDADGSVVVRKRCSRSQLLTYTGNLQVLRIGMEACSGSHFLGRALRDQGHDVRLMPAQYVKPYVKTNKSDYIDAHAIAEAVQRPSMRFVPIKTEDQLDLQAVHRVRERWVRRRTAVVNQIRGLLLEHGLTLPKGRCYVDQALPDILEDATLRLSDSFRMLLAQLKLELDQLSAGVEQLDAVLQHTAQENEACQRLTTIPGIGPVIATALIAAIGNGSGFRRGRDLAAWVGMVPREYTTGGKQKLLGISKRGNSYLRRLFVQGARAVMRQRHNQAPGLNCWLTELMTRSHPNVAIVALANKMLRVAWAILYKNETYRTPAPSPSC

SEQ ID NO: 465971 - protein, 441 aa, unidentified
MAMRKREEEVVFPNAAAIDVGASRHWVAVPRDRTDQPVHEYGAMTGDLHAMADWLIACGVDIVALESTGVYWIPVYEVLEQRGLKVWLVDARQMKYVPGRKSDVQDCQWLQKLMSLGLLRAAFRPDDEVCVVRAVTRHRELLLAEQGSWVLRMQKALVQMNIQLAEVLTDVMGKTGQAIIRDIVAGERDPAALARHRDGRVKASSDDIKRALTGNWRDEHLFVLAQSLAMYDSLGQRIAECNARIEALLTPLGCHEVQLTGTGKRAGKNTPGFDLRTALARWAGVDLTRINGLAVTSVLTILSEIGPDLSRFANVKHFCSWLGLCPGTKVSGGKVLSARTRRSSNRVRQALKLAAMSLSRNSSALGAFYRRMCARMDKPRANTAVAHKLARMIYFMVTRGEDYVDQGQQKYEEQQRQRSIAALRRRAADLGFAITPTTAPA

SEQ ID NO: 465972 - protein, 328 aa, unidentified
MKTNLRFIGIDVSKDTLDIGIYSEEEKSTVIKNNKKAILKYFNTLLSNKNVSHVCIENTGKYSWVLMELLPELDCYFYVVNPLHLKRSLGLIRGKNDKIDAIRIAEFIKKNFQEIKPYIPQREEINLMQILLSERRFKVKQRKQLKTKNKENCILSNKTIAKTLTKKNDKLIKELTKQIIELEREIKQLISNDEQLKALNKQLKSIPGVGDILCWNVLVKTNEFKTITDPRKLACYAGVAPFANTSGISIFGRNKVSNYADKGLKKILHLGALSAIRLENDLAYYYHRKVEEGKNKMLVLNAVRNKIIHIIFALIKNQEFYNNRLFMS

SEQ ID NO: 465973 - protein, 411 aa, unidentified
MEVIYKRCCGLDVHKEIVVACLLIREGGKVLKEIRTFLTMTVDLVVLHDWLKAHQVTHVAMESTGIYWRLVFNLLEEDFTVLLVNAAHIKTVPGRKTDVKDCEWIADLLSHGLLRGSFIPPEPIRDLRDLTRYRKTLTDERVREVNRLQKFLETANIKLSSVATDVMGASGRAMLESLVSGSTDPQVLSELAKGRLRKKLPELKKALEGRFRSHHRFMVAEILTHLDFLDEAIERVSQEVSSRIVPFSRTVELLDLIPGIDQRVAEGVVSEIGVDMSCFPSDGHATSWAGLCPGNNESAGKRKSGKTRKGDRWLRRYLIEAAWAATRKKGSYLSALYHRLVVRRGKKKAIVAVAHRLLVVIYHMLKDQTVYRELGSDHFNKLNAVHVQRHHVKRLESLGFKVILEPLPKAA

SEQ ID NO: 465974 - protein, 409 aa, unidentified
MSETIATRFVALDIHKHYAVIAAVDKDIQVVLKPRRVSYDRLPQWAQQHLRPTDQVVIEATTNAWHVYDMLAPLVAEVKVANPIRVVQIARARVKTDARDALILARLLAGKLIPEVWVPPQPVRDLRRLVSQRHKLVKAHTQIVNRLHSVSHRHHLGHPKGKRFRKDRLPWLDDLSELERWQVELDLQTKDHLETQIQTLTDRLAALSHKGPWAEQAMLLMQIPGFGLITVMTVLAAIGEISRFPSPKHLVSYAGLAPGVHQSGVKERSKPITKEGRKDLRWAMVEVARRAVKSHPLWQRRFQELTRRKHPNDAVVVIAHRLLEIVWHILTNGEPYRHSSPELIAYKFLSWAYRLDEKQRRGMTPAQFARYYLMRLGIGDDLQRVAIHPKYPRKLAPPEEVRPWLEETS

SEQ ID NO: 465975 - protein, 349 aa, unidentified
MRIIGCHYHPGFQQIAFVETETGECGERRLQHREEAEKFYRDLAVQGVKVRVGMEASGHARWFERLLAELNFELWIGDAAEIRTKRVRKQKTDRQDAQLILRLMLKDDFPQIWVPSWENRDLRQLLWNRHRMVQARPRIMNQLQAVALNEGLRCKKRLWREAGREQLEAFPLAPWASRRRRDLLELLDRLSPTIAELTQTIEQEAEKCPEARRLRTHPGGGSLTALAFVLIIGRAERFQCGKQIASYLGLVPSEDSSGDRRRLGHISKQGNALLRFLLVEAAQVTVRSLPEWRSKYFHLAMRRGRKIAKVAMARKLAIQLFWMMRKGWDYEQVKRFGPHAGQPENRRAV

SEQ ID NO: 465976 - protein, 370 aa, unidentified
MNKIIRVGVDTSKSVFVLHGVDAAEQSVLRRKLRRGQVVEFFAKLEPTKIGIEACGATHHWARELGALGHEVLLLPPQYVKPYVKRNKNDAADAEAICEAMSRPTMRFVPAKSAEQQAALMLMGRRGGLIRRRTQLTNTIRGYAAEFGLIAAKGLHKIEPLLSRIAAEEDLPELAKELFADYGREYLELGKQITKINAKLMAWHKQNEQSRRLAEMPTIGPIGTALLTMKVPDPGAFRSGRDFSAWIGLTPKDHSTAGKMRLGVITRAGDEALRSVLVAGATAVIQQVRNGRGHASPWLLELLKRKPPKLVAVALANKMARIAWKLMVSGERYDPQRAAGRFVPPAGRVAPRSPRQGRFAPPAAVAAGQP

SEQ ID NO: 465977 - protein, 430 aa, unidentified
MKNNTQNEKIKAITDDTMVVGIDIGSEKHFARAFDNRGIELSKEPFEFSNSEEGFVKLNAWMEDLKSKHGMKVALPGMEPTGHYWFNLGAFLQNNGMRPVHVNPYHVKQSKELDDNNPNKNDRKDPKVIAGLVNAGRYSYPYIPTDVYAEVRALSNQRLQAQESLVRTRNKLARWFSIYFPEYKDVYVNPDAVSGLMILRKAPLPADIVKLGVEGINQIWREAKLRGAGRKRAQTLVEAAMHSIGSKQAPEAARIEIMNLLDDIDMYSNRVAEFVALLDRKMEEIPYVDKLLAINGIGVRTVQTFIAEVGDIRRFDNPKQVQKLAGLAIVEDSSGKHNGESRISYRGRKRLRYVLYEAALSVIARNPEFKQIYNYYITRDKNPLKKMQALIAVSCKLIRVFYAILVKGVDYDGTKMLGDIRRQPEEAKAA

SEQ ID NO: 465978 - protein, 413 aa, unidentified
METLHERCCGLDVHQKTVVACLLTPGTGAAPTKEIRTFGTMTEDLLALLDWLGEAGCTHVAMESTGVYWKPIFTLFEGTLSVLVVNAQHIKTVPGRKTASKDAEWIATLLRHGLLRASFIPDRAQRELRELTRYRTSLRQERSAEVNRLHKHLEGANIKLGAVASNIVGLSARQMLAALAGGQTDAATLAQLAQGRLRDKIPHREQALAGTMGPAQRFLLAQQLTHLDDLDALIARITAEIAARLAPVEATVVRLDGIPGVGRTVAEVIVAEIGADVTRFPTAGHLAAWAGVAPGNNESAGKRKSGKTRKGSPWLRAALVEAAQAAARSKKTALGAYYRRIAARRGRKRAAVATAHRILDLVYHLLTRSEDYCEPGPDYYRARDHQALERRLLRQVRALGYEVTLQPPSAPAA

SEQ ID NO: 465979 - protein, 408 aa, unidentified
MKTLHQRCAGLDVHKQDVVACLRLATKGRVHREVRRFPTTTRGLLELAAWLEAARCTIVAMEATGVYWKPVWHILDGRFELVLANAAHIKGVPGRKSDVNDATWIADLLAHGLIRASFVPPQPIQDLRDLTRTRKQLSREIVRHTQRLQAVLEEANVKLASVITDILGASGRRILKAMITGETDPSHLAELGSRRLGCSRDTLVEALDGRVRDHHRFLLDQHLKTIEQLEETMVAFDARIEAALAPFRDTVERLTQVPGLSTRAAEVVIAEIGLDMSRFPTAEHLLSWAGLVPALDESAGKRRSTRVTKGAPWLKPVLVQCAWAAANKKNSYFEAQFLRLKGRRGPKKAAVAVAASILTTVYHMLRDGTCYQDLGPNYFARRNPARTARKLADRIRSLGYIVEIRSAA

SEQ ID NO: 465980 - protein, 340 aa, unidentified
MNTDYDGRQVVGIDLHRRRTVIVQQSEVGDRLGVTRIDNDPFVLADQVAGWGEAPQVVLEATYGWYWAADVLADAGAQVHLAHPLGVKGFAYRRVKNDVRDASDLADLLRMGRLPEAWIAPPATRELRELVRHRAKLVAVRSGLKAGVHAVLAKCGVSVPMTDLFGVAGQQLLTELRLPDVYAGRIASLRRLIDAFGFEIDLYAKMTGARLSTNPGYVAVQAIDGVGPILAGVFVAEIGEVHRFTRPEQLCSWAGLTPRHRESDTKVRRGRITKQGSTLVRWAAVEAVQRVRPGPIAATRARIGEHRGANIGKVAAARKLLTLVYYGLRDGHIRCLARSA

SEQ ID NO: 465981 - protein, 434 aa, unidentified
MQVTRGMRRRSEKMARRRDRLPADALIAGVDLAKKESVVVFVRASDRARVGRLRVSSDRAGTERLVARGRELVAEQGSGPLVIAMEPTSHFWKPVARAADGAGVGYVLVQGFVVARARELDDLTRDKTDARDAALIADLAAELRFTETRLPEGAWAELDLLVAARDARRIERAASLQEVRALLELAWPGLLSACPALAGTHLQALLRTGITPQAMAALSPRRFTALLRRHHPRRFLRWMAGRLHAAARDVAALPETPAAALRWRLAAERVALADIAIAELDARMIELIEASGYGWLRGQIRGLGDATLAALLALTGDPTRYDDARCLVKLAGSNPTERSSGEREAAGGIHRRGRPVLRYVAYHAAVTLVRHEPEFQRRYAELTDPERTNRLEPKQAYVALANKLLRTLWSMAVSGRGYEPAIARGEVRPLPRAA

SEQ ID NO: 465982 - protein, 331 aa, unidentified
MDLANNVFQVHGVDEHGKKTLGKALKRPQVLPCFAYLPPCLVGMEACGGAHYWARELEKLGHTPRLIAPQFVKPYVKGNKNDANDAEAICEAAGRPNMRVVAVKTPEQQDLQALHRVRARYVADRTAKVNQARGLLAEYGIVIGKGIGQARQHLPEILDDADNGLSGAARALFRERYDEIVRLDGQIAGGDRKVGLAAKASAPCQRLMQVVGIGPLIATALVAAVGDGRQFADGRQLAAWLGLVPRQDSSGGKPRLLGISKRGQPYLRALLIHGGRSAVRAAAHKDDPRSRWINDLARRRNKNIAAVAVANKNARVAWALLTREEDYRPAA

SEQ ID NO: 465983 - protein, 326 aa, unidentified
MTVIVGIDIAKDKFDVCLLNEASKAQQGTFANSKQGINQLHQWLKKHGAKQAQVCMEATGIYGDLVAETLHSRKYEVSVVNPARIKAYAQSQMRRNKTDALDAALIADFCRTQQPTLWTPPPPEWKELRVLMRHLDDLKQEKQRASNRLDVQDSAQAVIQHLQEQVRLLEEQIQHTLRLIHDHIDRYPELKRQRDLLDSIPGIGDLTASYLIAELGDISRFQDVGEVVAFVGLNPCQHQSGKRKATHGISRMGRAALRAALYMPAVVAKRCNPRLEAWANQLSQRGLTGKQLIVALMRKLIHLAYGILKSGRAFDPHFGDERFATP

SEQ ID NO: 465984 - protein, 367 aa, unidentified
MEKAQSTMFDYPHFTQFTKESEMFRPELYVGVDIGSETFTASIGKFEEKEGWRISAKPMTFGNNFDALNQFLSWLNENKAQTHNCIVCMEATGVYGEALAYFISTNGYKMVIEAPLKVKRAFDPKGHKSDPVDSRQIAEYAYRFFDELRPWKPKKEAIEQLKTLLAVREQLVEQRTEHKNANKAIKRKVVRTPLAENVHDKSIEELTKHIKAVEKEIKRLIDDDPSSRDLHNLIVSVPGVGSILATFFVLTFYSAPEPFNPKALAAYIGICPYKNTSGISRNKKSTSRRYGPSTMRRLLHLAAMSARTHCPKFQKYFLRKLAEGKPKQLILNNIKNKLVKIVCAIARTKTPYIAGHRSIHPQLIKAK

SEQ ID NO: 465985 - protein, 331 aa, unidentified
MFQLHGVNEFGKTVIKKQLRRDQVSEYFVNLPACLIGMEACGSAHYWARKLQDFGHTVKLMAPQFVKPYVKTNKNDAADAEAICEAVARPNMRFVPIKNVEQQAVLALHRVRQGFVKARTAQANQIRGLLGEFGLIIPQGIGYIATRVPELIEDASNELPGSFRILVQRLLDHLKELDRQVGELEVQIQTWHRHSDASCKLAQIPGIGPITASALVASIGDAKNFDSGRQVAAWLGLVPKQHSSGGKQNLLSISKRGDAYLRTLLIHGARSVIYRAVQKPESCSWINGVVNRRNKNVAAVALANKNARIVWALLAHDREFRSDYTTAKAAT

SEQ ID NO: 465986 - protein, 328 aa, unidentified
MGIGFLGIDIAKAKFDVALLINDKFKCGEFKNELDGFLTLNEWLKKYELSGLRACMEATGAYSEALATYLHSQEIPVSVVNPAQIKRFAGCKLVRTKTDKADAQLIPEFCMTMKPRTWEPKSSCIRELQQWVRRLEDLQSMRQQDYNRQGTAFLSSIQESIKMSLDFFDQQIEYTKSKIREIILSDEELSEKQKLLETIPGVGEATISQVLGFFGSPEDFQSAKQVGAFLGLNPRQHQSGTSVNKSTRISKVGDSTLRKSLYMPALAAIKYNPVIRDFYNSLVSRGKPKKSAVVACMRKLVHIIYGVLKNEAPFDPIWELKRTVSVAF

SEQ ID NO: 465987 - protein, 337 aa, unidentified
MRIIRIGLDTAKHVFQVHGVDETETAVLRAQLRRGAVAKFFAKLPPSRIGLEACGASHHWARLLRGLGHEVVLLPPQYIKPYIKRGKNDAIDAAAICEAMSRPGMRFVSIKSAESQAALMLLRVRDLLIKQRTMLSNAMRGHAAEFGVVAAKGPLGVAELLQHAHSEAAGVPALAQELLALLADQLEAIAVRLKALEAQLLAWHRQDPVSRCLVTQPGIGPIAAVSFTLKVPDPKMFRSGRHFAAWLGLTPKENSTGGRRRAGRISRQGDQSLRKLLVLGATAVIQFAKPGRGSPWLINLLARRPKKLAAVALANKMARVLWAMMASGEVYRRPQPA

SEQ ID NO: 465988 - protein, 417 aa, unidentified
MNNWNELKHFVGFDWAKDHHQVVVVDRHGTITSEFEFEHSLEGWSKWRQKMSDYPAAAVAIETNQGAAVEQLLQQGMMVFPVNPRSAKAYRTRKVPSSNKTDRLDAWSLAEALRSDGHGWRSLQPLDPIIQELRLLCRDELHLIEQRTVLVNQLQQALAEYYPAALEAFDDWTVPATWKFLERFPTPQALVAAGPRKLENFLHCHKLYRENVHARRMETFARAGQWNVRDAIARAKSLLVLSLVKMLVILNKQLNEYRTQIEKLFESHPDHDLFGSLPGAGPKMSSRLLSEIGADRTLFPDADSLRCYAGTAPVSYQSGQVHKVYLRRQCNKYLRCAIHLWADLSRRWCQWAQVYYRQLRKRGKSHAEALRCLGHRWLKIIWKMWQTRTLYDGDLHMRNQLEHGSWVLELMTPKNGE

SEQ ID NO: 465989 - protein, 324 aa, unidentified
MQVPLTAVAPPCIGVDVDSKRLNITRADAATLDTPVTGIANTAAASKAWLKTLPAGCRIGMEATGQYHRSLADLAVQAGHTVFVFNPAQVASYLRSLRSRGKTDVLDARGIARYVLNESAQCHPYVPPSPFHAKLAVLIGRRHQIVKQRSSLQMSLGDLPDCAAQIKALKDAFKRLLARIDAQINAAFAAEHELQVQRRRLCTIHGFGPLVSAAIAARLSRLPYANSDAVVAAVGMDPRPRDSGDFKGLRRLSKRGNAEERRLIYLAAVSACNNPLFSAIRDKLLLKGMSAIQAHCVIARKLLRIAFAVWTSQQPFNPELIGKA

SEQ ID NO: 465990 - protein, 374 aa, unidentified
MSSQNNTIHVAIDLSNSLWLVGARLPGAEGSRMRRITSGDTVALLALISDLRSRHSGGRDRSIEVACCFEAGRDGFWLHRLLTAEGIPTYVVEPASILVNRRAKRAKTDRLDAEGLLRVLAAHLAGDEQVCSMVQVPTPEEEDGKRPHRERQHLVQERTRFENRILALLATQGVRVRPSLRTWERDLATLQTGDGRKLPQHLRAELDRLRRRLVLTMELIRELDREREETLAAAPDELTSRKVVALRSIRGIGENFAAVLAREVFYRSFGNRKQLASYVGLTPMPHQSGGMDRDRRIGRAGNARARTTLVQLAWLWLRYQPDSALATWFRERVGTLQGRTRRIAIVAMARKLLITLWRFTETGEIPDGVVIKAA

SEQ ID NO: 465991 - protein, 316 aa, unidentified
MKMQVFVGLDVSKQHLDVALRPQGRHFVTPNDDRGIKQLVKRLAALQPELVVLEASGGYEFLVIAALAEAQLPVALVNPQAVRKFAGAAGKLAKTDKIDAQVLAHFAEALRPEPRPLPNQEQKLLKAALQRRLQVVKMIGQEKSRLEKTFIPSLRQDILAHLSWLNQRLEQLDRDLNDQIRKSPLWRERDRLLQSIPGVGPTVSRAVMAQLPEVGTLSGKKAVALVGVAPYNRDSGRFRGKRMIRGGRSHLRHMLYMAAVVAARFNPVIRTFYQRLLAAGKPKKLALTACMRKLVLIINSMVKNKQPWNHFAIQTP

SEQ ID NO: 465992 - protein, 328 aa, unidentified
MQGKVSSERTAMATVYVGIDVCKEWLDIHLHPLGRSFRVTNDTAGLRRLKRELDALDQMPRSTLHIVMEATGKWHRAVQRSLHADGFYVSVVDPLRARLFAKACGFLAKTDRLDARLLAIMGEALKPAQTPPQDQALEALQELVNARSAANGERTALSNRMKTAVTAFLRKELTRRLAALDTHIARLDAEIERSIGAEPEMRRRLDILISIPGIGAVTAASLIAGLCELGACSGKQAAMLAGLAPLACESGERAGHRAIRGGRPAPRNAIYMAALSASRHNPDLAHFAERLKKAGKPNKVVLVAVMRKLIVLANTLITKNRIWTPNPP

SEQ ID NO: 465993 - protein, 342 aa, unidentified
MKIHTIGIDLGKTSFHLVGLNERGEVIVRKRFSRAQLLRFTANRKVHVIGMESCGGSHFLGRALQEQGHEVRLMPAQYVKPYVKTNKNDYVDAEAIAEAVGRPTMRFVPIKSDDQLDLQSLHRVRERWVMRRTAVINQIRGLLLERGITVRKGRRYIEAALPGILEDADAKLSGTLRLLLAQLKCELDQTALRLEEAEALIEQTVQKNDACQRLVKIPGIGPVTATAVIAAIGNGAAFRKGRDFAAWMGVVPREYSTGGKQKLLGISKRGNRYLRKLFVQCARAVLQQKTKQTPGLKVWLEKLTARTHRNVAGVAVANKLARMAWAVLATGEAYRAPLPAAA

SEQ ID NO: 465994 - protein, 355 aa, unidentified
MVLHVGLDLSRRRVDVCAIGETGELVGQFRSPVDRDGLFGLARRLEPYGEQVRAVVESMNGARFVHDELTAYGWRVLVADAQRVKGLAPLACKTDKVDARVLAELSWRDLVPAIWLPTAGVRCERERARYRMHLVKHRTTLKNRVHSTLIAHGHQAPVSDLFGTQGRRLLASLELPDPWASTTTATLELIDDLDRRIAGIERELQRAGAEHRYVPILMTAPGIGWILAYTIAAEIGEIERFPTAKRLVSYTGLCPRVHQSGEVDLRGRLSKHGPRYLRWALIDAAAHASRHPIYTERYQQIKRRVGRQRGSKVAQIDLARRLAEAIWHMLTKNQPFAPFTPTGAAVPLAATTAPH

SEQ ID NO: 465995 - protein, 458 aa, unidentified
MDTRIIGIDLAVTAAHKAIVLDQSSNRFVSKLLTFHTDPAEIDRVLLAARDDAPDDVQLVAVMEATGMSWFSVGVYLHRHGVDVYRVNGQQVADLRRVYKRHAKSDRIDARVLARLMLVCPDRLHRCSFPAGPQVALQRACREVALLKEQIIADKNRLLATDQFAWLGLSDIVPAYSDAAFWVREHWYDPWRVVQAGEAAITSAWCTASPLQPADTSWIPDLVRRAQQVIALYGDPEQLPYPFLQTQLQRLQERLRTALAQVDLLRIKLVRPLYRQLHPQRHLESLQGVGQDSAAVYIAFVGDILRFPSLHDFRGWSGMVPFSRQSGDGQAKGLHITKAGPNLVKAMAFIDAQVARQWDPQIAAIYHKQMVTYGKHHLQAICACATHLLDRIYVLLRENRPYELRDVDGTPVDKHRARQICQERYLVPEEVRLRNNYRVRRERKERKVERRLNRRKNK

SEQ ID NO: 465996 - protein, 407 aa, unidentified
MEVIYPRCGGLDVHKDLVVACVRLAEGQEVKRETKRFGTTTRQLLHLSDWLASHRVTHVAMESTGVYWKPVWHILEGEFALVLGKAKDMRNVPGRKSDESDSSWITELQAHGLIRPSFVPPEPIQEMRDLTRTRKQLVRARAESVQRIQKVLEDANLKLASVLSDIQGLSGRTILNAIVDGITDPQYLARLAHPRVKAPREKIAEALEGKVTDHHRFMLRLHLGQMDALQRAIGELESRIDEKLSSFREIAELISTIPGLSGTVTATLIAETGGDMSAFPSDDHLVSWAGLSPGLNESGGKRKSARTRPQRWLKVAMVQAAHAAVKNKDSYLYSKYRRIRARRGSKKAILAIAATLLRAAYHVVKTRTPYQDLGTDYFDARSQQRAVRHLVRRLEGLGYRVDLKAAA

SEQ ID NO: 465997 - protein, 341 aa, unidentified
MNYIGIDHHKQYSHMTVMDQKGKVIKTGKVGNFRCEVEEFLEGLGQEMEAVIEAGYSSYTMIDVLEDLGVKVKIAHPQQVKAIAKARIKTDKRDSKILAHLLRSDLIPEVYYRDKENRGFQRILRQRVFFVATRTRVKNRITSLIAQQSEEIRGQACQLKDLFSKAGMKFLQSIKLSSSDQKLLDELLKFYRHLEGRIKKSNDLVESLYTKMEEARLIRTVPGFGRFFSVLVATEIGDVGRFERAEKLHSYAGVIPSTYTSGERSYHGKMIKQGNKWLRWAAVEAVWPAVRSDFDLKLFYQRRVRRKSANSAKMATAKRLLTIIYSVLKERREYIPYKRMK

SEQ ID NO: 465998 - protein, 405 aa, unidentified
MSVYGASESSCAVVVAVDVGKNTVALSVTDAGRRRLFGPVDFAMTGPGLADVVDRVRGVLPGAASVRVGVEAAGHYHRPLVAPSAWPAGWEVVELNPAHVSEQRRVQGRRRVKTDAIDLEAITDLVLAGRGVPVTARAAVIGELAAWSAHRTRRVATRTATKNQLLGQLDRCFPGLTLALPDVLGTKVGRLVAEHFADPHRLASLGAARFVRFAQTRGLQVRRTVAERIVGAARNALPTLDAAVARQVLAADLALLGDLDAQVCSAETELARLLPTSPFATLTSVPGWGTVRAGNYGAAIGDPARWPGHRQVYRASGLSPAQYESAGRRRDGAISREGSVELRRALIDLGNGLWLNDTAGRGYAAELRARGKPGKVIACAMANRANRIAFALVRDQTCYDPTRWT

SEQ ID NO: 465999 - protein, 341 aa, unidentified
MEQATTIGLDIAKHVFQVHGADAAGHVLFRKRITRVKLLGFLAAQAPCVVAMEACAGAHYWAREVGKLGHRVRLIAPAYVKPFIRRQKNDAADAEAICEAAQRPSMRFVPVKTEEQQANGIVFRARDLLVRQRTQCVNALRGHLMEYGHVFPKGITHVETLVAVVEDPQSSLPDSVRVILKLLVDTFTALEAQITALDAEINQRSKSDPTARRLMTIPGVGPITSTAITALVPAVEGFRAGRDFAAWLGLTPLQKSTGGKQKLGAVSKRGERTVRRLLIIGASAVVQQASRRGAPEGSWLAQMLARKPKMLVTVALANKMARIIWALLVKGGTYRTPTAAA
